United States Patent Application Publication US 2021/0254056 A1 - sequence listing, part 30

SEQ ID NO: 59129 - DNA, 4725 bp, Homo sapiens
agaaaagaaaagaaagaaagaaagagaaagaaagaagagagagaaagagagaaaagaaagaaaagaaggaggaaggaaaggaaagggaaagggaaaggaaaggaaaggaaaggaaaggaaagggtctctgacctcagacaggttacagtctcactagggagacaagggtcaggattacgtgggcgtcattttcctccttacaggcaggcggtgcctctcccttcaaaagcaagggacctttatgcatgattccacatctgcattccgataggaaagggaaacagcagaaacacaatacccatctgagagctacgcttagagaggactctgggcttttatttatttttttacttcagtcttgtgaccagtaattttaagggaaagccaataataatgtttttaaaaagcctcacgccacccctggcggcatctcctcggtgtactttgctgttcagatccgcctgccttctgtgccagcctaacagcgcccggcctcagcccccattgtccctggagctggcgaggtgtccggttgcggagccggcggcgtctctggaaatgcatcctgcatccccgcatggataacagctgcagctatgtcagaattgcacaaagaggggagagtgtcattgtgtgccttttgacacatacattaagaccaaaaaggaaaaaaagcgtctatctgtgctgccaccgaccagactcatggaggccagattttctccaattaaccagatcttgccctggtgcagacaagacttagtgagttcggaggaggggtggggagagggaattggctggggtccctaccctgggtggaaggaggagggaggggttccccctcccccttcccctaccctcccctccgggtttagggaggggattagaggtggggaggagctgggggggcgtttggcctgtgccccaaccttgtgagtgaggtgggggttggaggtgtgcggggggcggggcgtgtgccggggtcgccgcgggatggggggttggggatgtgcggggagaggcgcgtgtcccgagatcgcggggggtggggttggaggtgtgcgggtggaggggcgcgccctggagttgggggcgggcgaggcgtttgcgggcgcggggggcgggtttggaggtgtgcgggggaggggcgtgccctggagttgggggcggggcgaggcgggctcctccccggcgggcgggcccgggcgcggcgcggtggcctcgcggtgcctaggctggggctgccggaccgtgaggctgtgagtcgcgcggacggagccggacaaaagcgggcggcggcggcaggatgaacagcatcaagaacgtgccggcgcgggtgctgagccgcaggccgggccacagcctggaggccgagcgcgagcagttcgacaagacccaggcgagcgggcggcgggcggcgggcggcgggcggcggcgggcgggcgggcaagcggcgtccctgacccctcacgcgcgaacggctggggcccgggaggcgccggccaggggcgggggacggcgcgggggcagggcctgtgtccgcccgggctctccgagagctccgctgccgccccccgccggcctccgcggcccgagccgaccggcgcgcaggtgaaccggaagccgcgctccccgctcccgccgggcgctcgggcccagaggcgccggggctgagggggccggggtcagggtgtgcgcgggccgggagcgccggagctgaggcggcgggggacggagatggggccggggttgggtgtgcgcgagcccagcgcgccgggggtcgagggggctggggatccaggtgctcccggggccggcgcggcccgactggggtccccgaccttccgtgccgctccttgccggctcctgcccccgtctcctaccccctgaaaccgatgcccccacgggcaatttccttaaaggaaattccttaaactcccagcttccttctctcgtgagcggtttcccagggctgcacagtctcctattatttgctgggtgaaaagcttctcgtatgtcgccagacttgtttgcccgagcgctgcccacgtataaataggtgcacaccccctcattaaataccggcgcccgacagacagaaacttcctggggctcccttcctgcgcctcccacgcttgtaactcttccagatgatgcctatcctgggaaggcgttagaaatgaaataagggcgcgggtgtgcgttttgtacttgtgtttgtgccggggacccacgatgcagacgttgctgcgtttctggtttcctgttgctttttattttacaaactcttgaagtgctctcaggcttgggggatgggcggtggaggggggcatacttgtttatttgccaaaataagtcaaccaagactgaaatggctgaaaaattttactctagagataaaggaagccagaggacccctcccactcctgtctaaagcaggttggtgacatttgcgtttgtggcggctatttgcaagttccgtcccacttgtccttgcagagagctatgacttctgcggttgccttcacatctagttagcacacgcactctacaacagctttcgttttgaaatgagagagaacgcagggagaccttctaacctttgtgcttgggattgacccagaaagcgataataaatcctgaggatatcaaggctttagaaatgcgaagtgctggaacccaggtggctgcaaattaccaatttagccttgtgatcttcatcaccatcaactggttcagcccggatagcccgtcattttaaaaaaatttaaagtcaccaatacataattaattgtgccaagaacttgtagatcatagggagaaaacctgaattggcagacatatctggatgttgtcagaaactttgtttattcactgagttttttctcgtgcctttgaggacgtataaagaggtctgattgctacatggaggagatgggatgtgaaggaccaacttcattgatcttactcttaaatgataagaagtcaagggcaaccttcctgagtgtcaaagagagaatctctgatacaggaccacacattttagtggttggtttgatacacaagaaggtggattttttttttttttttttaaagacagagtctctctcgttgcccaggctggagtgcaatggcatgatctcagctcgctgcaacctccgcctcccgggttcaagtgattctcctgcctcagcctcccaagtggctgggactacaagcgtgcgccaccacacctggctaatttttgtgtttgcagtagagaaggtgtttcaccatgttggacaggctggtctcgaactcctgacctcaggcgatccacccgcctcacctcggcctcccgagatgttgggattacaggcacctctccgaaggtggattgttttgttttgttttgctctggttttttctcagaggctaagagggccactaacaatgaataactttgtaatgggtgaatgtcacaggtcttacctattctagggccccattttctggaaagttggagtttgagttcattgtctgggtttgctcgtcttcacagtgacttattgaggaatgtaagaatgaggttttgtacgtggttaatatttaattagatcgttcccagaaataatcaggtgagccgccagccaggtcccgtggtggaaaaggacctggagagctgaggttgttacttccatgtctccttcgggacagaaaatagcacatgcagtccagggacctggcttcctttgtaatacgctgcttgtcttgcattgaccacagcactgtgtgctgtggcaggagcactaggctggcttagaatttaaatattcactagcctgccagcctcgctttcctcccctgggctcctgggtcaggaggaagataattgctttcctgtgagcttttttgacaggacacaccctgtttgcaaatatctgtggggttagcgctcaggagtgtgaagagaggcgatcatgtgcctgctgggagctggtgcctgtgattgttgcatggtgtgtgtgtataatcccaggggaatgtccagaaaaccagtgtatgcttttcttccctatgactttagtccctttggttaaaaaaaaaaaaaatccttttcaaaatggaggtgacaaacttttattgtcttgttgctgttttctgaatacagaatactacaaaatacagcatgcctgtatttggaacctgaacactgcctgtaccatttaaaaagagggtgtggtatcataaaggcactagtaggtagatagacctaggctctagcctgtgtccctggcaagttgcttaacttgtaaatctatgtccttgtctgaaaaaaaaaccatacagatcgttccagctatcgtatagggctgttgtaaggtgtaagagagagaccgtgtggcagctagaacctgtgactacgttaatgacttagtaaggcgttgcaggtggaattagagtttttcatcagctgagatggtccttgagatggggcgattctcctgggctaccaggtgggctcagtgtaatcacaaaggtctttaaatgtggacaagggaggcaggagaggaggtcggactgagtccatgtgagaaagactcactgcctgctgctggggaggagccactagccaaggagtatgggcatcctccacagcctggaaaaggcgaggaaatggattcttccctagagcctccaggaggaaacacagcctttctgacactttgcttttagtcctgtgag

SEQ ID NO: 59130 - DNA, 3756 bp, Homo sapiens
aacccagtatatccaaaagctagccctttcaacatgtaattgccacaaaaattatgaataggagaatttacattctttttctcctactaaatctttgaaataggtatgcactggacactcacagctgatctcagtctggactcaccacctttccaatactcacagcccgcaccggccagcggctaccgtgccggacaatgcaagtgttagaatcacctggtggcttttagaaaagggcaacatttacgtgtataggagtgatttgcccgcagcatggcatgggcgttgagctcgttgttcctgggcatgcgcactgctgtctcgccccgtgacatcctctgctcggttccaccccatcagcccacatggtgatgccctcgtggtgatgcccggcaggccgctgacttcccgacccctgggctgcatattgcctccctggcagagctattccagaggctgttcttggtccaggttggggtgggaaggggccacccatccttgacctccccctccctgtctctgatgtgttttgatgcccatgacacattcctgagcgccgcttgctgtcttaccatttggcctgttcctgtagctttggggtgtgccccaggaaggtccgagtcatctttgtaccctctaagaggtggagagatgccaactgtggccacgtgtggaatggtagggcagtcaagagcaagctccaggttcagcccctggctctgtcccttcaccactctgcctcagtttccttatctacaaaatgggggcaataatactacacacctcctggagtggttgtgaagaaatttacaggtgttcatagtgcctggtgtgtagtgaatgccgtgtaagtgttggctgttatgttgtgttcagaagagcaggctgggctgaaagagagaaacaagctccctgttgagctctgcccggtgcccttagattagctgtaagcggaggccttgtgtgctggggcggttggggagaaaagtggatctgcacagaggttggggggactcaggcaggtggggacagcccttccctggaagagtgagcccagaggtgccacattatgaaggctctccagggttgggaggatattctgggggacgacagcctcaggaggtgcagacaaagccagcaggagccttgcctggcagaactgctcaccctctgaatagggacaggcgcagacgaggccccttctctgacctgatccagaagccagcctcccagccagcgctgcaccggtcattcgcgaatgaaacccagctggccactggatcccagcagcttaaagtggaaagcctctgagtggagtccaggcctgcttggccaagggacagggatacccagccggctaacctgagacgccttggctgctctgttggcaatgcccttacccgccccctccccgcccaacttggtaatctgcgatgctaacttgaatatcacctcctctgtgcagccacccgctgccgtcctcctgcccaagcctctctgtgctgcccagtcctcatgacattatttgcgctgcttccacatctgccctgacacgctgtggctggcccagcagagcgggaggaagcagacagacatggggtgggcgcatgtgtagaccaggctcgcctgagaagtgggagtgtgtcatctccttgccgagttccctgagcaactgctcagacctgcaccagccacctaccctggggtcatcaggcagggccgcgtcgtaagtggctggatgagtggatgctcaggggccagtggtctcccttctttgatgctgtcttcttggtgaggtctgaaaggctcatggccatccattctagggaatgactgaggcctggagaaaagtttatttggggcgagattgttttttctctggctaaaataaacatgatcctcaaactgcagtaggttcatctgcttggaggtgactcaggctcctggcttttgggacagacgggtttgtggagtgatgtcaccagggcccagggaatgaaactgcacgacctggctgcctgtcacttccagagccagcctggcagaggggtgacgcaggaacagtcctcctactactgggtgtcacccacaaagcctggggcggaggtggcagtgggtcaggcggcaacattgtaaccagtgtcctggggaacctgggctctcatgctcccctcgggagctttcctaaacgctgaaatgacggagtggccaggaccaagcaggcctgggtgagagtgaggggagatacaggttaaatggagcggagcagttgcccctgacttcctgtctgctggagctgacccagctgtccgcctcgctgctttgcgtgtggccatatcccggcctcctcagctacagaaaccctgtgtttgctctgtcaatggcctttgaggggacagacgcatttgaatgagatctctctgtccttcaaccaactctttggaaatgttaaagcaaaataacctaccgctctgccagcgtccgtccgtgtgccccagctctttgaagaacgttcttgtccctgccaagtgctgctgttaggtgccacgataatacagcacagggaggcttacgtctgattcatttcagcgttgattttaaaaatagaaattgttttataattacttttactctgcagctctagtggataaattattagctggagaaggagagactcagtgccctgaagtcgtccagtacttgtctttgaaagagctcttgtccttcgagtgttcacccttccatttgcccagtggggatttgctgacagccagatgttggtttgggcctagagatacagcaggaaggaagatgtccctgtattcgggggttggaggtggggacagagtatgatcggtggacagacaactccggagcctcctgggccacagggtgccgcggggttggcgtgtggggcagccgctgcctggagcctcccagctcagttgcctggctttgctgacagtgcccattcctgcggtctgtttccatctggactccacatcaggcctgggccagcagcctctcgggagcgtcccctgcctcaccctgatctcccctcttctgaggcagcactcactgagatgctcgctggggtgtgccccatgagtctcagtccagggaccagtgcagctctgggctgctcacgagtcagcgggctctgtctggcctgattgttcctggaagcagggcaggtgtatcctgagggcttgggctccccctggccactggactgagctgaaggccgcagcccagaggcagatgccctcgccccaagggatgggggtagtgggaagggcccttggctctgccagccccaaggccttcgttaacttgagatttgaacaaatcctgatccggagcccactcgcaatttggaggcatgttagcaggcccttggggagtggggctcctgtggtgggacgataaggatgtctatgctgacacacttctcccacacccaggcctagcccgcaccctgaactgtgaaggccatgcagcccagggccgcctgggaggggcctgaggggctccatctccatctctggtccatgtctggcccacatctttttgttatttatgaccttggacaggtggttaacctgcagcctcaatgtcctcccttgcccacctgctccgaggttccttgtgaacattaatgaggcaacactggaacaatgctgtctgctcgggggcccagtacaaggctgagctcaataaaattgaatttattaataggttattgagacctgtctg

SEQ ID NO: 59131 - DNA, 1325 bp, Homo sapiens
tctctccttctctcccccaggatcctcaactcctgcacagacctgatgaaggtgaggggctgtgacccgggggggtctgcacctggagggccaccagtcattgctgtcttggtctcggcaggctatccggctcctggtgacgacatccactagcctgcagaaggagatcgtggagagcggcagggtgaggggccggcggcagcagggcacagtccacaaggagcctgacccccagcctaggccaccctgggcatgagaccctccaccccctaccacagggaggcctcagggatgcgccctatggccagagtgagggggagagggcccttgagggccactttccacctttggtgtccttgactggcatgtcctgccctgttctcccgtcgccactagggggcagccacgcagcaggaattttacgccaagaactcgcgctggaccgaaggcctcatctcggcctccaaggctgtgggctggggagccacacagctggtgtaggttgccctgggtgggggggggcagggggctgcttcctgccagttggagcagtttggggttcaacagggtgcagggagtagagggggtgtggagtggtgccagccgtccgtggggtcagagaccctggccctgactggcccttgacccgcagggaggcagctgacaaggtggtgcttcacacgggcaagtatgaggagctcatcgtctgctcccacgagatcgcagccagcacggcccagctggtggcggcctccaaggtgagcttgcacgccgacagcagcacactgggctctgggcccagcttggcctgggctgtggctgccaagcccaggcctgctgctgccctgagctgggagacctgggcccaccctgacctctcgcccctcaggtgaaggccaacaagcacagcccccacctgagccgcctgcaggaatgttctcgcacagtcaatgagagggctgccaatgtggtggcctccaccaagtcaggccaggagcagattgaggacagaggtgagtgccagatgccaacgggggctgctggctcccgaggctgaatgggggtgggtgcccagatgttcacccccttgtcctccggccacagacaccatggatttctccggcctgtccctcatcaagctgaagaagcaggagatggagacccaggtaggcgcccatggctgccccgtgacctctgagctcatccctcgggcgaagcctggacccaggagagagctccctggggaggctgggctgggctgagcaggccgtgtggctacaggtgcgtgtcctggagctggagaagacgctggaggctgaacgcat

SEQ ID NO: 59132 - DNA, 1110 bp, Homo sapiens
cctgctccccccaccccagccctagccctttagcctttcaccctgtgctctggaaaggctaccaaatactggccaaggtcaggaggagcaaaaatgagccagcaccagcgccttggctttgtgttagcatttcctcctgaagtgttctgttggcaataaaatgcactttgactgtttgttgtcactgatgccccagagggaggggctgtgcctggctcttcattcctccagggacacgtgttcccttgtcggccctggccaggtgctggggcggggacctattcatgtctgcatttaatgctagagtacttgggactgcagaaaagctcagcagggctgtcactggctgtgtgtgtgtccgccttccatctctctctcgggggatttatgggcctcagggccctccttttacacaggaggccaagagccagctgcctccacagaggccacttgcactcccagcctcaatgcccacagcttccctggggctcctagcagttgctgaccccctcagtgtgtctgagaccatgcctgactgacagttgctaagctaaggtggggaccctgactcccggctggcttggacttgagccatggccacacacagcctttgcacttaccggaaacctggaaaggtgttcagtccctgggtgtgtggcagcctcacaagcacccactttacccaggagcaccatgccagagggaaggctgaggtgggggagctcaccctgtcctaccccctgccaagatcactggcatttatagagaaacaggacagggtgggtcaggggagagaaaaggccccttggctggctcctgtatggcctcagacaagccttccacctgtgctcacgtctcctggaggatgaagtggggcctcagctaaggctgcgtagccggggtgcttgtgccgggtggttagggtgaaagggccttgcaaactgaccacaagggctaagacagaccctgtgcctggctcttgtttgtttacaaggcaagatggcttcagaaacactaacggaactgattctccaccagatacaaatgaaaatccacaggcattgacaacgcttaactgatcattcttgagtcctcaatgaccaaactttt

SEQ ID NO: 59133 - DNA, 3834 bp, Homo sapiens
cctgaggtcaccctcagtcccctacttggacacagtggctgtgatcctgaagacaccctcttaagacacagaacatgccctgtacgtgactgctgtttatgagactggtgaccaagagggtaagaggccccacctgtgccaggggccctggacaggcagagattttgtcttcagcttcaaaaacagacgtcccagccagcttccctgctggaactttgatcactgatgtttcagaaccagacatcatgaacatccacatccccaagtaaataagtgacaggcctgttattaataattctctatttattaaaaagggtcctacagctttacagccacagcaccggacacggccctggacagcgacggcgagcccggccaggggccgctttgcaacttcaatgccaagctcacgtctggctgcgaccgtggcaggctgtggcatccccgacagcggccggtggcggaggtatgggggcgggtggcaccgctcactcgagattcacagaacatggcaagcccgcctgactggcatggcagtgaatcgtcctgtacagcttcatttcctttaagaaaacagttacagtagagttcaagtccgagagcaggaatgtacggtcactgaggacaaaaggcagtggcctggcccgtggcccagaccccgcttcagttctgccttctgtcaccctggcggctaggcacaggtcggggccctggatgcccgacaagtgacaggggaggggcgggccagaaggtccactggtaagcacctcggccttttccgtcaacaggtgccactgccccctgctgggccctgggccttcagcacacatggcacgtgaagatgaggtcccacaggggtgggggaagagcaggtgcagacggttggagtgcagccccgtccctcaatcccatggggcgggctttcgccaaacccctaacgttgcccaccctgaggcccagccaccagccacccaggggcagaggatattggctaagggtagcctgggtcaaggcggccggacgtcttgaccacctgtaacagggcaatgaacttggacaagcccttcagagaaagcagagccggggccttgcccagcccctagcaggtgtgagtcccggcacctggggaagctaaggcacagcacggacacccgaggggggggcaccgtgcactgcttgcacaaaaggaaattgcatccacttcatcggcatttcgatctgctcaagacagtatctgcattttttataaaatttccctgaatggtcttgggagtgtcaaaaaagttttttcaatataaaacaggaaaatcacacacgtagtaaaaatattgggggattatttcttcatagaaaccttcagggccggctccaggcaggcgggagaggaggagctggggacacaatttgctgtgcaaagtcccactcgtgcgctcccctcccacaccagtggccgttctccggcctctggactcggcagtgggcccagtgcaaactttgcttgtggctctgaagcaagagcagcagccaggtcaggcggtgactatggtgacctctccccaacagattcagtgagcaacaacgcagccacaggtggtggcccagccacggcgctcttccaggccggccggcgcccacccgccctcaccagggctgcagtggccggtgggtgagacacataggactgtctttcgaaaataaaataagtatcatgaaccatgctcattaaataaagctgcaacagaaggaccacgattctaaatgggactgggggagaggcctatttcttcccaaacatgagttcatcaacgctaagatacttagaaatcacacggataatgcaaaccgatgcaacgcacaggtgtcaggctgtaacccggcacacacaactgccttgatgcccaaagcctgggctcctactactcaccactgacctacagttctaaaatcagacagacacgctggcccagggccccagagcccttggcacagagcggacctccagcctccttcccgtgagcagagcacaacacgccaggtggaagaagtctcccgggaaggaccgcgccggcgctcactggaggatgaaacccggctggtgtggagggagccggggcgggggtctctgagggagaggtggcggatatggggacacgaactgcgaagagaatccttgctgagtggggaggcccacgcgggggggcaggggcgggcactgtaatcctgggtacggcacggcctgtcccgaactcatggccgcagtaaacggggtggctaagcgtcccgcaggcaccgggggtggtgggggggggatgcgccgaggtgcaacggcaggaggcccactggcctctggggcagggtagggaaggggggcggtaggtgccagttcgggcagcctggggggcagcggggccagggcctgtgggagtctctgcccctttaggaccatctcctggagcttctcgattttcacccgtcgcatgtgggccagtttccgtttgctctgatagacatcaatgaaggaatccagaggaagttctccatccagaaacttctctgccatgttctgaaagaggcagaaacctggttacagggacagccagatggggaggatgctcccttcgtggtctaggcacaaggagaggcaacgcccagctgcttccaacactgccccctccctgtaaccacccagagggcctcgctcctgctccagatcccagaggtcatgggctcaggcttcagcatgagctgccactaggtggagaggacgacagccctgctgcgcaccccaccaccagcgtgacaggcagaggagctggcctttgggtgagggctccgactcctgggtcccaggcctctctcgagcccgctggagtccaacacctccttgcttccacccggctgcaccctgactgacagactcgccctgggtgggtaagcaagacagaaacacctgtgcccccagggcttcagagttcatcgagcccagccctatcttggcaagaccctgccggccccagcctgcaacaactgcacaacattcgaccttgactcatttccttatcgcctggcgaggctcaaggctctaatgcgcagctggacgtgtcccagaagctctgtagcctcctcccagctggcccttgaacgacggcacgtggtaatccgccactggccccaggggccggcgttcacagggtggcacgcatgccctctcttggccctcgctcggacctgccctcactcaccccgctgctccctggacccctgcctggcactttccccagcacacaggccaggctgcctgctggtatacagcccgtacacctgggaggcaccactcctggccgtggcggtgtggcactcacggtccctggaggcagcgggcccacggactgcccaaagcgccccaaggattccaccaaggctggtgggctttacctcagtgtcttcctcaatcttggccccttctgcctgaagaagtgctaacagggtctccaaggaagcactgctagactgtctgtctggaaaaaaagcaagaggtatgacaaaagtgagaggtgtccaggtaaagcccttcatgatgccaaccacggcaggattgcaccttcctttccaggaagctgaatgtgaaaggcttgaaaacctacaggggaacaagtgcaccaagccagtgcccaggggccaacatcccatgtcagagcaacctgtgtcaccagctgcttctagaaccagctgttttcaaatatggggcagtgacattctcatcatgccactttgtatttcctttatgttttgagtggtaacttacatcgagtatacacatctcaagtgtgtaag

SEQ ID NO: 59134 - DNA, 2696 bp, Homo sapiens
ttaaagaggaggaaactgacacttaggaaggttaaatacttgccccaaagtttcctagcaacccaaatcctgtcttaaccacgatgcttcaacagtcaactttccaatttttgtacggcttttatgacttttgcctcctatcacttatttcttgatgatgttattggttcttctagtttttccccacagtcttaacatttgccactggcagataaaccacatgactaagtgattatttgaactgtgtgcaaaagcaagactcaacaggctctgctataagtccagtatatgtccttgaagtcagttatctcggctgcccaacgatcatttttatcaaccatctttcagcctcctaactcatatcccagctttctaatctcatccccctcaaatccatccttcccctggctgccaaaacgatctacataaatggcgagtgtgaccaaccgcagcactccctggcttaaatcctccaacggctccctgcctagaggatcaagcccaagctccttaacagggcatatgaggccatctggtccctgactgccttttgggcctcagcccccactacaccctgccctggtccctccagcaatacttataatattcctgtatgcacacacactctgtcccggcttcttccctaagtgcctttgttcctcccatatgcctgggagcccttctccctcattacctggctaactcttaactcattctctgaatcataacttatgagtcattcatcttctccaggaaacactccctgctgaccccccaccttccaaaggcttactggatctccccccaccagtgtgtgggcctcactactgtttcacatgtaccctgtacacctgcatgatcctaaatgatgaaaactatgtggtttactggtttcacatcccccaagtggcacaccacagatgctccgcaaaggctgggtacatgaataaacttcttgacctcagtcatgttcacattaatgaaaactactgtctgatggcaaacatgttagaccacttttgttttttttcttttagacagggtctcactatgtcgcccaggctggtctcaaactcatggggctcaagagatcctcccacctcagccttcggagtagctggatttacaggtgtcagccaccacacccagctctgatgacaaacatgaatttgcactatgttcctctactatcctagacactgggctgcagatgtaacctcgaggtgccattagttaaccttggagataaaaggtttgatttaaaagaaacattagctgtaacgctgcttgaaatataagaaattattcaaatatctacttttcacataaactctttgacaaagtaatggactacgttcctcacaatcccttgacaaatactttgaaaagccttcccttgacacactgtaacgtattctagagacaacaaagctaagctaagtcacctctctactttcattcttcccttggaagaaattctacaaaggcatttcctctgcttttgtatcattgggtaagacatcatttccaatgatgaaatctgaaaactcacacagctggggaaggaaataaaccaacgagaactcttgtctcagcatgttctgagcgccagtgattacctacgagtggctggcacacggtcttctagatcacctcccactgcgtacctggcatgaatctccatagcaacattctgctacaaatactgtaatcaaagccaaacaggcaacaaggccggcattcctcagctcaagaacacaaccactctgcatacgaccgaccggtgagggtcaaacagtgcagtctacttctgggttcctcttccagccagtctctaacaggatgttaggtcatccaacttgtttctctcgtttctcccctcccttcgatggcagctctttccttctcccaacccactaatagctcctagtggcctttcaaacttttatattctccttgatttccacaagcacttggaggagagtggcttgaatttctgtctccaagcagagcattcaccctgagctccagaaccacactccaactgcctgcgggacaaagccctgcccatccctcatgctctgcctaatccggcctcaatgactccctccctcctgcacccccactgcccctcccctccccgctcaccagagccctgtctcctactcacttccacttgaagcccggttatcaccactcactcagcagcactacccaggcacatcctgggtgccaggcactgtgctgggtgccaaggacaaaaagacaaacatgacaaaatgcagcccccaagccagtgggggacacagggaagtgacttacaaaatgtgtgtcaagtgccacaggagaggtatacaaagaagctaagagaccacgtgcctgtgacagaggtggggaaagcacttcaggtcagcaggagaggggaagtgagaaagggagtcgggccagctggtccgaatacctctcccagagccctagctcaaatcctaatttcttcctaacctccacttccgccgccaacctggtcctgccacgccaagccagcccacgctttgctgacagattaacctccctaaagagcagtttcaggccgggcgcggtggctcacgcctgtaatcccagcactttgggaggccgaggcggacggatcacctgaggtcaggagttctagaccagcccgaccaacatggagaaac

SEQ ID NO: 59135 - DNA, 1939 bp, Homo sapiens
gcaaatctgcaaggatgaagtcagttacccgagagcaaaccacacctcaaggtgtgaaggaagataaccagaaacaggagctggcacatgccttccaggggctgggcaaggcttgactctcagaggtgagggttggcagccagccccaaacccccattttaacttcttcctgaaactgctccaggaaccttccttagtcccagacacgtgggacgcagtggtacaaagccagccacactaaatttcccaccttcccttcctcggtggagggggcaacccttacagaaaaacgtatcctgtcgccacccttaggcccatccacgaactcccgtaactctgctggggccacttcaaaagaagtcagactccaggggcattattgggaccccttagatacatggaaccttcaaaccttaccctggctatggtatgaccatggactcctgcctccaaaccctgggctggggaccctcgcccaacccttaaagagcctcagaaccacctcatagactcagctacagaccctcagcctcccgaacccatcttggaaccctcaatcctctcctaagagtcctatttggatagtccactcagtcccccaaaacctactctgatcccctatagctgcctcagtccccctggttgtccccaacctttcctctcaaaggaaaccccccaacctctaccagatctagctcttggtccccctcagtcacccctaatcctcgcctccgactcagcccttattactctccccgctcctccgaccaaaccaatctcagatccccccagttccgtcctcttccgcctagacccaacgatagcactctaatccccaaattcccattccaggctccctaatctccacttcagacccagccttaagtcttcagacccagccttaagtcctcagccccacaaaaccttgtctcaggacccccaatcggctccccaagccccgtctcaggaccctttttcccgcctccgccctagtctcggtcccctcagtgcctcaaaccccctctcaggccccctattcctgcctaagcaccagtcgcggttccctggctcccgcaccccgccccaagcgcccccatttctagcccagtcccctcaacacgaccggaggcgccgcggtcgcctccgcctccggccaccgttcgaggagcgaaccccgctcgaggcctcacagccgccgccttaagcccagctcggctcacctcctccatcttctgcaccatctccgtcagctggccctcgtcctccagcagctcgttgagctgcaccagcgacagcccggcgaaccgggcttcgctcccggcgcccgccatccccacgtctcggccgtcgtcgccaccgccgctgcggccaccaggctccgccgaccggaagcgccgccctcaagggccgccccccgcgggggggacacgtgacgccagccctgggtcgtgacgtcatcaccgcgcgggcgggcggacgtgacgtaagtgtcgcggctcgcttggagtggaatgtgtcagggacagtcgggacttctaaagggaggggaagggccctatgattgggctgtgacgcgtgagcgcattaatgacgtcactgcggctcgggagagcgcgccatgaggtcataagagcctttttcctccaggaagagagataccgcgatccaaggaaaacaggcagtgggaaggaagttcccgcagcctgtgagcccagcccgatgcacggaacccaaaagacagagacttcatggggaaacaactttaggtgtcattggttacttggaattgtggagctgccacgtcattcatttaacaaatatgttttgagacctactctgtactgggcattgagtatacagttctgaataaagcaaaacggacccctgcttacatggagctaacagaatgaaagaggacgcaaacaaaacaagaaataag

SEQ ID NO: 59136 - DNA, 1276 bp, Homo sapiens
ccgtgttagccaggatggtcttgatcttctgacctcgtgatccgcccaccttggcctcccaaagtgctgggattacaggcatgagccaccgtacccggccaagctaaaggttttattgagctcaaaaggacactcggtaattttcttccttctaacttgttatacttggtgaagaaagatggctctaaggaggaaaggacacaagtgggaaggagatgtaggaagctggcgtttcttttttccttctccctccaggagaagaatagacctgtcaaattgagaatagtagctctatttccaggaaatcctctctatgaggcttaagatgtccaggaatttctcatagtccccacagaaggtgagaataaggtaggggtcagagctctccagaatctagagggatgatgtgatttaaccaagaacataccccaggaacaaaactggcttcagaatggcatacctatatacagtgacctctaaacgtactaagtttaaacacggctcacttgccacccttgcccagtccttttataactattctcatacttgctatctgccaccaacctattggagtcatacaccacttcctttgttaaacagagcaaaccacaaaatcatcttgttttctgctgctctaaaaacttcttgtcattcttaaaggggattgagagaagaaaagaaaatgtcaaagcttccttgcatcagtgtcaaacctgtcaatttaatgcatggatggatttgcatgtctttttccttttatcggttggctgatatttgggtttctttatgcacctacatctgcttgtaatgcttgtgggttaactaagagtttgctctggtgaatcaagggcaatgtatgcatgtgccagagcttcactctcaatgggagcattgttgccgtctgagcaatgagtctcctgttacacaatattgggaattgtttggcaagcatacttaaaacacacacacacacacacacacacacacacacacacacacacacaacctttgcatagttgaacctaaaaatcttctagccttgggattagaattctttctctcccattggtagatttatccagaaataatttccagtttgagacgctgggaaaaaatgtattaataagaaggtgtccatagcatagcacacatagctacaaaactatgtgtgcgcactagaggaattattcccccaggtgtcaggtggaacagccatgcttctctggggactcacagcctgatgtcaccaccatgtcactgtcatgtactaatacct

SEQ ID NO: 59137 - DNA, 780 bp, Homo sapiens
aaaaaaaaaaaaaaaaaaaaaaaagagagagagagagaaaagaaaagcacctactgtgagcagggagcacacctgctacatgaggacacaggtaccagcctttaagaaattcctagagtgtttgaagagcaaacaacatgctagaaaagcccacacaggccaaataaatgaagatggaggagaccagctatggtagtgagaaatcaggggagactgcctggtggcagtggggcatgaaggatgtccaatccagatgtccccaaagcagccatcttcctgttctggagaagcctgtcctcagccagagccagcacacatcagtcaccactacggtctcatggcctccagccaggctccagtttgaaaagaatcttccctttctttaggccatggattgtccagaaaagccagatcattaaggaccagaggtaaggaatttatctggcagctgaccaggccttgtcaacacagggcctcgggcagcgcttgtgtaactgccctgaattagttcttcccagccagggcgtgcccagcatggacctgggtccaggggaggtaaaggacctctattgcatgtctgtgtgggcctgtgctgctgccccggggcccttgctggccactgcttgttgctgtatgcagagcagaaaattccttgaagcatttctccatgcaccctccactcgcaaggttccttcagctataaataacagcaggacatgctgaataagggttgcagaaggtttggcgatgagaccgtggctgcagcctctgcaggcagca

SEQ ID NO: 59138 - DNA, 3568 bp, Homo sapiens
cccccaccatccccattccctgacccatcccaggctgcagggggaggtgagggcagacccagccacaaactgaaatgccggccgttggcaggggtgtcttccaaggcttgtcactcatgccttcccctgccccgagcatttccctacagaggcctccagctggagcaggctgtgggcttggccacagaacaaggctttctttgtgaggtcctggcacacacatgccacccccaggctcctcagcttggccacctgggaactattcgtcctcctcatggggaagagcatgactcagagagggcaagtgccctggctaaggtcacacagtgagctctctgtctcctcccccagtggggttccgtgaagaaggggctgtgatgggagcgcccatgccttcctcctgtgcctggggggcatctgggaagggagtggagtctgagtacccatggcagcccacaccctagtcagggactccatctgtcctcctcatgcccagccagaactaggctgctgtctggaccaccgtgccttggtggaagctgcaaaggcaccccctgccagcagacggattgctaagaggctcagctagctgagctggaccttagcccctcctctcctccttggctgatacttttgggaggtggcagcaccaggaagtcccagatatcctctttcccctggctcccctgtagaccaccagctccctcctccctctcactccaaaccctcctcattcctccgcagctatgccctgacctgcccacctcccatgtgtgtccagtgtagcagtgacatgatccaagtgctccccatcctccaaggagaggctgtgacgcactcccgggagtgtgccagacactgtcgggagtgtgtgtggctgtgacatgagacctgcccgaaagtggcctagggacctgctgactccccacctcagcaaggatgtttccccagctgggaaaagaaagctcccaccctgccaccccacgtcaggtgactgggagaggggcagccttgcttctgggaaagattctcagcagggcgcggtggctcacgcctgtaatcccagcactttgggaggctgatgcgggtggatcacctgagctcaggagttcgagaccagcctggccaagatagtgaaaccccgtctctaccaaaaatacaaaaattagccaggcatggtggcgggcgcctgtggtcccagctatgcaggaggctgaggcaggagaatcgcttgaacccaggaggcggaggttgcagtgagctgagatggtgccactgcactccagcctgggtgacagagtgaggctctgtctcaaaaaaaaaaaaaaaaaaaaagaaagacagacagattctccaccagcttgacaccaacatgcaggactgatgtcctagatcgagggcttcccccatctttgcatcccatccctccacagccagagctgcctggccaggggcacgtaccccgctgccccagacgtagtacatgtaggcagctgcctccttcctgttcagcttgtacacctgctgcagcttccgcaggtacacctctgcctcctcctcctcattggcgaagctccggacagtcttcatggcactgatggtctcctccgccgtgttgctcgctctggccagggcattctggacctctttggagagcctctatggacaggagggggacaagaaggagaagaccccaaaacagcctcactatgtactggagcccccaggcctctctgggtttttccacccttcgctggcaccagctatatgcaagaggttcctaggacaaaaagacaagatctagccctttctcccccatccccttctggctcaatttgacacactcaggtagtcaactccagagaggctcttggggcaatggtttcagctcctgaaggatagggcacggtgctgatcgttaagtcatccccagtattcaaaagaggctattcatgactggacagtttttggtaatcctttcagaaaaggggcctcaacacctgaccctgtgctggaagagcaggggatgccttggacggttgttcaggttgtacactatttaagaaacaccaactattaaaggggcaccatttacatcatcaacataaattatgttagagcctgagggttgataaagagattccagaactcccagccaagttctacatggtggcaggggccatgggttgtgaaatctgcccacaccatgtgcatgtcaccacaggcagagctgaaaagtggtcccaagtgtgcggccatcaggctgctgttcaccagagtcctggaagaggcccctgggtggagctgttcacactttgcaggagtcactatgctgattctcaagccagccaggaaggctgcctgagagtccaggacaggagcatgcactggcatgtcccatgaccatgtgtcacgccccagccgcaggaagcatgcagggtgcctgagtcatgtttggccatgggcggtgtgtgtggtttgtggagatgactcgctggctacacacaacacattcaggcatggggtggaaaacccaaacagagccttcctgaggcctcccttagctgaactaaaaggcagggcctgcagtgcacacagaggtgggggctgagggggagctccagggtttcttgctccatcccaggggctggtgggaaggccggaagcaaggggtggggagcagcgtgccagaaatggctcagactctaaagaatagatttactttctcatctcagtgaggacggtggggaggctcgtgaccaggaacttcgggaagaggtcctacctgtgtggctggagaagactgtggggagtggcctcaccgggggctgggtgggagatggcttcctttgctaccctggtctcaggtcaccaacaccaaaggctccaatggagctgcgacaatgacttacccggcaccacctggaggccgtcatgcatccaagcccctgctctagaagtaccccacgtgggcctgggtgactgtgagggggttgcctgtacctgtcacagggtcacagccctgcctgtctgaacccagcctgtctgtcccttagggctcgggggcacccgcccattcaggaagcaggaggagggtgaggtcaaacctggctcacggccctagctcggaagcagaagcagtgccgtggggtggccagaggggacagcagcctgcccatgatggcatcacagcgggcccgcgatggcatcacagcgggcccgcaccacccccacatacacaccaggcacgttccaacccagggccttttcactggctgtgccctctgctcagcacatacctcccaagatgcccgcctccttcagacccttattcagatgtccccttctcagcaagacctatttaacttgtatttattcattcattttagagacagggtcttgctgtgtcacccaggctagagtatagtggcacgatcattgctcactacagcctcgacctcctgggctcaggcgatcctccacctcagcatcccaggtagctgggaccacaggcatgcgccaccaagcccagctaactaaaaaaaatttttttttgtagagatggggt

SEQ ID NO: 59139 - DNA, 3245 bp, Homo sapiens
gtgccactgcactccagcctgggcgacagagcaagactccgtctcaaaacaaacaaacaaacaaacaaaaaacaaaaaaattagctgggcgtggtggcgcctgccgataatcccagctattcgggaggctgaggcaggaaaactgcttgaatccgggaggcagaggttgcagtgagcggagatcgcgccactgcactccagcctgggtgaaactctatctcaaaaagtaaataaacaaataaataaactgataggtacaacacactcatcttgcaaactgctgcaaacggagagggggtgagggtggggtggggtgctgcatgtgccaggcctgcctggtgggtggctggggagccgacctgccctgggcctcctggggaaaaagggcagttaggcgggtaatgaacattgatctggggaaatggatcctttcctagatagcagggcctctcactatcactgggcaatcaagacgactgtaaaacgttaaacaccttctcgggccgggcagctctgcacgagaaaaccccaaatcccacatacttccaccactcccagaagccctgtggtggttaactggggaactctgtagggttcaaacgccatatttgccccttactggatgtgtgacctgcggcgggtccctgtgcctctctgggtctcagtttcctcatctgtaagacggtgatataatagtacctagctcaaaggtttaatgctggtagattcctgagcaaaggtccggggagagaagaggctcggtctgcaagagttgtcatttgttggctgcggtgagaccacgccccgtcgccctcccacacctgaccccgccctcccgcgtccattgggaacgccaccggaagtaatgcgagacggagcgttttggtggagacactcactggggcaatctgaggtaatccaacagactgtggcggagggaccggaagcgccaggcagggacccggggtagatgctaaatccaaactgaaacgtacagggctggatgattgaagcaccagcgggaactagtcggacctccgagctctttaaactgtcctcagctcggctggttctccacgagctccgggcagacggcggggggtgggtcggcgtttaagtcaaaggccttggggctccgagtcccttcctctccccgtcctgtgaaggcacgacccagttcagctgtctgtaaagtggagccattagtccctgcctcgtagtgggaaaactgggaggcggaacgaggaggccgccggtcccaacccggcccaggagcatctttctccgcagaccgtttcctggcgaggtgcgtcttcgtccttttccgcccttgggaacttagagcggccccttggccgctggttccgcgcctcccgcggttgggggcgtgcccgaagtctctctacggaagctggtagggctgtgggtgcttcactatggcgacggtgggggctccgcggcacttctgccgctgcgcctgcttctgcaccgataacttgtacgtggcgcgctatgggctgcacgtgcgcttccgaggcgagcagcagctgcgccgggactacggcccggtgagtggccgctgtcgtccctacggagcagtgggcagagaggggtagtggaggagggaagttcgtccccagggtcgtttgctttgcgcacgccgcgcaccgtatcttcaaatacaagaatgacggcctctctctgcctcggttttctcaccgtaaaggggtaatagtatctccctgtgagattgtgaggaaggaatgaacaagcatgtagggtgcttaggacagggccgggctcagcttgccgcctcacagcaacaccagcccggagccctgtcctgagcttgacagggttccgcagttcattctctccatgatcctttgaggtcggggctcctctccccattttaagcaggggaaactgaggcttagagagtgaagggatttcctcaggtcatacagtcatgctcagtgttctttctgctcccagatcctgcgcagccgaggctgtgttagcgccaaggacttccagcagctgttagcagaggtaccagtcccctgcccctgcacagctcctcctcgttagatttgtgtccgcagcttgaggacacagcttgagcctagcctcagtccctgatccctgaagggtcacttaggccctcactttcctccttcctgccccccactcatccctccacacctgagtcttggcaccaggagagagaaggggaaatgctaagttgctaagttgcctagtcatgccgttcttaacagctctgtgagataagcacaagcaccactctcattttggattgagaagctgaggcttaaagagggatcccttgcccaagcttttacagcaggagcagatgtgatcccagccacagcttccaggcccctgggctcctcacaccttaccatataccccgcaggctgctgccagggctgctgccccactccctcctcctccttcccctggagtcagtggtgggaagcttcccaggagagtcctcagcaacctctggaacacaggacttggccatgactgtctcctgtccctgtgtgggcccagatggttgaggtacatctaggggttctcatcccagctaggctcaggttggggcagcctgaaacaggatgggtccccttctagaagtccctttcagctaacagtctggaacttgcagttgacccagatagattcaggagtgtaggctagacttggcttccagcctgggccctgtctggcgttctgggcttcagtttcttcatctgtacagtggcctcaggaggatgggaggccccacctggtaacaaccctgtgccaccccagcttgagcaggaggtggagcggcggcagcggctggggcaggagtcagcagctaggaaagccctcatcgcgagttcctaccacccggcacggcctgaggtctacgactcactgcaggtaccagccagccagagtgcttgaaggccggtactggaaagaggaggtagcatccagggctgggggtgctgcctgccccacagctggtgtgttttgctcccaggatgcagctctggcccccgagttcctggccgtgactgagtacagcgtgtccccagacgcagacctcaagggccttctccagcggctggagacagtatcgggtgaggtcctggccctgagacctggcaggaccagggaatggcagcctgggaaacctgggtgtgggatgctggggtccctccagccaccat

SEQ ID NO: 59140 - DNA, 2251 bp, Homo sapiens
gccaggaaccaggctgcccgggttcccattctgcttctgccacttccagctgtgtggctttaggtgagccttcaccttttggtgccttcgtttcctcatttagcacctacctcctagagctgttttgggagtcaaatgcgctgacgtatataaagtgctttgcaagatccctttgtgtttgcggctgtcattgtggaagagttgcaacttgggggcccgagattggatgaagcgcacagccacgctttgggttacacatttgaaactcagggggcttccatattgcagtcttgagtttggtctccctgggaaggtggggcaccagccccatgccacgttgcacgtatcagctggagcagaatcctggcttccttccggatgggcctggggtccatgcccgcgctcactgccaagatctttctggcccctacggacacgagtttgcgacctctgagtcactgggtgggcgcgtcggaaagaccagggcgcctcagtctggagctcgcagtcgtatggagagggcaggaccagccggggaggagggcggcgcgcgcgagggtcgccttcttcccagggcaccgggggcgtgggtgctgcgggcgtgcgccgagagggcagccttggaagtgggcgcagcttcggcagacacaggcgtgaggggctgcggagctcgagggccggcgcccctgcttgcctctgcgggaggtgggcgcgcccgggacggaacctggggcgtcagaacgaaaggcagcggcgccgcgcttcccagccggccagcctcccgcgcagcgccccggccggaagcctcctcgccgccgcttcctctcgagaaggcgcggggcgggctgtccggcccgcagggcggtcgaggtgggaacggagcagccccgggggcccccttgaggcggcgaggccgcgaagggcgcggggctggagggtaggagagcgcgggaaagcgccccagacgccactcgcggcggacggcggccagttcccaggggtttggagccgggtgcgcaggcgtggggcctccgggcacggggcgggcccttaacaggcaccgctgcggggactggagtcggcggagaaaaccggggtccccagcgctgggggtgggtgagggtcgctcattttcccgggacggtgacgggtactgggcgtcgccaggccccggccccgctagagccacccttggagcccgcccgcggccggccttgggggcttcggctcaagcgcgtcttcttcgtcgccagcccgcggcgccatggctcacgtcggctcccgcaagcgctcgaggagtcgcagccggtcccggggacgggggtcggaaaagagaaagaagaagagcaggaaagacacctcgaggaactgctcggcctccacatcccaaggtcgcaaggccagcacggcccctggggcggagggtgaggaccacaggcatcggggagaggaggcgcagttactacccggggaagtcgggcgagcagtggtcggggacgctcagtcatgcctctgtgcagccgggcctgagatgtgagggccaggcgccgcaggagccaggaaggggctcctctgggaagctccatctctgttctggaaagcccctcaggaagcgctcaccctgtagccggtctgtgcctgccccaggccagagcaggggacgaaggtttacctcttcccctcctggccttccagcctcaccttctccctgcatcacagagagaagcaagcagaaggcccggaggagaacaagatccagctcctcctcctcttcttccagttcttctagctcctcttcttcctcctcgtcctcctcctcttcctccagtgatggccggaagaagcgggggaagtacaaggacaagaggaggaagaagaagaagaagaggaagaagctgaagaagaagggcaaggagaaggcggaagcacagcaggtggaggctctgccgggcccctcgctggaccagtggcaccgatcagctggggaggaagaggatggcccaggtactgtgctgcccagcacctgagagggagaaggtcgcttcccaaggcctggccaccacctccgtcttcccttccagtcctgacggatgagcagaagtcccgaatccaggccatgaagcccatgaccaaggaggagtgggatgcccggcagagcatcatccgcaaggtggtggaccctgagacggggcgcaccaggtggggagctttcggcctgacttacaccacaggatctgggagtgttggctga

SEQ ID NO: 59141 - DNA, 989 bp, Homo sapiens
tgaaacaacaaaaagctacatcttaaatatgaataaaccctgaaggttccatccctccagacttttttctctgcacaaaataaatagctttcactctgtatagacccacttttgcagaacatttacacgaccctttggctgtacatatctacacacgggaaaaagttaacatcactctgtgcacctccccagcccggtccatgcgtcccaacaccagacccaggtcggccgtagcttctcggggacagagcctggtcgctggacaaaggccgaggccaggcaggctctcccacttccgggaaagccgaggagcagcagaggggccgccggagctggccgttgagcgccacagccaaggtcacgcttggtgctggggagagagggcagacggtcagacccagcgtgcaggacagcatggtccttgttcaggcgagaaatgaagtcatggctgcctgccctgaagctgacaaagcaagttgtggcttcttagattcggcatgaaaacggaattggcattaaaaaaaccgaagtgtgtgccccacccaccccagagtagaaattcagtgggattgccggggccaggtgaggcaaggagcccatgcctcgctaagtgggcaggagcagggcccacgggacccagaaccaggctggactccgtcacagtgctgggtgttttcagtgtggaggggctgctctcagtactgaaagagttaagaaaaggaagcagccaaggattgctcgtttaaaaaaacctcatagaaatcagattgagaagtagaaaggcgtagaaacgtgggcgggcggccttgactgatggcagggagcggaagaggcggccaggcccgtccagcccgtggcctgaggctggaaacaacactggcctgggctccaggcggggcaggcagacaggtgggcagggtccggggtgcagaaattaagatacagcctttctctcctgcttgcacgaggctctgccgcactggagcctt

SEQ ID NO: 59142 - DNA, 1899 bp, Homo sapiens
ccatcatctgccacgacactgctggtggcagcaggtcccaacctctctcgggggcccactggcttcaggacagccctgagctggaccacctgcccctggtccattctgcccccaactctgccattccccaccctcaccctcaagacaagttgctccctcaggcccaagatggcccttggtgtatatgagacaaggcatccagtaagccactttctcctgggcccagactgggattccaggtctcaggctgggggaacctcaggcagacagcccgggtctcctgttggccatcacaggggatgttcctccctcttggagcctcttcccacacccagaggcaagccccagccccccagccctgcccacctggacaggaaggcctggtgctgctggatggtatccagctcgtaggtggatgagtcgctcctcttgcggggcagttgccttttggggtcctcagtgccgttgctgcgggggatgtcgacgttgcttcggctcaggtgccgactgctctccaggctggagccaccactactgccaccaccaccactgctgccaccaccgccaccgccgccaccgccaccaccgcagcagtgtgctgcattcatcaggatgcccggggacagcaggtcattgtcctggaacggccccgtggaggctcactgccaggtggccgctggcctgaccccttctccagtgtcctggaagctgcctcctccctcctaaccccaggccaagcggccactgtccagccggcctcttgccaaaccagaggggagggccccattcccttctgtcctcccacccaccagccaccctggacctcattggtctacaggccgttttccactatgcagcagaggcagggaagcagagaggggtcgcccatcccacctcctaggaaccagaccccactgcccgcagtgcagaccctggttcaggctcatgaaaccacacgcattcctaggcttggccacatagcagctgctcccctgcccccatgtacctgccctgccgcctctgggcacctatgctgccaacctttgcccttcccatccttttttggaagggtgaggggaaagagattgtgagaaaaactgctacagctctttcagggcccaggcactttccttgactctttggccagaatgtgctgggcttcctcagctcccctgcacccccaacccctccacagcccctgtcctggaggtgagctctggcagcagggttgggggtcaggggcttggaaaatgtttgttgaatgaacagagcttaactgggtagagtccaagccagatggactcaggaagtgctgccagcattctgcttggtggacacagcctggggccaggtgcaggaacaggcagggcagccaccctgggggcgtgcaggaggcttcaggccttggggactgtctgggcccccacttgggtacctgcatgctgaccacgctgccccggcggctgctgctctgactctcagacaccggctggttactgtagcacagggcatcaaatgccaggatgcccccgacgcagtccccaatcaggcagaccttgggagagaggggccagaggcctgagccattcacccgctcgctggactataggctggggaggccgtcaccttccccctgaggccagcccgccctacagggtcttccatcctcctcccctccccaacttccccgggactcacctgcccattgaaggtcatgccctcctgggacttgatgaagtccccataggcaaggttggctcgctgaatcactgtggcaactgcctcctggtactggggggaggaggtggccagcagggggagggcagccaggggaatgtggtcctgactgctggacagacagccttcgtcatggctgtaggggctgaggctggggagagg

SEQ ID NO: 59143 - DNA, 1819 bp, Homo sapiens
tttggggtctcaaactcctgaccccaagtgatccgcctgcctcggcctcccaaagttctgggattacaggcatgagccactacgcccagacatgctcaactaattaaaaaattttcttttgtagagaatggagtctcactatgttgcccaggcttgtctcaaactcttggcctcaagtaattctcctgtctcaaccacccagagctttggcattacaggctggtacaggttcctttttctttttcttttcttttctttttttcctttcctttcctttttttttttttttttttgagacagagtctcactctgtctcccaggctggagtgcagtggcgagatctcagctcactgcaacctctgcctcccaggctcaagtgattctcctgcctcagctgaccaagtagctgggattacaggcgtgtgccaccaagcttggctaatttttatattattagtagagaaagagttttgccatgttggccaggctgatctcaaactcttgaccccaagtgatccacctgcctcggcctcccaaagtgctgggattacaggaatgagccaccgtgcctggctggtacaagtttcttttgaggtgatgaaagtgctctggaattaggtagtggtgatggttgcacaactctgtgaatataccgagaacctttgaactgtacactttaagtgggtgaattatatggtgtatgaattatagctcaagtagctgtcaagttatttcaaaatcccgtgggtcaagggggcctgaggggtttgctgaagaatgttctgttgcttggcctggtgctggttacacaggcatattcactttttgcaagaccatcagggtagacacttatgaatcataaacttttctgtatatatacaacacttgaataaaaagtgaaaaagaattaggaatgaaactgggaaagaaaagtctgcaggctgctcagagcaccccacctttagaacaccaggccgatgagggccctgccactcagccatctccctgacacagctccagcacaccactatgagctgactcttgccaggcagcagggtctctgagaatgagcaagcgctcctctctccctccaggaaagccgcaagccccatcagccaaatagttaaagctgaaataaccccaaatagcaaaatcccccacccagtggagggcctgtgcagccctcacccagaggagttcacagaaagtagaagaaagagatgtcattgtccaggctggtctgctttgggaagaatcatccctgctccagacttggagtacgtggaagacctaccccaaagagaacaactatcatgtgattagaagacatgaggggaggccttcactcagcctcaggggggtcagggaaagtgacctgcaggggagctgggaggtggggaggcactcaccaggcaggggtggacaggacagatatgctgggtagggaggcaggtgacagagctgaaggtctgtgtctagagggagccctggaagcgtgtggactcagttgcctgggtgtagcctgcgaggcaggaagtggcagggaagggcctgggagctaggcagaagccatatcacaaaagtttttttatttttttatttttgtttgtttatttgttttgagacagatgagacagagtctggctctgtcacccaggctggagtgctatggcatgatctcggctcactgcaacctccgcctcccaggttcaagtgattctcccacctcagcctcccgaatagctgggattatagtcacgcgccaccacacccagctaatttttgtatttttagtagagatggggtttcaccatgttga

SEQ ID NO: 59144 - DNA, 2119 bp, Homo sapiens
cacacacacccctcctacaaaagctctgacaggagccacagtggagaagccaggtgctgcctgagggttccataaccagagggacctgacagcagctcccaagcgtgcttgtccaggagggttccatgcctaggacgcccttcaccctgccttgtctcctcccgatcctgtctgttgcccgcagaactttgtgcatccctcaactcagtttacttccagcttccaggtctgtgagatcccgtgtgccctgtctgcctgctcgtgagccatagctcctccatcgccactctccagccacatggctgcttgctttgctaggaaatcactatgttagctctccattccagctgctgccatgcccaggaagcacccattccccaggccagggaacagctgctccctcactccctggcatcaaccaggtctgggcacaaatgccatgccctccctgtcccttctacagtgtagatttcctctcctgcccagttcagtcccattgccacactttgcaatgatctgatttgtgtacttgaagactgcctccctccatcccagcacaggtgacaggagggcagggaacttgtctgtcttatttgttgccataatcccagtagataatcctagaatggtgcctgcacaaaagagaaaaagataacacctttcatttgtctctccattcacagcaggtgctaggcagccagggcctggcacttagtaggtactcaagaagggtaattggcaaatgttcacaaaaaaaccctctgcaggcagataacgctgccgccaagcagccaaagtgctaattacaaactgctctgttagctgttccttagcgcagctaagattctccaagaatagtgcacgctccctgccatgtccctgtttcttgacagcgtctgtgactcagacttttcatggagccagacttgccctcctcaagagcatgtgcagggcataaacgtcaaacaggacaactggatgttgctgcccatggtgtgggctgggggtgggggtatctgaagtcatctcagccctttctgatgggcaggtttgggagagacaagctgggccctgaatgagatatggcaatgccaggcagcccaaatgcccttagtataactaccacctcctctcagacacactcagtgcagctcagtttataaacactctgccacaacaatctcgctggaaactcaatgctcagaagcagtcagggcaagatgggaacacaaaagcccagagggactgagtcatttgacaaggccatacagtgagtcagggcagaatggtaccagactctgtatctcctgggctgtgacccaggactgatctactgtactcttaggtgagcaggaaacccaggcgtcttaggtcaccaataaccaggtccaaatgcttaactcagaagggagcaagcaggcagagccagaggacctagaggacaacgaaaggcccagccagtgtccttaggggatgtgaggacaggcacattcacgtgtctgtacaacttcacccaggccttgctccacagcattgtgagcggtgtggcctttacagtccagcctcccagggctgccagaaacacaacatgcctggaaagtttcccaggtaactggctcttctttacagagctattagcttcccttcatcatgccataaaatcctccagccgatgacagatctcatccttctccagggagggaaacagggaagaaacgaaacacaaaggaaaaaaaccactggtcaaatttggaaagccccatgggcacataacttgggcagaaaaggcatcagagatagctgggttgctgcattcagttgcacaggctatgcactgtccaactccaagcgatgccattctcatgtactacaatatgaatgacactcccttgagttaggaagtgcagggaaaggaccttgcatgattttgcgcaatgtcttcaatatcctcaaggcccacccctcgctgacaccttgtcctaggcctctcagttctcagaaacttctcattgatacccctcttgcaggaggaaatgaccaaggttggggaggagtcaaggcaaagggtttggcatctatttcgtgagccacttgactggctgggctgaaatcaagcact

SEQ ID NO: 59145 - DNA, 579 bp, Homo sapiens
agtttgaagacacacacacacacacacacacacttgcaagatgttagtgaaagcacgacgaaaagaaatagagtggcacctttttatgatgtgttcatactccaccagccaatgtcctgcctctgcctctccctggggttctttcctgtggtgttaatctcacctctgctccacctggatcctagaacactgcccagtcccaagcccagttgggcttccttgagttcactcttaggagccctgcagcttgagttccaggctctggccctgaggtcaaggcagtggtgatgagtcacagctgcaggtcagtggaaagtgactgcagcgtcaggccaagcttggccacttacatgtctggcatgacagtggcctcagagtactcgtctgagaagaagagctatcacctgagcgctctggagaacttagccggagctttcaggcagtctgggagcctacatggaggcgtgtaggcttatgtctcatgtccacgttgcccgggagacaaaatccttttctatttagagctgccccaaaatgttctgcaccagcttctcactgcggtggcttcaccttagcata

SEQ ID NO: 59146 - DNA, 3456 bp, Homo sapiens
tatgtgccagtggcttcagagagttctggaggaaagacccaagagccggagcagctatgagggctggctgctgggaagagatggagttgggtgcggaggaaggcacaggtgttctaacaaagggactctgagaagcaggaactacggtgtagaggtaggcggtaagttcctagggaggccctgcagcaactgaggggcccctgctcctcctcctccttctccctgccaagtagagcagcctggcttgcatctgtctgctcccctccggtgcacctgggaccctgatgcttgctgcttcccatttcaacaaatccagggagacaggttcctgagtccccagactccctcccagacaggcagccaggtggaagggaaagtttggggtccagcgcctgcacttctcatctctccgtccttagatctgatacttgcaactgagccttggtttactcatctgtaaagggaggtggtaatacgtccagtgagggggtagaacactatgcctggcaaccaagatgtgttctgtcacccacaggaatactaaaaatatctaacccctgggcactgctgctggctgtggggctgggggaatcctggaggtgcctgtggacagcattgcccacttagctccagaaatcccagggaagggacaataagggggacggggcaggggcagaggctatttaccagcaaaaaaaagtacagcactcttgctcttggggctagatgtatctaggatttcagaatatcctgaactttagacaggtaaagctgcatatctcagcagcatccaataaacaaatacattgaactctctgcagtgaaagacatgaatatagaatacataaagactataaatagcctcacttggactataaatagcctcacctcagttcaggaaaaattttgctgccaaatgagttacaaaaaagtgtctggttttcagtgtgctggattttggaattgaggataaggaattgtggatctgcacatcaatgttttcaccacatatctgtgtgaaccaactgcatatcacccctgcttcaccccactaccaatgcaggacagatgaggggtgacatgtgctctgcctctaaaactcaccaggccctgtgaccttggggaacacagtccaaagagatgagtcacacacgaaagcaaatgtgcacacacacacaaacagcaatgcctataaatatattcataacacaggcctgcgggcacataggtccacaaggacgcagagcccagctctgctgacggaacctgtgttgccccagggcccgctgacccctgctcagggcaaggcctgtgtttccaggcctgtgactgggcaagcaagggtaggcaggaatgaggaacacggcagggcttggtggttgagagcttcctcatctctgcagtgtggagaaggggcaggtatgccaggcagacctggctctggtaccagcactgccactgcccagccggtggccttagataggtggccttgggcaggtggcctgcgcccctggctgggctgcatttcttcacctgcaaagtctgagtgaaacaggcctcttgggcttggtgagaggcacacaggagcccccagggcttggcacacagctggtgcttaggaagtgcttgctgactctgttctgtgacgttgcttaaatgcataatatttaaaagagggggctaaaataagtggccccttcagtcccagaagcgtctccctctcccccagggctctctttggaggcagagccccttgtgggtctctgtcctacaccagggctctctggtcagaatgcagatgagacctactggatgctctggctgccaagagcagcccccacgagaccaggctccaggtctggaaggaaaagcctagagcagggacccctggaggaggggtcacagcattgcaggcagaactcaggctttgacatcagaatggtgctctgatcacacagctccacccctcacttggtcttaaggaagttacttaaactctctgagcctcagttcttcattttataggtgaaggtatgtggaccttcattttataggtatgtggacctagtccaataccacacacacctcatagggtagtaaggggaataaattaacagacaatcaatgtaaagcacccagcacacaacacccaagcaacagcagcagccgctattattactataatgatgatggtgatggtgatggtgatgctggggatcagccctgctaaagaactgtgtccccacactcaaaacagtcaggactaggggaaacaaatcattgatatcattttgtcactatgcattattgccagccttcccagggttggggccgttgctcactgtttcgaccctcccagcaacgctgccagcaggcagacagacgcactctccccactccaaattggaaaatggaaaccaagagagcgacagggacttggtcaaggtcatcgggcaagtcagtagcagggaagggatgagaactcctcattctgggcccagggtgacaccaaaccgatcccaaccagcaccccaaggcctgcagcccacaggaggctctcagccaccacggggcacaggtatgtgcaggagcatcaagacctgggctgggggtggcacagggcaggggagctgaggggagtagggaaccaagacatctttcaactggcccaagcccatcgcgcacagtctggctcctctatctttggcggggagcctggggctatttcgggaagctctgcgcacagcccgccacttccctgccaggctgactgggtcaaaaacaaaacgagcccagcaacacccctgtgtcaacagggtgggaagtgaggaggcactgaacagccccaaatacaacagcaggaacaggagaaaatcagggaaggttgtgggggtaagcacatcaccctcaccctgcaaaaaaaagctagtgggaaacaaacaacacaatgaatcagatgcagcaggacacagggagtgactagctctggggccagaccacgttcacattcaagccttgtctttgagcaagtcctttacctgctccaggcctcagtgtacccatttgtggaccaccacccaccttggagggttgagtgggattaaatgaggtgacagtgaggcactgggcacctgagatgtcctcagcctgggcctgccatgccctgctcacccttcagagccttgctcagagtctcccattgggacagctgagctacagcccccattctgcaggcacttgccacccacagccgctggaggcccctggacggctgcacaaggccctgtccatccttgtgcaactgcagtgctgagcctggagcagctgcctcatcggtctgtgaggtcaagctcaaggggccacccagaaggctttccgagagcatccaaaaaaccagaagaaagggtgaagaggtccccgatggcatccagggttcccccatagccctccagtcac

SEQ ID NO: 59147 - DNA, 1841 bp, Homo sapiens
aaaaaaaaaaaaaggaaaaaaatgcagattcctatgcgctgctcccagacctgctaaatcagaacctctgtgtgagaggcctcagaacctgcgttttaaacacatctcctgaggttatcaggaagccctccagagaatgaaacacggggcctggtacaatctcccctgcagacagatggagagactggagacaggacagggattgctgcaggccacgcagcaaagaaaaggccagagtccacacctctcctgggcttgctggggtccctataggcctggaatcagatggccagagtcctctgtgctcaaagagcccttcccccaggtgaagcttcctcgccttccaggccccctggaagccttcccaagccccgtgggccgagtcagcaccccgggcaccttgcgcccactttccttttggcatttatcagactgcactgtagccacatgtttgccttggagctcagggcccgagccttgttcaaagttgtgtccccagggctcggccacagcagttgcttaataaaggtaggtacccagcaaatatttgttagataaaagattttaattccaaactctgtcccagaacagttgtctgaccttgggcaggtgacccaacttccaggccccttcctggaacagattctggtcatctgccctgaccgtttcccaaggtgacagtgaaaagccagatgcaatgcactcaggaagctgcccagcagtggggctctgcacccggtgctcatatgacaagcaggggctcactgagtgactggcaaggagctaagagtccccaggttggcaagacccagccaggagagtctgctgataagatacagcccagggacagacgagtccagaggttctactagccttgagcctggggcaagaggtcgccatgccctggcccctagcccagctctcttcactgctcttggggcttaaatcatgccctaagcccatgtccactgtggggagcagggactgggccctgaaagctatcagactgcaaacagaagatcacatcaagtggtggtaacaagggcctgggagctgaagcaggtccctggcctgtgtgggccttagtgtcccagctatagtgaaggggtttgagctggaccgtatccaagggccccaggaccgtgtgggcaatggcaccgctgtcacagctgctgtcatcagcaccctcagggcctcatggcaggcattcatgttggtgtgggcatcagggaaggtctgctcctctggacagaggcctcctagaacacccaggccgggcagcccagaggaacatgacacacgctgagtctgggaagcaggcgatgtcccccctcccagctccactggctgccctgaggagcagagctgcccatgggatgggctccctatgagacaggatgctcctcggtgtgccacttcctcaagccaggcagtaacagcttacacaggccaggcctcttccaaggaggagctggggagcttaggcctgccccccatgccttctaaataaccccacaggaccaaccggttcttcagaccaggctagttgtgggggcagccctaagggccccacatcaacatgccccttcgcgcatctgcccaactcagagaatgccgtgacgtgtgactcatgttggggccacatggaagggatgtcaccgagtcaccaggtcagcccttcctagctgcaaacagggggatgcagggaaggaggccagcagagagagggagttgaactccgttctgcctccaggagcctatccagctggcccagctcagtgtgattccaaggaactcaggaaagctgccctgggtctgcctggctcagtgtccccatctag

SEQ ID NO: 59148 - DNA, 1754 bp, Homo sapiens
cttttaaagtctgatacatcaaagtccctgaattaatttttaataaataaaaaagtcataatctaagaagcaccatcccacacacccccctcccccatcaagggtcagctctgagctgactctgggaagccagcttaatcgggccaagtatggctcttaatagagaaccagatccattccacagatgggagagacaaggctgagagatgtcaggtgcccaagcacagaaatcaggccctgagatgaacctagagttgtggcatgcaccgtagagtgctacatgtggaactgagtccttgatttcgaggggcacctgtctggagagatgcaaacaggtagatccaggagctgaggagtaactaagtaggtgtgagctagcgccatctgcgtgacccagatgggggctcctgggcaggacctgggcttctcttcctcttttgctccctggcagcacctggtatagggtcagcacacagtgctgacatcccctttgcttcaaaaagcccaccccctacaacacagacaaacctcaaaaacatgatgctgagcaaaagaagccagacacaaaaggccacatattgcaagactctgttcctatgaaacatctagaagacgcaaatccatagagacaaagagtacggcagaggctactgggggtgaggaaaagggttgggagttgttagttaatgggtgcagtttctgtttgggatgataaaaaaaattctggaaatggataggggtgatggttacacacattctaaatgtacttatgccaatgaactatacgcataaaagtggttaacacagaaaattttatgttatgtatattttaccacaataaaaaaaaatacaaggagaaaaaagcccactctccaaaatgcaacttgaagatacaggatggccaataactccacagggacaatggtgggaccctctgcaaactgcccccagacagactcaatgcttaaagcacagcgcagaggctcacagggcctgtcttgtcatgtatgaacaccagggaccttcagagaagggctctttgtgtgagccagcatgactaagccaggatgccctgtctccctggcggccagccagatgccacagggcaggcaggggctgagaagtctctgtggacacctccctggaaggcacctcctggtctcggcattcactgcacccttttcctgaaatgcacttcccgatattccgtaacctgcttcctacgtttatttaggttttcacagggaggtcctctctgaccatctacagttagaaaaataccgggaaggttgctggagccaggcaaggtagccgtgagcaagaacaggaaagccagggccccaacactatgacatgccagcaccttcctgctccctggctacagaaaagcagcttgcagggggcatcaggtcctggctccatcatttaccagcttgggggccttggctagttccttcaaccctctaaacctcggttttctcttctacaaaatgggggtgaagacagtgtttgtctcttgggcttttctgaggactacaatgagatgatgtatagtaagtgtttagcatatggctgggacatggtcaaaggtcggtaaatggtaatgatacatggattataatggaagtacaacattaatcccttaatgctggccaggaggtgtgggtcagcgatcctgaagacaggggaaggggccagtcgggccagaccacaaccacaactactcttctcagcatgtgaattaactgattgaa

SEQ ID NO: 59149 - DNA, 3400 bp, Homo sapiens
ctcactgatgaatctgtgcttagaacaacacctggcacatgagtggtgttcaaaacctctgttgatggctttagaagtgagaatgatgggtggaaggtagcgactggaagtggaggggtgtgggggtggcaggagggtggtgtggggcttttgagaattggtgaaagaagaaaaagcttgaataaatgaacagaaataagttaaaatgataatcaaagatcttccctgctccccgcaaaatatccccaggcccagagagttttatagctgatgttagcaaactttcgagaagttcagaaaaaaagtttactctttgttggggggagagggacaaataaaacaaaaaacaggcacatcttcatgaacaagatgccatctgagtaggccctaaagtaagatttgaagccacgacagcaacaacttggaatcccccagggaaccttgtgtatgtctcctttgcactcatgttgctgcctccagaaatgcccttctccaccttgcctctggtctcagccctctgtcccccttactaaacctgctctatcactctggacatccaagcacacagtgagcactgcataaatgttagctgctgttgggcttacttgcttacatgtccgagtccccggctaatttgtatccccagtgcctgacaccatagcaggtatacaaaaaatgatagaggaatgaacaaggcacacaaaaagcctagcaaaagctacatatttactctaaaaaaagctttcgggcacagctgctgtaggcatgcaaaccaaggcatccaggctgcgcagccccgaacccaccctcaaactcttggcctcgtgaaattaggcaacaggggccctaggtgagccagagggcactgaactttgcctcaaaattagcgcttcctgatatgagcaaggaggtgacagcagccagaaatcgctaccctccctgcacccaatgaagctgatagaaagctctgggtcactcaaggctctaaaatgtaacatttgtctggctgtttacttcccctttatgcagctcaactacttagatccttcttcctactagtgggagatggatcccagtggtgagaaaaaagcaaaccaagtcctagagtctcaggggtctttaaagctgatccgagggaagacaaagatgaataaagatggaggaggaagagaacagaatttttcctcccatactcacacaaaaaagatctcgaatacccatgcttcatccccaactatcactactcatgcaaacaaagccagagaaacccctggattagctactgctctaagaactgactgtgtctttctccctcatccatcaatcccctatcagccttcaaactcaggtcaaaattccatggagcaggaaagcaggtaagacctggattctgagtgtgacaaaccaccatcctctgtgaaaaggccttgctgtgagccaacaagaccacaagcatgagtcagagccaacaaatggacatcttttgcagccagtagagagacagtgagctttgcccatgaacaaagatgactcagtggagccgcagaaaggaaatcaacatttatggagtattattcttggagttatctacagctgtataacaaattaacccaaaacttagtttaaaacaagaaaaatttattatttcatgctgcttctgtggatcaggaagctgagagtggcttggctgagtgtttcagggtcttccatggggtcacagtcaagatgttgaccagggctgcagtcatctgaaggtttggctgaggctgatagagtcatttctaagtcaactcatgtacgtgactgataagttagtacatggtttttggcaagaggtctgtctcacttcctcaccacatttctgaacctttccagagagcttgagtgtcctcacaagatggtggctggtttcccagagaaagtgatccaagagaaaggacagcagaaaccacattttctttgtttagagacagagtctctgccacccagctggagtgcagtggcacaatctcggctcactgaaacctccacctctcaggttcaagtgattctcctggctcagcctcccaagtatctgggactacaggcacaggtgccaacacacctggctaaatttttttttttttttgtatttttagtagagataggttttcaccatgctggccaggctggtctagaactcctgacctcaagtgatccacttggctcggcctcccaaagtgctgggattacaggcgtgagccaccacgcccagcccacgctgtcttttatggggccttggaattcacaatctgtcatttccaacaccctataagatacacaggtagcccgattcagtatgggaagggacttcacaggggtatgactatggggatgggagactgaagccagcctggaggtggccggcacagccacattgtggtcttcctaacccttgatgtagaccatctcctttcaacctcaagacagcccttgaaggcaggcattttcattttacagacataggttcctgcgtacccgcactgacctgagcctcttgtccagcctccttggggcagagagaacgaattggtggtgagccatgtagtgagaatatagttgcaggaatccaggaggaaggaggctcaggaaaagtggtgcaggattcagccactcacacggttaccaccttgctaccagggccaggccacccagccactggtggccttacagaaacagcaaggagcatctgctctctcggttctgccaccttgcccctcccgaggtgcctggcttcacagcaggattgccgtcctgcagccagttcattaggtggccccctgtgcaaggtgcctaagcgatctgtggctgcaggtgccacctcatggggttcgcaatttatagtcactcagaggcagaggacacaggtgaagaaggcgtcagtcccaccagctaccaaagctgccttgtctcgcaggaaaacatgactgaggcttatcaatttcccccatttcattctcaccaccactgacagggaagaagaactgattaagtccataaatctaatttctccacctagggctggatggttctcaaggacggttattcctcctctgcacaggcctggggtgggggtgctgagtgagggtcatggaattgagacagaagttggtatcaccacccccaggaccaaatccatttccctatggcacaaaggcagagaggtgcatttgagcactacaagcactagggtcagctttgctgatattttggaagaggcaatgacattatgactcccagatgggccacactgatacacactggaaagcaccttcccgctgtcacccagagcatataggagcctggcctgagtttctacacagaatatgtgtagaaacacatttttgggctgcctcatgat

SEQ ID NO: 59150 - DNA, 544 bp, Homo sapiens
agaaccaaggattggctctggggtggcccagcagaaagctgagcagggcagttaattttaataaaaggactccagtctggcaccatggctcacgcctgtaatcccaacactttgggaggcccaggcaggaggatggcttgaggccgagtatgagaccagcctaggcaacatagtgaaaccttatctctattttttcaaaacaaacaaaaaggactccatcctctggaaagcattgccacactgcagcctcaaacaggattactaaatcgctgtttgaaaagacaaagcaagattaaacaaatacttaactgccctcatcctcatcccaggtctgtcatcagtcaggctaatctagtcttgctgggttcccagatcggcccaaaaggctcctcaaggctttatcttctcctcaaagcagggcctcaggccagacatggctggctccccaggttcggcctgcggacctgcggcctcctctagcagagccacctctgcctttgccatgccctctcctaacccatcctaggtctccgaaagagtgagg

SEQ ID NO: 59151 - DNA, 1840 bp, Homo sapiens
ccttgaaataatcatctgtaatcaacagagtctggccgctgcagtggagccaccccctgctcctgagccccttcctcctgccactcggcagcccctccagagccaacctcccactcccctcaacctgaagtactgactctgggggccagccctgggagggagaacaagcaaaagattcagcccctatcccaaactctgaggatggagctagaggccacagaagacaggctgttgcagcccaggagagactgctcttccatggctttaatacctccaaccctgagaccagaagccacaagacaccaacattcagttggtttgtgaatgactgtgaggaacctggagtctatggaaggacacagagccaggaggcctgggccagagcccaacaccaccagaaccccctgggcagaggcatccccacccacactcttaggatcagccccctcatctcagggacaaagctggggatcccagtgagaggcccctcaggctgggctcggaggctgcggctggcccagtgcagcaggcctggggatgctatgtggctgtgagaaaggcctggttaggggccacatggacacaaagcatcgtcaaacactccaggtgtcactgggccatggcagctgcttctcttgtggcactgctggcttggccaacagagccaggtgacacatttcaggaatacttgtcttatttgagcctcaccagtacagggctggctgtagacttaaaaggggctgaccaaggtgacaggtctgccagccagaggaatggaactcaagtggtgcaggggatcccagaacaccaggaagccagtccaaggctctcagagagctcaggcaggctcctgggaggtgactccggctgacctcggaaaggccccatgtcttcacccagcaggctgaagcggagcccagccaaggcctgtgatcctgtgcttcctgccaggcttgtcctccggcgcatcaggctcacccacaatgccatggaagtctccatcatctgctctgccccaggaaagcggacttagtcctctggggacgttacccaaatagctgcctccaactctggccataaagccaggaacttgggaagctggtaattggagaaactcttctcctcccccacaggaccataaattaccgtcctccatctgcacagatgcatcaaaggcccagacagccttctccgaaaccaagcacaggcagtggggtggggtccctccacctcctagaagcagctcccaggtggggccgagggcagggaaggccaggttcccatctaagaatcgaaggccttggactgaccgacctcctggctctgaccccacgtctgactcatagttgggaacaaacatcacatctacccccagggcaagactgcagccacacaacctctcctttcttcactctatttatcagtacaccctcgcagaaccacagacacgtgaaaatatttatatgatcagattaacttctgggcttcgtggcgcactgaagcaagcatgtttatccttccctcatacaacactttttctttggtcacttctttttcggggcactggggctcacagcacggcagtgcgtccacattagggtggctgctggggatccaagactctccactccaccatccttgcacagcaggctgattcagggcttggaacgtggtgagggggcccaggggaatgggctgctcccctggggagtcggttatctctgctccagaccctggcttttggcagtagccaagcttgctggacagtcgcccctgtggtgacagggagagctaagcaaatcagaaccgatggccctgtgctgggcacagatcccgcttg

SEQ ID NO: 59152 - DNA, 1984 bp, Homo sapiens
aaaaaaaaaaaattagggtttttttttttttttttttttttgagatggagtctcgcactgtcacccaggctggagcgcagtggcgtgatctcggctcactgcaagctccgcctctcaggttcacgccattctcctgtctcagcctccggagtagctgggactacaggcacccgccaccacgcccagctaattttttgtatttttagtagagacagggtttcactgtgttagccaggatggtctcaatcttctgaccttgtgatccgcctgcctcggcctcccaaagtgctgggattacaggcttgagccaccatgcccagcctaggctctaccttttaatcctgtgaccctcatatccctaaagaatcagaaagaagatctaaaaaccaagcagacccttcagtgagttgaatataactgctaagggttctgcagggattgatgcatatccttgggtaagcttgggaattcttgccctattaacctctcactcttgccctactattctccacaatccagtctggcaagcaagctgactacaactcccaccatttagaagagggccaacttgcagatcagaccaccaagcttcaggcgaaaagctgtcacaaagctggagggctttagtcctaggagaactgcacactgacccctctggtggtcatgcaaaccactatggttaaaataaggcagaaaattaaaagtagcaaaaccacactgagtgagtaaagaaaaagaactagggaggagggaggatgacttaggaagtatggccagcatgatgggttcagcctgtgggacagctggcagacacacatccatccaccccttccgtggcctccgagaacagcctgattcatgacattggaacttcagcttcatcatggtagccccagtcagctgaatgactcagcaatccctcaaagactgaattatctctagggttctctgttgattgaaagagaggcaagaattgcctttgagaaagatcaggataatgactgggaaaatgtgatgaagcttgcatgaatgacagcagtgatgaagcagtgtctgttctctggtttccagcaggagcaaaagatttacttccaacaaccaggctctgttcactggggtctcgtccaaacactgccctcagcatggtggtctaggggatgccagggcaagggaccacaaagctacagggaatttctgagagccctgcccttggagaatgcacgaatggttcatccctcctcaagtcacatccatcatccaggatgagttgagcttgaaataatggacttccaggctctgtgacaacgacttaatggtgcacaaatgtgttcaaaacattctggaagagtcctcagaataaccccactgagagatgctgaacaccctgcatcacgccacttacaccgctgccctccatttcctgggagtccaggtcgcaggggacccaggaggtgctggcagctgcctgaactgtccgggtgttactcttgtttctaaccagaaaataaggtcactggcgtgttgatgcccaagcaaacaggtgttagaggtgctcctacccatcaaattcaacaatggtttccactgacgcatagaaaaacaatggtgtttgcctacttattttgcaacaggctgccatactgtcttattctaattaattttgagtttgtctactttgaaaacctaagacaacggctgtatccactcaaaacattcattttgcaacctcctatctgagagttatgccctgcctctttttctttctttttttttttttttttgagacggagtctcgctctgtcgcccaggctggagtgcagtggcgtgatctcggctcacggcaacctctgcctcccgggttcacgccattctcctgcctcagcctcccaagtagctgggactacaggcgcccgccaccacgcctggctaattttttgtatttttagtagagacggggtttcaccgcgttagccaggatggtatc

SEQ ID NO: 59153 - DNA, 4391 bp, Homo sapiens
atcacaaggtcaggagatggagaccatcctggctaacacagtgaaaccctgtctctactaaaaacacaaaaaaattagctgggtgtggtggcgggcgcctgtagtcccagctactcaggaggctgaggcagaagaatggcatgaacccgggaggcggagcttgcaatgaggcgagatcgtgccactgcactccagcctgggcgacaatgagagattacctctcaaaaaaaaaaaaaaacaacagacaactgcacatctctgccttctttcctgctctgtccaaagcctcacctggtgcctctctttttccactgggcttccagagacccttcctgtcctctcccacacaccacatctgctggaatctactgcattttctctctgcatctgaggccttaacatggccagaagcttagaatctttctgggttattctaagcacctaggcaagactatagtgagagtaggaataaactggcaatccaccacctggagagaagggaggcccagccctgagacctcattgtttgctttctggggaatccctgtccatcccagaggccaagtagtccacttctacttttccaggtatgacttattatcaccccttccccacagaccacctcccccaagttttctttcatccagagatttaattaaatccctctttcaaatttagaaccaagttaggcaacctgaggaaacctaaaaagggataactcagtgtcccctggcaccccacaggctggctgggacacccaggtcctgggagctaaatcaagaggacagcaacgcaggtctgactctagatggtctgagaagttcaagggatgtgtctctatctagatcaagaaccaggttcagctgctctgaacatgcccccttaggcccccggggaacgcaggccctataactcctgctaaggggacctgagtcagaggttcccacactgggaccacctgcatcacctcttaatcctcttagcccagtggccacaggcccttctgctccttcagcccagaacagcccagagacagcaaggaaagtgggcacccccagaggacacagccaccagttccagcctcctcctccccaacctggcttcctgttgccctattcatgaggtcagctctgggcccctgctccttctttaatgagtcagagaacaaggaaaagagcaaaaatgagcaggctcagggaaagatggagactaagctggctctggctggaggtgagcgaggcccctcctccaggacaagccgctaggaactgtgctctttttaaaaaaatcccctgccccaccccctaacagaaaggaggccataaacagggatctgcttgaccagctgtcacccagccagtctgaacgttgttctcccttaaagggagaaaaaggcactgactctcaagtaagactcctaaaccccccaggaccacaccccagaggcctagctagaccccactcctgctctctaacctccagcctacaggtgcatggctggacaacttcacaagtaggtccaaatttggcctcaaagtcacatagacagatgtgatcccagagcatgtaatcctgtcttggtgaatctgctctaagtccatgcatccctttggcctctttgaaaaggaaaagctacagaacaaacagaagaggaattctgttttcctcttggaaaaaagaaaagggaaaaaaaaaaaccccatacaaacccaaattgaaaggtactttgtactgcttagactcaactagatcaggaaatactgatggattttttaaaacaacagcacaggctgtgtaacagaacatgaccaaacacaagcatgaacatgagggatcaggtctagagtccagccagcagttaactccctgtgtggtgaggcctaagtcatgacatctctgagtcttagggtccccatctgtgagacacaaaaaatgaaagcactgagggccataccatgacttctctgagcctcagtttcctcacctgtaaaatgggcacagcaacatttgtgagagtcctgtgaagcacaatgggcagaagtatgccatgcactgcggtgtcttagacaaaaggtgggtaagcgggaaaggcccctcccctctgcacctccagccactgcctctgcaagaacaatccacagacgctggatcactaccatgccactgggcctggcaccagcaactcaaacacaaatagctaagatccccccagcctgagaagcagctgggatacgccagggatgcctctggtttggaggcttccctggagaaagaagagcagccgtctcctggagagggaagagcagccgtctcctggagcaggaatcttaagcaccagaaaagcccataacacagagtcgacgaggctgggtatggtataggagccactggcctgaaccctgcaagcaccagtcctgcagctcccaggccaccaagacaaacctgagtgagctgcacgtcccagattttatgagccggcctccagctcactagctgtgtccttgagtcttaatcccgctccactgccaacaccccacacccagccctgtgatctcagggtttcagggaaatggaaagtcattcccctttgtggaaaggtcaaacccttggactcggttttttccagtgctccttctggctctcctatttgtttgattctaaattcctttatcccccctgctggaaagtcagacagaacattcctcaggaaagagaacttttagtgggggtgtggtggggaggaataattgaagtaaaatgaaaaatgggtgaaatcaggtactataaaatcttggtattcaaagagtgcacgacaaattgcaccggtcagcagtcactaccgtgaactcacaatgctctggtgagtcacccaaggctgggaactgaagtcaaactaatactctctatcacagtacaggacaggagctcagctgcatactaatggcaagaatccgctaaatgcatcccttgctactcccagcagcaaatgcataagctatttcacactcaaatataaattagtgagctattttccttgctgggttaatacaaatcgtgctctggaccaattaagtaagccacttcaaaactttgcttcagcgtattggaaaatgtcccgcttaggggaagaatgaagtctcgagtgatgcatgcccaactgatggcgaaataggtgagagtgctttcagaattcttgaggattttgttattaatggtgttttagtgttgggttcttaaacacatcaaacaaatttcctttaaactagtagttcctgactgccatggggaaggctgcaggcctcccacctcccagatggttcaaccacaataaacgtttggcctgtcagatgcacaacactgatgaactaattgaaatatgctgcaacaagcaaacccaaaataaatgtaaaataattgtttccttacacgataacccgctgaagtgcctccacgtctggccacccctgctgattgaatgttccccctgctccgtgagcctcacttatgtgtggttttcaaaggatttaaatgcttttttccagtgtgattacccacatgggaaaaattctaattgcaaaaaatgttgagtttttctccctcttatgaaaaaaaaaaaaaagcaagtgaaaagtcaactgttataaagtaccaaggaaagcacttaaatgggcccttcagtgtgagaggaagaatgtcctcctgttctccagagcaccgtcgccaagccagtgttaagcacgcatccacacctgtggggaagccctgcctctcagacaacctcacgccactgatgaaagctgggaatagccacctatttctaccctgacacacccatccctatccccctcccccctccctcgatccctccctccaaggggctgtctagagagacagcagagggtggagccagcagcacccataacaagctctcccactggctcaccacctcatgcaggacactggtgcccagtgagccctccctagggggctgggaagcccaagggcctgattctaatcccaggaggacaacagaagcaaagtgcacagccctgctccacagcacagcctgtgagtcagacttggaagggaagccccccagctgccaaaagagaaaattcaggccctccccaggagccacctctcaaaaggggaaataaacagctctgcagaggagaaacagtaataatccgtatgacgtacgtacgaactcttaagagggcacacaacaggcaaaagacttgggaaagcttcctctgagagagcccaggcataagaaggccacaatttgaggcatgggggccccaggaaccccccatcttggcctgaaacacctccgtaagaggattattcctttgggagaaggattggtctcagctcctaagaaaggccaa

SEQ ID NO: 59154 - DNA, 2858 bp, Homo sapiens
atcttcagggcagaggatgtactgtcctgttcacttggcaagccactccttacaagaaaaacagcccttcctaactcattgtgtttctctctgcagtgggagagggctggaagtccattccaaccacagaatacagtcccttcatggaaggaaagtaatttaacagcaacagtccaggaatcagacaagctatggtcccagaggcaagcgttggaggggccttctgctccacggagacactgactccacgcagggtactgaccagggcaggagaccagagatgaatcaactccagcccgggagctcaccgtccagcaggggagataaggcagatggaaaagtaactataaaataaggcagacggtgataagagttacacaggagatacagatagcaggcagtgggagttcagagcagagaggagtctgggggatggatgttaggggagattcagatgaaggggagcacttactgccttccctccagaagtggggggtctatcctagcagctctggtcactcccaggtggaggccggggagagagctggttgtggacaaagacagatgttccagtgaggtctcctttgaagaatcccgactctgggtgggggaggcaggtaggccggggtgtttggagaggcacccagcccacacttcagtgggagggagaggagtgcaggatgtctctgcaggagcaagtcggtggaaaggggacaagcctggaggacttgccttgaaatgacatttgcaccgcgcgcactatgttcacctggagtggccgtttgggatttcttgcggggaggcagtgcacactggggcgggggacactgaactttccctctccccaaggccccccgatcagccctgccacggataagaaaggattcggggtgggaagaagacagagccggcaccccattaccacacgaagggggcactgaggatggagacgggccacaccccaaccctgggcccccgacaagcagaggccacggcccgggcctggggacgttcagctggaggcgggaagcagagaaggcgggccgggggctcacctccgcttcctcccgatagccccttcctcgccctggcaccggcactgcccacgcctgccccccgaccgctatgacacttgtccctggcgggggtcccccacgcggtcgcgaccgacggaaattcggaaatcagcgtttcgggcacggatccagggccggcgactcactgaggccaggctcgggcggtctcccgagcggggctcccgtacgccacaccctcctccctgcccgggtctccgctccctcctccagcccccggcgggctggaggctcggcgggcgggcgggccggggcctctctgggagccgccgcccagatccccaggtccccggccagcgcccggcactgcgggactcaccgcgggcctgcggagcggccgcccggacgcactcaccccgctcggcgcggccgcgggctctgtcctcttcggggccccggctgggccgccgccacctcacgccgcctcacggggagcgcccgccccgcggccccggcccggccggctgcgccccgcgcgcccccgccgcctgctggccccgggcgagcggcagagccccggcgggcattgctcccgagcgtcgcaggcgggcggcggcggcgcacgtgctggcgggcggctctcgctgaggcggccgcgagctgagaaggaagcgccgggcgggcggccggggccggctggacagctctacgccgcggcgccgcggtgccccgcgcaccccagcggccgctgctgcccgcgcgcgccgggccgggctcgcattccctcagtggcggcggcgcctcctcaggccgcgcgggggagcggcggcggcggcggcgggggcgcgtccctgcggagtctcggcccggccccgccgcctccgccggaagaaacctctccgactcgggcagcccgcctggttcctcagacctgccgcggcgaccccgctcctccccggctcgcccgtgtcctcagggcccgggactggactcgggggcggcggcgcggatccccgccccgggctcctcgcccaccgtccgcagcagccgagcgcactcgggggcgggaaccggccgacttgcggccactgtgactcttaaaacagcctcattttaaaaaatgaagtttcttaggagcgaaatggtaaaccagggagggcagagcgcagcgggcagctcaccgaagcccagccccgggcgcggtgctcgccacacggtgggtccgcgctctcccctcaggacgcccgggccgcggcccagggaacggcagagccgggagcgcagccgtcccggtccccacctcagggagtagctggaagaggatcacgaacagtttaatccggatgatctggcacgacagggctctccaatgggaagagcccccggtgggggagcgcctggtgacattccttaaaaacatgaggtgtttgttaggttgagccagggtggacttgtttggcaaaatctgaagtcatggaactaaagagagcacacctaaaacttagtgatgtgtgacccatccctacttgtcaccttataaggctgaggagacggcggtgctcccctggaggagagaggacaagctaaaattaaggcggcctagatgactccagatgaagccggggaggccgagcccctgacagctgctcacctcctggggtcacggcagaacccaactgaacgggccaggaaggccatcgttcccgactcgcctccaggtgcccctgaccatgaccacgcagaggaggaccaaggcgtaccaccatcacctagaacgcttcagctccttccctccaccaagaggtgccctaggatccatccaga

SEQ ID NO: 59155 - DNA, 1874 bp, Homo sapiens
accacattataatgataaaaaatgcttgatgaagaaaaatatgggagtttataatgaattcattctggctccctgtttacaatcggcattcaaggtgattttcaagagggttatttttagaaagcaggttactaatttatttactaagagacactgcttgggagatgtaaccgcaaagacgctggcaggatgactaaggggtctgagaaagcaagcatagtggaaaaggagagaaatgtattggtgacctggacctgtgaaaaaacacagtattaaagacactacttgccttatctacagatgctcagtaaccaagaaagaagaggaaatgttatatctcacttcatgaataccaaatgcctatcacagccttctgatgtgtgcaagtaagatggactgacaggaatttttcaaatatccttaggaatgccatgtaaggccaggagcagtggttcacgcctgtaatcacaacactttgtgtttacactttgtgttgtgttgtggaggacaaggcgggtggaccacttgaagccaggagttcgagaccaacctggccaacatggtgaaactccgtctctgttaaaaatattaaaattagccgggggtgctggagggcacctgtaattctaggtacttgagaggctgaggcaggatgatagcttgaaccctggagatggagtttgcagtgagctgagattacgcactgcactccagcctgggcaaaagagtgagactctgtctcactgtctcaaaaaaaaaaaaaaaaaaaaaagaatgccatgtaagcctttttcataatcggaatgtaagattcaactggctttgtacaaaaggtacatgttatgccagaactgtgataaattattaactaggacattcaattctctatgaaacggggctgaagtagcagtaaaatagcaagtttacagagctaaaacttttaatttcattacctaaatattttaattttaacgaaggtaatataaatggggaaaagatatctatatccatctatctcaaacaaggaaatactcactatttgaggtgtcctctttctctgtctgtgtcccccaatttttaaatatttttccctcatcaagttcttttaaagctctcatgatcggcgtgtctgaagtctctctttgcttttttatcaacaagcttgttgatgaacttccaggtgaagaatccttttccagaggtgaacggtgccttaaacaataattttaagacatacagtgctatggactaaatgtctgtatcttgccccccgcccccacaccaaacatacatgttgaagccctaatcttcaatgtgatggtgtgtggaggtggggtctttacgaggtaattagggttggatgaggtcatgagggtgaagcctccaagatgggattaatgcccttatgaaaaagggaaagaggcaggagcgctctctctgtgcacacacaccaaggaaaggccatgtgaggacataaccaggaagagggccctcaccaaacactcagcaccctgatcttgcacttccagcctccagaggtagagaaagaaatgtgtgttgtttatgccacccagtctacggtaatttgttataacagtccaagctaaaacacacactttactggggttgttaggggaataacagagttgacaattatactccacaatgagcatgctttgcaatgcaaataaattaaacctgcatacagtgctttcccatccttctagtcctacacttagaggaacagcatctgcacagcaccctggagtaagcggctgaggctgctcacgcaggctcggggctcgggctggccagagccatctgaagtgggagaggatctacatcttttgtttgtttttagacaaggtctcact

SEQ ID NO: 59156 - DNA, 2648 bp, Homo sapiens
accatttccttcagggacaggagtgaatgcaaagggtaaccggacctaactaaatggacttttccccagtggctcagcccatcacccacgacaaatggggcattgaaacagtcaaggactgccccttccaactggcaacagaaatacctggattccaatcaccatgctattacaccaggaaaacacaagctctccagggagatgaacctgcaaccccatctattatttcccctgctaaggtaatccggatccggatgcagatccagatggaaaaccactagaaattcaaagatgcttctccatttggggtggaggtgctggggggagggcagggaagtaagagggaaaaatccttaaacacccacaaatacaatgcaaaaaaaaatttttttaacttgatacagaatgaatataagagcagagcttttatatttcccagcaacaagatatgacgcttttggtgtccctaccccctagcaaaaaaagggagctggggaaaaggaacgattgatggttatgaaacatgaaagttaactgggcgctccgccttgacgggaggcttgggggagaggaagagatttcagatggggatgaggccagatcccgacattctgagctcacagtcagcccgcaatggctggtggcggctatcgggtcaaagtgggaaggagagggagaatctatgcagtcgcctaagctacggaaagcagggaggacggagaaaagccaccgctcctgcaactacaaccgcgattccaaaaggaaaccggggcaccttggcaaaaaatggggggaaaaattaaaaaaaccccacaaaccccccgcccctcaggaagagcgatctgcgattgggccgcgcgagtgtcactcaagggcgccgagtctagaaaaggcgcaccgcggccgggcagagctcccacacgccgaagggctccgagggggtcaggccaatcggcagccgtcaccccacaccccagcccatcaccacactcaaggggccgctaagacagtgtctcctaagtctcgtctcctgtccccagcggcctacagctccctgcaggctggtggccgcttacctggccgccgctcccgctgccgatgtcagggtcatgcaagcggcctctcgcgaccgttacccgagggagcgcgcgcgcgcccggcgtctctccagtgattggctgcccggaaggaggcggagacagcctcgcatggcgcgcgcgtccacctcgccgttccccctcgcgcagctccaaccaaagagagacatccaaccccgggggagtgacaagggggcgggattgctgtgaaactctcttctctgattggctctctgggagccagccgctgccacgagggaaagaagcttcagtttctcgcatgcgcagtgagtaaacatgagcctctggtagataagagaaaccgcgatcggagtacggcgcgtgcgcagatcagggatcgcgattgcgaatcctccgctgaggtgatttggatatccctagaacgttgagggcacgagtcgggtcctgagaccaggtaagcatctgcggagaagccaggtaaccctacggctgccgacgactgtcaaaggctccggagagaggactgcgagccgggacgcctgggtttttcccgacttgcgaccccgagtggcgcagccagtttacctgaggccgcgctggcggtggggtggggccggccgtgacacccgagctcagttttctcgggacctggtttacgctaggtgctgtgggtcggccctggggctgttcaggcactcagggcaggggagaggagagactaccgtcctggagataacggttccacggaggcccaaggcgaaacggaaggatcctcatgtacaaaactgagcggaatggagctgtgagcacgcatcaggtgctgtttcaggcctggcacgtagtagaggtcagcactgcccttgctaggcttttgcggagatactcgttttttttttaatagacgtggggtgggggggtctcactgtgttgcccaagctgatctcgaactcctggcctcaagcgatcctccttcctcggcctcccaaagtgctgggatcacaggcgcaagccacccagccctacttttgaaggaccaaagggaactcgctctcctccccgtgggaccccagcccatttcatgcgcactgtgcaggccacattcttcagcatagttaacctttaaggtctttccagctactcgatttacctccaggagttctggctcacagtaaagggacttccctggcactatcacttaggcctccacaacccaggaaatggatctgcccttggaataacagatctgccaggaggcgttacatctcattggagcttcctaagtatacctaccaatttttttttactttttttatttttgtgggggaggggggtaggggggacaaggtctctctctgtcacccaggctggagggcagtggcgcgatctcggctcactttaacctctgcctcccgggttcaagtgattcttctgcttcagcctcccgagtagccgggaataccggtgcccgccaccacatccggctaattttttgtatttttagtagagacggggttttgccatattggccaggctggtctcgaattcctgacctcaggtcatcctcctgcc

SEQ ID NO: 59157 - DNA, 2204 bp, Homo sapiens
gggggttacgaggtcaacgtttgcaaacaaggcccaaaactcgagcaggagagccagcgtggcaccggtgaccaacggggccactcctctccccgtcgagtccttccccccatcccgccccgcaacacaaccgccttttgggaagtctgtttccgaccaagtgtcagagaagaagggccccagtgaggtcacaaagcccggcacctacgaatccctcaatgttgtgcccactccccatggctccctcggtcccctgggctcagcccgaagctgcctgacaacttctggaggagtttcctgggagcgcccggctgcggccgcagccccaggaagcttgaggggagcccctcccggcttctgcatcgagggccttccagggccagcccttgggggctcccagatggggcgtccacgtgacccactgcccccacgcccgcgcgcgggccccagcagccccagagctgcgccaacttcgttcactccgcgctcaccttacgggggtccccgcgtgaccgcatggggtagcccctgctcccacgctcccggccgaggcccccgggcctccgagtacgctgcccgccggcgaccccatcctggtcccagtcccggcggccccgcgacctcagggcccccggcagcccggcagccccgcagccccgcagccccgcagccctccatccgcgcccgcccgcgcgggtcctggccctgcccgcagcgccccccgcccgggctgcttcacgaccccgctccccagggcggcggggccccgcgccccgctcccggcgcggcccgggccgctcccgactcccgccggcaggggccctcgccgagccgcccagaagccggaggaaaaaggagccgagaacaagcctcccccgccctcgccctcgcccgccgcgctccctgcgatccgcagccgccggcgcgggggtcaccccgggccgcccgccccgcacccccagccgaggccctcggcgtgcggggcgcaccagagaactttcgcggcgcgggctcgggaatcatggcggcggcagcgctgccccgggccgggaccctgagccccccgcccccggcctccgcgggcgccccgggcatccccgggccggggccgggcgcgcggacccccaacttggcggcgcttggggcgcgtcgcacgcggctcactcaccggcgttgagggcggcggcgggcatgtgcgcggccaagttcggtttgtaagacatccccccgggcggcgggcgcgccgggcgcggcggggccaggccgcgagggcggcggcggcggcggcgaggccgggcggtagcgctgcagccccgcgcccgtccgagcgcccgccgagcgcccgcgcactttttgttgtcggcggctcgggccgcgccggcaaatatggccgtccgcgccctgccgccgccgcagtctcacccaggccccgggtgcggcgcaggggcggccgcaaactttccgcggagccggcggggcggccggggccgggagggggcggcccggcgtcagggggcggctccgcctgcggccgcgccccgcgcctccgggtgcgctcggcgcccgcaacttgccaaagtttggggggctggggtcccggcggcgcctgaggcccgcgcgcgtccgggcggctgccccgcgcccggcgccccgggggtgtgctgggggccggtcccgcggcggctgcgggaggccagggcgaaccggaatccgaagagcactttcttccccttgatggtgggggcagggatggaaaattacctggagaaaatggtggcgagtggtgtatttaagcacgtagatcattccagacgcccaggtctggccaagccccaggattagaataaccgatgcttgacattgatttcaaataaatttcatgtctctgtctgtatgaagtggtttttaaccctttggggatccaagactcctttgagactgacaaaagcttagaggccttctccacccctcacccccctccccggaaaactcatccctgaatcgcacaatttcgtgcgtagactcactccagtatttaagggaagcacctactatgcgccactcactgttccaagcgctgaggatacaagaattgaacttggcaaagtttctaccccctggagtttacgggacaattttagatcctccttcgaccccacccccagcccatccttggatccgattgaaatgtaaccatccagtgt

SEQ ID NO: 59158 - DNA, 621 bp, Homo sapiens
ccaccacgcccggctacgagttgggttttaacagaagaggaccttgaatgctgaagcttcacagggcggccaaactaactcgctgatttttgcaagaccacagtgtaaaggtcggatgtccacctgaagaaggggtgggtgcaactctctgggtgctgcacacaccatgaccagcctgggcatgcagcaccccagctcccatccattcacactggttgcctttgtgaggtccattttgagagggctttcagaggcctttttaatgagaaaaaaaaatagctgttctacaaagaacctaagatacatacactcctatttatcaagatggctagtccagagcaaacattacatcataggccatgggggttgtcacttagctgcatgctaagaatcctcatatgctgctttgaaaacgccataaaaaactaagatgccctcatacacagaaaagaggagttgggccaacagcctgcgagagaagatccttcccaactctgccattcttactgcaggagggtttgtaatgcttccccacttcctcaggtccagcgactgcacctccaccactggagtgggggacacttccattgctgatggaagctgcctactgcttttaaaaac

SEQ ID NO: 59159 - DNA, 2898 bp, Homo sapiens
gaaaaattttggaaacaacttctttaaaagatgagagaaaatgttcccttgcttgcaaaattaatgtcccactcaagtcaccagtaggaaattctgctatcttctgtgcaacgatgatagctttccctacgcttatgaaaatcaattctgattgctagaaaatatggtggaaaatagaatccctctgtactgtcagctcgcagaattatctgaaagtgttaagtcaattcctgctagggcactccggatgacagttctctgcacccttctggatgactctttagaaaccatattccatccctaattctggctgtctagaatatatgaaacatttaactcaacataaaatgataatagccaactttcaaaggtcaaaggggaccagtttataaccttccctcaacacgtgttcagtacaaacttccgggtgcacttacaattggctgcgcaattcaatggataaaaacgttgctttatttgtctctcattttctggcccgttcttttcccacgtttctcaaccagcgactccccaaaacaaaagcctcccacagtaaaccgagcacgcacataaaaagagcttctctgtgcgaggatcaagttagtggtccgcaaacattaaccaaacagaagcacaaagcaggggtgggaaggggaggagctggatgccagggtcaggaaagaaacaatcagaagggtttaggaacatccaaatctcctcagcggttaaaccgaccccaaaccacttctgggaaaccaccggtatccactgctttggggaactctggatgctcgttatgccaaacgctctcaaagtaagcaaatccccaactgccgttcccctccatgggtaattcttagggtctgggaggtgagctcgcccgccgaggcagaactaagcgagtcgcctggagaggcgtgaagggagcctgcacgtgtcccccgcggcttccccaccgccccaagagcggggcatgtacgagaccgcgctgtggggttcagatttaggaaggacgaccgcgtcgcctgcctccctccctcgcccagagccgggagcaatgctggggcacgaaagaggacttgggaaggatccggtccttactttccccgcgggtcccggacccgcagcccccgggttgtgaggcggaagccaaaggggcgaacccagcggagccggcgtgcacagaccctgccccgcggtccaagaggggtgcctccggcccgggacagcggggctcccggagcccgaaagccccacgagcggcgacagcggggcccggcgctgacgaacagaggaagcgagtacaacggagccgccgtcgggaacatgcccccgagggccccggagcgcgcggccgcgaggagcggcaagcggcgagggaggccccaagccggggcgaggtggctgtccccccagcctggccccgcacggccccccgagggtgggagtgggaggctgtccgggagggggagtgtggaaggagaaaagggccaagggaaggacttactttccccgcgggacccggcgccagcacagctcctcccgggaggtgtgagtttgaaggaccagaggcgactggagcggaggcggcggtggcggcggcagcagcggcgtcctgctctgcctacctccccgccgccatcttgacgcccctcccccagcccccccgccccgccgggaggggcgggggaggggcaacggatgaggcgccgcgcgcacgcagcgccctcacgtgacttcctccctcctcccccacccgcctctctgcgcccctctccgccccgcctccctcctaggtgaaggaagatgatttcccccccatcttgaccaccccccagtcttcgccgccaaaaacggactccgccggctatcctcggcccggtaccagttgttggatccaagagaattccggaacccaaacggtccattaccgcggctctggggtgggcgaggggtgagggggccgggtttccgcgaagggggagggggaaggcgaaggccacctaggagagtcacgtgactactgtttccgccggcgctcacggagagctcgcggtaattccgtttccccgcccttttttccccgcggcctgtcgggaagaaggtccgcgtgccagggctatcgggaggtcggccggagggccgcgcgcatgcgccccgcgcctgctttcaaactccggttaggaagggcctggagctattttcagaacctgttagggtggggagctacggcccaggaagttacctagcagcgtttctgtcacttggaagatctcttcattacctagttagtcctagaaacaaaatgtttacatattcattgcttgttaggctcgctcaaagcactttattggcagtgaaaccgcaagtaacccggagccctcggcgcgaccacggctagaatcagagcctaaggcgtgtgagctcagccatcccacgtctgtcttcacgctcatacgcaagcccgacacaccggggctcccacttaatgaatactgaagagtagggctgtccctaccgcttctcacttccttgttttcatcttttcgttattattaagcgacctaacacaataaacatattaccttgttggtaacccttttgtaaagtcattctgaaagtgctgtttgactccgttgcttgggtaataagcacgcctgggtgattcttgccccctactggctgcgcatcctacaagcctagtgctgaaagcaaaccaagtagctggaacagttggaggttacagtgtgaactcttccagagacaaagtattcggggaaagaaaggaaaaagtaggcacagaaagaataggaaacttcagtgtttgtacacatagatatgtattatatatctatgtatacatttataaatatttttaaagtgctaactaatcgcttt

SEQ ID NO: 59160 - DNA, 800 bp, Homo sapiens
gggattacatgctattctccggcctcagcctcccgagtagctgggattacatgcatgcgataccacgcccggctaattttgtatttttagtagagactgggtttctctatattggtcaggctggtctcgaaccacggacctcaggtgatccgcccgcctcagcctcccaaagtgctgggattacaggcatgagccaccgcgcccggccaaaacctttcaaacctgagaatgaatggatcaaactgctggagaggtcggtgtgctggagttgctaaactgctgggagactcaggtttcccagctcttaagggaagatcgaggggtcaaaggtcgggttccggtcaagcccacagagaaccggaagtcccagatccggtcggctcggagcccagggctccagccgggctactcacgctccggaggcggagcttcagcagcgggagggggaggaatctggggcctcccaatggcagctcgggtgtcttccatcgcagccattcaacgtctggcgacggtcaaatttaaacacccctcccacctcctccgccgggacctgtcgggaaagcgtttgcagttattgcggcggctggacacgccccgccgccgaagaggcgggagaagggcggggcctttctccgagttggcctatcactacgggcagcctgcggagaggcgggaggcggcgccaatcggggcgagcagctggagcccggcggagcagttggctgagttgttgcaacttttttcgaaagctgggtttcccgggagatcccaggcggtgacagagtggagccatggct

SEQ ID NO: 59161 - DNA, 2196 bp, Homo sapiens
attataacccctggctctgtctccccagggcttcctaccggtcaagtacagcccttctgggtttgacacctggccccatcacttcctagttctgtggcccgggacaaacccctgcacatcccttgagtcacagtgtcaccattgtaagctgggatgccgacaggacctgcccccgtgggcgtgcggggaggattcaatgcctgtgaaactctcggtgggcacagcgccgggcacacccgagggcctggcctggcgcgttcaccgctgctgatttcgtctggcacagaccgggttcccaaaatatccgcagagccagcggaaaaaggagccgggcgggctggcgggagggcgggcgggagcctgggctgtcatgacggtgtttcccaccccttcctccgcgagtggctgaggccgcgcgagagggggcgcgcccgagccgggattcgccgcgcccgcccgcccgccctccggagcggcctggcggcgccgcccctaccagccccctccccgggccgggcgccggacggtgggcggctgcgagcgggcgggagggctgcggaggacgcgccgcctgcgcctccttcccttcgtgcctcgccccgggcggcccggggctgccgcggtgcgcgggtgccgggccctgcctcgccggccatgggggaagggggcgccgtggggcgccgccggcccttccccggggcgccgcggcggcgctggtggcggcggcgagggcgcggggcgcgccgccatgggcctggccgggctgcaggtgggtgtgtcgggcccggccgcgcggggggcgggcggcgcgcggggcctggccgggccgggcggcgggagggcgacgcgggctccggcccggccctcccggctgcgcgggcggctcaccagagccggggcctcgaaatatggctgcggcgggaggcgccgtcgcggcgcccggcccgggcggccccgctccccgccccgccgcgccctgagcgccccctcccccgcttcccccgggtccccttctccaggcaggaagatgtccaagccccgcgcggtggaggcggcggcggcggcggcggcggtggcagcgacggccccgggcccggagatggtggagcggaggggcccggggaggccccgcaccgacggggtaagcaggcaccctccccgcacccctgcggcgcgcccgccgggccggggccgcgagcacatgggcgaccccgggtacccgcccggggcgcccggccgggccgcttcctttgctgccgcctggctgggagtggcgcccacacggctccgccatgagcctggcggtgtttgacctcggaaaagtttgactgcgccttcgtggcgtctccgcagcccaagaccctacttccccggaggtggccgcggtcccaggctgtgcggggcctgcgcgggcccctcggagaggtcacgggtctcaccgcctcggtgttgaatggtccccgaggcggcgagggcccggcgttgcttctggggacgccctcctccgtctgtacttactcagaggaggggccccacgcccagaggcgcccgcagtgacctgaaccgccccaccgccccgtccactctcttactgacgcccaggtgcggcttgcgacaaagtggccgccccgaatgcgctggctgtggctcctgctcttcccagattccccagtcaccctgagagaagtcctcccgtcgcagccctggaggctgcggggctgcagtgatttgagaggggtcaggctccggcgctcatggggctctggctgtgctgacaggccctccagccgccctcagcaccaagtggttaatcaggttccccggggcgtgtttctgtgctgagtccctgcggctcctgccagggcagtgaactcctaaagatagcctagctcttcacatgcccaggtccttttgacctccctgttgcgggtaggctgtcttcttcctatatagaccttgggttgcagccgactctcctgctggccagctgtccccttagtgatttagagaccagcgcgtttaggaaacgtttcactggacctgggattctaaacctgccagtgctctcctgagacaatgggggctggcatcccctggtagcccagtttttgaaaaacggtgttgtctgattttcatcttttgtattcctcctcctcgtgaatgctctaggatcttcttcttcaagcctctttcaga

SEQ ID NO: 59162 - DNA, 1174 bp, Homo sapiens
ctgaggctgggggatcacttggagccaggagtttgagaccagcctgggcaacacagcgagatcccatctcttaaaaaaagaaaaaagagaaaagagaagagaaaagaaaaggaaggcgtctccctgccagtaggtgccctcctacgccccgcaggcgccgtgggcccggaaccctcgctcccacactcacctccccgctggccggagggctctgtctccgcagcccctccacctccttcctgaggtggtccctctccatcttcagctcctccagcgccaggctgccctcattcaccagcgcctccagcatctccaggacgcggacgactttgaactgcagctgcgtcacccgggggtcgctgcccagggccataagctcgcggcccaacaggtaggagatgtcatacacgtcctcggcggtcagctggaaggggctcttgcccagcgccccctcgggcccaacctcgtccctctcctcgtcctcctctccctcctcctcttcctcttctcgcacagggggctcctccatggccacccagacccccgccgacctcggagctgctgtcttggagtctcccaaaggttagacttcctcccggcacccaaaactttccgctgggcagagtccctacctgcccaatcagcgcggcccgggggtgggcccggggggatggtgcaaggggccgcgcacgcgactcttgggcctgcgccccggcgcaccgtccccgctgccagccacgctggagagtgcgctccaggatgtggtttggggcgcgaagggacaacggaaaaggaggcagccgagaagaggaacggggaagttcaggggtgacggcaatcgccccagcctgggaacagttgcagccccggggaggagccgccctgagccccgcccctggcgaccgctgccaggaggtgcgtttccgtggagacggagtttccaccgtgcaatccagagcggggtaaaaagaacgcaactttttcctttccaccctcgtgctttccagccgtagaatttgcatcgtaggtgatggaagatccgggtgtctctttgagggtgttttctggagcctgcggccaaacagaaagcagctgctgggggcagcgcgacagagtccccgaggcttgaggatctggaaaactcccaggcaaattgtcactagggcctggggcg

SEQ ID NO: 59163 - DNA, 1664 bp, Homo sapiens
tttttttttttttttataaagaaattggggccgggcgcgatggctcacgcctgtaatcccagcactttgggaggccgaggcgggcggatcacttgaggtcagaagttcgagaccagcctggccaacatggcaaaaccctgtctctactaaaaatacaaaaaatagccgggcgtggtggcgggcgccagtaatcccagctacgcgggaggctgaggcaggaaaatcacttgaacccgggaggcggaggttgcagtgagccgagttcgcaccactgcactccagcctgggcgacagagggagtctccgtctcaagaaaaaataataaataagaataaataaataataaagtaaaatgtcccaggtaactgcatattcgatagtctttctttcaacttagttgttgaattagcaatttttctcttaaaaaaatttttttttagcttattgtcttcggagatgataacaccctcgttgcgtgggagtaaaattttaaaggtaaaacaaacaggaaacgagcgtcggcggcgaatctgctgctaccaatgtaaaggtcaggccgaggccggcgcggagaatctgctgtcgcctgcagctgctcgcctgtctccgtcggaagggagcccaagctttgcagaggtgagtggaagcggcttggaaggagcgggccccacgccggagagaaggaagagggagtgcggcccagacgctgtgcccgcgcttgtgtggggcgccatgttgaaacctggcaaaggggacgacattctgggttgcgttgcggggagtggggacgagagctggattggaaggatggcgccttactccctgcggcccccagagaaggagaggggcgggggagcggcctcgagggttggcggccaggctgcaggctggatgggaaggataggcttttccacagaaacttaggtgtttgcctccgaggcccactgcgcatgccctggagggctctgtgggttccgccttcagttttgcttttcacaggaggggcaaagtcttttttttttttttttcctttttgagacagtcttgctctgtcgcccgggctggagtgcagtggtgcgatctcggttcactgcaacctccgcctcctgggttcaagcgattccactgcctcagcttcccgagtagctgagactacaggcgcccgccaccacgccctgctaattttttgtattttactggagacggggtttcaccatgttagccaggatggtctcgatctcctgtcctcgtgatccacccgcctcggcctcccaaagtgctgggattacagccgtcagccaccgtgcccggccaggaggggcagagtcttaccccgaagacccaggaaggagaggcttcatttatttttttgtttttccccagagacagggagtcgcccaggctggagagcggtggcgcgatctcggctcactgcagcgtcgacatttcgggtcaagcagtcctcccgcctcagcctctcaagtatctgggaccacaggcgcgaccccacgcccggagaattgattattgattgattgattgaaacggggtctcactttgttgcccaggctggtctcgaatttctgggctcaagcgatcctccagcctcggcctctcaaagtgctggtattacaggcgtgagccagcgcgtgcctggccaaaaa

SEQ ID NO: 59164 - DNA, 841 bp, Homo sapiens
aattcttctaaggtgggtcctattatgattaccatttgacaggtgaggaaataaagcacagagaggttaagtaacttacctaaagtcacacagctattaaacggtaaaggtgggattggaactccagagaacagctcttaatctctcgggtggtatctgccagccacccctggtcgggcaaaagaaggccagggcctccctccctccccacgtcgggtctcctctggtccggtccctgaacacacacacgtgcgcacccacagctgcccaatgcggaagagcccttgggtccccgcggtcccactgcccggacggacagaccgaggccgccgcccaccttctggtgcttgcgctccttctcgatgcggtccatcctctccaggcgcaggcggtccagctccaggcgcagctcgtccagctcgggcgcgacgtggtggcggctgaccagcacctccaggatctccaggacgcgcacgaccttgggcatgaggcgcgcgatggcctcgcagccgtgctggtcaatgacccgctcgaactcgtggcccacaagcgacgcgatgtcgtacacgtccatgacggtcagctcggccacgttcttctccagcgccgactcggccgccagcgccgacccccgctcctcctccatggccaccctcctggcctgtcccccgccccgcaaactcgtgcaactcccaaacttgccgctgtcgagggccgggccggccgggcccagcctgggccgcgggcgggcgcgctcagcgggcgctggggcgagggcgcagcgggcagcgggcggcgggcgcgggcgcgggcacgggcggcggcgcggggtgtgcgggcc

SEQ ID NO: 59165 - DNA, 715 bp, Homo sapiens
ggcggcagcggggagggcgcgcgcgtgcgcaggcccgcggcgcctcccaagttgggatccgagttgcgctcaatggagccgggccgggcgcctcggggcggtgcgggcctgaggggcggcagagcgcggggccggagaggaagggcggcccgcggctcctccgggaaactttggcggcggcggctgcgaggccgggtgatcgcttccccacagggaggccgcgcgccccgccccaatcccggcctggccaggggcgcgcccgctttccgccgcccgggggcgccccggggtacccccccaagcgccgactccgcggcctgcactccgggcccccctctccagccgccggacccgcggcgcccctcacccgtgccccggccgcccctcccccgcccggcgctgactcctcccaccacccggccgccgggaggggtccaggccgccccgggagagggggccgggggcgctggtctcgcgggacgattcgctgctccgggtagcggccccggccttggagagggatggaggggtcacgaggaggtccccgggctggggctcatcccaggaagagaacggggaccccccccggcccgcagacactccgcgcagacccggccaccaggcggacttgcagaggcgcccggagaggggccgacgtgtcgaggaatgctggatccccggagccccagggcgcgcctccccgagccacatccat

SEQ ID NO: 59166 - DNA, 510 bp, Homo sapiens
accgctcccagccaccatcttccattttaagagattctattccctttcttataaatcctgagtggttctattcccctaaactgtagctctttcctcctgagcacatgctggactccatttcccagcctcctttgctgctacggacagtcatgtgattgagttctgatcagtggaatgtgggcagatggaatacgcaccacttctaggtctggcccccgcccaaaaaactcttacatgatcttctactctctttcattcctcacttgccagagggatgcaatggctctaatggagaacactgaaattctcccttagggaatagtggagctactgaatcactgtgagaaaggcttaaggtcgactgtgcatgggactgtgatgcaagccagaaatgaacttttattgtgctgagccactgaaatgctgaggtcatggttatagcagctcacctaagtattagtcaggctaagcctagaatatgcttcagtaacagcctaccctcaaaacctg

SEQ ID NO: 59167 - DNA, 1550 bp, Homo sapiens
aaagagactccgtctcaaaaaacaaacaaacaaaaaacacaaaaattaaccaagcgtggtggctcacgcctgtaatcccagctactcgcgaggctgaggcacgagaatctctggaacccgggagacggaggttgcagtgagccgagatcgcgccactggactccagcctgggcgacagagcaagactccgtctcaaaaacgaaacaaaacaaaagaaaaaaaccttagtttcagcccgcacattccctcaactcctatcgctgcctgcaaatgtttcgccatcttcttggacaatcctaagagggcattgcagaggcttccggacactgtcgttttcctgggaagtccacaggaactttagcttggacgagaaaggactagggaaaaatttttggtccttcggagccgccgtccaggctcgggccgcgcagagtcgcttgtccctcggcggctgccgtgcctccctttacgtggcagctgcgggagcccgccaatccactgcgcccgcatcagcccccactggtggcgcaggcggaaggggcggagcttaggcggcggtggctgagaaggcagcggggcggcggcggcggcggcggcggcggctgtggaggccgcagtccgggtcctggcttcggcctcagccccaccatggtgacgcttgctgaactgctggtgcttctggccgctctcctggccacggtctcgggctatttcgttagcatcgacgcccatgctgaagagtgcttctttgagcgggtcacctcgggcaccaagatgggcctcatcttcgaggtggcggagggcggcttcctggacatcgacgtggaggtgcgggctagctgcccgcagctgaggcttggtcgcgtggccactcggggattggtggcacctgggaccggcgcggggcctgtgtggggagtgggcttggaagtcgctgtccgagtcctggagaagcccaggccgccaccccccgccccgccccggccacggcgacctcctaacggccccttttcccgcgacttgcctgggttccgggatcccttgggggctccttcggcatgcttggttgctttgggttttctccttgaacgacgggttcctgttggaacctctcgctgagctttgtgaatcaggcgccgcgtgtcagtccgggccccaaaggcgcttctcagtcacagttagctggtggcgggtctctatccagttagcacctgccttctttcgtgttacggattaatgctggaacgtggcacggaaacttttccaaaaaattgattaaaatcgattgaggattaaaaacctattgagtgctaggcatactttcgcgttgtgtttatttttcatagaagcaaccttaaggttctactctttacgcctccagctacctcgtttagtctcttctgccaaggagagatggggagttgggtcatgcgttttaggagtaagcagtgcagtgaagtatcaggagaagacaggagtttaagaaaccagcagtccctaaatctccactcatgttttgtaaaccaaaagaatgatgtgttgctagtttt

SEQ ID NO: 59168 - DNA, 520 bp, Homo sapiens
acccagtgaatctttaaggtttcttttaaaaatctttgcttctactttgggaggctgaggcaggaggatcagttgaggccaggagttcaagaccaacttgggcaacatagcaagaccctttctctacaaaaacagaaaaaattagtcaaatgggctggtgcatacctgtactcccagctactcaggaggctgaggtggcaggattgcttgagtacagttcaaggttgcagtgaactatgattgtgtcatggcattccagcctgggcaacagagcaaacaaaaaagtctttgctttggagtatgttgagttgcttggagacaaaagtatttagagtataggtgacccataggttacaatgacttcacttagaaattttcagctttatgatggtgcaaaagtgatgtgcattcagaagaaactgagcatcaagtacccatgcaaccattctgttttttactttcagtgcagtgttcactaacttgataaataaaatagaaaataataataaaatgcagttta

SEQ ID NO: 59169 - DNA, 1786 bp, Homo sapiens
gatcacgaggtcaggaaatcgagaccatcctggctaacacggtgaaaccccgtctctactaaaaatacaaaaaattagccgggcgtggtggagggcgcctgcagtcccaggtactcgggaggctgaggcaggagaagggcgtgaacccgggaggcggagcttgcagtgaaccgttatagcgcccagcctccagcctgggcaacagagcgagactccgtctcaaacaacaacaacaacaacaacaacaacaaaaacagctttctgagtgaagttgtatgtggacatgaatggcccaggcaaacagtgaacagaggaatgggacagtgttcttagttaggactctgaccctaacttccgggaaagtaaaccaacattcaggacgtaccggccatcggaccgcaacattcaggacgtaccggccatcagcgggtgcctgttttgcagggctgctaacccgggtccccgacacgtttctctgcccacggtagccagccccgctgtccttcggcctggacgcggtcctgtgctgccacctgcctccgaggggcagagaaagtgggagggccgggccagaatccctcccgccaaaactcctgcccggtgcggagaggcgcccggagcccagggcgctgtgcggagcgggtgtaactccccaggcctgccccgccgcctgcctccaccgtcccgcggacgcctttcctccctcccgcggcgtgggagccttcgccgcgctccggaactctgctgctccagcgaagttcccggccggccgctggagctgcgggaagcggaagtgctcgttgggggtgcacaaggcgcgttcgagcagcggcgaccgacgcggcgaaggagcgcgccatggagcatgtgacagagggctcctgggagtcgctgcctgtgccgctgcacccgcaggtgctgggcgcgctgcgggagctgggcttcccgtacatgacgccggtgcaggtatcggttccctggcgtgggggagtgaggctgggagaggggcaggcacccgctgcatcggacccacaggaggtgatcggacagatctgagccctggggcgctcatccctccagctggggctcttgccttgtctccagctgcccagactggcggaatgcggagctgcccggccagcgagccggcagaggggccgcgacccaccccgccctcgggtgctgtggtctcaagcctggttctcatcctggccctgctcgctgtagctgtgagacctcgggcaaatggcttaacctctccgtgcttcattttccttctctgtgaaatgacgaaaaaataacaccctccttatggggttgctgtggggactaaataaaccagtcggcacactatgggagctcagtaagggttaccgttgttatgcatctcttcaagaatatttcttgaggacctgctatgtgtcaggaactcttctaggctctggggagtttgcagtattggcatctgctcatagccttactttctagtgcaagagctagagaaaggataatttcagctgctggtaagtgttatgaaagaactaagacggttgtgatagtgtcgcgcgaggactgcagaggaggtgagatagggtgttaaggaaggcctctctgaggaggtgcattgagctgagacctcagtgattgagaaggagctggctctgaggtgactagggggagattattccactggagagaaataccagtgcacataaatgccctgcggcaggctgcaaatagtttgagcagcagaaaggaggcctttgtggctgaacatcaagagtag

SEQ ID NO: 59170 - DNA, 2174 bp, Homo sapiens
gctacttgggaggctgaggcaggagaatggcgtgaacccgggaggcggagcttgcagtgagccgagactgcgccactgcactccagcctgggtgacagagcgagactccgtctcaaaaaaaaaaaaaaaaaagctactggtgtgcaaggcctaaaaattaagcccgagtaaatgatgatgaaaagtcattctctcttcagcctctttggtcctaaaatctgagaggatcccagagtcaaccatcttgccaatttctcctgcacccctccagacagtctatgctaatacatgtctattcacatacacatatatgttacaaatattatacatggagttccacccactcccctttatttctttacatgaaaagtgtattagtttgcccttgtttttcacttaataaccatactagatgagcacatcaaatatgccttattcattctaattttaatgacagatccaacaaggcaggaaggagactggcactgggaaggagcgtatgtgtgggagggatgcctgcagatactgccagggcgcatccctgaaaacaagagcagcgcgagggatttagttgtgactctggaaacacaaccagcggagcagcctgaaattcaaaagaaatctcttcgggagctcagcctggatgtgagaggttggggggacccctgaacggcgctgctgtagcctagcagccctggcctgtcttgatttacccttgtcgtccatggcgtcctcctgctgcggagccccaggggacccgagccgcccgcgctgtctcgaacgggtccgccggccgcgccgcctgcgagccagtctgacagcgcgctgcacacctccgcaccccacttccggcgcacttccgtacccctcttccggcgcactccccgcactccacttccgcagattagggggctggcacgagtcacagcacctcgtgcgtcacttggcggcgccggacgttgggctgcgcaggatttgagacgctcccctgaccaccacttgctctgcgctgaggtgctgggacagccatggtttcagacggtgaggaccctgcagggcgggacttcgactccggggctcggctgtctcggtccggctacgactggccagatggaatgtgtcttttgggctggatagaatccgtttggtctttagaggagtagccaaggcattcagtcattcattcagtaaatagttttggatcgcctcctgtgtacaggcattattttctggattttagcagagatcgtgacagacaggggccttagtggaggttacagtctactgggtgaaacagatgacaataaataaaaataatttcggccgggtcgcaccccggtggattaggcctgtaatcccagcactttgggaggccgaggagggagaatcgcttgaagccgggagttcgagacctgcctgggcaacacagccagaccccatctctacaaaaaaaatgaaatattagccgggcgtggtagcgcgtgtctgtggtcccagctacgcgggaggctgaggcgggagaatcacttgagcccaggaattcgaggcttcagtgagctattatggcagtactgcacccagcatggccgacagggcatgacctcgtcaataaaaaattaaaaaataaattatttttcaaaggatgaaaagagctatgaagatgatgtaacagtacggtcctagttacaatagtacattgtgactaggattgaggaggagctgttttagataggggcctaggaaaagtgcaggatattgaaaccgacttgaatgattatgtgaagttctgggggaagtgcactttaagtgcatgggccctgtggcagattgagccaccaagttacactgagaagggagaaatggagagcttgcgggtagaggatggtggggagactcattcatacattaaactaccacatacagagtcagatgtcttgaagatttaaaaggaggctagagggatgagatcagagaaccagccagtttcaggtcatgcagggccttattggccgtgatagagaagttggcctttatttttaggtgcaatacaaagacattgtagagttttaagccagaaagtgttatgatctggtttgcaattttaaaagatcactgtggctgttgtgtggaaaatggactgtggggagcaagaatagagataggggagtcctttc

SEQ ID NO: 59171 - DNA, 1583 bp, Homo sapiens
tggtgaaaccccgtctctattaaaaatacaaaaaaattagctggacgcgggtggcgcgcgtctgtagtcacagcaactggggagtctgaggctggagaatcgcttgaacctgggagacggaggttgcagtgagccgagatcgcgctactgcactccagcctgtgggactgcgtgagattccgtttctctctctctctctctcacacacacacacacacacacacgcagcagcacagggtcgtgcactaggaacgggtgagcttcgcggcgtgcacactcggcgagactcctccaggaaagccggggagccgcgcgggatttagctctgcgtccagtccggcggagcgccagctgcagtggtcgtacccgccgggttcgcgctggttggccctgccgccacgtcgtgcggcgacaacctcgggcgtccattggtcggccggcggggggggcgggacgcgggggcggaaccggaaccggcagtggcttgggggcgggacctcgcggactgctgtggcggcagctggagcggcggccgcggtggcagaaccgggggcggccgctgcagtctggagccccatagtgcggggccgcggccaggccacaggaagagctcgaggcccgggccgcaccggctgagtgtgcgggcccgcgcggctcggagccgccgccgcccatcgagcccctccgggcgcgggtcggcccgccatggggtccctgttccggagcgagaccatgtgcctggcgcagctcttcctgcagtcgggcacggcctacgagtgcctcagcgccctgggcgagaaaggcctggtccagttccgagacgtgagtgtcgcccgggagacgcgggccgcacctgctctcctggcgcccccaatcccgcgcatcgctggggccctcccgcggggagcaccgaggaagggcgcgccccgtccccattgtccagacggggaagatgacaccccagctcagcggccaaagcttcccggagcgcggggctgactccagggtcgccggccgtctgtgtggtcggcggctgctctgccccagttagttaggatcgcccgtgtggtcttcatcagctccgggcaccgagctcagcgggagaacaaatcccacaaaggcctcttggagtccttttggaactttacgggggttaggggggcgcattaaccaaataaataggtcaaccagaaaaggtttgccataaagaagaaacggggtgatgtgaaggtgattcgggcgggaggtgagtgtgaagggattgtcgaggaagcctcccggagaaggtgatatttcagctgagacccaaatagaaaggagccagccgtggggaagatctggggagagggtccttgttggagggaacaggaggagcccagacagagccagaaatgggaaggagctggatgtcatctgcttgaggagagggatttttgtgttttggtcactgatgcttaatgctgtacataccattgtgtgtaaggacttaagaactcagtcattgtttgtcgagtggaagctgtctccccaacaagtaataataaacatttgtttgtccatttacttgtttattgtttgtctcc

SEQ ID NO: 59172 - DNA, 1287 bp, Homo sapiens
gagttttcacggctgaaaagacagtggtgttttccattgcgatccttcactactgaagagaggtaatcattgtgatgatgtcatgctcccagtactgtgacatgactgaagccaccgaggcatcctgtttaggctgaggagacccagccgggagatgcacataattcagagggagaaatggagttggtcccaagaggcttaattcagtatcagagatgctttagaaacatgaaggagcattcaagacagatccctaaaagggtcagcgtggcagatgaaaggagaaaggcagggcgtctgctgcagatgaataacgccgcctgctgagtaagggcactcaccccatcttagctgtgtgtcagccaggaatggagggcagctcatccagcccgtttggcaaaacgcttgcactttctgtgtcaaaagggcatacgctacaaattgtgtgctctttgtactgcagcagtccgtcctgaggcaaatccaattttgttcctaagcgttgctgagagccatccgcaatcttacagtatttgctcaaccaaaggcggcaaggccaggacattggtcttcttccctccttggagatgctgcccacagctgcagaaaatggggctccaactgactatcacttcagggcctggtcacggctgccagagggccagccccacccaggtgactttgcacagctctgctagtttttctccccacagaacgccagcagaagcaatgcaaatgggtacctcgagggtcaaagtcctgctgaataggttaccttgatcagggctcaaaggttaagccacacgtacagtttttcctatggcaaatccactaggtaaattaatttactgttcactctacttgttcagaaagttaatactcaaaaaaggcttttcattccaaatcctatagagataggctctgaagacgtggcaagacagcttcctggatggggaagcgcactgccgtcatttcctagtgtcaacgtgtctgaggaaggcccggcctcgccgagtatgctctccagcagcgtgaagacaaggggccctatcaacagctcaagccgaattccatcttcattccaaagtgctatcccttcctctcagggcattaatgtaacatgacgacataattctatccatggaccacctgacttgcccgagcacagtgttctttcacgttacttacatcatttgctcttgcaacccgcctctggggaaaagaggacactatcccatgaaaagagagaacataaaccaataaatgcatctaagccttgccgcttct

SEQ ID NO: 59173 - DNA, 2743 bp, Homo sapiens
actactgcaacctaagctacagagcgcggttatattttctctctggcagcctaattttccttagtggactagatcgtactgctaaataccaaaacttgaaatgaaacaatacaggtcagcatgaaaacctaagttagagaaactcactcgccgtagcagacggcagcccagtagccaagcctggagctctgctgcgtttgtgcattctgctccgtttcacgaatcacaggcaaatcgttactcagagtaaactaaagccgcatcaaagcttcaggaaggggctggcaaggtagtgtacttacggaaaggctaccaggacgggaggcgatacaacttgtcagggagggtctctaaggttccccgggtggtaacaagcatttaaaaaggcgatgtggattcagacggcctcctccccacagcatcccagacaaagccgggctaggccccggggcgctcctggtgcacctgcaatgcggatccctcgccctgcgatcccaccccggggcagacaggagcgccccgggaccggcctctcctcccccttggcactggggtgggcgcgcgccgcggccggtccgcaccctggactggagcccgggccggggagccccctccccagaaagggccggcagaccccgcgggggcgggcgcgggggtcgccgagcctcagggaccctctttccccgactccgccgtctcccgagttgccttcgcccggggccacccctgcccctgggggagctaacgtggctcccaagccccggaggtggggcaggaggaccccgtcccccgtctcccggcggggagggtttttaaagtcttcgccacgaactcccgtccctgcccggcccctccgcccctgcccggcccctccgcccccgccggcgctgccaggtgagcggggccggactcgacacaccccgggccccgcctcacctgcgggcgccgccgtcgcgttccttcaggcggctgccctcttaggctcggtcctcccggcgggcggcggtgggggcccgtggcccatgggctgggcggggcgcggcgggcggggctgcctgggctcgggcgctgcccgggccgggccgccgagggaggtcagtgggcaccgcccgcccggcgcatctcgcccgctcccaccccagcgctagccgcggtgcaccctgggagcggggccggcggcgaggcctggccgcgctgacccggcgggctaggcgccggcgcggcggcgggcctgtgtctgccgggctgggcgggggcggcgggccgatattcacttggcgaggcggggctacgcccccttccgcccggctgtggcggggcaggggcgaaggccgaggggaagggagggtcgggcccgcgggacgcaggcgcacagctcaggtgcggccgcactgcggttgccctgggtaacgcggcccgagggaggggggggcgcggggaggagcgagggaggcgagcgggagcgcgcgcgccgggcgctggggtgggggatggccgggcccgaccgggccggggctggggggcgggggcggaggcgggcggtgggggcgcgggccgggtggccgcgcatgcgtgcggcccccgctcccccggggcttccccggcctcgtgcgtgcgcacgcgcgctgtcccccggaggcgtctgggtgtgcggagcgcgcgcgcgcgcggctcggaggcgcacctgtgaggtgtccctgaggagagggaggtgggtgcgcggcgcccgcggcctggggcgctgactcccctcacttggagtgagttctcggcggccgggctgcagtctttctttctttcccggagggaggcgggggccgggggccagggagcgggctgggggtgggaaggaggtggagtggcttaaagaaaagaaaaacaacccatcccggaggatgggcctcgggatggcggggaaggtcagagcggctccgcgcagcctggcgggtcccgggctgagaagccgcccctcgggcctcgggcggtcggccgcgggcccgcagtgcgggggagcggggccggggggcgcagatggcggccggtgcgagcgagggctgggcagcgggcagggcgaggccgggcgaggcccctcgggagccggactcccgagccaggctccattgttgttggagccgagggaagggggagcgctgccgccctcgtcgcccgtggagccgcgtcttggagcccttccaggcgggtcccgggagaggcggtcatggccgcgccaggggaccggggagccgggcggctgcggaggagccggctgcatggggtgctgtgtgtttttcagggcgccctgcgtccggcagaggaggcgagcatcccgctcaggtgatgaggaacccctcgcgcacccagcgcagaaggctgctgccgccggacgcctccattgtttgaccacaacaagggccggattctcacccaggtaaaccggctgccggcgctgtccacttccctctgactcccgcctccgcaggcgttctcaccccttccaggactcgactgcagttttctcactgtccccggcttctcatgaactccgtataccccctcccagacattttcccgtccggatccatctctccgccacatcacctctcatttcccccagaactcagctcctttgtgaaacctttcttgccgaactctaacaactaaatctccccgggagcctgctccgaactgaactgttctggttgctagattgcttacgggctgtcttattgcaacaaaggagacc

SEQ ID NO: 59174 - DNA, 670 bp, Homo sapiens
tgactagatagtcaagaagggaaaagttatgggtgggaacagggagcagcagacacataggtataaaggcagggtttcaccttgaatggaggaagaaccctaattacagggagattacatcatcaggtgtttggaagcctctgcctgtgaaatgacattcttggcaaatgaatgaatgtgtcatgcactaattaaaataaaggaaataaggaaactaacattcatttagcctcagctatgctgtgggcactctgataggtactttcatgtttattatctttaattaccgcagcaaagtattgtagacattattatccatacatttgcagctcgatcagatcagccacagtcacatagcaggtggcagagcagaggcctatacccagtgatgtcattccagaggtcattttgtgagaggacttggctgaaggaaagctacagaatggatgcctgtgtcatccttgatcaccctgataacacatgcacttatccttctcagactttcttctcagactcagcagaaaacttggcatcattcccttgataacttttgttgcccttctctggacctaatttcatagtctttgtggtaatttcttgttaaagaaaaatcagacacagcttcttttgtcttttatcttttctccattaggagtcattaggctaagtc

SEQ ID NO: 59175 - DNA, 614 bp, Homo sapiens
catctgattgttatgtctcaaatcgctttcatttagagcaactcctcccaccttaccggctttttttccctcgtgtccttattgcaaaaaaaaaggggcagttgtgctgtagagtggctcaccttttgatattttgctacttgcttcctagtagttcctctgtcccttcagttctttccattaaaaattagctccagaggcttgattaggttttgcttcagtcttttgacaagaatgtcttcagagggtgctgggtgtttcccattgcaccacagcaggaggcacacgtgtctggttgttcctctttgagtcatgctaagatcgatccctggcttcaggtggtgacagcctggtcctggcagtgtcaagtcctggatcagccttccagccgcttttttcacccattgcttttcatggtttgaatcaggtgtttgatgaggagaatgcacatattagctggttgtttctttgtcttgaaagagagttcatagaggaaataggatagatgcttctctccatttaattaccaatttttagggtaaaaagttgggcccctagttaattccaattttgttcagtgccttgggtctctccatctctctgcctgcctgtct

SEQ ID NO: 59176 - DNA, 943 bp, Homo sapiens
ctccttcagacctgcaaatccaagagacacatctttggaagataagagagcttcttcaagaccaaaaaaggtttgtgttactgctgtcacatttatataaaattaattttggaatcaatagcagttttccagataaaagcattttcaatttatttatttatgtttctattacaggagacggcatgatacccatgtagggaattccccaaagcagggcttgccatacctggaccccgaggagcctgcttgctggaaaggctttcctgtctgatgtgcaggaggcagaatgccaaactgactcttcaaggggcaactgcaggggctcgagaccagccagcagtatctcatccttcgatacaggggatatactgtacagtcctttttctagaagtgagacatacaagattactctacaagaggaagattccaggggctcaaaaacgcaaaggtttgcactttgagagccccttggaatgttgacaactcaggatctaaaacaaagttctgtgttaatgagttacagaattcacgtggaagtcaatgtcactttataatcgataataatactgagtgaggaacactatgcaggaagaaaccttccgtagaaagacaggcagggaaaagcttaggctgaccttaaacttacctaatagagcaagcctgagatagactgccaaaatggccaaataagagactctatgaaataacagtcttgtaactgtagtaatcataaggaaattttctccttgaaatcacgataccaaataggaaaaatgatctacaagtgccccatgtgtagggaatttttctctgagagagcagatctttttatgcatcagaaaattcacacagctgagaagccccataaatgtgacaagtgtgataagggtttctttcatatatcagaacttcatattcattggagagaccatacaggagagaa

SEQ ID NO: 59177 - DNA, 621 bp, Homo sapiens
ttgagaaaggccagcagtttctctttataaatcactctcctctcctgaagacaaacggctttctcctccttcttgtgttcctttgtgatttttctccattttaatgctgccacggttacttcttttaacctggtctagctcgtctgaaaacattctggggggtgtccgtgtattatggggtaacttggaagttgctgctcataaatatgtttcaactgagggctccaaagccccctggggatggccctggccctgccttacgatcttgctggcccccatgtgccccagggcatgagacacggtcgataaacctattctgagtcatctcccagcacctagcacagttcttcgcataccacaggctctcaataaatatttgttgaaggaacaaattggcttgcagtgcctgacactgtagaaagaatcattgggagagtcccttgggtgccaccctggaaacacagctcacaaatctgggaccatctgtcaggctcctggaaggcccaggaaaaaaaaaaaaagccatccatttttcccaaaatagcacaaacaggatttcctggagggagcagagcgggggcgcaggctgtgtttggaaatggaaaatgcagccttgctcgc

SEQ ID NO: 59178 - DNA, 2840 bp, Homo sapiens
ccagagagttgggagagagaggaggggagctgttcgatgctggaaggcaaactggggctaggccaggctgggcgggcggccgagagcctggagagacaacctgttcctccagttgggcccagggggccccgagggacctgcttggctgagccgctctgtgtgggagccaggggcagaataggctggcttcctgagagaccagagaggtagcgctgggtgtcaagttcatgtgtgtccctgcgggagctgagctgcaagccaggctgtgcaagaaaggcatgcagggcctaacgccaggtgcaccgtccccacggggaatgaggccaggaaacggcacaggccctggccacaccaacgggctgagtgccagccgcgggaactgctggccggtggctccctttctcccaggacaggggcctgcgacctggctcagcaggacctggctggcaccgtgcagttccagccctgatcagatctgacgctggccaaagctgctggggcccctgacatggatacacagctccttcccgggctggcgccccaaacctgcaacgtctcccagagccacaccctgggccgcacactgtaccctggccccaggtagcccagccctggtcatggggcatcccagttccagcgagacatccctggcgtcatccccacaccgggttcaacgccccactggctttgcctccaaaacaaactcccgatgcgcccttccttccacctccacggccacctgtgcggttcaggcagcctctgtcgcctgccaagagctgcgctgtgacctcccgctgctgcccttgactcaacaacggccagacagagctttccaagatacaaatcagataacaagcacctccttccccttccgcaacacacgctcacttcaaatccctccagcagcccctgccacacctgagacaaaatccactgcccgctgtggcctgagaggccccacacaatccggtccccacttccctcactgtccacccgcccacccttccctggccacaaccacccccggcgactcctcacacaccccgagcgtgtttccacaccagggcctttccctgtgctgttccctctgcccgcaatgcccacccagagagctcccactgcggggctgcttcccactccacagggtccttcccggagccgctcttcactcaacccgttttgtttctcatggtggatgaacgactctaaaaccatcttgcttcgttacgtgttccctggtttaacatcctcctcactcaaaacaacagcagctccccagagcagagacttcctcttctccctacctaatccccgctctgccagcatggtgcctggggccttgggttttcaacaaatgtcctgacccagcagcctcggtggaccccggaggcagaggttgcagtgagcggagattgtgccactgcactccaacctggcgagagtgacactccgtctcaaacaaaaaaaaaaaaaaaaaaaagagaagggggatgtcacacccaaggcagcggggaggggacagctgatggtagctccagtcacccggatttgtccctgggctgtgctggtcaggaggtcggcctggtgtcctgctgccctcagacctttggagcagcctgccagcaagcgccggggctagcccagggtggggaacctctggggaagcagcccccaacacctgcaaggcacaacagcacctgctgcgtgccaggctgacctggagaagatgcctctttggggacacaggttcagaatttcttgggcctagtgggaagtggggcagagattgaagatccagagaacaagcaatcacgcccgcctgtctcctgaccttgagcttcacgtgatgacagtgaggtgtgcccggggcagtccctgtgacacagcggctcgggagtcacccccaaccctggctcctggtgaacccagagacctgggcctggagcaaggtcaggatgccagctggggagggcagcccttcctgcccaggccccagagctgctgccagccgggtgctgggccccatctgtgattccagaagctcctgcgtggactgattcacaccgaatcagaggctgggctgtagacatgtttttgcgtgttcacaatgcttttgaaaattttgagaagttgccagtgttgagaaaccagggaccagggggatttcacataagatggatttctggctttgctggaagaaccaccccaggcctgatttgccacggggtgactcttggccaaggccaatacgtgcccactttagagaaaacaagagttctccaatttgccgcagtccctaccattcccaactgcctccccctgctcaactgttccattcgtttactttgctttccctgccactgtggccatggggtttgcagcagctgctctagacacacaaacatcccttgcccgtcagtcccctgctgccccagccccactcagccactggtgtgcactcaccctccttgtcggcggggggtgccgggctcctgctcttgccccgggggctgctgccaggctgctgaggggcgtcgctctccggctgcaggttttgcggtggcggtggggctgggggagctggcttggtgggagctgcgtcctcccgggggggctcatggactttggtgacctgctgagggaagcaggcagaagtgagcattcacagagggtgtctgaaagtgacagggtcagggagagacatgcacgcgaccagcctggaaaccaaggcccgggaaagccagcgacatgctcaaggtcccaggtgcggcaagaaagggaggtcttagcacagagcacatggggaagcccacctcccagaaagcctggcccagctgccc

SEQ ID NO: 59179 - DNA, 1956 bp, Homo sapiens
gccatcagtcacttgcagaataaagtaacaaaggtgaaattgctgttatgatcttccaaaatgccagagggacagctgaaggagctgcactccagccccctcttggggtgacctctagggggtgtcccaaagcagatccaaaggagggcagctaatctctgagcgcccactgtggcccgtcattaactgagttattcttgcaataagccatccacgcccaccttacagatgagaaaactgaggcttgggggaggggactcccaaggccaggccctgccaaaaaagcacccaggcaccttctctgaagagtaagagaggggaaggcaggcaggctcggggttttgcaattgaagccactatctctggtcgtctgccaagaaaacacccaggcagagccacctcgaagaaagtgccagcgggccgaaggagaatgtgattttctctctcccaaagtcaccggggcggggggccagatgagagtcatcttgcgtccatccaggaacacagagctcccccactggggctgccaggcaggagggatgatactgggcgggcagccaggagcaggggtcgcctggggggcccgcccgtcccaccagcccttcccgggaggccctggctgccagggcctactctgacgcatctcgtccgcgtcctccagcgtccgcccggccctgcgcagtcgtggccggcagagggaggggtggcgggctgccggccaggacgaggtcagcaggctggccagagtccagcctcgttcactgagagggcaaagcaggccccaagggcgggggcctgggcctagtcgcacagggcgggacaaaccaggtgtcctgactcccagccgaggactcctgcacccgggggctgtgtgctggacactgggcaaggggtggacgtacgccaggcccagctcggggagggaggacacggccctgggcggggctgcaggggagaggacgggaggctgcaagtgccctgcggggcctcaggcctagcctgagtgttctggggacggacaggatgcaagctgatcccccggctccccagtccggggccagccacatggacccaaaatacagactctgggaggcagcttatcaatggggctgccccatgacctcagcggtcccccggcgaaggcagaaacatgtgtttctatgactctgtccccacagccagcaggagcggggcggggagccgtctgccctgaccccgctatccaggcacaatggccctggctgcctgcctccagggcagacccagccacaccatgaacactgttttccaagctgggactgtcgggcaagaagctcagggatttggtgccctcagaaacccgcaggccaggcctttgctcatcacagggtcagggtcaggccgtccacttctcacacgcatgggcgcggttcctgttggcagtggttcctggggaccctgagattttgttttgtggaacctatagagatccgggtgaacctcagttcctagggaatgtcctaggacttccccctttaacatggcccagggtgaaccccagggcagagacaagggccccgcatgaccctgcgggtctgattttcctccctcgcttgctctgcccaggaccattccaagggacttgggaggggagaaaacagaccacactgtagttgaaataaaatggcctgcctgccccaccagaaaacaattcctccagccatccagatgtgagcaggacgcagtctccgcgggtctgccctctgccaaccgagattggccctaacttgggtagccatctttggttctgggctggaggccttgaggcccaaagcatctgtgctgaaaatgggtaaaaggtggcattctcagggatgtggggtcacccaggccaggagcaaagacagaggccagaaaggaaagaacacacctcagagacatcaacacccaaacaggacgacactggggtcctccagg

SEQ ID NO: 59180 - DNA, 867 bp, Homo sapiens
gacaatggctcagagaggcaaagacacttgcccaagaccacacagctcatgagttgaggagctcagatttgaatgcaggccagcttcaaacatttcgtggctggaccatctctctgcaggcctgtgcagcctcaggtagaagagattaacagcagaaaacaaggcggggctgggccaaggctgaggcggacagagactgaggaacgtggaagccgagccccaggggcctgaattcacagatgggagaaaagggtaaccttcggccataaggagggggagggaaacctcgtagaagacactgatgccaagtgttacataactccgggacatgccccgcccgcccggccgccggatcctgcttcctgctgacgtcgcctgcggccacactcgggccagacctagtgcaaggcgggaggggacacccactgaccctctgcttccccactccttccttctctggccaagggtgacatgtcttcctgtactccagacagggctgggccagcagccagaggtggctgatactgcgttaggattcactgggatatgccctcctccctgggactgaaaggcacaggggaggggcaggaggtggaggtcaccaggttcagcggcacctctcctggtgagacctgcttgcttactgcagcgatggggagctcaccactacaccaagaacggctactgtcaagacggatggcctggcctgagccccacttcctgtagtgggtccctgcatctgctccgctttctctgcagcccgcgatatgagggtgctccttcaaggtcggccaggagcgagaaccaaccccacactcccaaatcactcattctcatccaggtcccaacctggatctcggggtcccc

SEQ ID NO: 59181 - DNA, 1983 bp, Homo sapiens
atgccccagggagcgggccgaagtgggccggcaggctgggcggccgcggtcggctctgcgaggctgctggttggcgtctgctggcggctcagctcagcctcacatccttctccgtcccacggtgagggagggagggagggagggagggagggagcgagggagggagggacgcggcgggcggaggctggctcgagaggggcgggcgggaggcagctcctcacaagtccgcctgcctgtggtggcccggggctcctccagcggccgctgccacctctgacgccgtccccaagccgctgtgggcgcgcgaggtgcccttccccgagggtggtgggtggcgggaagttgtcagtggtgcgtgtgggatgcccctgggccaggtatcaccggggcgcagcgtgccgagctcctccagcaccaatgtgcccagtgcggacgctcagcgagcaatgccggccagagcccacagacccccgggccgggcaaaatccaaggacccaggcccagcagggcagccgtgtcccccgcagccgggctcagctctgatcttcttgctgcctgacccagcgagacgcggcaggactgaatgtgacctccagacggaggctcgcggcgggcgggcaggcgggcgggggagcgtggcagaggcccaggttcacaaggggcgggccaacttggcactggctccccctccctctctccccatccgcggcggtggcggcgtcagcagtggtaagaacagatgagggttccagaaaaacagagcttctccacccccggcagacagggagcaaacagcttcttccgccatcatcccccgccgcccgtccccccaccctccgtgtcagttccacctgagctctgccccctgcctggcctgatgctgccgaggctgaccgagccctctgtcggggactgtgggtgggcagggctagcctcgcattccggagggatcccgggatttgaggagcctttgcagggtgcacatgagaccgccaaccatttaggggagggggaagggtttggggatttggggtccccaaagagccctctgctgctgggggggtctcgggaccacagctgcccctttcgtcctcctccgagagcccctgcagccgtgaaggaacactgtgggaaatgccggggagccacccagaaggttgaaagttaactgagctgaactttggatcctagattcaggtcacgaccgacttccctgactctgggatcattaacctgcttttccctttaactcccagcccttccatcctgccccctaaaaatctggggagcagaaggcgtctctggaatgtccctgcacccccagccctcgtcctggggcacgatgccaggggagggcaacaaacctcaaccacatcagggatctgggcctctccacctgagtcctgccctctgccctctgcaggggaggtctcagtgcacttttaaggatgccaaccccgtgaaatcactcctctgcttaaaatcttccagtgaccacatgaagctcttggaataaaatccaaaggccctagcacggcccaggtgacccttaggagccagctccatgaacccgcccagcctctctctgggtcactcgtgtgtgccccagggcctttgcaccagctgctcctgctgcctccacgggttttctcacagatgtgccttgtcttccctctggtcttggctcaagtgatggctcctcagagaagccttccttgcccgcccctccaaagtgacccccccccgtcgccctgccatcccagggtttgatcatcttcatagctttcaccgcctctgaaattagctccctcgtcccactgctcatcggcaggtgtccggggcctgctgagcaccctgggcatctctgccacccgtctgggtccctggtaaggagcttgcaaaggaagagggggctgtgcgtttagctctgcagggggccccgaaccctcccaaaagaggctggggtatcccccttgacatcca

SEQ ID NO: 59182 - DNA, 1552 bp, Homo sapiens
ctcagcaacctgaggctcctcctccatgggcccaggaggccagggcggggcctgcactgatctatctcccagatggaaggaagggagggagggaggaggggagcatggcagctggagcaaggggccaggcaggccagggccttgtgggcaaggagggagggcctccaccctgagtccacgcagttgcccacggaggtggagaccgaaggggtatggggcgggcagcgactcaccttcctctccaggaatgatgcgatcaggccaaagttcttgggatgctgcatgaacctgcgggacgagaagggtgggcgtgagacctggccgaggggggctttcctgcggggcagccgatcggctcccaggcgcctgccatccccactggccgggcctggcgggcaccgccccacttggagcaattaagcccaggggggtgtgggaagggctgctgcggcagacgggaggggtggggacccaggggtaagagagggcgttccttggagtgagtcactggctttagcgcctttgaaaatatatttgtttgtcctgctggaggcggcttccaggaaaaatgaggacacgacatgcagctctttggtggggttcccccccctttaaaatccacttttgtttctctctccagctggatctgggaagcagggcctcacccagcccacacagggtctgcttgggaacatggcagggccccaccagtggggtcatagctcaccaggctgctgggcctccccagaagagctgggagcagaggctctgagtgcccgtggggcagcaggagggggctggccagccaaggaggcggcaagcatggacttaagtcggagggcggtggcgggtcgctggcactgtcccaactggcttcctgcgtagccaggagaattactgggaaaccactgggcccaggctgaaatgtgagggccaaaggagcgggagcatggtgggggcggggatgtgggtcaaggcctgctccaccccaggggtgctgggtggagtccctggccccaggcccaggcgtcccggcgacgtgccacagccccacagccttcgcagggagagcagcggctggctgctagtgaggctggactgtgggctcccacggagggaggctgagtgagcaccagtgcccgacctgcctggccctccagatggctgggcaggaggccagcaggccccgcgcctgcttcccagccagacatccgaggatcctgaacagtctctgctctcttcccggtggaagcggcgcagtgaggaatggcaggcttccctggcctgggatcccacctcgggcggctggcaaggccggagccatcctaaggcccttctcttccaggtagggagagtcctttcctctccgctccctctccttgtcccagtgacatttccttccctgcaaacccctcccacggggtttccccaggcacagtgggggctcccaagagaccaggaatcaaacttgggaatctcctaggtcccctgttcccctccctcaatacctcacttgcacccctggaagacgtttattagaagtttcctatgc

SEQ ID NO: 59183 - DNA, 929 bp, Homo sapiens
cacgcgcccacctgccccagcctggcccaggcagtctccagggtctgggagccttagcccagggcagtactactccaccaaaggtctgcaacgttgccaactgcaacgaagtgggcacagaacatgacagcatgcagacctctggggttggcgtgaccctggcatccaagggcacaaccaactctgtctgaccctgccggactgggcctggctgagcccctgcgtctgtgcagtgggaccccatatcgatttgtgacaaactggaaatgaaacagaccggtccttcccatagggagtctgataagagctaatctaggccaagaggcagcacactagggcccaaggccaaggcagcagcgtccagtgtcacaggcacaggccacgcccactcccttacaccctggctgagctgctttcacaccatacgggccgcgaagggcggttgcatggcctgcaaagcctgaaatatttacagagaaggttgtgctcacccctgccctaggggcaaagcccaaagtgtacccttggggcaagacagaaaaagctactaaaggcgatgttgtaataatagcatcgtcatcattacattattgattatatcaaatgtctgcttactctgtccataccctgtgcgaaggactctgcacctaccaactaattggatcctcacaatcttaaaactatccttgctcaactgatagggaaactgaggcacgggacggtaaggccacttgccccctgtttcacagctaggacatcactggggcaggatgtaaatgcaagcaacctggctccagaaccggtgctatgaaccagtcttcaatactgcggcatagagaggttaagtaacttgcccaaggccacacagcagaaaagagtcacgctgggattcagactctgtgtccctgcttttaactgcattcctttag

SEQ ID NO: 59184 - DNA, 3885 bp, Homo sapiens
agctccttctcccgtcagtcccatgcttgtgtagaccccactgtgccccattttacagacgaggaaactgaggtctgcaaaggggaggcaacacgcccaaggtcacacagcatagagaggacggagccaggactcaaacccaggtctgtggcaaaggagcaacattgcctggaagcccagccccctcccttccccagcctgggctcagaggtccccaggagccattcccgccacctccctatggccgcggcgcacccagacctcaggacaaatcactccctcatccccccggtttgcaactaaaggctccttgtgagctcgggaagcccttccaactttccagtgtttatcccggctcctcgctgccaagtccctgggcaagcctgggccggtggcgctgatttcaaaccagacatgggcaccgagccaagcgccacctcggtggggagccgggcgccggggccgggctgcagcgctgcctgcacctggctctcccctgcctgagcccaccgcggagccccagggcagagcctcgggagcgcccacgatcacatgccctcctgaagtcaactccgggaacagaagccccctgagcccccaaggctcgccatgctcccccccagggacgccggatgtgcaccaaggagaggagcacagtgcccacccgggtcccctcccacgcgggccggccaagaagcctcaccccggcctgcccggccagcgcctccgagcgctcttttccgtgactgcagcaacttcgtccgatgagacagccctgcccaccatcccgctgagctcagggccgacaacactgcgctgccaggggagggtccagctgcccccattggctgacctgcggccggccactcagcccccagccctggccaccacctccagcgacagaactggggctctttccagatgaattcctcggcccccaatcagcgcccctgcatagagcctgcaggccacagccccccaccccagtctgcgcccacctcccccggccggggtgacccagccacactgcacctccctgcccactccaagcccggcgacttctcttacccgagcacatgaccaacctcgctcacgtcagctccaaacacaacttgaagtaactctctcacaagaaaaaaaaagaaaaagaaaaaaagtgccagccagcgggccagcagagtccacacacacaggctgtgctgccggcttccaggaggcacaccacagccaacatcagacccatccttcctccaggatgacacccgcagaggggcggccccagagggcggcctcaccttcccgcgagactacgactcccatcccggccctggaggccctgcagggccaggccaggccccccaggctcccagcccgatgccccccaaacccgggcaggccaaggcccaccggcgacaagtgcggggccgcctgaccccacggctgggccgtgaacgagacgtcgggcctccagcgatccgttctcgcctctgccactctgggcctataaacacagggaattacataagtccactcctcttgtttggaagccaaaagtacgagctttttctcccagccttggcagtaagtaataattcctcatcgccatggtaaccctggcgggcttccagccgacactcgggagctgaaacactgtgaggcctttttatagctcggctcttcgctcgctggcaggcgaaagagagctccagccccgcttctcccactttaacccgcttcctcccagcccggactgtccagcttcgagccgcacctgcacctccaacctgagcgtagctctggcgccttggctccggcctggttccgaacccaggcctcggcccatccctcccccgtcctctgtcccgagggccagatggccagaggagcaggctctcccttgcaaatatttctgtcctccttttaatcctaggaaaagaaagcgtgaccccctcacactggcattctgatctggggtcatctcggtgacaggcctagaaaagaagacgtggccaaataatacacacacacacacacacacacacacacacacacacacacacaggccaacaatgatggcttggtagtcagccaggagtctgaaccttggctgcaattagctgtgtgactcagagacaagtctgagcttctctgggtgtcaactttccatccgtagaaggggcaggctgagctctgcttctccaagtgctctggaaagcagagatgaggcgccagaggaagctgctggagctcccaggaggcagaggaggctccaccagggtctccagattcacttccctgcccctagcagccaagagttgggcctaagaatgtgtccctggacagcagcccacatgatgacaagggtctgggggtgcagatgtgaggaaggcacccctggcagaagcatggcagatgtgaaggtctggaggctggaccacgcgggtgtgttgtcaaagcagagagaaggctggtgtggccggggcgcaggggcgaggcggggagagtttgacgatgaggtcagggagctaataggagtggaggggaagtggtcagatggactctgggcctggccttcaactccagcaataacattgtcatcctttttactctcaggagcatcttgagagtaataatattaataacaataacagtggccacacacaccgagcccagcagctcggactgtgtgcccagcactgtgctaagcgggtcccctggttcaccagctggcctcacaccaccgcggcataggcaggtatgcccctgagccgccacacacagacagagcaggaggctggcccagagagggtaggtgacttgcccaaggtcaacagctagtggctgagctgggacttgaactgggcaagcctggcttgtctccgctatccacgtggtaattcagccacaaggagtcacaggagggtttcaggactaagaccagatttgcctgtgacaggggcccgtggccactggactggcagggggcccagactggccacgaggggatgagcatagtggctgcggaggcccctggaagccagatgtctcctgtgaacagctggccctctagccttccccaggaaacacccctggggggtttccgtagacctgccccaaagccaaaggtgggattctgctactcttacgccttcttttataggtagggaaactgaggcacaggaaggcacgggcatatttttagcccaaagatccagcaccatcttcccgcccagaccgtcgccaagaccaggcgggaccatgacacccaggccaaactggccccatgcaaacaccaccaggaagcggtgcctgagagcggccgagtcaggcctcaccacctccttctgttcatttttgtttgttttggacacagacctgcatccagaccttcgccaaaggctggccctggaatccacggtaactcctcccaccccctcagagcgactgtgtgctatgggcaggtttgacactgggcatgtctcttcacggccactcgttctgcttcctgtgtcttccccgccagacactccgcagcaaattgtttgttgagtgacttaatgaagaccacaaatcatcaaacaccagaaacagccacaggcagcagcccccagacagagcctgtggccaaaaccaaactcatattcagaataagccagtgtctggttatctgctcagcaaaagaactccccatcacgcaagccttcgacggcgaccacccctccatacttcgaaaaagcatcccctggccaaaatctgccgacaggccgcttcctggagcccgtctgctgagcagagctttgacggtgggaaagatcggtgaagaccccccagaatatgattcaccgcaggccacaggggccaggacagtgggccaaagggggtctg

SEQ ID NO: 59185 - DNA, 1134 bp, Homo sapiens
ttttttcttttttaagcgtttttttcactatgatgcccccaggcttggcacttggtcctgccatctgcatcagctccagagacaggccctgcaggaaggctggaaacagggagggcccgggcacatcttcacagccgccctccccagctcccggaagcctcggtggccagccacctgcagcacgtcccgtcacaggctagggcagagccaggcctggcaggcgctctccctgggcaccaagaagctctcaacctccacctgggagagacagctgggagatcagaccccatcttctcctaacctgctcccaaccccagccagctcagcctgcaatccccaacagacagagtcccagggtgtcccggtggcatggggtcaaggccagtgggggctggccccaaggtcacattgtccagagggaaacagagaatctcccagcagtaatggagtgacacataggtccaaagaggggttcccaatttagaaaactcagcagggacttcccaggacaggcaacctgtcacactggccagaatccagggagatgactgaggggccaaggggggtagcgaggactgggctgaggtgggaaggaacccagggccctggctggagcagagccagggggagaggaagagagaggagggctggaggcagcaggggcgggtcacgcagggttctgcagatgggttttatctccagagcagagaaccttaggagggttacgcaagctgcagaggggcaaggtcccactccaaagtggagatgcatctggccgtggagcgcgggtgagggcagaagccacagccaagggagaggccactgtgccagtccaggagagtgatgtggcgggcggccaggctgggcgcagcgaggtgggagaggggctggcatggagagcatcatgcattagagagtccgaaaggcaggcaagcgatggtgagaatcaagaggcccgctcctcctctctgaccctgggcagagctagtcggggagggaaggagagggtgacaacatccacttcctgcacaggaccctttcaggggcacagccatcccgtgtccctggccaggaaactgctgctctgagggaggagtcacccaaggccacgtggcaaggaagggagtgagccag

SEQ ID NO: 59186 - DNA, 1961 bp, Homo sapiens
cggcgggaggacactcgcttccaaaaaaataaacctacaatgtaaaaataacgccgggcgccccacgctaattgggcccgggcgacagcagctcccaggtacagcctgtctctccctcccgcccgccgtgccctcccgccctcggcttgctcctcctgcaagtgtctggggcggggagggcgtaccccacgggtgccctcactccccgcaggcctctgaggaagctgccctctagacaagggtctgggtcttcccagtcgtgcccaagtgggatcagctctgaattccaacttcgcaaagtagtggcatcccaagtatccgcacagcccgggggagggactaggaggcggcccaatgaggcgtcaccagccacgggaggcaggcccagacaccaggaacaccggcccgcgggggagggggaccaggggcgactctcccgagggaccccgcccagcgccccgtggccccacgcctaggagggacaaggctggctctccccctcggctggtgagagaccctcatgcgcccctccacaacagccaggccagggagctaggggtaccatctccaagggctttcaaacccgcgctgcccgatggaaaataaggcgcagtgtcgccccgccaggtccggggctacaccgggtacaagggacgcctggcggccaagtccccagagccggcgcacactgtggggggccgctctgtgcatttccagcgcgccccccgcccaccccaacgccacttccctccttcccgccccctcgctagggagctggagttcccctaagttccccggcgcccccgagcacgcgggccgcagtgtcggcggggcgccttgctccccagcaggccaccccccgagagcgccaactcgggagtgcaggggccccgccaactccgccgcgtgcgccgcccgatcctccccggatcccccggaagcgcgctccgcgcctccccccgcccttcgcggggaccctcggccccaactcacctcgcggaggtggcagcggtggcgcccgggcttggggcgcgctcgggccgccggggcgctcaggcaagtggcggtgccgatcgggctgggggcgcgcagcaggcccggcctcgggtcgggacgcgatcctcccgccgccgcctcctagggcgccggccctgggtccccggcccgcaagttggcgcgcatcgcggagcgcagggcgcgggcgcagggctcgggcggggcgccggcggacgcggggctccggtgcggcccggcctgcccgcggctccgcgctccccggcggccgcggcggcggtggcggcggcggcggcggcggcggcggcgggagggggaggagggggcggggcgcgagcccgggaggcggtggctcggcctccctgctcccggctccccgcccgcagcgacgcgccccggcccggccccctctggctccttaaagggcccgcgccttctctccaggccctgcgcgtccccactcgcgcgcgcacgccgccacacacacagacacgcacgcacacacttgggcgcgacgccgagtttctttttggcagctccccgaggaggaaggaggggggaagcgcctcccagccttcccctccctcttctcctgcgggcccgggggccctcctcctcctctccagccccagtacctcactggaatcgcgtttcagctattaaattataactctggagtggccgctggatggggagggggcgcgcagggagggccctacacagggccttttaggagcacgcccagtggggcacttggggacgggagcagacagtagcgcagagccctctccaggcaggaacacgctgggcctccccagacccgagacccagcccgggcgaacacactgcagactcaccacccaccacggaccggagatgtcagatctcacacagacaaatactgggacacccacgcgagttcacagcaccccggaggacacagacgc

SEQ ID NO: 59187 - DNA, 3490 bp, Homo sapiens
tctcctagaaacgggtcctgggatgaggtttgtagacccgcgcttcaggggaggctgcacaggggagacaggacagggcagggaaggaagccaagcccaggtgtcactcgagccaatatcccagcctcagccggatctgggtctgaggagcacccagttcgtcctgccccaaggcaagagctcagactcacagtggtcacccaggggctgtcccagggaatcacagccaccaggcgggtcaggctccctggacatggggccaaagcaccgccagagcccgggagcagtgcccagaagcgaggtgaaagtgcaggcagttaggagcaaactggagagaagggacacagaagcgtcattgagaggcccggagcgtgtgggggtggaatcctgacagtactcctcacactgcccgggttgcaggttgctattttagggtttattgcctacaaacttcaactccacaacaaacccatctgaccagtggagttgcccttgttttacatgtggaaggccagtggtttggccaaagcgacagggcttggggcagggatccaaatgtctaggctccaggtcagcttttcactgcccttgcggcgtggtggctgcgtgcagggcccggaggagagggtgctgacttgcacaggaggccatgagcggctccagggcctggggcacccggagcaggttgtagcattcaggatgcctggggtagcaagttagagaaaaatcccaattccaactgctttcatgatgaacatggattctccccatgagaggaggtcccggagcaaaggagctgcagggctgggtgactcagcagctcattggtggcatctgcaccaggcgcttcctcctctctcttctgccacccctcagtgttgggactcccttcatggcctcaagatggctgcagcagatctggtcatcacatcccaacaagacagagtgcagtcaaagataaggcagccatctcttcccccctttttgttttttgtttgtttgtctgttttgttttgttttgttttgtttttgagacagagtcttgctctgtcgcccaggctggagggcagtggctcaatctcggctcacggcaacctccacctcctcagcctccctgccttctcctgcctcagcctcctgagtagctgggattacaggtgtgcaccaccacgcccagctaatttttatatttttagtagaggggggggtttcaccatgttgcccagactggactcgaacttctgacctcaggcaatgcgctcagctcaacctcccaaagtgctgggattacaggcgtgagcccccgcaccctgcctggttctctcttttttaaaagcaggtaggctgggcatggtggctcagacctgtaatcccagcactttgggaggccaagaaggatggatcgcttgaacccagaagttcaagatcaatctgggcaacatggcgaaacccctctctaccaaaagcgatacaaaaattagccaggaatggtgccacatacctgtagtcccagctactggggagaccctatcttagaaaaaaataaataaataggtaagagcaggtaagcattccctgtaaatcccccagcacagtcccctccacgccacagtggctagggttaggccacgtgaatatctaggaagggggatggggtggccatgacgcttagcccagggtcagcaaacggtggttcacgggccccaagcctgtttgtttttgtaaataaagattgattggtgcccagccacatcctttttttttttttttttttttttgagattgagtctcgctcttttgccaggctggagggcagtggcgtgatcttggctcactgcaacctctgcctcgtatgttcaagcgattctcctgcctcagcgtcctgagtggctgggattacaggcacaaacaaccatgcccagctaatttttaatttttttgtagagatgaggatcttgctatgttaccaaggctggtcttgaactcctgggctcaagcgatcctcctgcctcagcctcccaagctgcacacccttttttttaatatcgtctgtggttgcttttgtgtgacaaaagcagaactgaggagttaccgcagagacgcccaagaagcctagaagagtgactcaaccctttacagagaaagagtttgctgacccctggctagactaaccgggatctacccctgacccggattgagtcatttcccctgagggatgaatgaacactatgacagtctgtgagccccatagaagtgggggtgggggctggcctggccgctgccagtcgtccttcaaagctttgctactcaaagcgtagcccccaggccagcagcatccgccgggcatgggagccaggtcttgggtcccaccccagacctatgaaatcagaacctgcatcctaaccagacccccagggaacgtcacccactaaatgcagcgcgtttgcttctcaggctgttgtaacaaggtaccacgaagcgggtggcttaaaaccacaggtctggaggccagaagcctgcaatccaggtgccagcagggccctgctccctccaaagcccctggggcaggattcttccctgcctcttccagctcctggtggctcttgcgacccttggccttcctggctttgcagatcggtcactccagcctttcctctgcctccacgttgtttgtgcgtatctccccttttcctgtgagggcttcagtcatcttggacgcgagtccaccctgatgacctcatctcagcttgatcacatctgcaaagatcctatttccaaataaagtcacatccacagctgccaggggttaggacccggacatgtgttttcgggaaacacaaccccacctgtgacctgtgagtagtcccaacacacaccacacatgggtgaactgcgacatacgtgcttgtgcttttgggaaggacagggctgggggaggggcagctccagcttccctgccttctcaggctcccagagctgccctcctgggaaacagcacgctggaagcttcatgaacatagctggcctcaggctggctcagggaggtcatctctacccctcatctcccaccaggcctgagctgctcctgggcctcccgggttgaaccgtgagtgccctcagcaggtctggcactgggtgaggcatgtcaggcatcccaggtgcccctctgcactggcaccctgagagggcttgccttctaacattcggtaccctgagcccagcactggggctcagcccacttctcatctccaaaccctgctccgggcctgtgctccccagctgtggccaagtgacaggtgggcccagctcctgcactggccgcatgaacagaagcaccgtcttctcagtgaaattaataaatgcccagcaagtgcaccctgagcaaacttccttgctttgcacataactggtgcttaaaactcacgtgctcggtgtacgaggaagtaaatgccggaaatccagattccctacagcgactgacaaggcccag

SEQ ID NO: 59188 - DNA, 383 bp, Homo sapiens
ctcaggtttgttctcctccagggataaaaccagccaaccagatctttcgctgccatctctcctgagcatggcgagcctccaactgggttggcttcaatcctcggggaagctggcgccataaatcactcggcgatgatcccaggggcctctgaggacatctcccggtatgaggctcagacaatagaaggggatttggatgagctcacccagcggcaggcacattagatttgccataaattattacaaggttaacaggaaatcacacagtgatctcagctgagctgtggaaggaacaaggggagggtgctgggggcccttacagcgccacatactcaaagccatcaccctgctctgcagtcagggtggtgtgtgtgtcccagaac

SEQ ID NO: 59189 - DNA, 1842 bp, Homo sapiens
gaggctatggagacagactcaggtgctcactataccaagaaacgaatcagaccctgtgtgctggcatcttctgtttgtccgagagatctctctcttcctttctccactggccctctgcccctgaagctgacccaccttaaccacttccacagcccactgctctctgcctctggttggacttggcacggggtagcccggcaggacatgagtgaggtcaagggctccctcaggccactcaagggcccctctcctctccatacagctcctgctacattccctctcctcctggctttctggaactatcccttccctcctcccttccagcccaggggtggtggcatcacctccatttccagcccagggttcctctattcctgcccacacttttgaaaatggcccctgtatgaagccaagctggagttatccacatgtgactgttcctgcttttcctgaagtcttgcacccagatagatgccccggaagaaacccagtgcatgctgggtcgcccggattctcccatgatcccctagtgtcagcccctcccccaccagaacccacccccaccccaccccggcttcccccaagtcttaaacgccagtgagttgagaggatgaaaaagttctggaaatggatggtggtgatggttgcacaacaatgtgagtgtgcttcgtgctgccaaattgtacatttaaaaatggctaaaatggtaaattttctgtgatgtatatattgcagtaaaccacaagttttagcctgttaaaaacaaaaaaagccaataagcacaaatcctcatccagccagtgtcccagcttttctctctccctgctccacctcgggtatagcaattcctgctcggaggcatttggagaggaagcccagtctactttcgatcaatgcggtattgattcgtgtttcatgaacaaggacaaaggctgattgccttccagtggatctgaacttcacacgcccccaggcctcaggcacaaaaatgatgcaaaccatttccgcagccaacagggaggaggttcagcaaccggccctggggcgggcaggggaaagaaaggcgcttggccagcgccacctggtaggagccactccggggcagagatgacaaggtccggagcagacacccaagttcctctttccagcacgggaactgagtcaccctgcctgtgtcctcccagcagctccgttctgcccgtaggctgggagtggcctggttacaaggccagatgcccacggtcagcaaattaaagacagtcctttccactgggaagaaccaagactcccagggcacacagtaggccgggttctagatgctgacactaaaaaagggagctgaggccaggcgcagtggctcacacctgtcatcccagaactttgggaggccgaggtgggcagatcatgaggtcaggagttcgagacctgcctggccaacatggtgaaaccctgtctctactaaaaatacaaaaattagccgggcatggtggcgggcgcctgtaaccccagctactcagggggctgaggcaggagaatcgcttgagcctgggaggcggaggttggttgcagtgagcctagatcgtgccactgtactccagcctgggtgacagaatgagactgtctcaaataaataaataaaaagaaggaagctgagccgatcactccctgtcctcattgagttgatgctccagggcagcctgtctagtagaaacataatgccacccacaggtagaatttaacatttcctagtagccacgttaaaaaagaaaaaaaaaaaagggaaaaaaatgtgactgggctccttggctcacgcctgtaatcccgacactttgggaggccgac

SEQ ID NO: 59190 - DNA, 620 bp, Homo sapiens
actcgcctgctcatgggctgttggtttatttccagtttttggctatgacaagaaagcagcaatgaacatttgtgtacaagtctctgtgtagacagacgctgtcatttctcttgggtgaatacctggagtgggatcactgggtcatactggaagtgtatgattaacttaagaagctgccaaactgttttccagtgtagttatgtgatttcacattccctccagctgtgtgtgagttccaggccctctgaattctcccagtgctggagggcatcagtctttttcatttcagtcatgctagctgctgctggagtattgcattttgattttggactgtgagatctctaaggttcggaatattcattcatgctttcaacaaatatttgttgaggacccatgaagcactgggcactgtgccaggagcaaaaacaagcatagtcgctgctcctctggtatgtccaggttcaggggtgagactgacatttaacagctgtggggttacagggcctttcagtgcatgagaggccaggaaactgtgaggcagaaaagcgtgacctgttcttgtggagagagaatcagggcaggctcccctgagtaaatgactttttaagaactagctggtt

SEQ ID NO: 59191 - DNA, 2314 bp, Homo sapiens
ccaagctgcctggatgctcaaatatttccagatcattaacaagatagagagaggagagagattagggggctggtgggggaggaatgaatgagtgaaagaatgaatgaaggaaggaaggaatgacagaaacctttgctggactttagtgctcagacaaggatccacagtccttgcggctccacagcgagaatcaaggctgcctggaaggaagacccagttttggaaagggcgctgggtctttgtgagctaggagagggggcggcggggctggcagcagagtcaggaggaagggaggtcagccagggcgggcgagcaacggggccgtgccagggacaccgcgccccgggcagggcctgctccccctgccccgaccttgcctcccgttccacaatagagcatccattgtaagtgggtaattgggttccggcacatcccctcccccggctgggggtggaagcaaagggaaacacaatctgttttctatttgtcacggctgccaagacgccactccctcccccagcctccgctctggctggcccgctgagccacagccgctgcgacattccttggcctgggctgagcctgcattcagagctgcccacccccgctggctgacccaagagaaaccacgtgacagagacccagaatcagcctcaggggcctcctggcctcgttccccagcctcccccatgggaagccaaaaccacagccctcgctggaggctttccaccccaaggaggactcacatcctggctccctctctttttagctgtgtgaccttgagccagtcactcagcctctctgtgcctgtttccttctctaaaatggggaggatagtaatgatagagaggccctcttgcgtgttaaacatactcctccaggcagagtgcagagcacatagaaagggtttggtcgctgttagctgtcatttgatttattcttttagggagtgagtgggaccttcctggtttcagtgtaattcgcagagttgggtgtctctgttcccgaacaatttgaagtgggggagacaagggtaaatgctcagggggccccatgcctgagccgcaggctgcctcactgcactgcccactcacacgcaaagggcctgttggatgcctcatgtgcgcccagctcacactgacctgacaggagaggatcagagaggtgagaggaggaacatacagaaaagtcaaaggtctgagctctgcctatgaggggctggcgacccgtagtgttgggttagaaagcaaacaggctctgctgacatgtccctaagcccctgagttctgtgggagttggggaactgcagcaggcttggaggacttcctggaggaggggagccaggtttgaatcctgcctctgctgtgggtcttgggcaatgtcttcaccgctctggactttgtgatttcatcttttggggacttcttcaagaaaaagaacagcacaagtcagccaggcctttaacaggtaaggttagggcaatttcagaagaaaccaagacaccttgaacttggctttcgttgttggatgaaatcccggggtggccttgacttggatgttcagagtaatcctgcttcagccccgcaaagggcctgtgtggacagatgtgcacctggggctccaaccccaagcccctccacaccttgggcaatcactgaacctcccagactcagtctccacatctgtaaaaggggacttcagaggcaccagcgtgagagcttaagctaacagacttggcacacagcaactgttcaatagatcttagcaactacccctaattcccagaggcagaggcgtctgagaaaagcggaggcaacagacagcagaggccacagcttatttgtggacagcagcggggccctcactcccctcttgatgaataaacctgcacatggtagtaatggtccacatgagttctttcatgacctcaggtgcataaaatcggattaatcattgtcttgtgactcactcccatggttggtgaagcctgacctgttttgttttatgggtttatttcttcatttctttttgtggttttgaatttgtttcacaatataatggacactcatgaagctacccccaatgcaagaacagaacataggcagggacacatctgcccccagactctccccagaagtaagccccactcctcgatttaaataaacacgtattttgtcctcactgtgggctttgggcatgagcatgtttgtgcctaaaccggtgcttctcacacgacagtgtgctcagtcacttgggagactgtggcccagcccagagcatccaactcaacaagtctggaggagagcccgagaat

SEQ ID NO: 59192 - DNA, 486 bp, Homo sapiens
ctgcaggcagcggggcggggagggggcttggcagaagccacggacatcccccccggcaatggcctttgaataattcaccagccgcttccagcccagcccagtggtaaacacttgtttagaaagtaaccaagagcctccaacaggtttcccagaatgtggcctgctgaaatttctggaacccctggcaagcctacataacaaatcccagccacctatgccctcaggtacacagaaccgtccaccaccccaatgcctcctgcctgccctgtgtccaaacttcaaaaagtgcctgcacacccacacagagaggaaaagcacagctacagcgcatgcaggtctgcaagccgccaacctggttcccagcagagaggaaaagcacagccacagtgcatgcggggtctgcaaaccaccaacctggttcccagcagagaggaatagcacagccacagcgtatgcgggtctgcaaaccgccaacctggttcccag

SEQ ID NO: 59193 - DNA, 620 bp, Homo sapiens
ggccctggggagagaacagtctgctggggccatgtgcatggcccagggcgcccgaggcccagccctgcctgggcctcccatccctgccctatgcggttttcctcttgccctgcttcccatctctgagaagcagcaaagtcaccctccccatctgcccttccctgggggagcggtccccacccccacgtccatctggacctcagtgcggccatccctcccatgcacaaagctcctcccagccccagcacacaggaaacctctcgagtctgcccccgtggtgcacacttcagcacaaaagccttccccctctccaggcccagcctgaaagaaccaaatgttcctctattatgcaagctcattcctctcttcctgccgcggccgaaattgcaatctgtgcggaggggtggagggggaagagcaggcctaggaaagagagagctgaacagcggcagaaggagcatccctcccaccctgctaaacgccaacttagcaccagctccaacccctcgaaggccccggccagacaccccagcagaggggatgtggtgtcagcacctgtaaccaaatatgaacccagtcgtccctgtggtttgcccggaggagataaactctgggtgtat

SEQ ID NO: 59194 - DNA, 2043 bp, Homo sapiens
ctggctgaggtgagaggatcgcctgagcctgggaggttgaggctgcagtgagcagtgattgtgccagcctaggtgacaaagtgagaccctgtctccaaaaaaaaaaaaaaaaaaaaaaaaaaaccgaatgccttctggggcctgtctttttttctgttttatgagcaggtagacttgaatgcaagagttaaaactgtctgtgatgtgttgcatacacagattaagtcaaaatcctcaccgtggctatcaaataaccaaagctggcctcagcttcccagaggatcagacatggggagtttgaagggaaccatcctcggggcctggactctctcctgagcttgtcactcgcctgccatttccccgggcaggtcacaagaccccccacccctccactctacagccaacgggcaaagcctccctgacctccagccccaatcagagggaacttcccggacacaggtttcgagaacccatctaaagattgggtaagaaatgcttttgcaagccggtggtttccactttgctgctttctacaaatttgaagaaaggtcaaacggacctgtctgctgggagatcagtgagaatcgcttccaatgacagatcgccgtgtgacattcgcatactacccagaaggagtataagaattccactcccagtgacttccttatgaaaacaaggcttctctgcacttgcagggacaaagaattgatggtaaaaattggtttcattctagcaatacgtgacagtcattcacggatacatgaattaattgggggtggagaggaagtcccactcatctcaggacaagaagtatttctaagcaaataaaagccacaatgagaaaccactacgaagggctgaagttttttaaaactgaaaacaccaagatgctggtgaggacgcagagctgatgggaatgcagcctggtacagcgactgtgaaactggcagtcccccaaaagtgaaacgcagagctccagtttgactcagcagctccactccgaggtatacaccccagggaaatgaacgtacgccttcacacacaaatctgtacatgaacgttcacagcagctttgttcatagttgctgatgtggtttggctgcgtccctgcccaaatctcatctcgaattgtagttcccataattcccatgttgtgggagggagccagtgggagatcattgaatcatacgggcggttaaccccatactgttctcctggtggtgagtaagtctcacaagatctgatggtttgatcgggggtttcccctttcacttggctctcattctctcttctctggtcccatgtaagacatgactttgcttctcctttgccttccaccatgattgtgaggcctccccagccatatgaactgtgagttcatgaaaccttttttctttaaaagttacccagtcttgggtatgtctttatcagtggcgtgaaaaccaactaatgcaattgccaaaggctgcaaccactctacgtgtccctcaataagtgaacggctgaaaagcactggtgtgtgcaccccatggagttctgctcagcagtgaaaagaaaggaactattgctacacacaacaacaggcatgcatctagagacagtgctgagtgaaggaagccaggctcagagggttacaggctgtagatcccatttagaacattctggaaaaggtaaaaatagctagtggccaagggctaagcatggggatgagggacttccctacaaagtgggaggaaggcagcacaggtcgcaggctgggtgcagtggctcacgcctctaatcccagcactttggtaggttgaggtgggactaatgcttgaagccaaaagtttgagaccagcctgggcaacagagccagacccccatctctacaaaaaaaaaattagccaggtgtggtggcacacatctgtggtcccagctactcggaaggctaagtcaggaggctctcctgagcctgggaggtgaaggctgcagtgagtcaagattgaaccactgcactctagcctgggcaacagagcgagactctgtctcaaaaaaaaaaaa

SEQ ID NO: 59195 - DNA, 1302 bp, Homo sapiens
tactgatgaaatggtctcatattcaaacatcaacgatgatgacaatcggagaaaattccatcctttgcaatgatctacacttaagatgagaacttttagatggctccaatctgttctcttacccgcttctcttcttcaccatttatgtaacgagcagaaagcaaaggcctagaacaacacggggcatgtcctatgggcaccaggatttgtagataaatgcacagaaacacatccagggggccccatgcaaaagtggcaaaagcgtctgcactgggggctgtgggatgggactcagaccctgctgcttctaaacaagggcgtactcatgcagtatttctatgaaactcaacattgcacaaggttgaaatttgaaaacaacaggaaggtaagccagcagcccggccctgggagagacgctcttggcagccaccagaaaggagctattgaccaagagaagaggagcccggaacttcccagaggcccccacccccacgacctcagcaaacaaggctgtcacagaggcaggcatcccatttttttaaacgtttattacttcaagagtgaattatttttcaaagatgataaaactcatttctattccagtagaaaagggtcacaggtttgccccagggtccaggagcgcccggaaggcagggcccccaggcctcttcacctcagcctgggcacctataatctgagggaccctgtgagggggtgggggcagctcgggggcacagcctgcggccacttcggccagagagtggccggctcagtccataggatgatgtcagtttaggctggaggaaaagggcgccagacaacccgatgcagtgcctgtgaagacttcggggggatcaaagtccggccggggtgggcggagaccctcgggcagctgcacagggcatcttgtgctcactccattgttttccgaggcctgtgtaaaggcgctttgcctggcctggcaggtagaccaaggccaaagctcgtggccagggcctgggcactgagtccccactgaatttggcacaggaaggcggcactcccagcctggcccgtcctgcatggggagccaccacaccgggactgcagtgtttcaccttggaggggaggaagcctgggcccaacggctgaacgggacaggccaggctcacccgaggaaggggacgcaggacccacagcccctgtggtcaggcctgtgggccacgtggagagaaggttccagaacagtgcttgttgacgagcctctccctacaagtcccttcagcagcagctccatccctgagtgtctgcacaagcctgcac

SEQ ID NO: 59196 - DNA, 825 bp, Homo sapiens
agcatgtgacacaagcctggccaatcagcatagtccacctcggctactgtgattggtttacagctgggcatgggagccaggcagaccaattagagcaaaccctggaacttctgctggagtgaaggaaacacaggtggccccctttctgcaggactcggagctgggcggaggtgagcctggagcctccacaggcagccaggagggagagcctgcttggcagcaaagccagtccagcagaaaactgagctgggacttggcagaggcagcttccagacaacatctaagttctggatttgtgcctaatgcagagatctgccctggaatttttcattacgcaaaccaagaagtgcccttttggcctaaatcaggtggagtccagcatctgccacttgcgacagttgctgtagcacacctattgggtgtgtaacatcctcaaccttaggagcagaaatccccgccgataccagcaaagaatgaagcaagcagaggccaatgcccagacgggccagacaggaccaggagacagcagcgggcgtcccaggccccagctccaaaccattcattcacaggttgttccattctgcctgaaataggggaaagcatccaatctgttgacagcccctcctcctgacccctgttgcagaccagtcctttagagtcgccattgccagctggaggacggggcttcaaccaaaaaggctcccagaaggcaagacacagtcaaatagagggccgcttccggtcctaccaaccctgtgaccttggtcgcatccagcatcaggcctcaatttcctaagtacagaacgcactcaccatccctatatt

SEQ ID NO: 59197 - DNA, 1731 bp, Homo sapiens
agcacaggagttcaagaccagcctgagcatggagactccatctctacaaaaaatagaaaaatcagccatccgtggtggcaggtgcctatagtcccagccgcttgggaggctgaggtgggaggatgacttgagcccaggaagcagaggttgcagcaatctgtgatcacaccactgcactccagcctgggcaacagaacgagactccatctcacacacacacacacacacacacgcacacacacgcgcacacacacacacgcagcctcaatttccctttgcagcctccctctcccacctggtttctcagcagaggctgctgggctggagatacctttctcctttggaatctcaccatgctttcctcctcccctggccgcttggcctggttctgaagatgaatcagggctaaaccaagaagtcatgggatccggccgcgtgtccatgtctcaatctctctctctctctctctctccccaaagaagaggctttcaggccctgggtttcagcccattcattcagcactgcccaaagggaatcttcagagacccagcgcagccctgtccaactgggtgatcagggatgggtcactgaccttctccgagtctcagtttcctcaaccatacaatgggcgtaaggagagtgtcgcctcatgggctgctgtgaggtttgaatgagtccatggaggtaaagtgcttagaacaaggtctgaagaccccgggcaccagagggtcagccctgcagtcattaagtgacccttcctcctctgccccacctccacccgggttaagggatggactttgccctgcttttgatcagcaggatgacttttttccaccacactagaccaggcagctgattagataacagtggtggggacactgtggccttttgcctaacatggctgattctatgattctgtccccaccacccccaaggtcaaagaccatggccctggaacacagagttgggatagaatgccaaggtgagcccttgttggacgccactccctcccatctggcgaaatagaccctttgagcccaggaaggctgcctggaggaggggacatctgagctgggaattttaaaataagctgggctttgctaggaaaagaagatggtggaggagtgcctggcagaggacacagcctgtgcaaaggctgggaagcctttaagagcgtgacttgcctgaatgttcaccaaaaacaaatatggaatgatatatccatatttgatagttggaaacaactcaaatatccatcaacagataaatgaattgccacatatccacacaatggaatgctacctggcaatcaaaaagaaccaaccatggatgaacaccacaacacaggtgagcctcagaagcactaccccaagcaaaaaaaagaaaagaagaatcatactacacaacaccatttccgcgacatcggggaaagggaatactctagagagagaagccagaccagtggctgccggggaccgggatggagggaggggactaacgtgaactggcccagctatcttgattttggttgccatataggtgaagtgtatacatctgatgcaactcatcaaattaggccaggcatggtggctcacgcctgtaatccaaggactttgggaggccaagccaggagaatttcttgaagccaggagttcaagaccagcctgggcaacatggtgaaaccgtgtctctactaaaaatacaaaaaatattagccgggcatggtggcgc

SEQ ID NO: 59198 - DNA, 3138 bp, Homo sapiens
ctggaatttacagataacaccagtagttttggtcaggggttaatattattattattattattattttaaccaccagggccaggtggtggcgccaaggtcgtctagctatttatcttacttctgtttctttccatctttttgctttctcccttttctcctgtcttataaactagggaaaaggggaggctggggagaagctgggaaggacaacagcagaagcggtggtctcattccacaaccactgtctgttactcagcccagccccacagcctccttgctatcctgtccaagaggccacgctcctgccccagggcctttgcacccactgcttcctcctaaacacgtggtcaaatccctcaccccttcgaatctctgcttacatgcccccttctcagaaggctcatccaacctgcccctaaaactcctgacctcccgacctgccgtgttgtttccatgctgcttgtggccttcgagcacacggtataattagcttatcaggtttattgctgtccatctgtatcacctgcctggccataaacccacaagggcaagatcctcagctgctttgtttggcgatgtgtctgtcctcagggcctgggacagctcttggcaccttgcaggagctctgtaaatattttctgggtgaatgagcaaaagtgagacctgaaaccatataatcaacgtggaaatgtctagcgggtggtaacgctagtcctcctttgtgtgttttaaacagctcatacttaagaagggatttttttttttttaaatacacagagagtaccgcctgtttaggccggggcaacaactcggtaaatgtgtgatggatgagatgaagatttcatagacattaatttttagcattctcttcctaccacccacagcactctcccctgcacctggagaggcccctgacctccaaacctaacaccccgctcgcccaggtgccacctcctccatgaagcccactggaacgacctcggcctacagtgaggctgctctgacctcattgggattgcagttcatgccctgtacaatcatccgccccatgctagatgctatgctaggaatttaaagacacagggatgaacacgatggggcccctgccctgagacgcccctgccctcagacaccaggggagcagaatcgtctggacgatctgcccggccctgttcaggtagcgaaacacttccacctacttcacctcttaaattctcaatggctcatctcatcgaagcagacactgaggctccaaagccaaatgcctgaccaaggtcacaggagcagggagagacagagccccaggctccgtatccacgtctaggcctgtgccctcacgcttctctcctaggccatccccgctgggctccttgcacgggagcttcacaaatgaatcattaacttgacctggccactgaattgcaaggtctaattcctcctcctatgagaagagaaaacaggcttccaagaaacacacctctgaccaaatgagccaagaagccaatttgcccagacgaagcctagttctgggacaaggccaggccctgcccactctggaccagcagtcagtggctgactacactctcaatcccagggctccaggcatccccagctccatggggccttaagatgcaggaacaactacgacacaggctaatccaatctgggacttgggaacaccacacccttggctcatgttccaacttcttttgatttttaaaggactaaggtaagaagactaaaataaaaggtttttacaagaaacccacgcttgtaagttgcttaagcgaagaggttgagtcattcctgagtcctccattttcctcccacctagcaccctccatcagcaaggctgggctgctctcgctttaaagcatgcctcaaatccatccacttctctccaacaccatcctggcccccatcctggcttgtatggatgggtgccgtagtttccccgctgttttcctgcctctgctcttgccccccgccccgttctccccacagaatccaagttatccttttaagattaaagtcagagcatgtcattctgctcaaacctcccccatgcctccctatttatctcagaatagaatctaaattcctgacagtgacctatgaggtcttgcacaacccagctccctatagtcactccagtctcctcccccattcctatctgcctcgctcactctgctccagccacactggccttgctgtgctcctgagccaccaggcaagtttctgccacagggcctttgcactgactctttgctcctccaggggcaatctttcccctgatgcccacaaaagtgagcccctcacttctcaagtctaaagtcactttctccgtgagaccttccctgagcaattttcaatcccttaaccatctctattgagccccactgtatggcaggctctgctctaggcctgggcacttcaatagtgaacaaaatggatgaaaataccattcttcctaaagcagcccttcccccatcacattatattcatcaccctgttttatctccctgacattatcaatatctgaaatttctatgtagttgttgataagtcccccttcctgctgcccggaattcagtcacaatggatggagctagagcagccatcttggatcatgaggcacccttaagaatgaaagccacacatgaagaagggcggagcagaataggagataggagaaaggattcctgtgacttcctggagccacccaccagccctgggtggcttagtcatcagagaaatgtccactggactcacagtgagatcccatgccatacaccagaatggctacaatgaaaaagactgacaataacaagtgctggtgaggatgtggagcagccagagtgctcacacattgctggtggaagtgcattagtgcagtcactgtggaatatactttttctaccaaagctggacgttcaccctacaatatagcaatcccacccccagtatttgtcccagaaaaatgaaagcatgcacccacacaaagattatccacaaatgctcatagcagccgtacccataacagcccaaaactggaaacaacacaaatgtctacaagcaagtgaatgcatgacaaatggggacacactcataccatggaatgctacccagagacaaaag

SEQ ID NO: 59199 - DNA, 1157 bp, Homo sapiens
ttacaggcatgagccaccgcgcctggactgatttttgtatttttgacagaaatggggttttaccatgtcggccaggctgaggtctccaactcctgacctcaggtgatcggcccaccttggcctcccaaagtgctgggattacagacgtgagccactgcgcctggcctaaagcaaaaaattattgatccagggttgggtactcttcagatgttcaatacaccctcaagtggtgtcgctaataagagagcacctacagccaccaaggcccaatcagggtcccagtgccccgtcaaatctgatttctgaagcagagcagcgaggccagccaggagaccaccaggggccctggagagacgtgagaggtctggggtcccctctttaccagcaaaggggctctgtccactccctgtcccctcaaccccctgcccatcctccacctaccagcaggcgcctgatacaacttcctgtgcctgtttctttacctgtaacaaggaataaagaataggacccatgcagcagggacaggtcatgttgacataatgtgctgggaacagcccttcgtcactgcgatcttccttccaaaacccggaactagggcctaatcaatagaagaacaacagacaaatcccagcagaggggcgtcctgcaaaattcctagccggtgctcaggaacgcaatccaggtcatccaaagccaggaaagtctgagaacccacagagaccagaggatcctaaggcaacgtgagggacaaacgcaatgtggggccctggattgggtcctgggacagaaaatgatacgaaggagaaacgaaggaaacgtgaatcctgtctggatgttagttattactgatgtatcaacactggttcattcatagcaacaaatgtatcccattcctttaagatgttaatagcaggggacactggctgtgggatatgtgggaactcagcactatcttcccaatttttctgaaagttgaactgttctaggccgggcgcggtggctcacacctgtggaatcctagcactttgggaggccaaggcaggtggatcacttgaggtcaggagttggagactagcctggccaacatagtgaaatcccgactctactaaaagtacaaaaattagccaggtgtggtgtcaggcacctgtggtcccagc

SEQ ID NO: 59200 - DNA, 1251 bp, Homo sapiens
acgagcccaggaggtctaggctgcagtgagccatgatggtgcccctgccccccagcctgggtgacacagtgagaccctgtctccaaaaaatatgttaaaaataaataaacaaacaattgaaagaaaaatgccatttcatgacatgtgaaagttatatgaaattcacattttggtgttcataaatgcagtggcactggcccacagcggccacctcgacttatttctgtgtcgtcaatggcagcctcagcatcacagcagcagggctgagtagctgagacacaacccgtgcagcctgcagagctgagcatattgactatctgtctctgtacagaaaagcatgccaaccccagcctagaccacacagaaattcaggaagggccatcccctgccaggccagcttcacgggtgaggccggatctggccattagggagagggccagggcgcagacctagttctggcctcggctcagtcagcccctcccaccccggtcccctgatatgccacatggagacgtgactgcctccccatcctccccgtggcagtgcagagagaatgagatgacccaggacatgtgtctgttgtgaagagggcacccggctataaacatgcctcagggaactattgttacaggagcctccctgagctcaccactggctccagttcaagaacacgtcatgaagccagccaaggtcttgtaaaatagggcaacggtggtttgggcctggaggaatcagaagctcagggctgcctgcttcaaaggctaagtcttctgcaacaggctcagcatgttggaatttgaccctggccaacaggctgggccgtctggtctaccatctacaaaccaacagcccaacccattcaagcaggaggggccggtaccatttctcccttcaggttaaaccctgccacagtttttaattttaattggggtaaacataaaatttaccaacttagccttttttttttttttttttgagatggagtctcggtctgtcacccaggctggagtgcagtggtgtgatctcagctcactgcaacctctgcctcccaggttcaagaaattctctgcctcagcctcctaagtagctgggattacaggcgcctgccaccatgccaggctaatttttgtatttttagtagagacggggtttcaccatcttggccaggctggtcttgaactcctgacctcgtgatccacccaccttgggctccaaaagtactgggattacaggcatgagccactacacgcc

SEQ ID NO: 59201 - DNA, 2837 bp, Homo sapiens
gtgatccacccacctcagcctcctaaagtgccgggattacaggcatgacacctgtaatcctaacactttaggaataatgtaataatggcgcccggcctataaatggttccattctaaataatgaaccttggcttaaatgctcagggagagaaacactcccagccccagccccatccaagacacctgatgggaccaagatgccaacaggaggatccctgcttcctcctggaggcaggaggtggccccagaaacagcctccacgcttcctgtggcccttccaccatgacaggtgctgtctctttacccaccatccacagacagccccgatgacatctttatacacccgcatcccttccttctggctactccaccttcatgctggggcaggaaaggggtcaatcaaaagccaccaaagctcagacagggaaacagcccagcactggaaccaggcagaagtcattgaaatccagatggagtgtgttaagactcaggcctacaatctgtggatgcatcccagggacccaggctttggggtgttccccagggcgtatgacctcccttacccctcgctacagcccgaggagggaggcccggagaaacacgcccggcagggttatgcaactcacccacagccacagagacaggaagtgcaagagccactgctgaactcagggagtctggttccaaagtccacgctgcggaggacccccactggggcctctctgccttagcccaaggtcctacgctaggtggttctctgccctggacaagggtctccaactatggaatgcagccatgaacgagacagataaagtctctgtcctcatggaactcacacaagtggatgagataatttcagagactattaagggctcagaagggaatagcatggtgtggttataacacagatggcgcaagccaggcgcggtggctcatgcctgtaatccaagcactttgggaagctaagacaggtggatcacctgaggtcaggagttcgagaccagcctggctaacatggtgagaccccatctctactaaaaataccaaattagctgggcatagtggtgcacgcctgtaatcccagctactcaagaggcaaggctggagagtcgtttgaaccggggaggaggaggttgcagtgagccgagatggggccattgccctccagctgaaaaaccacacagatggcacagacagtggacgtggggggcaactgtccattgggtggggtgggcaatcacggggtgtcttcttcaaaaggttacatttaagcttcaaaaggttacatttaaacataaaagaggaaccaagcataagagccagggagacaaaaagacggtccaggcagaaagaaaagcacttccaaaggccctgaggcaggacagcatgtgacacgttggaggaaaaggaaggcctgtgaggttgcagtggggtgagaatgctgagttgagatgggcagggcccacgaaaatgaggctcacagctttgataccaaatgcaggaagattttattcagcttcttgaaatgatccagtttgcatagttttgttttttttttttttttttttgggagacggagtctcgctctgtcacccaggctggagtgcaatggtgcaatctcggctcactgcaacctccacctcccgggttcaaacaattctcctgcctcaacctcccgagtagctggaattacaggcacatgccaccacgcctggctaatttttgtatttttagtagagatgaggtttcaccatgttggccaggctggtcttgaactcctgacctcaggtgacccacccacttcggcctcccaaagtgctgggattacaggcatgagccactgtgcccggcccaatttgcatgttttaaagagcatcctggctttgatggggagaagtgacaacagtgtggtataaatcagcagagcaaacagccccatgatgacactccagcatccactgggaaacaacggtggcagctcggtctggggcgacggccacggcaggtggaggagtaggccccattgccctgcacaggaccacaacctgccactggtcacgaaccatcctgtgaaacaacccttgtcttttaaacatcctttcaataaatatttgagaacctgcgattatgtgctaggcatcgttccaggggcttgggtcacggcaacgaataacacaaaggtccctgccctcacagtccgacattctcatggggagaaatagacaataaacaatcaacatgatacccagggaagttccagggtatctacagtggctgacaggtctaagcagagcgggtaaggagggctggcagcacagggggacaagggggaacctgcatgatgcacaaacggaatcaggggagggtctccgtgagcaagtgagagctgaacagagacctacgggagatgagagggcttgtgtcaggagagctaaggcgattgggcccatggggctgaggaatggccaggaggccattgtgcaagggaaaagggaatgcggacgtcgccagaaaagtggcaggggtggatggcacaggccctgggccaggttaggacctggctgtgactcctaggggacgggtctggccatgtcagggctttgaggggaggaggtgctaagtgcaatcttgatgggctcccatggctgcttattgagaaaccccactggggagcaaggatgagcacagggaggccagtgaggaggcggatgcaggaatctgggggagaggtgatggtgccttggaccagaggtgatggcgcctcgggcgtggtgagaagtagttggaatctgggtatatttagatgatgaagctagaaaactttctgacgggttctc

SEQ ID NO: 59202 - DNA, 2227 bp, Homo sapiens
attagagtgacaatgtccacatcttcaccccagctctgcatctggctagaactttgataagagtgagccccagtttcccctccccgccactgcatgtgtgggttcccagggcttcaaaactctaaatggcttttagttcaaatgtgatactctgcaatctcccagcccttccctaactccaggctcattcaaacaggccacccaggcacccagggcagagtctgtccgtctgcagaccagctgaccgcctaatctgtctccctggttgaaagggcaatggtatgcaaagttaggatcagaggaaagacctaaggctgcgtgcactcagaggaccttgggctgctgcctgcctctgcatgaatctggggagaaaagcggcttatagtttccagactgaatcatggaggcagtgagcagggagaacagagtcgcgcattctgcctctgggagagggttcctatggggagattctgggcagtggaggatgctcagctgagcacctaccatgtgagctgggcacccacgtgggtctcacagaaggttcctgtcctcctgggctcacaggatacaagcaaagtgcagctctaattttaccggaccctgctaccggctgctgtgaaagcagacgttcacacactcttgggctccttcgggcggcaccacggaagcaacctgtccacactcctgatccgtcgtgggcgcccagaccctttagggcgggtcaggcgcccgggtggtctcccgtccaggcctccccaaccctggcctgcgcctccagcaaagcccctgggttcccccctagcctcagtctggggcggtgagggtggtggggaggcgggcagcagcccctcccgaagcgcctggcctccctcgtgctctgcggcgccaggcccgggcgccgattccgctgcggtcgcccacccaccgcaacgcgcgggtcctcccggcgcccagcgcccaacagcccgggtccgtgcgcggaccccctggggtctccctcacccaccttaaggacctgctgcttgatgagcgacggcaccatcacgatcatgacagcgcccagcacagcgcacagtagccccgcgacgcccagcgccccggcagcccagcgcgctttggcggagcagcccatgtctgcgcgcctggggcccacccgcggctcgcagggctccgcgcctggcaggagacggggacggcgacagagacgacacaggcggggactccgggcacgcaggccgcagaggcacggtggatccgggacggcagcgcacgcaggagcagcccggcaggtggccagtggttttatgccccatcgccggcgccgccggaccgcccccgggcagccttgggcttcaggattccggcggcaggggcggggcctgagcgggcccggggcggggtcggggcggggacggggcggggcgctgatcggacgggcagggggcggggccatggccgccaagacaagccccgccatgctgccgctgcccccacggcctcgcttccgttttggggcgggagctgaggaggcctcgtggccgctgagccaaaacgtctatggggcctggtgcccctcaccctcttgctcccttcccctttctcctaccccttcccccacctatgtctcccctcctcccagctctcccctctgagcccctcacccttccttttccctcctcctccctctcctcctctatcgggaccatcatcatggttggtcactgtgagtaggacttcgccagcccacccaggaaccccagagcccttacaacggtccacatgccccgccaccaccttctagaccctcatctccgcagtccatctccagcctcactgtccctggaagaagccccgcaggctccagccccagggcctccatacaccctgcacaggcaattctgttctcccaggtatccgcctggccctatccttcgtaacgctggtgccaccatcaccctatgactgagcaccccctggcaggttcacgttcatttgcgtccttgcattctgaccatgtgctccaactgggatgccaacccgtgaggcgggcccccccccccacgcgtcctgagctctagaacgtggcctggcagggaatgcctgctcacagtaaatattctagaatgaatgactgaggagccttctaggtgctggcccctgtcctgagtgctttgcacacaatggctccattttacaataagaaaactgggaggtggctcacgcctgt

SEQ ID NO: 59203 - DNA, 1528 bp, Homo sapiens
taattaatatcacttcattgaattccttaaggccttcaacagccttcagctatgcagttgcctttttttttaatgacttttgtagttctcggaaattagccagttaactaaaatctgcggtctgcctggccctgacaccctcctccacttccttgatactgacctgccttgaccatctcacccaatctaactctgattcatgaccaagtcttcaaggtccaaatgtacgtgatgcttacccaagagggctgcaaggccatggctggagagccctcatgtcacgccatgctgtcactcgagagagaagggcagagatgaaagggtgatgggacacgtgagccaccttggccttgctgaggggagtcacttccggtggcagggagggcagcttaagaagggaaaaaaagacttcgtcatgtttgagagagaggtcttgccctggggaaagtcgaagatacagaagaaaagaaagagtgctgataacaaaatatgatcaacatggtgtcacagggctcctggaaaatcaagtcagatgcttttcctcctctgctcagagtcctttcgtgatcaaagacggagaatgactgcaggcaaagacctggaggagttggaagcctcttgaggtgcttgtgggattgtaaaatggtgcagcctcaaaaggtaaacataggggtcccctaagacccagcagttccactcctgggtatatgcccaggagaaaggaaagagcatgtccacacggaagcctggacacaaatgttcacagcagccaagcagtgaaaataacccacacccccatcagctggtgaataggtaaataaaatgtggcataaccacgcactggaatatgactcagcataaaaaggaatgaagggctgacgcgtgctacaccatggatgaaccttgaaaacattgataagtgaaagaagccagacacaaaggccacatgtatgattctgcttatataaaatgtccatagtaggcacatctatggggacaaaaagtagaccagtggttgccaggggctggggagaatgaggagtgactgctacaggtttggggtttcatcttggagtggtgaaaatgttctaaaagtgacggtaaaagtgatggtaatgatggttgcacaactccgtgaatatacaaaaaaccatcaaattacacactttatttactttttctttttttcaagagacagggtctcactctgtcacccaggctggagtgcagtcttgaagtcttgggttcaaaccatcctcccgcctcggcctcctgactagcttggacaacaagtatatgccactatgtacacctgatgttttcatttttgttgagacagggtctcactttgttgcccaggctgctctcaaaattctggtcatcctcccaccctggcctcccaaagcgctgggattacaagtgtgagccatcatgcctggccaaattatatactttaaatgggtgaatgtatgatatgcaaattatatctcaatgaaaactgttattttaaagaaatggccaggcatgg

SEQ ID NO: 59204 - DNA, 623 bp, Homo sapiens
atcggagccgcccaagaggatttttgttatattcacactctgggcgacacagactggatttctaggcaagttgctcaccttctcaaggccctggctgcccctctgagccccaggtattccctctgagctccagctgcccttctcagcccacagtatcccctctgagtcttgggtgcccctctgagccctgggccccctctgcacagtgggaatgagaggtgtaccaaggttggaacagtggatacagcccccagcctattcaaactcgggttgctatttcttatcactgtgcaccggtaactctaaaaaatgtcagcgataaaacattcctcctgaaacaatcttttattggtctaagtctgaactgggagttggcaaactacagcccgaaggccaaacctgacccccagcctgtttttgtaaataaagttttattgacctgacccccagcctgtttttgtaaataaagttttactggaacccagacacacctattcatatagtttatggctgtgtccaggctacagtggcagagttgaggaattttaacagaggccctgtagtgcaaaaagttaaaatagttattatctgttgctttacagaaagagtttgtcaatccttgg

SEQ ID NO: 59205 - DNA, 1336 bp, Homo sapiens
cagggttgtccctctgtggctgcatgaatcttagattccaggagcaaatcagtccatcagccactgaggttggggcaagtgaaaaaggacagccctgctggccaggtgcagtagctcacacctgtaatcccagcactttgggaggccaaggcagcaggatcacttgagcccaggagttccagaccagcccaagcaacatagcaagacgccatctctacagtcccttatttgttaaatgaacaaataaacaaactgcacagttaaatgaacaaactgcacaattactttataacaaaattacctttgagaaacattataattttttaaacagtgacagccaggcactcttgcagtttgtcatagcttctgccattccatatccaattccgtctttctctctgcatccaccatagctaataattagcaacacaagctcagtgcaaacgacagatgaggcaatcatcacaaacattagatgccctcctggagggcaaagtctccgcgtccccagctgagatcccaagggcttcaagaagtgttttctacatggaaagtgactttgtcaagtgaaataatcaatgaggtccttattgtgtgagggaacacagaataatttttaaggtaaaactatcaccgggcacggtggctcatacctgtaatcctagcactttgggaggctgagtcgggtggatcacctgaggttaggagttcgagaccagcctgaccaacatggagaaaccccatctctactaaaaatacaaaattagctgggtgtgctggcacatgcctgtaatcccagctactcgggaggctgaggcaggagaatcacttgaacccgggaggcagaggttgcagtgagccaagatcacgccattgcactccagcctgggtaacaagagtgaaactccatctcaaaaaaaaaaaaaaagaaagaaagaaaactatcatgagatactgtaattcacctggcagataaataagcaaagtgtgaggagctccttgtgttgttagggtgtgaggaaggcactgctgacggctgttggtagaagggtaaatttgtgtaacctctttggaggggaatttgacaaagcctgtctaaatttaaaatgcatatggcctttgacccagcaagttcactttgagaagttatctttcagatatatatgcacacaagggcaaaaatctatggataaaaatagccagccggacgcagtgactcacttctgtaatcccagcactttgggaggctgaggtgtgccaatcacttgagctccagagtttgggaccagcctgggtaacatagtgctactccatctctatgaaaaatacaaaaatt

SEQ ID NO: 59206 - DNA, 846 bp, Homo sapiens
ggaggttatgatgatgtcatctgggtgggaggtaaattttttttttctccttacactgggccccacagaagggggtgaggtttggctccaggtttgggggatatagctaaggaaggatgtcagctctgggccaaagacaggaatgacctatcagatcccccagggaaggagcaggaccctggagcattaatatctgcggcacacaattgtgatttctccgcgttgcaatttcctttcactacccccatgtctagctgtcctaaggaaagagccagatccctgaggcaacccagagaagccaagtctaagatgtcagaggtcatgggcagaatctcccaaggcagccagctggctgagtgacaaatgacaacaagcacagatttgtgaagagtgcaagcattcttcagaaactcccaaaaataccagtgaggagaaactggtaagtggacttcctcgaggagtcacgcacagtgcagaacagaccactgtcccacgtgcttgcagggacacgctggcctctaaacactggcccacacagcgctgagtcacacttgcccctccctcttgcctacggtcactccccagccacagttgatgctaacgagcttcgcccttcactcccgggagttcggcagcttttgcacattttaagatcaactgagagtttataaatatgccccgtttttctatgaccatcgctatgggaagagatgaatgtgttctaacctgtttcccatcaaaacttgtgttctaaccccaaaaggaaaagcagcaataaaaacaaccaaaacattttttaaaaataggttctatagtttcaaaaacaataaaaagaataagagccaa

SEQ ID NO: 59207 - DNA, 2814 bp, Homo sapiens
aaaccctgtctctactaaaaatacaaaaaattagccaggtatggcgacgtgcgcctgtagtcccagttgttggggaggctgaggcaggagaatagcgtgaaccagggaggcggagcttgcagtgagccgagatcgcgccactgcactccagcctgggcgacacagcgagactccatctcaaaaagaaaaagtagttagttatccctggaaagtaaaattgagtaggaacttaaatgggttactatcacctttgactttataaacctgcacacaaacacacaaaatgtgtatgtatttaattacaaacagtaagagacctggcatggtgcctcacacctgtaatctcagcactttgggaggcagaggcaggagaatcacttgaggccaggagtttgagaccaacctaggcaacaagcgaaatccaacccccccttttttttttcctgagacggagtcttgctcttgttgcccaggctggaatgcagttacacaatctcggctcactgcaacctccacatcccgggttccagcgattctcctgcctcagccttccgagtagctgggattacaggcgcctgccaacacacccagctatttttttgtatattttgtagagatgggatttgccatccctccaactcctgacctcaggtgatccgcccacctgggcctcccaaagtgctgggattacaggcgtgagccaccgcacccggcctgaaatcccctatttttaaaaaaggtaaataaacgtattttttttctctgggagtgaccatacgtggaaatttcactttctacatcactaattttatgaatgtgcttatgttgctctatactgcttttcaaaacttttctagtacctatgcttgtaattcggaatttctcactgaacttgatagaagcactttagttcaaggggccaagtgttcttcagtgagttttcaagtgagcatcctcacctctacaacattcacacagctttattaaatagactaatgttcgctcacaccaagatcctgccggctctgcacaacgctgttaacaccaatgtgacccagttccatcccacatcttcaacagctttagcagccatggcctttcttgtacttgacttgatgcagctttgaagttttcaaaaagcaccttacacagatttatcaatgttacaatgcctgacaccaagtgtacatctttaacactattcaaggtattttttccttacactaaggtcatccagattttaatggtaactaaaattacacagaaagttgcatactaactggaagtgatcgcctgtctagtagtggttgagtttgttgggttcttgtaacgtttcctgattcacatgctcacttgcatgggagggtcatggaaattatacattggatgcactcataatgaaaactcacaatggatttccttaagatttatgaatttctcaaattttagtccagtaaccctaaccctaaagctaaaactggtttaagccaccctcagttgctttacaattgctagggacatgaaactatcccacagcagctgttcatgaatcccctaaaactttaagcgagagaagagggagtgattctccttcggaaaaacattccaaggcctttaatgggcctctggatgactgcctggtgtccacccttgtactaaaccagtttccctgcaacttccacctttggttctagtcaacattaacaccttaccaggaccattcgattgggcaaatgctactatacacttggacaaatccagaggtcaattgtttcccccactggttaggttatgtgccaatcctccacctgtagtcacataaaatgtgacattttaccagcaagaattgtttcaagaacgcaattgtttcaacgaatagctcactctctaaccactaattctttttccacaccttggtagctatgcctttttttaccttccacatcctcttaaaatttgatcccatgactgtctatgcagctcaatgtgcatttatatagacctatgcactgaaagcatcctttcagttaccccatcactcccaccttttaaaattcctttcctggtgttccagtaattctcccattccgttaccttacacatcacccacaaaccagtacttttaaagttaacttataagcaaatctacatatgcaaaatacttccatctcccaataacttcttttttgagtcttgctgtcgccccagctggagtacagtggcagtatctcagatcactgcaacctctgcttcgtaggttcaagggattctcctgcctcagcctcccaagtaagctggaatcacaggcactcactgccacacctgccttttttgtattttcagtagacatagggtttcaccacgttggccaagctggtcttgaagctggcttttatttgcacccaccttctacagttcatactatattaaggccacccccttcactgacatttcaccgttaccacaggaacatttgtagaccgaaaaccttgacccccttcacccagtctaatgcaaaataaacttaaaaaaaaaaaaaaaaaaaacaccaattgggaatgcaacaactttattgaaaggaaagtgcaatgaaatttgttgaaaccttaaaaggggaaacttagacaccccccctcaagcgcaggaccaagtgcagagtggactctttctggatgttgtagtcagacagggtgcgtccatcttccagctgtttcccagcaaagatcaacctctgctgatcaggagggatgccttccttatcttggatctttgccttgacattctcgatggtgtcactgggctccacctcgaggg

SEQ ID NO: 59208 - DNA, 5276 bp, Homo sapiens
tcttcacgaagatttgcatcccacctctgagacggagcaccaggtgcagggtggactctttctggatgttgtagtcagacagggtgcgcccatcttccagctgttttccagcaaagatcagcctctgctggtcaggagggatgccttccttatcttggatctttgccttgacattctcgatggtgtcactgggctcaacctcgagggtgatggtcttaccagtcagagtcttcacgaagatctgcattgtctaacaaaaaagccaaaaacggccagaatttagcggacaatttactagtctaacactgaaaattacatattgacccaaatgattacatttcaaaaggtgcctaaaaaacttcacaaaacacactcgccaaccccgagcgcatagttcaaaaccggagcttcagctacttaagaagataggtacataaaaccgaccagagaaactgacgcctcacttatccctcccctcaccagaggtccggcgcctgtcgattcaggagagcctaccctaggcccgaaccctgcgtcctgcgacggagaaaagcctaccgcacacctaccggcaggtggccccaccctgcattataagccaacagaacgggtgacgtcacgacacgacgagggcgcgcgctcccaaaggtacgggtgcactgcccaacggcaccgccataactgccgcccccgcaacagacgacaaaccgagttctccagtcagtgacaaacttcacgtcagggtccccagatggtgccccagcccatctcacccgaataagagctttcccgcattagcgaaggcctcaagaccttgggttcttgccgcccaccatgccccccaccttgtttcaacgacctcacagcccgcctcacaagcgtcttccattcaagactcgggaacagccgccattttgctgcgctccccccaacccccagttcagggcaaccttgctcgcggacccagactacagcccttggcggtctctccacacgcctccgtcccaccgagcggcccggcggccacgaaagccccggccagcccagcagcccgctactcaccaagtgacgatcacagcgatccacaaacaagaactgcgacccaaatcccggctgcgacggaactagctgtgccacacccggcgcgtccttatataatcatcggcgttcaccgccccacggagatccctccgcagaatcgccgagaagggactacttttcctcgcctgttccgctctctggaaagaaaaccagtgccctagagtcacccaagtcccgtcctaaaatgtccttctgctgatactggggttctaaggccgagtcttatgagcagcgggccgctgtcctgagcgtccgggcggaaggatcaggacgctcgctgcgcccttcgtctgacgtggcagcgctcgccgtgaggaggggggcgcccgcgggaggcgccaaaacccggcgcggaggccgctgcaccgggagcgggtgggcggcccgcgttccttagccgcggctccgcggcccctcccctcagcccccgcggtcccctcgggtcgcgaaccccgcgttcggcggacgtggggcacgcagcgagcgccttctgcagagtcggggtctccctcccctccctcctgacccgccctggcccaccctgcgagatggacgggtctttatttttgggtcacatttgaggtaatgacggggcttcctttgctcagcccccttcaacctccctgagcctcccaggccggtcgcggggggctcccggggccgcgggacaaggacaatgactcggcagatctcagggcgggcgtggccctaaagctggggaacgctcgagaactttccaggggagacactgcagaggagctgggtgtccaggttaaatttggaaaaaagaggcggaaaccccacacagttttattttagctggaacgcaaggctgagcgaacgacatccttctagactgttcttccaccttcctgtacattctgagggccaggtatggaaaggtcctacttgatgccaacagggaggcatggaaatttctctggtttcaatgggtacgattattgtaagcaggatccattcaataatcggacccatttaaaccggagattttaaaagacaggaatagaatcccaaccttatttcagtgcagggtagggtgtcaaatatgaaatgtaattctacagggcaattctattttggtaaaagaagtggggagaaaagcatcaccagccagctttttaaatttttaccacaacctattttgtgatccctacgtgtcatttcttcagtatattttttaaatgttttaaaatatacgaacatggtgagattttttaaatgtgtctttttaaagtgtacagtgaaaagtctccctcatgccctcaatttcccagccactgttccttctggactcttctacaaatagtccctgtttctacaaatgtattggaggtagggaggctattttgatttctacccttaaaagcttcaaaaaaaagagaaaaagaggctaccaactgaaaaatattttgccattaggaaaaggctgcattcttgttttaagttatgaacattacattatttaaacggcagacttaaaatatgcatcaaagcaaaatgaacctgctatatattttctatggtaacccatgtttctgtgtatttatgaaaatccaagatctgtgcattgttcaaaacagactttgacatctccaatttttaacattttaaagagaatgaattcatgtgttactgggaaattaaaacgaataataaaagtgtcattttccaggattggcaggataccccagtgatttccaatacacatttctgcaaagtttttgttttttgtttttcccctacatttcgggaaggagttttgaagggattaaaaagctgagattctttctgaggtgaccaggcctggctttcaaccacgccctggttgcttttggctgttactctgctgcaagccttgtgattcatgttgtttaaaggctgagtcaccagctttgtgacatagcttttttcagagtccaaaaggtacagagaaaaaacagccctaactgcagaggcaggggcgggagaggaggacaggaggaggaaaaaggaagaagaggggatgagggtagggtgggtaatgggccaaaggttagctgcaaagagaaaccaatgttgtctctagcagaaaaaaattattgaaaacatcccagcattccctgacttaaatggttattgaagcaaacagaaataaacctttctccaaagtcactgaggtgacagggaagaaaatggcctcccaaaacgcaggtgtctgatgtttctctacaacaatggttctcaacaaggagtgatttgctctttcaggggacatttggcaatatctggagatattcttggttgtcacaactcaggggaggttaggggatgctactactaatactagcactgttggtagacaccagggatgccactgaacattctatgagggacagtcccccacaacaaagaattatcagacccaacatattaatagtgctgaaattaagaaaccctgtcctacaaaggatttttgttgttgcaacaactgcttttctgttttccgaaagggttcccaaagtctaaatgtcccacttggactcaggagtcaggtatcaagtcacgctcttaaaacctaaaccctgctgacctagaatgcgatgtgctagaatgtgcaagaatcgggatgagtcactggatccgttttcagttcgttccacccacagatccgtcctttgcaggcgccccagaaaagattgcttcagagctggcaccaatggagaagggacagaggcccagcaacagggcgggattggcaggcggaagggagcgtgtgatgagctgagctcacaaagggccggggtgctgggctgcagctggggagggcggggttggatcagcgcctgctcctccgccttcgtttttcccctccccctaaggattcagttcccccttctgaaattcaccaccttgtatgtgacttaatccagccccatgaaactgtctgagagcatgagtgagggtcaacaaacttgcttcccccaagaaaaagggtggaatcagagaggtggtgggaagggtttgccttgctttgtcatcgcttatataaccataaaaggttgtcaaggacgcctgcaggttagaggcctggcaaacaggaagtaaaaaaaaaaaacctggggaatgtgttcttcttcctgtttctgcttgtgctgtataactgtgtggtggaacacaaaccgctccagcttaaaaataacccattcatctcagcggtcaaaaccggacttagctagtctccaaatttgcctactttaggaacattaggaagttatttaacctatttgggctttgtttgtgtcgtcgtttggttttgtcttaaaattgtggtaaaatacacataaaatttaccattcttaagtgtacatttctgtagcatgaagtacattcagtattgtgcatcagccatcaccaccaagccatttctggagctcttttcgtcttgcaaaacaaactctgtccccatgaaaaactgattccccatttctccctcccaccagcccctggcatccaccattctactttctgtctctatgaatttgacaactcatgtgacctcatataataagctttgtttaagggtaaaataaaatttaatagttgaaaaagcacttttttcaaagagtatttctaggaagctccaattcctgacaccaacctttaacaataacaactccctgcggtattttttttccttgtcatgcactagtagaaatatttggctttgtttctttgttttttgaaacagtatctcgctctgtcatgcagtggtatgatcacggctcactctgcagcctggatgttccggatcaggtgatcctcccacctcagccttctgtgtaggtaggactacaggtatgcgccaccacacctaatttttgcattttttgtagagaggagggtttcgcactttgggaggctgaggccggtggatcacctgaggtcaggtgttcgagaccaacctgtccaacatgctgaaactccatctctactaaaaatacaaaaattatcaggtgtggtagctcacgcctgtaatcccagctactccagaggctgaggcaggagaatcacttgagccctgaagtcagaggttgcagtgagtcgagatcgtgccactgcactccagcctgggtgacagtgagactctgtctccaaaaaataaaataagagatggg

SEQ ID NO: 59209 - DNA, 1290 bp, Homo sapiens
gtgagctgagatcgggccactgcactccagcctgggagacagagcgagactctgtctgaggaaaaaaaaaaaaaaaaagaaatggtctccaaaaaaaaagaacgaaatggatgaacacttccacatgcgagcactgcctttttcttgctttcctgtaacagtgtggcacgcaacgaggccagagacaaccacagaaccagagtcccgtttacctgccgggtttattcttcataggaagagtaaggaaaaatacggaagaatggtaaaaacgtacttggcctccccgtcggggaatcgaaccccggtctcccgcgtgacaggcggggatactcaccactatactaacgaggaccgcccataaaacaggttcttcaagagactgttttaaggtaaacgtagctttccctaaacactttccaaagaattaagtatcttgtatttcccacaaaacaacaggtccgacttgacttcatgccattttaaggcgatcgtttccagttcagaaagcagacgttaaaaaacagaaagcaaaaatgaacaaacaggcatcaacaaatgtgcatttgagacatggaggaggtggagacgggaaaaacttgaccttatttgatttacccaaacggggagtggagggggagtttcctttccctctggctcctcgcggacactgctcggggctttgttaaatatagaaagtaaaagcctttgatcaattggaaggaatcggcttcgtctatgcacctcctttttcccccggggggaaggaaaaagaggaagtgccgaaacccgggatcgaaccagggacctttagatcttcagtctaacgctctcccaactgagctatttcggcagccgttacgactgcgatgctcttttatcctcctggtcgttttgccgccccgggtctttgacacagacgctgggaatgcaggttcagcagggactgcgtgcggtggcctgttcgtctgtcaaggccacgacctctgagaagccttctctgatcacatctcccgccatggcccagcctttactatttactgttaactttatcattttccttgtccgtctccccagcaagcatgacaaacacaagaggagcaggaaccttgtctacctcgggcaccgctgtgtccctcagtacctagaacagtgcctagcacattgtggggccttgacaaatatttgttgactgattgactgactgactacatgaatgaatgcatgcgtgaatgaatgaatcccacctggttcagagctcgggtttctcaagcccccttctccgcgcaaagg

SEQ ID NO: 59210 - DNA, 3752 bp, Homo sapiens
gaaagaaagaaacttaacagaatgcagtgaggtcaggcacttccaagagctgacccatcagtcagcccttattcatccccgagtgggtgtatggtggtattttggagaacctttactggacactttgccaaataattggagcggtacttgtgctctagttcagttagctatcccttttaccctggcatttcatcaaccagaaaaacaaacaaacaaaaaaacatgacatcgtaaaacaagagaagcctctcgtaggtcctttgacccccatgtttatttagatacaactgacgttccacgaggtatatcagataaattcaaagctagaaatcagagagctgtgaggttcaaatcccttctcccacaaataacaattaataagaatgtaaattggataaacaatatttattactatcaacaacaatttattaactatacttaaagatgctattaaaggaatagcagaacagttaggatccactactaaaatggcttaggaaaataaaatggctttaaatgtagtattagccgagaaaggtggtgtttgtgttataattaaaacccaatgttgtgtacaaccttcatcccaaataacacgactcctaacagaagtataaccagaaccttacaaggtctcactgctttatctaaagagcttactagaaattctagaattaataaccctatttcaaattggctaggacgatggtttggtcaacggaaggaaactataacctcaattctcacttctattactaccgtaataggtacacttctccttctcggatgttataccatgcctctggaagctaatgacaaaattaataacgacagttcttaccaaaactactaaaacctatcttaactctcctccaccttattctaagagatttctcctcttaaaagctcaagtagaacaattaagccaaaacatgctaaaacagtttaaaaaggaaaaattataaaaattaaaagggaaggaaatgtagaaagcaaaagttcctcttcaaagcttcccctttaaatcataaatgttattaatatcttttctcagaactaactttcttcaaatttcttattttatagtaataactctctgttaagccttaggtagcaaatgtaacagaataagcacactctgacttcggtatctgtgctaaacatgctcacaggcacgtagtacattctatgtccttgtacctttgtcaaaatattcgtgctggacgtgcccaggcatgtcccagcttgcagcctacactcttccttatttaggaatattattacttttctaagtcctttcgtaaggaacatccttttttcctatgttcctcactgcttttacctatttaaaaaatttttgaactgttagctaatcgggttttagtttaaattgtgaggtctggctgcagccaatgaagtcaaaacacagcaatagggacctcatgcataaggaataaatattcttcagttgtatctgacttttaaaaattagacgtatcattttgataaaaatcgaataagagaggaaaggaaagaaaagaagggagaaaaaaatagaattccaaaagtccagaaaggtacagaaatggaaagtcaaaaagtcactcctcccacccaccacccgagtccttctccccaaaggccccctatgtctacagttgatcgtgactgatgtgaccgcgggcgggccacggagcctctgtctgagcctgtatttcatcagtttgatgtggagaaaacggctcgttggtaggatccttgaggatgtaatgcgtgaacactaaagcgcttaccaataccgcccccgcacgttaagaactgtatattgttggctgctgctcctgctgctgttgttaccgtgatgccaatcagaaacattaatatactcacacatttgtgtgcatatctataattttttgacataaaaatgaacctattatgctcactgccgagcaccctgttttttcttccctcgaactctccttggaggggaaggaaccctcgtaagggccctaattcagtgttgcaggcacacctgcgatgtgcacatcctcttatacctactctgtatattttggaacaccgaaaagcatcgccaacaaagtctcccctctgtatttaaaaatacgaaagtacccggcctccccgtcggggaatcgaaccccggtctcccgcgtgacaggcggggatactcaccactatactaacgaggacaagccgtactgtgttccctgcagctcccttcttatgtccataccattctctcgctatcgttcctaacctttccgggccatccaggctccgcgccgggcaccctggctgctgggcttatccaaggcgggtagaggcccctttgagtggctggaggcactgcacgttccgaagctaaggcacctgaactagcagagcgaagggcacttcctgtatcaccatccccagaaaagaccaacacaaggggtaggggatgtagctcagtggtagagcgcatgctttgcacgtatgaggccccgggttcaatccccggcatctccagacttttccgcctttttcgggcaaattacagtcacgtggttacaaaagcttggaagaggacccaggcaaccctcaacaacctgcctgcgaagaaagctcccttggaaggggctgcgccagcacatttccctgcccctaatcacaaatgccctgggcccctccaccggagattcgcgttcagtaggtcagtgacggggccgggaatctgccatttgaaacgaatactcccagttatttgtttcatcaagcagatagaaaaacatggattccttagaaaggttctgcaactgaccattcattaactcctgagggcctcatgtcaggttccgtgcatgcactgagcacctactgtgtgccgggtaaagtgtacgtcccctggtatccctggataagacaggccaggcaagctttctcagcctttttggactttatagtccagtcctggagacttaacaataagcaagtagcgatacgttttatgaagacaataatagcgatgagatggaaactcaggggtgcaggagtgggggttgctttagattagctgccaggggagacctctgcagaaacagtgcttccagcgaaggaaacggcaggtgccaaggccctgaggctggaggaagggcgctcagtgttgaaggggcaggaagaaagccatgccctggagcttagtgaatgaggatgaactttatcttcgaagacactggaaggcctgacgcaggggaacgcgaccagattcaggtttgaaaaggctccctctggctgccatgcggagaacacaccctgggcgtgggtggacgtggggagatcgggaaggaggtgcagccaccgcccaggaagctgctggagacttcctccaggggtgctgcagaggaagtgcgagcctgatggagttcaggacaaatgctggacgtggttgcatagtatttcctaacggaggggtagcacgctttattaccattcctcctagggattcgggtaattttgtttcctctcactgaagtcttgtagtcagtgatctggtgcatgcgttttccttgccttctggcgccggtacctcgatggggcagatgtccacagggagcaatgcagggtcaaagggcatggatacttttacaaacgtacttctctgtcgcccaggctggaatgcagtggtgcgatcatagctcactgcagcctcgaaatccttggctcaagagacctcccagcctccccaaaag

SEQ ID NO: 59211 - DNA, 1091 bp, Homo sapiens
gcaactctatgggatgctgcaacccacccaatggcctcttctgttttatctgctcactatagccgcataaatttctatatgtttattctttgcctgtctcctcctatacagcaggtaaactcagggattttctaaaaatctccctttctgctatgtctccagtgcctagaatagtgcctggcatgtaataagggctactcctaaaaaggggtctgagagaaatgtcagccagcctggagctgagcagacaagactgggctgaaaatacacatttgggggtcgctggagattataaagagattataatcgaagtcatgggaagggatggaactactcctgttttttttgccaaattctccatgttactatttgagggcgagagaaatcccgggtattccatatacactgttaaaactaggctgtcactaagcccctctcctttggatcatctggaatggggggacccattcccccattccagatgatccatcccacccctctgggatccccacccgagagtcctgaaggcagggcacaggccgccctgggaaatctccgaaatccagccccggtccggggatgtcttaccctccagttccagctgcacggggggcggctcgggggggcccttcgagggtccggggcccgcctgctggcgccccttgatgttgtagcgccggcgcagcttccccatggcgactaggccagggtgggcgctccagcggccggaccagcagagcaatccgaaacccagcccacgtgggttcccagaccaccaactccggccgtgagacttccgggttgtgttatcgcgagaactgtaactgactttgccgctgaggggcggggttgcaagagaaacccagcgaagaggagaggcggagccgggccgggcagggggcgggactatttagagaagtaggcggggcctgaggtcccagcggaggccggagtttaagtcctgggctgttctcgcttggggtagtctgggtttaaatatgaattatatctactgatactaatttggcttcttgggagtggaagtgttttgccaccttttaaaatataccccgcccccagtactccaaact

SEQ ID NO: 59212 - DNA, 1271 bp, Homo sapiens
ggctgtgggtaaaggcgcggcgcgcggcccccgagcgcgccaaccttgccctagccggagcccgctgcggcccagcgcacggccctcaccccgcatcgcgaccccgcgccccgccggccgagcatgggcgcgcgcgcctcaggcgggcccctggcccgggccgggctcctgctgctgctgctgctgctgctgctgctcgggctgctggccccgggcgcgcagggggcgcggggccgcggcggcgcggagaagaacagctaccgccgcacggtcaacaccttctcccagagcgtcagcagcctgttcggcgaggacaacgtgcgcgccgctcagaaggtgggcgccgggcccgcgcccgcggtcaccttgccccggtcgccacgcacctggctaccggggccgacctgggaggagcgcggcctccggggctgcccgcccggccagcgcgcgggaagagggggtccggcctgcgcctcggggcctgccgcctgcggcccccgccgggcctgaccagtgcgggtctgggcggccgggcctcggggcgccctctcctctgcgccgcgcttctccttggaccttgcctccgcggtcggcgcagccagagtctctcccggctgcgctgacgcctgccgcgcgtctcattcattcattcaccgcgtttgaatggctcctactgtgagccaggcagcacactggcgctctcggtccccacgcggctgcgccctccccagctaccccgggtttgtcctagcctcgcatcccgacccacttcccctgggaccttctgccccactcctcctcctgctttgaagatacttggagttgtttttactttacaggaaaagaagggagcaatgcgatttgctcggtggctttgggaaaccgagcacctactgtgtgcggggcctttcgcgtggagccttttgtttagtttggggaggtcccggatcctgcagcctcctgggaagggtgttgagtcccaggaggatcgcagggggttttccccaattcctgctctctggagctaggtgcgataggggtgccattccgggccgaagtccgccgactagctcttgagaaggaggaagttactggggacagttgtgtgtggtattgcggttcctttgctgttccctggggaggagggggctcttgcttgccgccagccttcctggggttttggagtcagagaagtttgggttcaagttggagctctaccagttggatgactttggggaagtgacttcacttctttgagcttgtttctttat

SEQ ID NO: 59213 - DNA, 1445 bp, Homo sapiens
tgtattttgatacccattggcatactatgtatattattgtattatactatgacattatcttgtgtatgtacacgatgtacttatttgttaatcgtctcccgtcttcctcacacctgtacccctcctctcctgttgacagagaacaagaattttgttttgttcgctgctgtatccgcaaagctcccaaagtcctccgaatgccgcaggctctcagtaaagacctgcaggaagaaatagcgaatgaatgatgtacacgtgtaggaaacagcgggctcggacgcctggcttctccggctgccctaacgccctccagctccaggtgaggtcggggagctggggccaaggctcgtgagcgcccctcacccccacgccccccggccgcgggcgctggagccggcggctgcgagcactcctttgagcggcgctgcactcagcggagggttacaggcgggagggcggggcctggaagggggcggggattcgaggcggggcctgcggggcggggcctgggccaagcggcccgcaggaggcggcggcggccgttcagtcccttgttccccgccgccgccgtcgctgacccagcccgccaggcgctcctgaccgtcgcttcctccggtcccaggtccccggccctcgcctcagccccggcccctggtccccagccctcgtcgcagccccggccgcccgccgccgccatgtccaaggaggagcgccccggtcgggaggagatcctggagtgccaggtgatgtgggagcctgacagtaagaagaacacgcagatggaccgcttccgggcggctgtgggcgccgcctgcggcctggcgctgggtgagagtcgggcgcgcggccgggcctgcgggggatgggcgggagccgtgcagggtggttgggtggtctccccatggctagtttcacgcttctggggctggaggagccacttgatggcggggaggccttctgactgcggggttccccccagtcttggggaacatcacccctccacagcacctcctggcacttcctgactctgcagcgtctcctctgcatgtgggggtcaccctctccccgggagtgtcacccctcgggagggccagctgcctgttgaccgtgtgaccccttgctaggctttcctacctgtgaggtgctccctggagtcttgacctccggcctgtgggggcttcccccggacatagggcctttttgacttgcagctcttcctctgtttgtgggggtcccttgccagtccccagtgccgtgcactctgtccccctgacctccctcatctccagctgcccctgctggaggccagcacctagcaggatggtcaggcaggaggccctgtccacgtgtctacactcccagcccccaaacagaacctagtaaaagactctctttccacccatcaccttgaacctcagaaactgcctctctcggtgcgggtgggg

SEQ ID NO: 59214 - DNA, 1000 bp, Homo sapiens
ttcaccaaatgcatgcagcctgctgttttgatgtctcacaaagaagtgtgatgatctggctaatgttgcacaaggacctgtcagctatgttagaaataaatctcacactctctaaaacccagagcttctttactttgtattcctctgggtgtgtggtactcatagttagtctctaaaggctgtttttgaagtgatgacacacagttaaggacactgaggtacaggggagatgttgtctaagaaaagtggttctgaagatccccggcagcattatccatgatcttgattgacccagacagaaagaagtcttctatcttaaaagtatttgcctctgcttttttctgggggtggggcggggagatggtgggggggtgggtagatttgtgatccattgcataggaagtctctcttctgaaaaaaggggtaagagttttttgcttttattttccaagtccctgtcaatagcactgtagcttagtccacaagcacagctagaaatactggacccttgaacacagtaactcaaatgggttgagttgtttgtcctctggttgtttattaatgaaagaatagttgggtctcttatctgtgtgcagtggacagactttgcccttgcaggaaggtgaatcaaggcagtgccaactggagcttggtcttcttggtcttttgtgtgtccctacatagaccagaagccccacttcacatgtcacaggtctgtagccaacaaagtcttccctccttctgtaggttgaaaagctattgtggataccttttatgggaacagcattggaaacagcttttgagatgtgcaaccccagtttgtaaataccacctaccttgttggtagtcatttattgagctgctgtaccaggctccaagtaggatattggaggtttaaaataagaaatggtggtgaattttaagaagcttgttactgagatggataaacatctgtctccatcttccatcctcctgtttattaatttatccgttatccatc

SEQ ID NO: 59215 - DNA, 888 bp, Homo sapiens
atgttttcatggattgccttgatacttgtagatgtttaaatgtgtctgggcattgaagagttaggtatttattatagtctttactgcctgggcatgtttgtacctgttctttttgggaaggctttccaggtattcaaaaggacttaggtgttgtgatctaagctgtatctgctttagggggcaccccaagcccagtaatgctgtgtttcttgcagacgcatagtggtacccccttgatggttttagtcaagatctgggagaattctctggtttattagacagagattcttattctcttcccttactttcttccaaacaaatggagtctctctctctctctgttctgagccacctgaagctgagagtggagtgacataagcacccctgtggccactcccactatgactgtgctggatcagacctgaagccagcacagcactgggtctcatccaaggcttgctgtaaccattccctagctaccagttatgtttgctcaaggccctggggctctacaatcagcaggtggcaaagtcagccaggttggtgcccttcccttcagggtggtgagtttcctcaggatctgggtaggtccagaggtgctgtctgggagccagggactagattcaaaaaccttggaagtctacctggtgttctattgcattgtagctaagatggcactcaaaccactagacgcagtccttccccctcttccttcgcctttccaaatgcagagaagcctcaccctggggccaccaccaccacaggcctacagagtactgccagactactgccaatgttcccttaaggtacaagatctcttcagtcagcttgtagtgaaggctacccggcctgagactcaccctgcagggcagtgggctcccctctggc

SEQ ID NO: 59216 - DNA, 383 bp, Homo sapiens
ttcttccttctctcctcaagtggagggaaggggtcttttgtggtactgtaagctgtacagcctggggttggggaagggtgatgccagcactcctttagctgccccagctggtatctcagtaggtcacgtgcccccaggtccactggccctgggcccagttcagcactaggacttgcctaggtgttgtaatccttgtggactagactgcctttcaagtttatttaggaacacagagcactttagcccacagtggtaaggattgcagaaattcaagtttggactgctgggattggagattcctctctgcctagggctggatttatttatttaatttatttatttatactttaaactctggggtacatgtgcagaatgtgcaagtt

SEQ ID NO: 59217 - DNA, 930 bp, Homo sapiens
ccaggtaggcctcaagaggaacggatcctgcatcctgagctctgggactcgcgggctctggagctcccgttgcgttcaggccccgggtgctgcggcgggcgcactcctaggcagggagaggggtggccgccgtctccgaagcccgtttcttgccgggatgcctggaggaagtggtttctgggtctgaatccggtgagcgcggcctcgtcctcttcccgccaactccccgccctcgaggagcgcccgcctcccaccaggggccaggtctccctcgggacgccccgcgactccgggccgcgggtttctggaatccatgggggcacggcccactcccggacgctccttccccgcccccagccccaaccccggcgtccccgcagcggctgcatgtgcagttggagggagcgggtcaaagcctggcaggacgcgctcccaatcccgccattctctgcaccactcgcgataggaccaagaggatcctgcgcaggcgcagagcggaggccgaggtggcggtgacgcagggcccagcgctccctgaagggtcaaagctcaatccgagcgcaggcgcagagcggaggccgaggtggccgcggggcggggcagaagggctcctgtggggcccagatagtttcctcgcgcaggtgcagaagccaggctgcggtgctggagtggcgggttgcgggcccaggaatcttctgggagcagctggggtggattgttatagttttttaaaagtggctttgaacgtttttacagatgttggccttaagaaacagcagtttgtgcaaacaaaggattcccttttcacagtagctgagccggctattaactaggccggaaggctggggagggagttgtagatacctgggcaaattggctttctgctttatttttatgttaatttcaagtaattcttgattggatctcagc

SEQ ID NO: 59218 - DNA, 879 bp, Homo sapiens
tcctgacctcaggtgatctgtccgccttggcctcccgaagtgctgggattacaggcatgagccactgcacccagcctcaaaagctttttacaagaaactgctctcctccctgtaattatttgggtaacttttcttatcagtaaaggtgtctgtgcaactccccttctcttatgcggccgtgggtatgtctctaggcaagcacaaagtacagcttctcttgtttgtataactgtgggtttgttttaggtaagctccctcccccttgtgcaagttctcatcatgtatatgcctgaaaaggggaggaaatttttcctgggagctcactaattacaaagaacaaagagattctgggctggacattgcttgtttatctgtccaggtacagcctgagtgttttcccaggttgttttatttctgcctgttgctgtgactattcaggccgactgcttctgcagtctgactttttcccaaatgatttttcttttccttctccctcactgatatctgactgtgcaatgctggctctgtagccttgggctggcttccctgagctcccgtgtcctcaccaacagggatcatcacatccaccttgtaacgtggttggggatgtaaagacgacctggcagggtgcttacatgtgcaattgttcaataaacatttgccactcgcccatgtgtaaggtagggggaaaggtgagatacagtttttttctaattttctcatttgagaaacaccttcatgattttttgtcctatatttaccacctcatcacactgacttgctttttgtttgtttccttaaaaaacatattttaggcccagtgcggtggctcatgcctgtaatcccagcactttgggaggccgaggcgggtggatcatg

SEQ ID NO: 59219 - DNA, 2203 bp, Homo sapiens
gtctctactaaaaatacacaaatcagccaggcgtgatggcgtgtgcctgtagtcctgctacttaggaggctgaggcaggagaatcacttgaacccgggaggcggaggttacagtgagccgagatcggccaccgcactccaacctgggcgacacagggagaccccatctcaaaaaaaaaaaaaaaagaagataaaaagtaaaacgtattttaaaaggaagcttgctatcattactgaacatggaaaatcactccgtttccaaatttacaaagtgtagatgtgattaaaaataaaacaacgtggttaaatttaaaatagaaaaaataatgcatacgtgtttagagaagtgcatacctgaaaacaagttcttcaaggaaaatggaactattgacaatccctgggagacaccaggagaggctcctggtgggtcggggagttcctgaacgccctgagtgcggggtctccaggtctgagacagaacggccctgctcaggtcagaggacagctgtgatgagtgagcgaggtggccatcctgccttgccctggaccttgtgtaatattttgctgcgtttggaggataaggacaagtggtagtctgatgtggattagggcatgggtttcctgtggctcccagaaaaagggacacacagaattgcagtccctgcccagctgcacccaacatccaggtcatctgtcaccaggcccaggggacagagcaggtctgtgcaggtctcaccaccccttcctgttgactctacctccaagaatcctctgggaagtgtgttctttaccgtcctccaatcctggtctctcctggtgccctggggaggaggctgtgagaagatcaaggtaactggacaactctttgcacacccccaggggcagagtgcctgccagcaggacttcccaaagcagtcgccaggctccacgaagcggcgctgatactttgggggcttccgcctagtgcagggcggggcccgtgggcaggaccctcccccccccaggctcctcccagaaagagcgcgaggcggaggggaggggctgcacgttcctggtgtttgcctattagcgggaaccatcagcggacaagacacccccgtttcctggactcctaggggcagagccctgtgagaggaggaggcaccacctcttcacctattcgctggactttgcctagttcgggccgggcaggtccgggcatctcggccccacaggcttctagggaggaggaggggcacacttctttgtgacgtttaccagaaatgggcgtggccaacggagagacctctcccacagtaagaaggggaggggccccacgccagtgtggcctttttcttaaaactggccaggggtcctcactaggctccccgggggcagggcgcggtaggggaaggtaccctctctgtggggcatttgctctgctgggagaggctagttgtcctcctgagacctccaattcacgggctgcaggcggcagctcctgtaggaggggctttgtggggaaaccctctctttgcaacttttgctcagggctgggcagggctggctgtcagactctgcccaggcgggtccccatcactttgctggctttctcttggtgcccctggggccaggggccagggttggaccccacaatctcctgggctacaggaagtgctgtttaggaaagggtggagcctgccccctttactggggggcttagtgtagagcttggtggctggacaaggtcccacccctcagcccccttgggatcagtatctggtggggtggcggggggcggggcaccacctccttctattctttgcctaattctgggaaaggctggttgactgggcccagccccccacgccccttggtggaggactcaggtggggaggggcatcggcccagctgctcctgtgaggaagcggcgctccttaactgttagaggagtggttacagttaaaagagatcaatctgcagcgcctccctcctcccagtcggctgtctacctagaacaacattttcttggagctttttgtctttgtgctccttggtggtcctaggttggagggccagggtgtttaggatgcaaaagtaaacagcatccttcctcttccctggaattctgaggtccctagccgctacaccttctaatctccacatttcagagccttctgtgggttgctttctgttttatgtccaggagtttttgttcttttttt

SEQ ID NO: 59220 - DNA, 570 bp, Homo sapiens
atctctctgtgctcttgtcctccacaattctgctggtgtctccattgactaaacctcatcagaagtcgagagaaagggaagccaggtgatgctgtacaaagaagtcagtcttcagagcacagaggagggcggggaagggtgaaaagtgcgtctggagggagaggtaggaactatctaacccagaggacaatggtcttcatgaattcagctataatgggcatgcaatcaacacaaataaataagaggaaaaattgccaatatagttgcacactcttttctaagtatttctcaatggatgaaaatagcttgcacaatcccttccttgcttcataggggacagtttcctatagtttagctaaaagcagaaacggtgacaattctatcaagaacaacatgagcagaaacagaaacagcaactagcatttctgtaatgctttatcatttacaaatgctgtagtctattaaatcacaattgaacctcatcataacaatgttttagttagatatttagaaacatttataaacgaagaaatggaagcgtggagagcttacttggctaactggaagaca

SEQ ID NO: 59221 - DNA, 733 bp, Homo sapiens
ctggttctgggatgtaaagccagaacacaagctgtaactgctgtgccagtcaaaactgttgctgtgcacatctgtatgcttcaatcaacaaaacctagtgcaaaaaaacccccaaaaaacaaaaaaaaaccagaaaagagggagatgtgggggatcactcagagtggtgggaaaactatatggaaaggacgcaaatcttctgaaaggtcagaagtttctgcagagcccccaggggagaatagctgaaggcagctgttctataaccctgaggcaaagggcaaggagtagctacaagggaatgtgggggaatttatctcaaacaagcttgtttagttatgttgaccaggaactgacctttgatcatccatgcgcatgactcttcctgaaaggggaaacaataaatgttaattacctacaggttgtgtgggctccaggttttcggcattgtgcctgcactgaataaaagcaagcagctccagcttcttggggctgctctctggtcactagagccaggcagtcacccagctgctcttacgctacatacttgtgtctgagtactcatttcatctgttggccaggatttgcgggacagacctagcaaatttgagtccatttaagagtgaaaagtaacactggtagcaatcatttgaaaatgtgtcagaataccagtgacacatatacaccaaaaatccatgtaagataccaacaagtaagtcaggtcattcacaagata

SEQ ID NO: 59222 - DNA, 1080 bp, Homo sapiens
tttataatcaccacctaaacggaggttgaactgacctgaaagccaatggctccagagtttcagctcttttttttttctttttcttttttttttttttttttttgagacagagtctcactctgttgccaggctggagtgcagtggcacgatcttggctcactgcaagctccgcctcctgggctcaagtgattctcctgcctcagcctcccgagtagctgagactacaggcgcacaccacaatgtccagctaatttttgtatttttagtagatatgggatttcaccatgttggccaggatggtattgatcgcttgacctcatgatctgccagcctcagcctctcaaagtgctgggattacaggcatgagccaccgtgcctggctgaagtttcagctctttactggaaaatgtttatcttggagtggtggtggcaggtcggggggcatggcatgaattctgcttagaagtccttgctggttgtagtgaaatggccaaaggttggccttatctcaggcaggacacacagtccatccctagtggtagaccagaaaatcgattgcaattgattaacaattagtgagtcatttccatggaagtcatttgtgttttcaacagcagctcatcctcatttcactgccaattgattcagtcttctgctcacagtccacggctaatgacatagtaattccaatacgagctgtggttcaaaaggcaccatttgtgatgtgcaaacaaaagtctgatacggtgaaattccagccaattcactttgatgaactgagcagaagaatttgttttggactgggctgcatccctttactggtgacttaattgcaaagggcttaattccaacattgaagggagttctaaggagtgtcccctctcttggctgacagcactactccttcatttatctccatctcggcaaatggtgccaccatccacaaaattgccctgaccacagatctaagacaaatgctgatgactttcttctactctaccaccatatctagtcagtctgcaagccctggggactctaacctgcacaatacatgtagacgtcacctatttttatccgtct

SEQ ID NO: 59223 - DNA, 735 bp, Homo sapiens
gattacgggaactacaattcaagatgaaatttgggtggggacagagccaaaccttatcactcagcctcagttgccaaccctggcctaatggctacagagggcaaagggggctgtactgaagccgttggcgtgttctgttgggtcctgtgcccactcctgtgtataaccatccctgactagaagtaaacaagaggattgccatgcagtcacaagaaaaaaaaaaaaaagagatcagttctgcaaaggcttttggttcaggaaagcaaggtaaagactaaattgtttccaaacttatccattgagtctgggatatcttaaaaaacaggcccctttttttttttttttttttttttttttaagtatacttaggccttctttcagaatttaggtgtgaaagaaaagaaaattagcacaggttgttactaaactctattttggtgacttgggcaagggttgagcttgtcgttgatgtttatataagagtgaatcagctagttaccaaccacccaaaaaaagataggaaatgggtgaagatgtgagtttggaagtacacatagaagctaaattgtgacggtcactctagctaagccaaggcgtttggactgtagcctatagtcactaaaaaaactactggaggattttaattaggagagaattttaagagaattcttgaaaataaatgaaatttttggcaggatgtggattagcaaggtgataattattttagaaggtgct

SEQ ID NO: 59224 - DNA, 1026 bp, Homo sapiens
gagcaggtgaatttcagagaatgtagcacctgctgatattaaggaagtgctcactcggaagcagagaacacagaagtctgcctgtccctctgataccgttgagaaggaccagtctgtctttaggggactcaggtgcctattctaatgaaaacagaaaattcgagaactggggtagaatgaagtcctgtgtgaccctgcagaggcagttggacagggcttcagcacaggtctgtgctttgttcatgagtcatagaagtggcatctcagatcagcctgtttacagggcaactgcaaagcactttactcctggactgtttctgatctcattcaggggaatggtaccgaccatgatttcctactctttattgttgcatgtaaacacatgaatcagtgtcagttttgtacactcttaataacctgatgaaactattgaaaaaatatttggagcaaggaacatatgtcaacaatgaagaaaatagtgttatttcactggttacatattaatggacagaaagaaataaagtagattatgatatttccctctatgagctaggaatctcctgcttatatgatgaataaacagcaaggtttccttcacttgtctagcaaaaaaacaaattggataatgtcattttttggctcaatattaaaactaaacattggatgtgattccaagtggtttcctgtcctgcttagaataaagtccaaaatccatattaggatcttcaaggtcctacattgcttctggatgtcttgaccatgttgttcgcagatactattcattggattcttgccatattgtcctctttgctttgcctcaaatacccccaactacacacctgctcttctttcttcctggaagtcaattcgccagatattttcctcacgttgttcagtctctgttcaaattccaccctttcagagaggacatcttgaacttcatgtatgaaacaatactattagtcatcctttaaccccttggtctacgttaaattgttatcttccactattacttgatgttatatg

SEQ ID NO: 59225 - DNA, 1510 bp, Homo sapiens
gctagtcttcagatcgggacactcagtaactacattttcctttctgacctcagtctggggctttaattataaaccaatggaacaaaacagggagttgagtgagaaagacacaaaaggaaataaaaacaaatatacactggtggaatatttttaaagactccaagatgagagtattattatttatacttatttatgggtgtgataaagactaaatgaggtggatagttttgtggtttgactctcaggttttaaagaggaatggctgttggtttctcaattcccaatgaggtgacttgctagggaagaaaggttatttctcagaaactggatctgtcagcaagtgtgttcagttgcgtacaattctttacattgtacaatacaaaatactcttttatatcaggaaacatgactgtctctctcttctgaataatgtacttttcttcttagcagaaataaggcattatcattgactgcatgtttctgaggatagcaccccagagcctgtgggttgctgtgggcagcaataaagagtactgcagtgcttttcaactatattcttagatcttattttcctctccccctccctctcagcctctcatctaaagtaaactcttccaaaacagtaattgaacaagcaaataaaatgccaaggcacctaagtcaactcttttccaaaacaatcatcaaacaagcaaacaaaatgccaaggttatgataacagcagcttttgaaagttgtgtaagaaacacaatcaaccctccttttccacgaacagggagtgatttccagtaattttctcagtacttgaggtttagccattttgaaaaatcttttttaaaatgaaaagaaggagggagcatggacgttcagagagggaggctgaacaagaggcaccccaggctttctctgggccaaggaaatcgttatttgcttccctgcttcccatcctatgatttttgcattaaactacttccttctccaggtcagtccagaggagggatatcattcactattgaaattaagataaatttaaaaatttaaagatgtacattctggggagagagagagagattgagagagagagagagagagagagagagagacagatagagagagagagagaaagagagcaattctttataaaccttggaattttgccatattctgttccattagaattgtcttcagggagagcctctggggtgagacaggagatatgaataaatacttgcttcttcatgaaaactaagaattaactttttcttagttccgcagcctctcctccctagcatctctctgtgttgagcatatttttgacctatgtttgtcatatgacatggttcctaaaaatagcgtctcagttatgcaaacagcacatagcaatccatttacaccctacagggaaactgggttccactgggtctattgagtaatgttaaccagatgttgttttcattttcacattccctttcaatcccaaacctggaataaggtgtcctttcatcagtcc

SEQ ID NO: 59226 - DNA, 1369 bp, Homo sapiens
cacagacctcaattaaagagttaaaattgtaatactcttagatgaaagtataggattaaatttttgttgcctgggttaggcaaagctgtcttagagacaacactaaaagtacaaacaacaaaatattttgttactacctgtcttcctgatgtgcgtctagtctaggctgtttttcttgttattgttactgagacgagaagtcttcttccgaccgaaggttcttctcaatcgaagggttcgtggtctcacggcttcaaggaatgaagccgtggacggcagtggcgagtgttacagctcgattagagagtgtgctgcggcaagatttattaaagcgaaagtgaaaggaaagcttccacgtgggggaaggggacctggaagggttgctgtttctggcttgggtatcttatgcttacatccccttatgacccctgccctcttcctttttctgtcctatagaatcagcttattttctatctgcttgtgggttggcgggcctagttggttaaaaacatcaggctgaagctagagcttaaactccctatatgactggttcaagtttcaaccacttagcttgcagctatgagtcagtttgtcttaggggaaagtcccctttgattggttgaagtttccatcccttagctttcagctatgactcattttggcttaggggaaagtccccttagggaagtccctattgacccaggaagtccagccaacttagccacttagtccctcattacaactcttcccatttaactgaatgaaccactcctttttaaaaaaatcaccactttttttttttttttttcttagagacggagtctcgttctgttgcccaggttggaatgcaatggcgcgaccttggctcattgcagcctccgcctcccgggttcgtgccattcttctgcctcagcctcctgagtagctgggattacaggcgctggctaatgtttgtatttttagtagagatggggtttcaccatattgatcaggctgatctcaacctcctgacctcgtgatccacccgcctcggcctcccaaagtgctgggattacaggtgtgggattacaccgcacctgacctaaaaatcaccacatattttaaagcactatttgtctcagggcattgtgggatttcagtgatgaactggatttagcttttaggttgaacaggaaacgtcaatagaattttcggttttcatgtcagtgcagatctcgcaaaataaaaataaatgtggcattggctctaagggcagggcccatacactagtccaggctattctgtaaatgattaacacatctccaggaggagattgccgccccagaaacaccaattctgctaaatactgaaagcaaatctcacacttggg

SEQ ID NO: 59227 - DNA, 997 bp, Homo sapiens
ttggtggtagagtgagactgtctcattaaaaacgaaacaaaaaaacatatccacgtaaatgagaactttatcactcaccatttcatagtgaattctgcaactttcagttttagcaggtggtcataataatacaaaaatatcttcggcctttttgctggacccgtgacagggatgtgtggtttagctggcctgccacactcacccccttgcaggaggcagcacgtgagcgagcaagtgcagggtccagctggctggtcctgcagggcctgtggtggcacctaggtggggatgcctgtggccctgaagcccaagaggaggtgttacggtgctcttttagttctgccgtttctggatggcagcgtgttggcagctcagttggctccttgcctcattgcatgagtcagctgtcctctgccggggagggcaatgagccagtgtgacagcctttttgggtacccacacttggtgagtcccaaactcttgtcttgcattcaagaagaatgaggtcacacagacaactgaaggatagtgaaagtggagaatttaactgagcaatgaaaactgctctcagcagagaggagagctggagagaggatgggaagggcaggttatcttccccgaagtcccgccatctccttcaaggtccggccatctctctccaggtccagccatctctcccactactgactgagtctggggtcttcctaggcacaggatgggattggggcaggctgtaggtaattttggaaaaggctacatttgattggtaaaaaggtgtgattcagaaagaaccaatcgggagagagcgggcaaacaagaatagaagatctcacgttgggccagcggttccaggctgattttttatttgtatttttggcttgaaggcgtggtttcactggggatccacccccgtctgcctagaatttctctgcctcctgcctctatgaataatttgaaaagaaggaattatatgcgggacaacattttttaatatgta

SEQ ID NO: 59228 - DNA, 766 bp, Homo sapiens
gcacacacctacaaacatatacacagacacagaaacacacacaaacacacacagacacagaaacgcacacacatatacacgcctacaaacatctacacacacatacacacacaaacatattcacacagaaacacatacacatacatacacacatacgtgcattgaaatacacgcatatatgcatgtgcacacatttatgcagacacatacatagcaagtgctggcaacaaaggtggaggagttgggccatgatgtaaagaggaaaaacacacaaggttttcatttcttcatcacaggagtgactgttcgggttatactgtgacggtttcacaagacctttgtcctaataaaaatcatcagtgatctccaggtcctgttgctcaacatgtgaggacagaaaaagtccaggtttatcttcctttgcttcttaggcctgcagcttcgagcgtttgcccctcacttagcatgctgctcccagaaaagaaacattaggtaattaatttgaattcccagaaatgtgcttgcgacctcgatgcaggctcagcggcttccagggagctccctgccttggccgtgcctttgcgcctggctcttgcgtggaattcagactcctagctgtcccgtggctctgttaacttacatgaaatatttttgattcaccctgaaaatatctgtaatatgctgcattatttctgagctgtatgaggacttcatatgcaaggaaagttttatttaactaaataaaccattggaagagccatttatg

SEQ ID NO: 59229 - DNA, 778 bp, Homo sapiens
tctttttttatgttctgatttgtttcatgtggccttctctaagctggtagaaatggaaccacacctgcattagtgtttgcacgccacagccctgtatttacggagtgattgaggaacctcccaggaggaagcggaggcaaactcccatttccaggccctgctgctatcctccttcacagagcaaagccactttcttcctttaggaggtgtccatggatgcctgtgggccatcatttcacccttaaacacaacagcctcctcatcagtcattctaacactgcttcagttttccaccaactttcgcaacctgagcgtgtcagccagggccttaggagccggttactcaaagggactgtggaccttgaagcacaaacaaaatgcaacaaacaaaaatcttcgacagctgatctgaagcaatatgcagacagcagcactttgtttagatttgtccatgcctatttctaatcttagcagcacagactttaaaggtgatacattccctgtgtctactaagggaaggccgttcctctcactgtttattttaaaactataacctttaagcttggatatagggaaaaagaaaggaaagtttccataactggaatcgtgtatttctaatcttaatcagtactccatttaacccttgtaggaatatttgtgtgggtacaaagtcacatgtaaaaataccttggttttgtgaagcttcagctttaaaacactgtgagtcagaaaaagagaaatccttttcattcataatgcaggaagctacccattgggg

SEQ ID NO: 59230 - DNA, 1422 bp, Homo sapiens
tattttagtaatagaatttcatttgaataattgtatagagtgctcttttctgttaaaatttttcatctcatcatctatgttactgaatatgtttatgagggtttttaaataatattttatttttcttgtgtttggtaatttcctttggtaaacctgatagtttttaaaacaaatctttaataagactttttttttgaaacggctttgcatgagcttagcttctgggaagcagttagtgtgtatgtatgcaggctgcatttgtttttctattatctgattaagaagacttgaggcttgtgttcagtttttgtaagtcttgagggattattttttcttgcttataggatgcaatcttttagtataaagcttgagtcatttaccggggctatgtttcttgctgagttctgaacccaactgtttttccttccacatttagggattgcagaggctctgctgactcctcagcctcctaactgctgcttcctacttgattcttttgcctcttggtctttatttatttatataaatttaatattttatttatttatttattatatataaggaagtatcttgagcatcaaaggagtttagagatttccaggttcacttttccttcctaactgataggttggctacccttaactgtacattcagccttcccagaactgtaagatcagtaaaagctctgcctggcatttgctgcattttagtttcactttctatttagcatctcgggtttctactcttcactgcttatgagtcagcaaatatcgcaatgataaggcagaatcaaacgctgggctcaccttgaagtgcttcctttctctcctagggacaatgtttctcaaaacctgaggaaacaagatagctttgcaatgctttaaacaaacgttatttcctttggtgctttaccagttaattaatgtagttgttctaaatgggagggttgatctactgtaaactgacccatcaccacaaaacttatgttttctgagaactgtaattttctaaatctccacaaataaaaattcccctatttgaatgcatctctgcattattttgtcttctttgtgttcaattatggagctagaaacctccaaagagtttaattaaaattaatctgaacttatttgggcgtaagggacagctcacagatgagaggataaagcgagagtataaatgacaccaaaaatcattttttaattctattttgggaaagaatatggtctgcattattccatactaagttcaaagacctatgccattccatagaaacaaactgtgtcgcatccacacaattgaatattgtttagcaataagaatgagttttcaggccacaaaaaacatatagaggaaacttagatgcatgttgctaagtaaaatgagtcaatctgaaaggctgtatactgtctgattccaact

SEQ ID NO: 59231 - DNA, 7045 bp, Homo sapiens
tagagggtgggggatggaggggggatagagggtgggggataaagggagggggatagagggaggggatagagggagggggatagagggtgggtgatagaggtagggggatagagcgtgggggatagagggtgggggatagagggggggacagagggtgggggatagagggaggggggatagagggtgggggatagagggtgggggatagagggtgggggatagagggagggggatagagggtgggggatagagggaggggatagagggaggggatagagggagggggatagagggtgggggatagagggtgggggatagagggagggcagccttgcctctgattgctaatgggaggcaggctggggtgggctccagtgcacaagtcctggcttgcatggctcaactccctacagtgctgagggaggcgatgctggactttcttaccaggacaggtgagggtgggggcttgaaaggggtcaggggccaaccattaaaaatggaatcagactctgtatcacagcagtgatgtagaatattaaactcagctctcaggacaccaaaaccactagggggtttctaccccacagcagctgccatatacaacacggtcatggagacacacacagaccatatgcaggcaacagcttgcattttgaatattactcaccactgtgagtcctgggctgcatcactcctcactggtgagcctgtctcctaggcactctggggatgatcaaagtacctgtattgtaggactgtcctgagaagtaaatgagagatgcttaacttagagcctgctgtgttgtaaatgcataaacatggaactcagttaatcatcattcactcaacagcatcggtctatcttcctgcccacagggttctgcatccaacctcaggcaaaggtgcaagtcatgggggtttcccagtgagtggaatggcctgatgggcgtgtcatctctactcctccatggctgggaaatgtggatgagtcatttgcttagcaggactttactgagcactttgtgtttttgttttgttttgtttttgtaattgtgtgtgctaggcactgttctaggtgccacagacacagcatgaaacaagataggcaagattcctgccttgggcagtgtacatcccagtgggatgagtcagtgatgcccatattcacaaatgaataagcaaggtggcttaaaacaatatcagtttgctgtcttatacttttagaggtcagagtctagaaattagtctgtgtggctgaaatcaagctatcagcagggctgtgttcctgttggaggctccaggggagcatctactcctggctctgtgttcctgtcggaggctccaggggagagcgtactcctggctgtgttttccagtttccagaggccacctgcagtcctttccttaggtccctctgccagcactcctgacactctaacctctgctattgtggtcacctctcctctgactctgaccctcagtccttctccttattagaaaacatgattacacaggactcacacagataatcctgggtgatctcccaattcaaggcactgaatcacatctgcaaagtcccttttacaaaataacatgttcaacagctccagggactagcctatggacatttttaggagccctactacacttgcatattgcaaaactttgtatattaaacctatgaaaaatgagttcaaatcaaaatcacacatccaaatggcctacaatctccaggaagatcagatacatgggtcaaaaggaagaggcatagcaatggaaatttatattaatttgctcaaactgacataacaaagctccacagactgggtggcttaaacagcataaatgcatttcctcacagttctggaggctggaagtctgagatcaaggtgtctgtagggtgactttcttctgaggcctctctccttggcttgtaggtggccgtcttctccctgtgtccccacatagtctactcagtgtctgtatcctaatctcctttttttttcttttttctttttcttttcttttctttttttgttttttgtgatggagtctcactctgttgctcggtctgatgtgcagtggtgcaatcttggctcactacaatctccgcctcccaggttcaagtgattctcctgcctcagcttccagagttcacaggcacctgtcatcacatccagctactttttttttttttttttagtagagataggggtttcaccacattggccaggctggtctcaaactcctgacctcaggtgatccgctggcctcagcctcccaaactgctagggttacaggtgtgagccaccgtgtctggcctaatctccatttcttataaaggcaccagtcagattggattaggacctgccataacaacctcatttttattaaattaccacttctctaaagaccctctcttcaaatacagttatattctgaggtcctgaaggtgagaagttgaacatacgtattatgagcacacacaatccagctcatgacagaacccagagcagcagagtgggctgcagtgacaggaggaggaactgatctgtctaagggggcgacagctccagccagtggtcaccccatagaaatgtgggcttctgagacataatagtctcctggattttcaacagaagtccaatgaaagttttcattttgtttgtttttgtgtatgttcttgcttactgtttaaataagccatcctgggttagcaacctgcatacccagactctctcttatccctctggacacgctgtgggagaagagagggggcttcttttctcctgctttgtctcccctcccttccatccaggttggtgatgagttgtagagggagaagatagaagatgcaagaaagaggctacctgcctaggactggcatgagatggtgcaggtgctctctgggcagggcacatgttgaaagcagctgtttttgcaaaacatccccatacaaaaaaaggagtagaggccaccacccttgactcgtccagctcctacactggactttgacttccatgagggctgcatagaggctgacttttgactctaacccctgggatgggcacaaggccaagccacagacagaagtcagtagatacctgttaaatttatgaataagtcaaagaaatgccttggaaagagaaagatgttctatcaggaaataaccccctgagaaatcttgcaggtctgcacgtgcgctgaggctgaggggcctctgggacttcagtcaaggcacccagatgagtcggtggcaccctctgcctgctctatcttgatgacaatgagagggatgatctcagtttcctctctgagcaagagaaacacagattttaaaggatccagcaatctgtgttgagaaactacttacaaatgacttgttttcattggtctgtataggagtatcaaaagctcttcaatttcttcaataatttcatcagaatccactaatgagatagctgaaccaagatatgggaattgcaatcaacaaaatcagggaaaaggaaaagctctttgatttactcacatttgttccttcctttttctgcagtcttatttgaatggggacagctagctaatgactattccaattctgccaaaacctgagaacgatgccaaaattcaactgacaaaatattaacaagatacaactctaaggaaaggttggcaatacaattacatgcacaaagagtaaacaaatgctagcctttctctctaattgtcgcatgagaagacattccatggtttcaggcacataagagctacttcaggaatcaaaggctcactaaggaagagcggggatttgtgatgtaataggaaacatttccaagccttcattacagagcaagggaaaactgagattcctcaagcatcatgaaacgagatcttccccgagtctaagaggagcccactagagaggcattataggcgtttatgcctctctaggatgccaggcaggcttcaggctgtaaccctggaggctggtgaggaacctacaaaaacaggagccctcagagctggggccagctccttccccatgacttcctccaggtaaaccctctgtgcacctaaggcctgaaaggctcacaacagggttaaaataaaagctgtcttttagtgacagggttgaatcttcaaatgcctggtgtgcacaaaacatacacaaacttatttgcaagtaagcaaaagttagcatcaacagccactgcagcaccccgacacagtacaataaagaatatttgtgcttctgaaacaaaggtgggaagtggatttcctggaataataaattagttactgcatgttcatccagagaaccagacccaccaagagccattggctgcaggtctaagcattctttggatctatttattttaattcaaatgaaatctatcttttttattttaaaaatagcattggagtcacaggagaaaataagaaaggtttctcctacaagtgaagtttactattcatttctacctctttttctgtctaaagtgttgatgctgccctcatggaagtcaaagttgagtgaaggaactggatgagtctacgttggtggcctcatctaatcttagccatttaggaatacaggtgattaaaggcagcttccctgctgggcgcggtggctcatgcctgtaatcccagcactttggaaggccgaggcgggtggatcacaaggtcaggagaccaagaccatcctggccaacatggtgaaaccctgtctctactaaaaatacaaaaattagcagggcgtagtggtgcatgcctgtaatcccagctactcagtaggctgcggcgggagaatcgtttgaacttggcaggcagaggttgcagtgagccgagattgcgtcactgcgctccagcctggcgacagagtgagacacagtttcaaagaaaaaaaaaaaaagcagcttcccgcttccctttcctcagctcagaggcggatcaatgtacaagaacaaataaaatatggaaagacagatacagtttttattattttctggggaaaagtccaatctctaggctcatagagtcagtgtttccatagccaaccaaggatggccagtcctgggggctgtacctaattagcataggatgtccggctgctgttgaccaccaaggtctcagaacagagcagccctactggagaggcagagaatagagagaggatgaagttatgggcaggtaagtagcatattcttttttctctgaaggggaccagataaaattgcttgaactttactaactaaatgttttatgatacagaaaataggcagatttttttttctcaataagagccaggtgttacttaagatggttgtctttactgaatggaagggaaagagagagagagagagggagagagagagagagagacgtgaaagaatgcaaatccctaatagatcatcatatgcactcattttatctccagttgtctgtattttgtggcgattattaaagtttctctgtattcctaatgcccttttgtgaattgttaatacaatattactaaatcacttttctctattattattattattttttttttgaaatggagtctcactcggtcacccaggccagagtgcagtggtgcaatcttggctcactgcaacctctgcctcctgtgtttaagcaattcctggcctcagcctccagagtagccgggattacaggcacctgccacaccacccagctaatttttgtacttttagtagagatggggttttgccatgtcagccaggctggtctcgaactcctgacctcaagtgatctgcccacctcagtctcccaaagcgttgggcttacaggcgtgagtcaccgtggctggctaaatcatccttctatttaaataaaggcatggccctagaatctatttatctccgctcatttccagttaaaaccgtgcgctgaagcctcggcccctccctcttgtgtgggccatggtttgctgaggtttgtatttatgcatttcagaaatctctgcaggctgctggaatcattatctctgggggttcagaaattccaaatgcactgatcttcttctgcaatactacagcaatgacttgcccttacagtcttctccatctttgtaatgtcagctaagtcaatagatttaaaaagaaattgaaaatgccgtcattggtgccaattgccacgaagagcaggcttcagtgtggctttgtaaagaagtaatgaaggtgggaggggggggattttgttccctggtggatgtttttattttgttttgttttctctctctcagttcgaacattctacagacacaagtaacataaattccagttccacatgttttaactgaaaaaggaaaaacagctactagaggttgttgtttgttgactcacatcactgaaaagaccagggtctgaactggctcacctcaggcttgcctagaacctgggcttcgtgactcagttttactccctctcttcattccatcttctgctgggctgggtgagtccatttgatgtagccttatagattcaggacataccatccacttttaacattttaaacagaaaagaaatcatctctctctcgtggctccagaaaaaaaatacccagattcactctgcttagaccaatctgggcccatccagcgataatatctgtgactgtgggaaccatctgactagtcatatctgggttccatgatccatccctgagtctggacgtagagaccacctgaatcacatggactgagaataggggagaagtcttcactccataaaatcgggtgcctcttaccacacacacaaaatgtagagggatgggtgtttgcaaatataagtatttgcaaccagtcgaatttaatttaaatcactgaattgtagaaacaaacagtgtctgcaggctataattatcttttggccttctaatttgcagcatgtgactaaaataccatttattgttagatctttaggttatccccaattttacactattataaacaatgtggatgtgaaaatatttgaactgaagttcttgaaaacaatatgtgattaattccttagggtaaatgtca

SEQ ID NO: 59232 - DNA, 1310 bp, Homo sapiens
ccaaggcggacagatcacttgaggtcaggagttcaagaccagcctggccaacatggtgaaaccccgtctctacaaaaatacaaaaattagccaggtatgatggcaggtgtctgtaatcccagctactcgggaggctgaggtgggagaattgcttgaatctgggaggcggaggtttcagtgaaccgagatcgtgccattgcactccagtttgggtaacagagtgagactctatatcaagaaaaaaaaaaaagaactgtcatataataaatttatattgtttttagccactacatttgttacaacttattagggtaacgttaagaaacttttctattttccgtagaggccccggagctccttagctttgggataaactggtgcttaccccaactgtggggtcagagcgtggaagtgagagaagggaaagaccatcatggtctgctgtggtcagggaaggcttcctggaggaggagaaagtggaggaagcagctgagcctggagggatggggtcactacctttaaagcatctgtcagccatggggatctgatggtttttttattttttattttttatttttattattattattatttttttacaaacccttgtgtggagatctgactttcaatagatcgcagcgagggagctgctctgctacgtacgaaaccccgacccagaagcaagtcgtctacgaatggtttagcgccaggttccccacgaacgtgcgttgcgtgacgggcgagagggcggccgcctttccggccgcgccccgtttcccaggacaaagggcactccgcaccggaccctggtcccagcgcggggcggggcggcccgccggcggggaccggctatccgaggtatccgaggccatccgaggccaaccgagccgaccgaggccaaccgaggccatccgaggccgaccgaggccgaccgaggccgaccgaggccatccgaggccgaccgaggccgaccgaggccgaccgaggccgaccgaggccatccgaggccgaccgaggccaaccgaggcgccgcggggctgccgtatcgttccgcctgggcgggattctgacttaagaggcgttcagtcataatcccacagatggtagcttcgccccattggctcctcagccaatgggatctgattttttaagcagtcacaacactagacttttaattgagaaagctctgtaagcaattaaaagccgctgttgttttaaactcttcttgtgtcacctgctggcaatgaggaaaatgatacatcacctcaacaaaatgcctcagtgagttggtacacattttttatttgcat

SEQ ID NO: 59233 - DNA, 2607 bp, Homo sapiens
tatgtgtatatgtatatatacaagtggagcatccgcccctcttgttatctttactttaacctctgctcctagaccagggtctgggaatggtaggcattcaataatcaattaattatcttagctgatgaataatcagtgattaatgaatatgcctcataaattctcttatatttattgtcaaactctgcttttttccttaaagttgccaaccagtctgatttttcaagagaagccaagtatcaaagtttttaaaaataaaatcccacaatgttaaaatagaagtggcaaaataaatttttatatttacatgtgtgcaatttctttatatttgcaattccttgggatttcttgtttgtgatttgatgcttttttgttttattccaaagcaatgtggctataatatttaatataattctcattgcaggaaacaagagtcattcattcacaagattcacttaatatctgtaggaagggagttattagtgaacatcaaagagaattgtcagaagtgaggaaggggttctaatctgagcttttaaggacaattctgaaaaggattctgtgtcatccagggaagagactctcataggctctgccatacctgagaagcttccccagctagtctcagaagggttgccatgtttctaccactcacatcaaaaaaaaaaaaaaaatgagcaaggagatgatggccatcaattttctcatgtattcagcttccatattaaaaactctcacacttgccactcaaaattatatgctaatctgtgaagaaaaagtagacacagcaggcccaagactgctattgaaactgccattgcaaaattataactgaaacagtgaaagaaatcagacctgaccaagtccatcttacttctagcctccaagctgtccttgttcattcctaagcataggctgaactaactctgggaggaactttgtttatagtttatagtataaaccgaagacaataacggccctttcccaaaacaaacccccttcttacctggggactagactgcctttttaggactcacacattagccaaaagatgagaagttacggtttaggagtcatgcagctagaggccacaagattctgaccctacccgaattgctcctggggataacatcactattgtgaaacctaagaccagtgcttgaggtattttgcagaccctatacgtgatggatcagctggcaccactcaagtcaataaactggctcatctgatattgtggctcccacccaggaactgactcagcacaagaggacagcttcaactccgtatgatttcatctctgaccaaaccaattggcattcttgactcactgacttcctctcgcccacgaagttatccttaaaaactctgatccacgaatgctcagggagactgatttgagtaataataaagctccagcctcccacatagccaggtctgtgtgaattaccctttctctactggaattcccctgttttgataaatcagctctgtctaggtagcgggcaaagtggaccctttgggcagttacactatccttagagatggcggctcgagatgcttctccattggctggcatctggtaacctggattttgggtaggtactcacattctcaaaactgatacaaggggcttaccttgcctaaacaacatggtcctcgtgatagagacactagacagggaaattctgggcagaaaagggcaggtctctggcaagggccccactctcaagcctggaactgtgggccaaaatgagaagatgcattcctatttttagtgaagtaagtgaagtgagtaagtgaagtttgcctctgccgtcaccgaagtggccaactagctccagcgcccacactccagttcctgtccatgaaggggacagggaaaatgttctgcttcacttgctgaattcctgctttccttccaggagtctggaattttgctgcgcgccgggcagagggttcctatgtaactggcttccatgtgcttgaatgttgccttttccaaaaccacccatggcctgccccaccccatatcctgtgccataaaaaccccaggttccacctgcagagagtggaggagaagaggataagcagctggacgttggagactacaatttgatgatggagagaagcagcttgacttcagagggattgcctgacggcattgcttctgaacggagtctgggggaggaacaccttcccactccatcccctttccagctctccttcctgagagccactttcatcaacaataaatcctccccattcaccacccttcagttcattcatgcgacctgatttttcctggacactgaataagagcttggctgccacggatgtgaatgctaaaggctgtcacagtgactctctggccttgctggtggagagcaaccacttcatgtgaaaaggcagagggcccactgaactgtttaacacttaagccatccatggacagcaaggccaaaagagagcactgtaacacacgccctccagggcttcgagggtggtgggtatccccctagatactgccgcaggccctgcatggagttttgttcctgctggtgcccaaaggcactcaccccacctcctgcgcccactcacctgcat

SEQ ID NO: 59234 - DNA, 4675 bp, Homo sapiens
gctagattttcaatttcttcaccaaaacttactctatttttgagacaggatgttctttcctttctaatggggaaaaccccaaatgccacaacaatttgagcaacaagttgtgaaacaaagccctgttcttcttgttagctcagttgtgcatcacaagacaacatttatgtgactttaatggatttactggaagtttagcaggagacaagagaatgactcttcaattattgtgacaatgcatttgttgccattagtatctgcaaatcgacgtcatgtgtgacatcgataagactgaacagcacatcttaggaagggctcagtactagatgtggcacctgaatggcagccagttccttcctcacaatgactctgccatttgtaaaggctggaaaaatacgttatggttggtatagcctatccacagcaggctatctcacagacccacctcacacttacatctactctggtcatattcgtgatgtgaacttgagaattcaaaagtgcattattctgtttgtcacctagataaagtctacctatatagcaaggaggaaaaagaaggcataggaggcagaaagtgctctccattgattcttaggtacatccacaccttggttctaccttccttctctttcttggaataagtcattccttttagcttgaactacttggagatatttcctgtcccttgtaaacaaataacctgaaacaagaatatagcagatcctggactaaggtaataggtgaaaaccaggtaaatctagtcaatgaaaataaagccagagcaatgaggattttgcctttgcataataaaacttcctccctaaaattcatgaatatttgtacaataaaatattttcccttgggttgcaatgactcggtagcccacaacgttttgaaaaaaggaaggcacttataaaactatcttgtttcatgccccaccctcttcagcaagtcagcaatagataacattcctgacttcgatggatatttgttttgctgacatttttccagggactgtctttcatctagtaagttgattgctggagtataaagctaactaaatgtgtctagatggtccttccactcagaaagccacacgtgcgcctcctgcctcctgtctcctgccagttgttgtatagaaaggtggtctatgtgtggctcttggttagatggggtcaacgtgagtgttcagtggtgccagcaccagtagccatgtcttagccacatcatcctggtgaagtttatggttgtattgctaaactacgcaggccctcttggctcctgctaattctctgagccatagtttactttgcttttctgtaaattccaagagtcgattccattttgtgcttattttatcttatgccagtttctgttagatcaaaaatcaaagaagcaaacaacaatgacaaacgagacaacctctggatgagacatggacagggagcctcatttttcctaaatctgctttcactgacagagcgctcattagctcccagggcagtctggtccagttttggaaagcttttgtgatattgttattttaatcttaatttctagaaacccacaaaataagtattgtttacttttcaagtattagctccaagtttcctgaatagtttgaaattacataaatttgagcatgtatctctggaagaagagaaaggagggttggataaataaataggcaaaaattctaccaccattctactcaaccaacacccctcagtgagcatgaagtcagtgaaggctcctccaatgctcagagatttttttattttattttatttttgctaccacttggccctcaatgccagtactcctctgcgtttagagctcggctacagaaacggtgattcaccacaacactggatcggaagagggttgggctgggctttgtcggagattacagaggtttccaaagaagtttttgattacttccaatttttgccttcaatgctgacaggttttaccctcgccccactaggattccttgattctaatgagggtcccctccccagctctccctctccatttgtcccaggcacttcatgatcaatatccctcacactcgggtgagtggatgcaccacgagcaatcatttcagatgctcagggtcagccatcgctaatatctcccctcagagctacccattgcttcctctaaactagcttaatattgtgtttttaaaaaatggaattacaggtgatgatactgttgggttttggtggattatttgttgagtgtgtgtttgtgtgtgtgtgtgtcgtcagctgtgctcactgataagaaaaaaagaggccacctggccatttgtttggcaaaactcctaaaaatcctatttagagccaatccttgagctgagtccaggaacatcaggatactcctccgattactgctattgacacccaccatttaattggcagtgatgatgggcacagtctatgctaagcacgcttactttacctcatttattccctaagtcacatccatgagatagtgctataactgttccatgtcataaatcagaagctaggctttgaggggttggataactatgcctaagttacacagctgtaagttttcaagagtcaaaaattaacccgcttcttcataatcctggaggcctctcttagccaagagttcaaactcaaatgcacacaggggccaggtggtgacaggtgggaattagaggaggaagacagtgtcagaggccagcctgaggtctgaagccccttctcagctcctgctaatgaattctatggccatgagatccctgtggccagatcgtcctattcttcaagaaagtccagaaatttaggttttactctggtaccttttaaagtttaaatgttggtaccacaatttgccacagaaaagagaatgaagacaaaagaaaggaaaataaaataaaatgaagataatagaaaagaaaattatgtaaagaaaattcagcatacttagagttgcatttggccatcagctccaatctgccaggcctgggttacagcccttgcctgaggccagggagggaccaggtatcctttatttgtcaaggtgtccactgtacattgcacagagcctgccacgtgggaggtgctcattaacacatgtggaatgcatgagtgcaagaaagatggtgaatatgacaatgagtaattgcagggtagaaattcaagcacgttcatcagcagctatcctgggaattccacggcacattctgttctctaagcacagctattctaactatagatggccaagattgatcgttctctcaagggcatggcagaatcgtttgcattgggtctttttacgttaatttaaatttctttcacattttgcctattgtgctaatgcgcatttacaaagaaagcaataaacagatgtctctcagcaccaaagagctttaatctttcacacaactttaattttattttcctgtttaatactcttcagtaaatattgtgaaatacagacttcagtccaaataatccaattttactggaaactctgaagagttgatactgaggacacaccagcttgaccaagctaaacgagtcacacagccactatttaaaatgtgttctgtggccatatgattgtccaaaaacacatccaaagaaaatgtattcaaaagagacttttattgagttcatccaagcataaaagagcagtaagagcaagaaaggctcagcattgaccttggcatgaccttgtggccaccatgttggtgtctcaatgccagtgctcagggaacattggggatatccctgctgcccctctggatgagataatacattcaggatcattggtccatagatgatggggtcccctgctgaaattcctacaggggccaggaaggaatatgaatgagtaagaatgctggggaattttcttcaggatacattttttggaatattgagcacatagccatctctttcgctttcataacaataaagtctgaggtctcccacctttctggaagcaactggttctcttcatcttgtttttgtttattcctttttgataaatacatgaaacaggaaatacttcacttttttcttaactctattactagaagaagtaaataaaatggcagagtcatgatagtgaatgcaatccacaccaacatagtattagacggtaaacaatggtgtgaaatgtccttccaaagtcagcagccacaggattagacagtaagggatgacatggattgtccttctaaagtcagcagcctctctttgtgttccacagatttttaccagacagaaacaagtgtcagtgggatcagaacttctacaatttccagagaaaactaaaatctggacttttacataaaatattatgaattttaaatgttgtcaataattccctttctaaaaacacttcctgacagaacaggaccactcacacaaaacacatgggacctttgtagtaattttctttctgagcatggctaacttacttgatacgcatatctcaagaaagcgtattttattctaatgcttgctcactcattcatccatgtattccttccaaaaatatttactgaccagacctctgcaacatacaccctgccaagaagaacaagaatggggttcacatcagtgccctcaaaagctcatattttgattagggacaaattaatgaagcaggtgcccattgtatgggg

SEQ ID NO: 59235 - DNA, 3529 bp, Homo sapiens
ggactactgggcagtcactgcacaagtcgtatgttactttcttagcaatcaaaaacaggctaaaagaattctcagctgttaaaagacaagatataggtgttccttcactcactcactcatcagcaaatattgataggacagactctaggtgctcatttttgttctaggtaaagtgatggatggactaaaacagcaacaacaagatacttccttcatgaaatgatgaaatctacagtctagtcaggagacttgggagataaaagcactgaaaataaacagatatggaagtttcaaataaagactaaagaagcaggtgatgcatggacacagggaggggaacaacacacactgggacctgaaggggtggggtggggtgaggtgagggggaggattaggaaaaatagctaattcatgctgggcttcacatctcggtgatggattgataggtgcagcaaaccacaatggcacacgtttacctatataacaaacctgcacgtcctgccagtgtactccagaacttaaaaatttttttaaaagtcagttatatgtatggattttataatattaaaccattcctgtatttctatgatcagaaaaaaaaaaaagaaaaagaagcaggtgatgtagtggaaggtggctgggccactttggaagagtagccagacaggtcctctctgaggggacatgtgagggtggacctgcgtgatgagcaggaaccagcaagatgactgtcagagtgaggatgtgccgggcatggggaacagcaagtgcaaaggagggaacacacttggcgtgtgggtggagtagctggagggacagcatggcctgcgggcagggagcagctgggaggggggcggggagaagctacagggggccaaatcagagagaccaccacatcctgagtatttgagtggtgagcacataatagatatcaaaaacctggctactttgctgctatagaacaagaggacatggttctgaccttcatggagcttaacactctagagaggaaaagcaacaccacacgaaagcaaaacacagatttagaagaagcacccttggtttcttcccatcacccttccctcttgggaatgccccaccacacatgggcatgaaaggtgcccttgacctcgtcatgcagccacagctgattggaccgggagtgaacacctcactcaggtgggggccaatcaacgtccctcctctccctgaagtgtgaaagagtccatggtccatgagctgcagggagctgaagtgaaaatcacttgactaggtgttgggagccctgaggcagccagggaccagggcaagtggagagagggaactgagaagttggaaaataataataatattcacagtattagatgttggggtcccaagctgaaattcctacaggtgccaggaaggaagaaaactcattaatagcttacttatgacaatagctggttaaattattttaaatgcactagcacattgaatcctcacaacagtcttggaagaactatcgtattcccattttacaaatgataaaactgagggacagtttgaaaatggagccaaggtacagaaataaatgtaataaagtaccatttggccctagaactagagacagaaagattggctactaaaaatccaacctcccagtgatgtcaagttttgttcaatagagtatcaatactctactcctcaagaggttctgttttctacggtaactccccattaagcaaacaggccatggttaggtcaccttcttggctgttttcctggccttcaggaatgtttgctgatttgctaacagtcttcattctaaacccattgagggcctgtggctcctgtgagttgaggtttgtttggtaccatattcctttttttaagattgtcaagaaaaagaaatccttactctttatgtccaactgccatccatggtgcttaccctaccatgcccctgtagatgtaagtgtaaatttcaagagagttttctggactatctcattaaagaaggtccaacctatcaatatttttcaagctttcttactccaatatttaataggcatactgtttacgccacaagggtgttatcaccactaacttgtgttcttgaagtatttaaagaaatatcctctcaggggaaaaaaatgcacgtggttacctttggccttaagtgtgattatgtggggaaaccctgtgactggtcatctgttggcagcattttagtacaacagccccataaagaagacagcacagttaatgttagtttggtagctcaacagtcacttcttcctgttgcttgctgtagcaagtcatgcatggtggtatgagaaatcatgtgagggagaaattaatatgggctgaattttggctttttacaaatttaatgaaagcaaacccacagaccaaagaaactcaacaaactctgaaaacaataacatatttcacaacaaagaacattaccatggacaaacaaagtcatttaattacgataaagactttaataatgataaagatgataaaggggaaaattcctcaaaaggacaatattactacacatgcgtgtgcttgattaaagatctccaaaatacatgaagcaaaacttacaaaactacaggagaaataaacaaatacacaattctggttaataatttctagaacaaagaggaaagataacagcaaagatatagaagacttgaacaacaatatcaatcaagtagaccttagaatgttccacccaatattatcagaatatataatcttttcaagtgcataaaaaacacgtaccaaattaaactgtattctggatcataaacaaatcttaataaatctgaaatgattcctgtcatacaaacaaatgttcccagcaaatagcaaaaagatatcttgaaaatccaccaaactgtcagaacataagtagcactcttctaaataatgcacagatcaaagaaaaaactgaaagggaaattagaaagtattttgaactaaatgaaaccgaaaccgtaatttattaaaatgtgtgtgatgtcactaaagcaggactcaggtggacaaattatagcacatacaccccaaattagaaaatttgtgaaaaaagatttcaaagcaataattttagctttctaccttaagaaaaatttttaaaaagtgatcattatgaaaccaaaagctagttctttcagatttttaaaatggataaacttctagccaaactcattaggaacaataaaaaagaaagacagaaaaagagatacaaattgccagtagcaagaataaaagaggttaagtaattacatattcttgaaatattcaaaagataatgaaaggaaattatgcataactctaacaacaaatataatgagttggataaaattgacatgtaactcctaaggcatgtgctgacaaagcttactgaagaaaattatattcttggaatcaccacacatgtgattatattactataggttttataggtaaacatctcacagacaacattcgaggtacaggttatttcactggataattctaccaagtaagtaat

SEQ ID NO: 59236 - DNA, 3637 bp, Homo sapiens
tttggccctaggcctgaaaatgcttcttataggtgtgcaccacgtgcatccattacagaatggcttggcgagtcacagcgtgggggatgtgtcagctctggagcaccgaatggttctccagaggtctgcaaattattactctccccaacgtgtttgcccttctccaagtgaacacccctgagtagacaggctctgacctccaaaggtttgctagacatgctagaaacaactgagaacgtgccacgggctgtcacgaagcccagggcctcagcgttagtttggataggactaccccttgcaaccagggtctcatccaggtgatttgaggcagggtctctctctcttcccccattacccagacaaaatgttgccaataaagacgtttctagtcacgtggaggacagacaccaccacagcataaaaggattacaggctgcaccctccactgccaaacagagttttgaaaatgaaggacatttttgtgaaaagaaagactttgtcaaggcttatggcaaaacaagcttaaataaccctgtaattcattcccacccaggaccctggaattaaagtaaatgcacgggtagtcagtagggagtgaggcctcccccgtccctgttaacacacatcgagagggaatggagctggggaaacctttcccacctaaagcaaaaccagtttctttaccaagtaagaaaacttcctttgtcttccattgtcaattttgtcaattttgccagaagcaaaaagaagaatttttttgttgttggtatgcaacagcaaaaagaacattgctttgcaaaagcctggaatcaaaatatgtgaagctggggaaagaagcagttgtccccgtggcttcatgaaagtgcagagagctggtggagctggactgagctggatttgagtccctggcctgccccctgtggcaacgagacatgccctggcccagacaagcttttaactcagtgcctgttcaggttctttggtcattcgacattgtttttaataggaggagggaaacaaactgattttcctattcattcattcattcatccacccattcattcattcgagaagcattctatgtgcaaagttcagttctaggcaaggtagaagctgcaattaataaaacaagcaaactcctgaagtcatggatcttcaattttactagagaaagatagagaataaggaagcaaataaataactgatactacccataaaaagttatgaggctatgctgcaatgtggaagaaatttgaaagcattacactaagtgaaagaagctagtcgccaaaaaaaaaaaaaaaaaaacccacatattgaatgacaccatttatatgaaccgccaaagacatgcaaatccagagagacagaaagtagattcatggttttcagggactgggaagggagaaacagggagtggctgttcataggcactgagcttccttcttgggtgatgaaaatggttctaaaattgatgaattggtgaaatagatgagctgtgatgtctgagttatgtctggatgaagctgttgagcaagagttaggatggtagctgtgtaagttatcactgggtcacctgctgtcccaaggtgtagtgactcggcaacacatgctcattattgatcctgagaatatgggtcagttgggtggctcggtggatcttggctggttgctcacagtccagtcatctggagagatggctgagtaacccaggatgggctcactcacatgcctgctgggtgacttgctgtctgctggggcaaatggggttactaggtccatgtgtcattgtccccaggccagtctgggcttgttcatatgacaacccccagagtctgagaaatgtcagcggtgtgtaaggtttctggaggcctcagaacagacacagcatcacttctgccccctcctctaggacaaagcaagtcacaaggccagctctgagacaagaggtgtagattatttttcaacacctttattaagatgttgtattagtcctttctcacactgctctaagggcatacctgagactgggtaatttataaaggaaagagatttacttgacttacagttctgcagggatggggagacctcaggaagtttacaaccatgacagaaggggaagaaaacatgtccttcttcacatggtggcggcaaagagaagtgcagagtgaagttgagggagcatcccttataaaaccatcagatctcctgagaactcactcactatcatgagaacaggatgggggaaactgcccccatgagtaaattatctccacctggtccctcccacaacacgtggggattatgggaactacaattcaagatgagatttgggtggggacataaactatatcaggtgtaattcacataccacctatttccctcatttaaggaatacaattcaacagattttagtaaattgagtgttatgcatacaccaccgcagtcaacttgggaactttctcattatccccaaagaaacccttcacctctagtcattacccccaaactccccaatccccccggctctcccccacagaccttggcaaccacaaatctcctttctgtctctatggatttgcatattctggacatttcacataagcggaatcatagaataggaggccctttgtgtctggctttcttcactcttagcatgatgttctcaaggtgcatccatactgtggtatgtatcaatgcttccttctttttagggctatgtgtaatatcccattgtagggatgcctcacatttaagaggtgcatagttttgaaataggctccacgtgtttatgaaggagctgcaaagtcatattgcaaggagcgtggatacagaaagggggagaattgaggccattttggcaaacagtctacccagcagcatcagttcatttattgctttttgcttgcattgattttgttacaggtgataatgttcccagtcccaggtaatgaatcatgattggaccaagccaagcaaggctgtctcattccttttgccaatgactcatccagaggaaacatgtgacacagttctggccaatgatgagtaaggagagtcttccagcatctctgagaaagcatttcttccctcgtagagaaagagctgcaccttttgtctcctttttgaagggttttcgagggtcattttgaccatgcatgatttttgctttatgcaccatctatacagctatcactgtgtgtaccgagttgaaaagtgagtgcctcaaaagactcagaccctcagaatgtgaccttatgtggaaacaggatcttcacagttataatcatgttaggataaagtcctcctagattagggtgcttcctaatccaatgactggtgctcttctaagaagacagaaaaacaggctgggtgcggggactcatacctgtgatcccagcactgtgggaggctaaggcaggaggatggcttgagcccaggaattcgagaccatcctgggcaacatagtgaaacatcatctctacaaaaatgtttgaaattattagagtgtaatcgtgcgtgcttgtggtcctagctactcaggaggctgagatgggaggattgtttaaccctaggaggtcaaggctacagtgagccatgttcatgccactgcactccaacagcctgggcaacagag

SEQ ID NO: 59237 - DNA, 844 bp, Homo sapiens
aaggaatattagacacattcgctacggctccaagagcatgagtaagacaaacacagacaggccgcaggcaggcagatgtgtgagtgggcccgcagaagaatgtccagcaaccagtgccatgccacaatggggtgcacggctcagagacacaggacgctctgatggctgagtgatcagcctcccacccagcagcctccaggcatttctacgttgatcaaaacattccatgaggggactgactacaaaaggtcccagagacttctctggaaggatggaaataatctatgccttgactgcactggtggttacacaacctgagtaagtttgtcataattcacaaaactgtacagatataaggggtaaattttactatctgtaaattattcctcaataaagagtaacacaaacacttctgagctctcttcttgggcttaagttctggactttattaactggcatccaacatcaccaaacatgagtcatagttggccagtgacttggaggggttctgaggacacaggcctttctgttttaacacctcagttcatgggactttggtgctaacactgggtaagtcccatgagatcatctggttaccctcagtgcatctcgccattctgctactgcaccttcctgtcaagagttacagacctgaccgccgtatgatggacctgaccgccgtatgatggacctgaccgccgtatgatggacctgaccgctgtatgatggacctgaccgccgtatgatggacctgaccgctgtatgatggagcccatgctgacctttaggtaagaggcagtggcttactttttaaagagcagagacaggtactgacagcataagc

SEQ ID NO: 59238 - DNA, 1730 bp, Homo sapiens
tatctattacaatactgaacagaggtcctagaccaaatgcagacatctctactgaataaagagtttgaggtgagaacttcacagacatctaagacacttcttcactaggacacaatgcatttaaatattgctcaacagtggacaccaattctcatgctatactagacatggaccaggaagaaaaatgaaaaatgtgagcagagaaatggttactgagaaaacaaaactagaagtgcgaaaaaataacaaacaaaaagtaattttttgacaagcataaaagaggccagtaaacatagtatataaacttaatagaggcacaaatgatttcctaactgaaatgtactcggaccttcccattacccacagtgacactgcacacaccttcccacggtctcactcgggccttcccgttacccacagtgacactgcacatatcttcccacagtctcagacttatgtcctcttcagatgaagcatgaaaatatcagcatttgattactctgggaaaatcctaaccttaaaatgccattcatcctcatttcctgtgtaattgtggtggtcaatttattccaactccaagagtaatccatcaaaattactttataagccaaaattactaagccctaaataaccacacagcaggcatttctgtaccaagggaacctggctgctgtgaagggacatcacatgcttcccagcccctggcgagcaggccacaacctcctgcccatcgtttgcatgacatcactgtgtgagctgcagctacgtgccctaccaagggtaaacaaggttttcacatgactggccaaaagataccaccaaaatcaatttggagaagaaaagctaaaagaatagaattgtgtacagcataccaaacagttggctgacagaagaattccttaaaatggggtgtcagtttttcctctagaaaaaaaaaaaatgcatcatttgctcttttcatctgtaacataagattttcgtctttcaggtcactatttcaaataatccatccaccaagaacgattgtgacctttgaaaaaggtgaaacactgggggaagatacggcctgacatgatttacacgaacatacgtctcccttggactcacagctcacacatcctctttcagaagccaactaggcctccttctcaaagctatgcagcctcaccccattgtctctcctatcagaatgtttcccagaggctctacctgggagatgaagaggtaagtgacaaagaaccataaaaagcaccttaaaaatacaaacaggtttcctctaaatgaaaaggaccaaaccaggacaaattaaccctcgcctggggcacaacagagtgtacttcaggcctgcacacctcagggtccccagccaggcctcctgccatgaagcagccgcacctggagggggacctgccacctggtcacgggcaagcaccctggcataagggtacttttcccttcaaatgttttttcactatgattcacataccataaaattcacccttcaaaagtgtacaattcagtagtgtctagtatattcagagatgtacagccatcactgccatccaagtccacattctcatcacaccaacaggaactcctgttccctttaagtcagtcccacgcccctctcctggcccgtggcaacccttaatctacttccagtctctgtggactcgcctcttccgggcattccacatcaatggaatcacacaactggggccttatgtgtc

SEQ ID NO: 59239 - DNA, 2435 bp, Homo sapiens
ggctggtctcgaactcctgaccttaggtgatccacccacctcggcctcccaaagtgttgggattacaggcgtgagccactgcgctcagcgtattttttaaattttatttatttatttttttgaggtggggtctcactctgttacccaagctagagtgcactggtgtgaccctagctcactgcagcctccgaaactcgtaggctcaaggaatcctcctttctctgctaggactacaggtgtgcgcctccacggagggcaaatttttaaattttggtagagatgaggtctcactgtgttgcccaacctggtctcaaagtcctgggctcaagagatcctcccgcctcggcctcccaaagtgctggaattacaggcgtgagccaccgcgcccggcctctcttttctttaaagccactgtggccatcactgtgtgtgtagacctcaccccgccccaggcaaaccccttccagcacccatcacaccggtacctccagtcttggcccacctgctggcgggattcctcggcactagacagaagccccccggggcaaggggctccctccgcggtcagaggcagggactggggcaggggaagaggctggggctgggcaggggctggacagggacagggacagcgcgcgggggcgcggctcacctggtcggcgccgaagggcgtgatgttggccttgacggtggccacgcccaggcccaccagcaccagccccgcgaaggtggccggtgagcagcagcgggcggcggcgtcgggaccaggcgccgtgcagttgagcaggcgcgcggaaccgcagagcgcggctcgcgtggcgggcgcggccagcagcgggaaggccagcatgcccagcaggtagagcgccaggctcagcaggatggcgcgcgcccggcccagccgcgcgtcggccagccagcctccgaacggcgagcccaggtaggtgaggcccatgaagagcagcagcgcctcgctggcctgcgcgccctcccagcagaacggcgccccgttcaggaatagcaccaggttggacgtgatgccgtagaaagcggcgcgctccagcagctccgtcagcagcacggccccgcacgccgcgcgccggcccgcgaacgccccagccgccgccgcggccgccgccgcccgccgcgcgcccagcagcggcgcccgctcgcccgcaccgcccccagagccctccatgcgacgccgccagctgcctcgccccgccgccgggtcacctgtcccagaacccagggccgccgcccttctcgcgagactgccgggcctgagatgtccctattgggcgggctcgccgctgctcaacgccccactcgccggaacttccggccccgccccgggcactaggcgaggaggtggccggtattctggatcactgcgtgtcttggggagcttgggattccgcagcttggcggccgagagcctttgtttgcctttttgagacagggtttccctctctcgcccaggctggagcgcagtcatgcggttacgcctcactgcagcctcagcttcccaggatcaagcggccctcccacctcagcctcccgggtagctgggaccgcaggcgctcgccgctgcctgtggctaatttttaaacagttttttgaaatggggtctcgctttgttgctcaggttggtctcgaactcctggcatcaagcgttcctcacgtctcagcctcccatagtgttggaattacgtgcatgagccactgcaggcagtcggactaagggagtttaaacaaagaagccggagcctggccctcttcgggcttcggtggggcccagtaggcagccaaaactcacactgagacggcggctgctctccaggcgggtttgctcaggctgcccccgtgctccctgccctgggcttcagtcctggagaggacccggtttctcaacccgtgcatcgttggcactttgagcgacgggactgtcctgtgcgttgcacgatgttcagcagcagctttggcctctgctatccactaggggccagttccaccccctagcacctcaggttaacaaccgaaaatgtcttctagactttgccgaaggactcctgggggcaaatacgcccccattgagactcactggcttagaacaaggcaagctccagcctgtttcaggctttcccagagactgcccctacaccatctatggttgcatggctggcttctcatccttcaaccttccaccgaagtgttgacttcagagaaacatttttttcactagcctgtccaaggcccgagtatcccattccatcatgttactcttttctccttattacctgttacattttttaatttattcgtttatctccccaacctgcatgtgttaacaggtgtaagcttcctgatggcaggattctcttgtgttttgttcctcactgtgccccctgcctctgggacagcgcctggcacat

SEQ ID NO: 59240 - DNA, 1714 bp, Homo sapiens
accatggccacccctgctcctgttccctgtgggaaaggaccaaggccgcccctggtcctggtcactgtgggaagggactgtggtcaccgctggtcctggtccccttgggagggactgtggtcaccgctggtcctggtccccgtgagaatggtctgtggtcaccgctgcctgttccctgtggaagggaacgtggtcactgctggtcctagtcctcttgggagggactgtggtcaccgctggtcctggtccccgtgtgagggactgtggtcaccgatggtcctggtccccgtggaagggactgtggtcaccgctggtcctggtccaggtggaaacagaccgcggctaccctggtgatggaccccacggggcacacccgcgccaccccgcacccagggctcgcgccgcccgaggcccccggttcctgtccccctccccgcctggcgccggaacctgcgagctggggcgcggcctcggggaggggcgggcgggacagacccagccgccccggctcccccgccgtccgcgtctgcgccggccccggggcctggtcggcggcggcggggccggtcgatggcccgggcggcggcggcggcatgcggctcctgttcctggcggtgctgcggccacacaccggcaacgcggtcacggcccagcgcgttcggtaggtgcagggcgccggggcctacgaagcctgggccgggggccggggggcggggacgcgggacccggggacgcggggcgctcagccaggccccctccagccgcgccggggccgtcccgagccgcgcgcacaaacggatgggccggtgccgcctgccgggcgcgcgggggtcggtgccttctgcgtggcgcgcgtgtccccgggtctccgtgcggccggcgcattggcctcgcgctctccggaggggactgagcaggtgaacaggcccggagcctgtcgtggaggggcccgggaaggcctcgctgcagaagcaggatgggagcaggatccgcagggatgcgcagcggggtccgcggagctcccggcgggggcgcgtttccaggccggggaccgcggtgccagccctgccctcgcggatcgggtctcggctgtgtgccggcgtccggggtcctgtccccgaagtccctttcccacctcccctctgccctgtctattctcgtcttcctggctggttagctccttcacactcatctttttctgcctttgtcttatttgtttacttgttggtctgtgttctggtcgctggaacgcaagcccggcgggggcccggggaggggccgccgcgttaatcccgccgcctcccacccgcacagcgggcgctcggcctgtattagccggataaacatattccttgaggcgaagcctgggaagtgccaggattagagcctgcagcttaacagaagccgtgtgtgtgtgtgtgtgtgtgtgtgtgtgtgtgtgtgtgtgtgtaaaagcggacttgcttcatgaaatttcccgatttacttcccttctgtgggcctgtttccccatcaatttatttttttgaaatggagtctcgctgtgtcacccaggctggagtgcagtggcgcaatctgggctcactgcaacctccgcctcctggattcaagcattctcctgcctcagcctcccaagtagttgggattacaggtgtgcaccaccacgcccggctgatttttgtatttttaatagagacagggtttcaccatgttg

SEQ ID NO: 59241 - DNA, 1491 bp, Homo sapiens
gcagggtgcttggagaacacagagagttctgcagcccagcagaatagaccgttttgtgtgtgtgtggctgaatctggagtgagagttcctctcattgtagggcacacctggtggtgaggttggaaggaagaggtcagaagggtccccacccccctctgatcccctgagaatgaacatttgccaggagagccaggccgtcctcacggaaccggggaaattggtctaggtcagtttctaacggtgaagttcaaaattaaaagcagctctggtaagtgaaaaaatagagtctgacacctagagaaccaagttcatgtcacctgtggagggggataaactgcacaaggagtggatgtaaaaaatattcacgccgagagtaagttgtggagttgtttcaaagggtgccccccgttatgctaaaacaggaggctagtccttggaaacactgaaatcatcttctaaaaccagggcgacaaactgctgcctgcccggggtgaaacgcagcctccctgccagttttgtaaataaagttgtagtggccccagctatactattatacgcttacgtgttgttcacatttctgcttttgcttctcaggggcagaatggagtagttagaacagaggccctctgacccacgaacccaaaggtatttcctctctgtctgcttccaggaaaggccttctgacccgtgctctacatcttgatatcagatattcactagataactgagttgcatgcctagggtattgtctgcagagctgccaagggtactggggaaatgcgtgaagatggtctcgggaagagaacaaaatagagcatttggtcctcctcggcccagagcagggaagcccaaggggcagttcagtccagccaggagtgtgttgacatcagaatgatggcaaatgttgtcacactcatagctggacttggtgcagcggggtggtgactgtgtgtttgttgtgtttctccatctggaacggagagtgcaaaggtgtgtttgtcggaatgggaagcattttagataatgggggcagatcggagcactacaggacacggaccagaaaggagagaaagcgaaggaagaaatgcaaacatcctttgcatccaaggcagtactttcccttccaggcccggctactttctggccgcatcattctgaattctctgtgtcaagcatttgggaagaaaaaaaaagtatgaggaaaagttttcaggttttctagattttcttttgaggagtcaaaggaaagtgtgaatgcagatgaagttcagacaaggaggctattttattttttctgccttccttggttttgtttgttttttgaagatcttgttactaatttttccacgtccaaagatagccattgaggccagccgcggtggctcacgcctttgatcccagcattttgggaggctgaggcaggcaggtcacttgaggtcaggagtttgagaccagcctggctaacatggtgaaaccctgtctctactaaaa

SEQ ID NO: 59242 - DNA, 1089 bp, Homo sapiens
ggaggctgagacacaagaatcgcttgaacccgtgaggcagaggttgcaacgagctgagattatgccactgcactccagcctggcccacagagcaagaccgtatctcaaaaacaaacaaacaaaaacaccttaataaatcagaaactaccgattgtctctatgtaaccacctgcattccacgcactctgctgtatcgattctgcataagtcatgagtccctcaggaatggactctccaagtagaattcagccccttttccatctatcagtgtttatttttggcttctcatttcttagagctttacgaagaacataaaatagcaattattcaaccatggtcagaagcatgttgaatccttatttttgtgtgatgtattttatatttttttaggctgaagcgagctgatagcttgactgctgcaggcatctttcctgatcctgctggtcagttaccttcagcatttccaaaggatactaggtttggtggggagagaaggaatgttactgacccacaatgactggatcaaaattaacagtgaaaatggtaggctcaagatacacgatgcacttcagtaagttaaaccaacctaagtctcaagaccctagttattctttatttgcacagtgatgttgtgacactttacgttatgaaaaagaaacagaaagagagagagaaaaatatcatccacatattagtacagtgtagaatctcaccatatgccccagggtcagacgatttgaacctcatgtttctctgtggctcccacagtcctagcaacttggtcattttatgaacacagtgtttaaaggctctagacctccccctacttcctcctcctctgatctttgtcctcctcttctttgttttactcatgattttgtgcaatattgctcctaaatgcacaccagttaattcacctggtgttcagctgaataaataactatttcattgctggaattacaaaagaaaaaagggctaggttggacttgaactttgttctatagtactgtctggatgatttaagagattttcaagggtaatttttttttaatttattttttatttttatttatttatttatttttgaga

SEQ ID NO: 59243 - DNA, 2224 bp, Homo sapiens
tggggtttcaccatgttggccaggctggtcttgaactcccaacctcaggcgatccacctgcctcggcctcccaaagtgctgggattacaggtgactgccactatgcctggctaatttttgtatttttaatagagactgggtttcaccatgttggccaggctggtctcgaactcctgacctcaagtgatctgcccacctcatcctcccaaaaggctgggattacaggcatgagccaccgcgcctggcccatttcccaccctaaacactcagctgtcaggtattacaccacttacgccgtttcccagaagctaagggtgcaggtcatgcctctgtttggtcaaggccgaatttcctagtacacacccactatatgtcatcaatatgaaagttactagtgacatcatattttacctttttgtgtgtgaagtctttgaaatcctgtgtgtattttacactcacagcacatcttaattcaaacagggccttagacgtgccctggatcagccacgtggccacgtgtggcgagggctgttgtgtgctcagggcagctctgtttcaggatttctgaaacttactcacacgatatctgatcctggaggacacatgaacggacatgtgcccagtgagggttagtttgtaaccggtgagtgaacttcagcccccagggctgctcttgtggaaatgttgtcttgggagctgggtttatgatcgcctacctatctctggctgaccttcacaagttagtttgattggatttcagtaaagacggttttatctcttttaatttgaaatgcctttgtttatgctcaagtcattattttttagtgttgtttatatcagccttaatttgacattgtacctactttgtaaaatatacaatcctagtgggctcctcaccaggtcagcatgctaggctgttaatgcctagcacgcgtgatcaacgtaggttatgttttgggatggcattactatgttggtttgtgatattataatatatcttttaagtgttttttttttttctttattaaaggagtctcactctgttgcccaggctggatggagtgcagtggcgtgatcgtggctcactgcagcctcaaactcgtgggctcagacgatcctctccccctcagcctcctgggtagctgggactacaggcccatgccaccacacctggctgaaattttgacttttttttttttgtggagataaggtctcactgcgttgcccaggctactcttgaactcctggcctcaagtagttctcctgcatcaacctcctaaaatgctagaattacaggcgtgagcgtctgtgctggccagtttctgatattataatattgatttgacattttcaagaatttgattcatttcacatttctgatcctgaaatatatgttgtgggaagtttgaaaatattttatgtaggattttgatttcttgctacaatatgtaatagatattcaggatgcaaacttgagtacttctagttctagtccacgtttagagcgctttgtctaaattcatcagaatttcaccagaaaatgtaaaaatttcaccaagaagaaaaaaacacccacgaacaaattaaatgtgtatcttaatggacgcttctaccaggagaagcaatggttatggtttaatatgtctccattgggctcaaaacccctcatgcctgttttcacactcttttcctaataagcattcttctaagaggacattatctaaactcaaatatttatttatgagctatatttaaaaaatcctgtttgagtaaatattgcttgaagcagttatcaaattcaaacaaaaaaaagcacagtgtcattcataatggcccatcaatatgctttgcaaaggctaagttttcaggtgttatctttagagtgaggtttttctttttttttttttcttttttttttctggaaactttgagtcacccccttctggggcctaatttatctactttgccttggcacttgtgaaagaaaagtaacttcttcaagttgctgtgttaggcaaaacctaaagtgtaattttactttgtgtacatttactcatcaaaattcttttggaaattaaaatatagaaagcaagacagatctcattggctgtcacaagtgcagttcctgtacaggtgagctccacaagtcagtgcagatgttagcgctggcctaatcggaatgagctgcgtgtctccttatccctaaagtctgcagtagaagcat

SEQ ID NO: 59244 - DNA, 875 bp, Homo sapiens
agtttttacaaagccacagtctgaagttgtattataatttcagaacaaaaactattatttttgtcatctgtagagcataaaattgtgcctgtatttcaaaaataatctattgtggtttccatttgcagaaagtttaattttagaaggtgaatctctggcttatgtttagtcaaagaatgggaagttctttggttgatgttatttccagcatgaaaaggtatcagttagtccttgggtctgttagaagtccatctatttataggtatctatccaataggatcctggctttttatatccagtaatgagccaaagaggtaacagttgctgatagacacacctcagtgtttgccattgtgtgcactgatgagctaatctgcaaggcaggccgtacacaaggactttgactcatgttatttcaaggcagagagaacaataataaatattgagcaaagaaagctaatttgtatttgttacactttcatatagaaaatgtttttcaaaatcaatataagccaattggcttttgccagatttcttttattgcaatgattacaaataactcaggtccagacttcctttatactgcaactttatttcctctgtttgcctggatgagatctgaaaataccatttatgcaacgcttttcaaatgattagaaaaatgatgctcagagatgtgggaagatcagcagataagtccagaaatcttcactttcagtcaattccttctgctgacagagctgagatacaagtttaactctttttttttttttttttttttggtggaaaaaggagtttcttgacaggaacattttgagtttatgtattgctaattgcagagcctatttccaatgaaaatagtgacaaaaactata

SEQ ID NO: 59245 - DNA, 497 bp, Homo sapiens
ggacctgggaggcggaggttgcagtgaggtgagattgcggcattgcactccagcctggacaacaagagtgaaactttgtctcaaaaaaaagaaagaaagaaaaaagaaaataataaagacagcttctagaatagaatacagggcatagagactgcctcagcgtggattgggtttctgttcctgagcccgctcatgactcatacttgggagattaagcaatgtggagtgtagctgttggcagcaatatgccagatcgtgaaaacaacacattttgttttgaagataaaaataccgttctccaggaaatggttctatcggaaagacatttgttaagtgacgagttcaaatcttgactcatggataacctagatattagaggaaaagcaaaggtaataaaaataagtttggcattaaaaggaggagacaacatttattaaaaaaattagtcaggtatgtgccctgtctctgagcatcagcaggccaaccttatttaatag

SEQ ID NO: 59246 - DNA, 510 bp, Homo sapiens
acttgcatatatttaggaatttttttcagtattttaaaattctattcattgtcgataagaccaggagaggcatgggtgttggttgttttgttgaagactttgctgttggatgagccagatatgataactgtattctgcagctttgtcctgagtgggctggaaaaggtgaaacagcaccctaggaaggtcctctcagcacctcagtaagcaaacttacctgaggccaggttgttgcacaagacgagatcattgcacaagacgaggttgcataagatgatgtcgtgtcacggtgaggtttctgctggtgaggagtgtggctgctgcccctgggaatccaggggttcctttcaggcaatcagggagcttctctctacctcccagttctggagttttcagaagtgtggcagtgtcacttaatctcagatgtgtacttaatctcaaaagtacacatttgaggccgggtgcagcagctcatacctgtaatcctagcactttgggaggccaaggtgg

SEQ ID NO: 59247 - DNA, 605 bp, Homo sapiens
gcaaaccacagtggaaatggttgttagcaatctaggaaaaaaaaaaaaaaatcaggccacatttgcagctgatctgaatatatcggaggccagttgggactcacctgttttctgagccagctgctttcttctgacaaacgatgacagctggtgcatactttccagtataatccgtgcgctccttgacatcccaaatggaagggctgctggctcgcacgccgatgatgttcacgcctttcttcacctttgccctgttggagacagcacgtgtgggtctgagtcagctctggggaatccccgggtcatgctggttctgggaacacggggagcttaattgctcaccgttgcctggcaggtgtaagctcatgtatactaggatttaaacacaaatttgcagtcgccttccaacccatctgccctaatttctttccgtttttcctacctttactaaagagctagagatggtagactgacagccagcaaacattagttacagaaagaaatagaatatccttgcactagcttgtatctttaaataaagccaagccaaacacaaacacagaactacctgaaaacccttagcctggccaaactcaatagaaaaa

SEQ ID NO: 59248 - DNA, 1490 bp, Homo sapiens
tagtacctgtattgtaaagggaaaaagtcataactacttctgctggcctaagccgtcctgggttagacaagcttggaaagtgcacgaccatcactatcattccgctgtcactgcaccatgcacagtcctgtcacctttacacgtgtagaatgcatcgaaatccttccaaaatttttagtgacctgcttttcccttgctaaagtaaacagtaacttgctgtgtgcccggctgctgggcgcgtaaggtgcgttcagagtcaacacacggtcccagtttccaaagcaaactactgggagatcagacacaagctgctgttcgcgctcgccccaccccaagcacccagcactctaaggtgcccacatttcacacccatctgttgcctcccgcttggtgcacagtcctttgtgaagccccagggataaagcagcgaccaagaggacccggcctgctccccggggctgacgccagctgcggggaccccgtggggcggaccacagttaggccagtgggctccggctgggtaagcgccagatacaatccgccaagcggagtgacggacagggagccacgctcgaagagggggtcgaggccgggaccttccccgctccctcctcctgccccaacccgccctgaggactccgcccaggaagccctggggaccccgcccggagcccccaccctaggactcccgggacccccgccctggggaccccaccagcagtccccgctcaggactccctgagaccctgcccgcagcccccgccccagaacgccggagatccccgccctggggaccctcccggagccccgcccaagacgccccgagcccccgcccgccctccagacgccgccccggccgggcctgaaccgctacccgcggctgccgctcaccgccgtcaggtctggcagccggtcccgcatccccgccggccgggcagcgcgccccgccgctcaagcctgtcccgagctgcctccggccgggcctcgggctctccggtctccgcctcaggccccgcggtcccggcccggcgccagcagccctccctggagccggcgctgccacggcaaccgcgccccgcgcgctctgcgcatgcccggcccgcgccgcgccccgcacccacccacacggcggcagcgctttccagcgggagcccggaggggcggggcctgggggcggggcctaggcggggaggggcggggtccggccgagccccaggctggcagttccgctacacgtgctgtttgtcccttgatctgcttttatgctttcacactcattgttttatttatcaaaatatagagcattcaacgaatagtgacaaaagagcaaagctcccggaatgtgctgggtgcagctttgggtaatacatatgccgaaccttctctttaagggtccacgcgcagcctcgggtgtgaatgaaggagaagagatcgtgtaccacacatgatgcttacggagcataacacggcagggggcggtaacgggaaga

SEQ ID NO: 59249 - DNA, 2376 bp, Homo sapiens
gcaagtgtgctcaggactgcagggaggactcttcggtcactgcggctctctccccatggtggactcttctgaggcgcttgactgcgctgatttgggcctttatctgtctgcatgtcggcaggggcgcccaggaagtcgggtccctctagctcaagcttgtttgggctcttacagcttcaggccaacagggggctgggaagctgagcacttactcattccgtccccgttggtaactagggctggtagacgcgtccagactgcaaacagtatttcatcattttgtctgtagcatgcagcggccaaagctgccaacctatgaaacgctttgagaagccggacgctttgggaggccgaggcgggtggatcccctgaggccagcctgggagacatagttagattctgtctctcaaaaaaatttttaaaaaattacccctgatgtggtgcgcgcctgtagtcccagctactcgggaggctgaggcgggaggatcgcccgagcctgagagttcgagaccagcctgggcaacgtagcgagactccgtctcttaaaaaaaataagtagccgtttttctgggtgggtgcatccctctctggttcctcgctctccaactggccctggtcctgggggcgtgaaggctacgatctggagagacagaacagcgggctgcctctggaggacgggcctagaccccattcattcattcattcgttctgtcacccacccgtcctgcgcgcacgcgagccaccctaagccccaggacctcaagaacccccaccccacggggcacagacaaggacaggctggccagcgcctggaagccgcgtgcctgaccacgtctgcccgagcgagtaccgcctcccacccgggaggcaggagagccgcgaccgtcgggccgcgcccaacgtctcccgctcaggggcgcgccgcctcgctttcagcgcatgcgcgcccgggagcccgcccggggcgtcggcgcacgcggtccccaccggccggcttgcgtacgcgctcccggctcgccctcccacgcggtccaccgcgcctcccgccccaccctaagcgcagcgaccgcccgagcggccgaccgaaccgcgttgcgtgcgtgcgcgcacgcgcgggccacgtgggcgggcgccgcgccgttgccccgccccttgcaaccccgccccgcgccggccccgcccctgctctcgcgccggcgtcggctgcgtctccggcgtttgaattgcgcttccgccatctttccagcctcagtcggacgggcgcggagacgcttctggaaggtatcgcgacccggcgggcccggcacggccgggcggggacaggggtggcggcggcgggataggggtcggagccggggccagggccggggcgggtggcggacccaggggcagcgggcggctgagtaggtgggtggtgcgggcccggccgggccggggcaggagacgggcgtggggtcggcgctagcccccgcgaacccccgtttcatcctccgctctcatccccgtcccggtcccagtcccgttcccatccctacacctccggccgccgttccccgggccccgccgccccggatgccggccccgcccgccgccttcccgctcccaggcctggccgccatggcgccgcgggcgggaggcctttgtggggcgggcacgtggggcgctgggggcgcgggagcggggccgccatgggctgcggggccgcgcgagcgctcgcctccgtcctctgcctccgcaggaacgccgcgatggctgcgcagggagagccccaggtccagttcaaagtaggtaaccctgcggggcgggaggcggccgagcccgaccgcgtgcgactcgcgggtccctcctcctggggccacgatggctgtaatggggccccgcatccacattctttgttttaagtgagcctgtggtggttaaagttccgtgactctgggatcttgagaggtgaagtgtttagggtttacttccaaaatgtgtttttcaacagcttgtattggttggtgatggtggtactggaaaaacgaccttcgtgaaacgtcatttgactggtgaatttgagaagaagtatgtaggtatgtgctggaaaaccttgcttgtggaaatatgtgagaaatgggtaagttcatccactcaatcgcatcgtttccgtttcagccaccttgggtgttgaggttcatcccctagtgttccacaccaacagaggacctattaagttcaatgtatgggacacagccggccaggagaaattcggtggactgagagatggctattatatccaaggtaggcatttgtaacttgctgaacggtttttgagaggttttgtgtacttcagtcttcaaggttatagaaaatcaggtctgttccaacaaatag

SEQ ID NO: 59250 - DNA, 1133 bp, Homo sapiens
cagtaacacacacacgcacacgcacacacaccacacaccatgtctgtttggtttgattctgagcctgagatcctggaaatatttcagctgttgttaagaggctggagttaggacccaggaaggacacagcagtggggatataaatagaaaaggagaacagaacaaagtttgaggagagagacttacatcactcactccccctccacccagagagcaggacggaggtgtgaacttgagccagaccagaaggagctcgagagcggccgcaggacaagcccgaggagcaggcgggcgctccaggggaaaaccacgcacaaaaccttcttcagagaaaagggaagctccaaacctgactgagacaaacggaggctcttgaaataaaaagaaaataccgcaggacaaacagcctcccgtccccgggcgcaggtcgcggtcacagtggtgacctgggattgctttcccaggactgcgagtcgggtttgggtttctcctccctgcattccacagctgctctggtcatcgcaacgtgtttattgatcactgaagaatctcaagttttgagacgaggaagaaacacccattaggtctccaagacagctgtgtttcacaaactttaaggagacagaaattttctcccctggaacctgtgaaaatgtcccttttccaaggaagtgaaggttaagaggtcccgttctcacagaccctcaggaatttcacttggctccgagctttgacctccgagagagccatggaaaagctgctgcggctgtgctgctggtactcctggctgctgctattttattacaactttcaggtaatgtccccaagtggccaggatggcgacaggcttggtttctccggaggctttccctgagtgtgtctcacactgtggtcttttgtgcgcaggtgcgtggcgtctactccagatcgcaggaccatccaggtaagagtgtttccttctcactctgagcaccgctctccccctgcctagtgcaggtatctcaggaacagcccacttgttcatctctgaggcatcagcgaatggcccttgttgggctcctggtccccgacctcactgcctcaccacacactgtgaccctgggcagctctgctacccctcaccggctgagcgg

SEQ ID NO: 59251 - DNA, 1401 bp, Homo sapiens
tttcttccttagatattgtggaagggaaggtcaacaaaggcatttacctgaaagaggaaaagggagtcacgcttctctattacggcaggtacaacagctcctgcatcagcaagccagagcagtgtggccctgaaggtgagtggctgatccctgcggcatctttgtcaagcatttcattctcagggagcacctgctcctctggtgactggaagatgtgaacctgaggttctcatcaattgcagaatgcgtgagaatgtcaacgatggatcggagggcaggggagggaggaatacaggcaaggaggttactaagcagagacttgtcctggtggctggaagttataacatcctcttacagagatgtgagatcaaaatacttaatcttgtaaaggatgaaaaaaaaccttcctaaaaaacagacacagcgatgtcacagtggggactggacagggccgtggcgtttgtgggaaggaaattgatggcatggcacctgcagtgtgatttctggctctgggatgttgacggtgagcgggcagggcatacccaagaacacttgcgcctggttttggttcttttacattcatcgagaggggctgggcagtggctcgaactgtcccggcaagcggtcgcaggcttgtggctaaagtcatgccatggacagagcagagatgcaaaagaaaaactggcaatcgacttgctttcgtttgcttttaccgtgtgaagtgtaacctgctctctcgtatctaggcttcaggcaatgcacgtctggatcacattgcaaattttctgggaaattgttctctgccttccaaaccagcttggagccttcaagttcctttctcctaggcaaaatgaaagttatgatttctagggaggaacaaagcttaatgcagtcctcgtaggaagctctaaggcattttggacatcagatggccttctgtgatgagttcattgtacatgattgtaggacaaaatggactttgttccagtaaaaataaacaacagcttagcaaggcaaaaacatgtgggaggacacatcttgggctttgtggaaaccagaattttgagcaatggttatgaggcccaaaaccacggtcaggtttacaaactcatagtttatgctgttcctgagttcaagcagctccataaacatcccaggcttatttatttttacaaagtaaaaaacaaccatgggctcggcgtgagctcggtggcaggggcgaggaggacgggagagtaatatgtgctccttccttgcattggattcgggaagggcgggggcatatctgtggtggctttttctgggtttctagagaacggcttctctttggagtagaggcatccagaaagctccagcaaccacactggaattgatctcatttgaggacaaggatggtgcagg

SEQ ID NO: 59252 - DNA, 1927 bp, Homo sapiens
aaccactccagatttgctctcatatcatttgtgttcatagaaggttctcacttaatgttttccttatgtttttcctaagaaatggatctaagtcatcgccgcttgcctgtgagtagattcatccactcgctcactcactcacgtgtgtgctgagcacccactgtgtcaggcgtggttccgggagctggggagagcagtgaaccaaacgggaaagcatccgggccccaggggaatttctgttctgggagggagatgatgaccaccggttgcaccatcaggaaatgtccacggagggaaagtcaagggacaaatcatgctgcgtgtttagggcctgaagcccacagctgcgactttctgttctggctaatggcacagccctaagtgttgctagcaacgtggtttttccagcgcgtttggtggaattgcacacgtgttgagttcatggagctctgcagaaaaggccacgagcatcggggcactgggcacagagagtgagaaccaggctcctggctgaagcgaacacaccacacgtcttagggccttggagtcgcgtgcggggcggggacaaggttctgctgagtgagtcaggctgggcgccgcggggctttgccttggtcccccccaactttctgcggcctcgagcccaccctcactttctgcggtggggactgagcccacgcatgcccagtggtgaatgttctcagacggtgaatgttgttcttccggggaaacatctgagatactacccgggtctgcggctctgcagagtggaatgtttatgtacgttctgtacgtacagcttgtatctctgtgggactaaaactttctgggcaagtttattagaaaaaaatgtctaaaaagcctcttcagaggggctataatgaaaaaaatggttgagacacgtggacctagggtgatgctttcttttcatttttttttttttttaagtttgtgttttactccatgtgtgtcatctggactttgggcttggatcaataacatggtcacatagaggaattgccgggtcgagcagtcgcgtctgttgttactcacaggcctgagaatcgatgaccctggtttgctccagaccctgtgaactggtgatgatctgcaggaagtcgcttctgcgggaacagacagggtgttcattctctatggcgccatctttgtaaacactttgtatttacaattccaggaataattctgcgtgcttcttggaggcctgctctttctcagggatgtgtgtaaggagacagtgcagaggccgggggtgaggtgggacgtgctcctgctccatgagccccaccgcccatcccaggcagggtcactgaacacggtgtttgaatctagttagaaggaaaaacaagttgagggaggaaaaatatggtgcccccagctcccagagccctgtgggatgtcccaaaggtggttcagtgggtgtcgaaacagggacctgcaggttcctcagtcagtcagcgctttggatggtggacgggggaggtgcacaggacccgggtgaggcccacacagaagcagacggctgggtgaccgcggggggcccggtgacagcacgtctcaggcatctttgtgtagtcaccccaaattcaaattcatggaacagatacttggtgacctgctgtgtgccaggcagggctgggatcaaatcaggcaaatgggctgagggcacaaaattaaaggagctggtcatccttggggtcgtgcccagtgtgagcaccttcttcaatcttgcccttcaggtacctggcttccctcaccctcctcctggccctgaatatcttttcaagctcataaccccacgagacagccactgtagacatcagttaggcttctttagattgggctgcaaggggcggaaaacccatctttaacagttttaggccaagggggagtttattggatcacgtaa

SEQ ID NO: 59253 - DNA, 1360 bp, Homo sapiens
ccagaaaaggttgatttgaaaatggtttaaaattatctgtgctaaaaatgaacattctcatcaacattaaaaaaagttaaggctgatatcataagtagaaaccaaatttgcagcatactcagagaattaataaaaatagcaccagtgaccttatttctgtgacctggagtcatgtcttccacggggccctgggctcgcactgctggtctttgggttcctggtgcaggctttctgctcaggagctcacatcctcatcgtgtcccttctctctccgaggttttcccctggcttttctccatatccagcctcctccttggcggttgtttcgggaagccctcttcctcctaagtgggcagtgtcctttttgtggaaagcctatcagacaacagagttcacctgagtgaactggacctagctggggtgggctccagggctgctgtccaggggagggagaccccaaaacgacactctgtctttgcatgctgctgtcaacatggtgattagggcccaggccctgaggagccatgtcaaggcatctgctgatggacactgcgatggcttccagcatctggcgacttccagtggttccggagtgcatgaccctgcacatgcttctttagaataaattcctggcaggtgaatctgtgggcaaagggcacaggcattttgattttgaaagacattgccgcattgcactctgggaaccgtgtaccaatttattgctcctccagccagggtcaagaatgggtagctttgctttacatgtgagtcacagaaacatggcgtcatctctgggtgcttctaacttctcctgctgagtgcagttcaagcaggggaacgaacccctgggctgtccagtagatctgcatccagacccacccttcaccaccccaactgctccactccccaggcctgatttctgcccctttgaaattagcaaccccagatccagtaagaacccagagaaggcaagtttttcttttaattggataaaattatcctagaaaagtaggccattggaacagatagagaattcatccagaacagaccctgtaacttctcagtacacccatgagaatctatgtcagagaattaaaagaatcagcaagtaagatgacataaaaaagtataaaatcagaatattgacattatttatagtagaaataacagaagcatgaataaacataacactaatgattgtgtaaattctaatacatccacgctaagggagattattcatctctatactaaaagaggaatgatgaagtcacgaaacgcggtgtaactgtgaaagaatggggttgtcaccatgccagtgcgtttgcagggatttccaaggtaacattgtgtgaaaaggaca

SEQ ID NO: 59254 - DNA, 2188 bp, Homo sapiens
gggaaactccagacaacgtagacacataaggccaggtggagaaatggatgactgagttaaacttgggtaaggagcctggcaaatgaagacagaagcatgacccagtcaggggaaaccacaacaaaagacgtttggtgggaactgcctgtttcttaatttccaaaaatcagttaaaggttcatatacattatctcatttcaacatcactggtagaaagattccatttttatggagaggggatctgaggcccagaaaggagacgatctgtcatcgttttccactcaagggcaaacatggggatatcccatcccatcccaaagcctaagattttgcactccaggccctttgtctgacctgaaattactgagctaaaagggaccgaaagatcctaatggaaccaccgatgggaaaactgcggcccaggaggaaacacaccaagcaaaattgcaccgtatccaggtggccagtctccagactggggtctccctgccccgccagaccatctcccggcgacaagggtctcaggtttccgaaatctcgccacccgcgagtgatttgcagcgcaggggcctctgctgcctcggaaaccttcaaaggtgggcgggtcggggaccaagtccccctagggatggagaaggaaacggggccaaggaaaaggacatcgccaccctgggcagagcacgcacggccccagcgactcggacatggtgaggggcgcggaggctcggggtggacccgaggcctccacacatgtggcaggctgcagcaacccgccacccacgaggactcgcccaaggcccagagcgcgccgggcccctccctccgactccgtcgccgcccgactggccgcagcggaagccggcgcgcgatcccacgctgcgctttcgccacgtcctgacggctgcccgataaaacggacattaaaattgcactttccactgaatacagcagcgcctattgtggcggcacacctgaatgcgaaaattaaagccaaaatatttcctagcggctaaaagagctccaagcctaggcgaatctgccggtccgctcgccggaaatgcgggctctcctgccggaagctgcccctccaccattttgtggcccgctatggcggcggtgttgaggttgggtacgggatgcggggtctttgactgaaggggtaggccaagtggaggtatcagggacgtcgcgcggcacagaagaggaccagcctggacgccggggacgctgtcatgtacggcgcgagcgggggccgcgccaaacccgagaggaaaagcggcgcgaaggaggaggccgggccaggcggtgccggcggtgggggcagccgagtggagctcttggttttcggctatgcctgcaagctgttccgggacgacgagcgggccctggctcaggaacagggacagcacctcatcccctggatgggggaccacaagatcctcatcgacaggtcggttcctctccccacccgtcgatccttcccttccctcacccgcttgatctcgtctgatgttgacttgactgcaaggactgcagagagttttctggagccagcggggatctgggggacaccccctcccctgtccccacctcctcctggtgttctggtggggagggggacggtgaaacctgccctaaggcactggctggaattgcgtgccgcgtccgtctccggagggatcgtctctggtcccgcagcccctctcgacccctcaccctgtcgctgggctgcagttggcgattccgcgcggtgaaagcagccagtgcccagggtcttttcctgagtgcacctgggcctgccgcccggcgatgccatggggtcgtgcgctgcttttctacttgccgcgctctcactgctcggtgtactgggagggtaccctgggaggcgtgcctttattcttccgaaccgccgctcactgagacagtggctagaagtgtctcttggacctgtgagttagccttaacctgttatgcccccagagccctcagtggagcgcccgtactttgccggcatgacgtttgatttcccggtgataatccgacgagtttgacagattgaggtagtgagcaaagttgcccgtcagttggtggccacttgacttcgtgcggaccctggccttgctcttggaagagatagtgttcttagggctggtttcactgtctcttaagactgaagggtggagctggg

SEQ ID NO: 59255 - DNA, 2367 bp, Homo sapiens
cagcgagagactctgactcaaacaaaagaataaaacacaggccgggcgcagtggctcacgcctgtagtcccagcactttgggaggccgaggtgggtggatcacgaggtcaggagatggagaccatcctggctaacacggtgaaaccctgtctctactaaaagtacaaaaacaaaattatctgggcgtggtggcaggcctctgtagccccagctacatgggaggctgaggcgagagaatggcgtgaacccaggaggcggagcttgcagtgagccgagatcacgccactgcactccagcctgggcgacacagcgagactccaaaaaaaaaggaaaagaaaaaaatcactcatttaaaaagaaagaaaagaaagagagagagaaagaaaagaaagagaagaaaagaaagagaaaacaaaagaaaagaaggaaagaaaggaaagaaagatcaaaactaatccaatcggtctcagccaagctaggtcctggggccacaggaggatccctgcagcctgttgcatgaatcaatcaaccttccctggaacacagccaggcccatttgtttaaataataatgcactaaacaaggcagcggagcggtgggctggcctctgggagaggtgacacagcagcttttagttgtcacaacactcgtttcccaagcacaaagagaaaccaaaggacgcgcagaggaaaggtggtctcccggctggggaggacctgggatgtgagggaagagggagggagggagcagggatgcatgagcccggctctggggctcctgcacccctcaaggcaggctgaggccggcctcgccctggttgcatcacccaggacgccctggggatctccaggccaccgtggcagccgggcccctgatgcaatccacggctgtctggcagcatgacctgccccggtcagcctggactctgccctgcctgggggcccagccctgaccacagcctccagcgatccctcccttcccagggtctgtttacaggcgcttggagcatcaggcgcatttctatcatgaactcacagggtggtgcccagcgagtgtctctgatctgtaaactgggtgtggtggcatctaccctgtctgtggggttgcaggaggaagccacacgcatgtggggagccatgccaggcacacagtggatgcaacaggggagttgctcgttctgaccgtgttcaccatgtctctgatgcgcatcttctcacgtgaaatcagcatgtgtcttaaaatggacagagtagaagttcaactagcaacattgtgtgcttcctactggcacatacgtgaatggtggaggctcacgcctctcaacccagcactttgggaggcccaggctggaggatcacttgagcccaggagttcaagaccagcctgggcaacatggtgagaccctgtccctaaaaaaatttaaattagccaggagtggtggtgtgcacctgtagtcccagctactcaggaggctgaggcgggaggatcacttgagcatggagattgaggctgcagtgagctgtgatccagcctggacaacagagcaagaccctgcctctaaaaaaccaagttaatggtgggtgtgttgtggacggcacccaggttggaaggaaagcagttaagtattgctacgaagctcagctgcacagcatgtcacagaacccatccaggctggggctggagagtgctttgtgaaccagaattggcaatgatgcttgggtgggctgggccctgcacttccatctcccaccgggttaggtgccccagaacaggtctggggtgcgccaggggctctgaatcccctcatccaaggctgccaggggaccgggctttcctgccatctcagggactctgaggagccatcggacagtcggagggagaagagagcaagtgaggaagtcacctctggtataactgacatgagacttagatagttggggtcaaggtggatgtaggggcactttagctgggtggtcagtgagggcttcctggaggaggtggcatttgagctaggacttgcatgatggggtgagcacttgggcagagggaacagctagtgcaaggcctcaggttggggaaacaaaaagaggccaaagttcagggtccacagctccagtagacagagcaaagattcaaactcaggccacaggtccccagggtcagggcacaccccctgcacctcaccaagttatcgacaggaggatggtggggaggggaggccagcgtgacagtgggcagggggcactctggaggcaggggctgggctcgctctgctgcccaggctggagtgcagtggcagcctcatggctcactgcagccccgacctcctgggctcaagcactcctcctgccttggcctcctgagtag

SEQ ID NO: 59256 - DNA, 460 bp, Homo sapiens
accgcgccccactgcctggacttgtttgatttgtagcataatgaaaatccgtgggttcagcagcccactcgatgttaaccatggctgccatctgcctctgcgccttctaaaccctcgctccctccccaggcggccactgtccttgatttgtgctgccgtcccttgccttcctgtgttgaaggtttagccctaggggcatgccacacgtatccatcacaggtgcatcacggtgtcgtgtttagtttttaattgtttttaactttgtaaaaaggatgtcacacccactgccatctcctgggttcactttttcccactcagcatgatgtcacctcagaagcatcctgtgattgcaggaagctgttattcatgcatttatttatttatttatttagagacggagtctcgctctgtcaccaggctggagtgcagtggcgtgatgtcagctcactacaacttctgc

SEQ ID NO: 59257 - DNA, 3304 bp, Homo sapiens
taacctttcctccccagcggatttatgggctatgtcgttggtttgggtgacaactttttggtctacaatttttttttttttttttgcaatttggcattatggaactcaactttaaatgcctaacctctaactcagccattctatttctaagaattaattctgcgcagtcccccgttttgggaacatttcccacgcctgttctccattctcctgtagaaggggaacagggagcgggaaggaggggaacagggaaggggagggaggggaacagggaggggggacaggagggaggagaacaggcagtgggggcgggaggggagcgggggggaaggcatgggagggggcggaagggagggggcagggagggagagaggtgatgggaaggggaaaaggagggaggaggacggagagaggggaaaggagggaggggagcagagaagaagcggggcggggaaggggcggggaaggggcgtggaagggagtggggcaaggaatcaacactgagccccgtggcccgctcccgggtcagcgcgcctctctgctctcaccggggcgggtccgctgttggccccacccactcccagcccacccggccccgcaatggcccggcccagccgcccacccccccgacaggccccgccccattccccgccccccgtctgttcgtcacgcccggctctgccgctccgtcccgcaggccccgccctcatcccgcctcccggcccggcgcgcagtgcggctgcgcgggcgtctcaggctctgaggcccgggcgccgcggctcttttgtttctccgttggggccgagcccgggccctagttggagccggagtcggagtcggagtcggatccggattcggattagcagcccgggaagagtgccgtggcacaggcgccggagggagcgcgaccctcggaccccgcctggcccgcggggctgggacccggccccggcctgcccgatggggcgcgcggccccggagatgcgccctcgcccggccccgcgcccccggccccgcgcccccggcccgcccgccccggcccgcgcctccgcctgagtcccccgcgccttggcccgccaccccccgccccgcgcccccggcccgcctgcgccatggagcccggccgcggcggcacagagaccgtgggcaagttcgagttctcccgcaaggacctgatcggccacggcgccttcgcggtggtcttcaagggccgccaccgcgaggtgaggcccccgtccggcccgggatcccccgcccaggatcccctgcccctgcatccccgccccgagattccccgcctgtcccgggacccccccacgcctcccgagagccccactcgactttccaggccgacccccaccccaggatccccaccccgcgacccccagcccgactttccagttcagactcccgccccgagatccgctgccgggctttccagcccagatcctcactccgagacccccagcccgactttcctgtccaaaccctcaccccgggacaccccgcaacctggtcccacagccggctttcgaggctggatccctaccccaggacccccagcgcgatcctcaacctggctccccactcggccttccagtcccgggattcccaaccgggatcatctcagggccccacctgtgtggactggggtctgggggaggcctgcgaggggcagccctggccttgaaggtgcacgtttggctttcagaagcacgatttggaggtcgccgtcaagtgcattaacaagaagaacctcgccaagtctcagacgctgctggggaaggaaatcaaaatcctgaaggtgagccagtgctgggggagggggcgtgggcgtgggcgtgggcaagcccccctccccacactgataacaaacttgggtttctgtcctaggaactgaaacatgaaaacatcgtggccctgtacgacttccaggtaaggcctctgggctgcggtctgctggggaccgggctgggggactgtggccccaggtgctggatcccctggtgagcactggtgttgagcctgtccaggctggggtctactgggcccctggagactccaccctgggtccaggcctgggctggtgctggctcttgctgtgacttccccagctgtgagaccggggagggggtgtctgggccgcagggcgccccagggcagggctgagttctcctgaacaggcatcccctccccgccgggcgtcagtcctaggggccctgcctgagtccggcgtccccggctggccctggcagcactgccggcctggcccacctgtctaggccgtgtgtttgttgacattgctcctgcggccggcattggccggcctcgctctgcgtcagacggggcgggggaggggccgccggagactcctgctcgctggcagtcagggccgggccggggcacaggcggctgccgctggctggccaaggagatgacctcgggcccggctggccccaagaagcaagcggtgggaccagctggctttcgtgctgcctccgtgtcccggggcccagggcaggcagggctggggctgtgggagccagggtgccgtcctggggaccaggaacctgaggcgggagatccgccccgccaaagtgctgactaatggctctgtgacctgtttactgagcccagggcccagcccctggctgagggaagggctggcaggccgtgttttggtggcctcctccgtccgcctctcagagctttgctgtggccttggggaccgaggcttgtcacaaggtgccgggtggggggggcccaggtccagcgagtacctggaaacccaggcacactgtgtcctggagctgggccatccctcctgctgcttttcccgccctcttcccaccccttttctccctgctttcctccctcccttcctcctctttcctcatcctctccatgtttggaagcctcctgcctggaccacagcctgcacatgcgtcatggctctgggagccagcaaggagtggacagctgtccctggccaggcagcgactctgagggactccccctccaccctgggctacactgcctgctgctcccctccagggctccccaggtccagtcctgggcatctccaggccaggccctgtgactgtccgcacgacccccgcagacccgggaccagtatccccaggcccagctccatcccagtcagccacacacacctggttgtgggcatctgccacttcctccagtgttggcaactctgcggctttctctactcaggaagcacttggagccgccagctgcaggcgctcctgtctccgggcaccgggctctgctggagctgcagctt

SEQ ID NO: 59258 - DNA, 546 bp, Homo sapiens
ggtcctcctagtggtcagtaggaggtcggaggccataggcctggtctccttagacagtgctgctcttcggatgggtgggggccgctcacctcatgcccctcccccgccatgtacccctaccttgtttctcagcaactcttgttgcctctacaccctgcaggtgggtttattccttggcttttggggaaccccccgctccataatggccaggggctgcccacgtgtttgttgaatgaaggtgcctaaacttttggagcaggcctggggtctgtggctcctctgaaggccctgcactctgtccctggctgtcccaaagctcctggaggtctgggttggcactggtccccgtgtctgccagggacacaatgactcatgccgagccctccgcctctcccatcagcatggcttctgcgggggtggtgaggcccgagccaagccccagacagacccggggagggccttggtcctttgccagctgtcagggcaacaggaagacggacaccaggggtagggcagagcctccttgggggtgggaacctgggtatt

SEQ ID NO: 59259 - DNA, 2434 bp, Homo sapiens
agatctgcctgggcaacatagtgggccggtctcttaaaaaaaaaaaaaaaaaaaggccgggcgcgtggctcacgcttgtaatcccagcactttgggaggccgaggaaggcggatcacgaggtcaggatatcgagaccatcctggccaacatggtgaaaccctgtctctactaaaatacaaaaaaattaaccgggcgtggtggcgcgcgcctgtagtcccagctactccggaagctgagacgggagaatcgcttgagcccgggaggtggagattccgagccgagatcgcgccactgcactccagcctggcgaaagagcaagactctgtcccccgccccccaaacaaaacaaaacaaaacaaaaaagagtggctacttttcaggagaccgcatctctataaaaaataagaaaaaattagctgagcgtggtggggcgcgcctgcgaggaccgctggagcccggaggcggaggctgcggtgagccgtgacccctctaccgtgcgggtgaagggcagggcggagccgcccctgcgccccagcgtctgtggaacggggacggggagcggggctggggccacacgagggccgcacagggtgggtgccactgagggtctgggggccgagcccgtgggagcggacccggcaacggagaggagcggggccagcgtgggctcagcgcttcccctgctccgctgggcgggcgacagcacccgggaggcggcggcggagcgaccagtcgcgcggccgcggtgctggatgcaggagggcctggtgccccgccctcaacaccctaatccccgccccaccccacccccaccccctagtctccgcccccatcaccccctccgtctctgtccccgccctgcctcttctcccgaattagttttgtccgcgctcggccgccgtgcagtcggtcgttccacttccgccttcgcccacgtggtccggctccggctcagtcagccgcgtcgcgaatggggcaggagcgagcctctctggtcccgacgcgggtggcccgggtctcctcgactcctgaggaaagcccaccgggcggggcgggaggtgaagaggctggggaagtcagaggttaacctgggcgtcaggggacgttggagttgatccgtcagggtcccggggcggtctgggggcagtagagacggggcttgggcgcggggcctgagaggtcaggggtcagcaggagtgaggctggggcgtccaggtccgagaggtcaggggtcagctggagaggggctggggcgccggtttcccggaggtcaggggtcagaaggaacagggctgcagcgtcagggtccgagaggttaggggtcggcagaggcggagctggggcactgggggtcaggggtcggggatcagggcggggtcgggtgcactggtagcctgcgcatgggcctccagcttcgcgcgctgttgggagccttcggacggtggaccctgcgcctgggaccgcgtccgtcctggtaatgaccgcgacgccgggcgaccccgctatgcccgcccagcccagcccaccccagtccaccccgcgcggtgccgagcgggcccccgctcacgccgcccttctccgcagctcgccgcgcatggccgggaacgcggagccgccgcccgccggagccgcatgcccccaggaccggaggtcctgcagcggccgggccgggggcgaccgcgtctgggaggacggagaacatccggcgaagaagctcaagagcggtggcgacgaggagcggcgcgagaagccgcccaagcggaagatcgtgctgctcatggcctattcgggcaagggctaccacggcatgcaggtgtggccgcccgggaagcggcaggtcccgcggggtttaggtgcaggtgcggccgccggggaagcggtgggtccggctgggtttaggtgcaggagcggtcgcccaggtagcggcgggtccggcaggatttaggtgcaggcccaagcagctttcactgctcctgctgcacgcgagctcctgctgctttccatcaggcccggccctgccgctaaccgctgttatctggggcggggttcacttgctgggtgcctgagtcctcatctttaggatgggagtgctcacagcacctgctaagtagagtgtgaagatgagctaggtgtactgacgctcggtgctgagaacagtggacagctcggggcagctcagaagagcctgctgtcgtgagcgttaaggggacagagagctaagtattaaagttgtgaggattctctcctcagcccacttccttttctggaaggtagagggtctgggtacattcaggtaggtgtatttttttttctttttgaggcgtggtctccctttgtggtccaggctggaatgcagtggtgcatccacactgctcgctgcagcctccacctcctgggctcaagagatcctcccacctcagcctcccgaacatc

SEQ ID NO: 59260 - DNA, 1730 bp, Homo sapiens
agtccaggagttcgaggccagcctgggccacacagggtttgggtcttgcatgtgagcctggtctgtttggtgaatctgcagagtgtgagagctggcggcccacttctgttccacgtgggcgcatttcccgaactgcgcgtggaaaagccgggctgccgcgactccgtcagtctcggccccgcccccgccttcctcagtctcggccccgccccgcctccgtctgtctcggaccggccccgcctccgtctgtctgggaccggcccccctccgtccctctcggccttgggttcggcccccgcccaccccgcagagtctcgcggcgccctagtcctccggcgccctcgacctccggcgccctcgcgcggtcagagcggcgccgcggaagcgcagctacgggcgcgcggacgcgcgtcccttccggctcgccgtagcagccgcgccgccgcttcctcccgccggggccccggatgcactgagcggctgcggcgcggcttccatcctcccgccctcctgacgcggccggagcgcagccctgaggcccagggtaagtgagggcggaggcgcgggacgggggcgggaggctctcgggacggcagcgtccagggtccggggtcgcgtagccgcagccgcgggcgtacagggcccgctcgccggccggcctcgggcgtcgcgtggggaccaggccgtggcggctgtcgtgagcgaccccgggcgggcgaccgggctgagggctcacgggcccgggtctttcgagtcgtagcgcccgtcccccgcaggtcgcgcgatccgcgcccatttctcgtggccccccgggctcctgggctgggggcgtggccgagggcagctcggcgcggcggcgttgcgggaaccgggggactccggcccgcgcctcctggttctcggggctgagggggtggctcttgctcctggcgcttgcgtgggcttccctcggggtcacggacgcgacgctgagatgcggggatgggacgtccagaaccactttcctgaggcgcgacggggcgaattcactcagaacttaaggaccccgcgtcccgggcgtcccggaacgcgccgccacaggggttacagtgaggtccgaatccgctccttctcggcgtagacctgcccggtcctccacggcggagccttagtaattgccgctgcctccccgggggcgcctctcgtcacacacctgcggcccacgggcttctgctcagctgtcgctgtgtcagtgacagaaaagtaacgtatcccagtgctttattagtaattactttctgagacggggtctcgctctgttgcccaggttggcgtgcagtggcgcgatgacggctcactagagcctcgacctcccgagtggttgggaccaaaggcttgggccaccatgcccggctcactttttattttgttttgttattttcttttgagaaagagtctctctctgtcacccaggctggagtgcagtggcgcgatctcggctcactgcaacctccgcctcccaggttcaagcgattctcctgcctcagcctcccgagtagctgggactacaggcgcctgccaccacgcctggctattttttttttttttttttttttttggatttttagtagagacggggtttcatcatgttggtccggctggtctggaactcctgacctcgtgatccgcccccttggcctcccaaagtgctgggactgaaggcatgagtcaccgcgcctggccagtttttt

SEQ ID NO: 59261 - DNA, 1749 bp, Homo sapiens
ccagggacatgtcccaccatttcagtggtcacaggcaagagtcttgtggatcttcggatcccacgtaacatctcatctccctaggcaccccgactcccctgcccaatttaaaacagacctcagcctgccccatcccggctgctttgcctggtgctcttctaactgcatgtttatctatcctccccgcctagactgtagggcccgcgaggggagccgctagctgtgcttgtcagtgtgaccagcgctcagcaggtgtccggcgggagggcgggcaaatacaactcagtgcccacgtgcgaatgaatgaacaaactagttccgggcggagccagaggcgcgcgccggcgcggaccgaggcccggccctatccgccccgccccctccgccccgccccctccgccacgtccctccgggtccgctgggcgctgattggtccgagcctcgcctgcgcagtgccgggccggctcccgcgcttgcgcactggctccgcgtcggccggtcggtttggtcggttgtagtggcctcgccgcccggtccgctgtcgcagcgctcatccgcgccgggagcccttggctgcgtcgcccggcagccgcggtgagtgacggcccgcgtatccgctgccggggctgtggcgggcgtgaggggttggccctaccctcggcccccgaccgcccacatccgccggttaccctcgaggctccccggccgcgcgctcccctctctccgtcccatcacccggtgaccccggctgagcgaacgcccacccctccctcagggaccccctccccgtgacacgatcccccgtgaacgcccacctccctcagtgaacactcccccgtgacatgaccccccgcaaacgcccacccatccctcggtgaccctgcgcccgtgagcgcccacccctccccctgcgacccctccccccgccacctggcaactgccgttttcccgccttccctcctccgccccctctcccgcatcaccccgttttctggtgaccgctcccccccatcccgtgacacaaacccccgacctcccagcccttccccggtgacacgatccctgtgaccgtctggcccggtaaccgcccctcccctcatgacccttcacccagtcccctggtgcccacccccgtcactgccgcccgcctggttccagcctcgcgagaccgctgtctacggcgctgacgccgcctctgcctcttgaccccttggccccgctgtcctgatccctgaggtcggggcctggtctgcactccaggaaagacgagtgcgcttagtgtgcgctgcacgtgagcagtgaagttgattccacgcgctgcgctgctcggcagctgtcccagaactgaccacggacccctccgcgggtcctgctcctgacaagggccttccggcactgggagttttgtgttagtggaaaggaagaatctaataataccaccacctttacagtaaagacgctgcgaattgacgccttttataataaagacacttatcttgcccaagagctgggtgagtatttcctccttaccaaaaagttggtttacttacagttaactggctgaaagtttgagtcttaggcttatttgtgccgctccaggcaggctgattggcgctggtttccatctgtcagattggacagcagtaccactggctgttgggggctcacgaccagatagagtcttgtctgggaaccacaagtgagtgttgttaccacagctctgcagcagtgagggcacctctcaatcca

SEQ ID NO: 59262 - DNA, 2234 bp, Homo sapiens
ggcgtccctgcctcgaggcctctgcctggcacccccaacccccaaccttgacctggcttcaagtctttgcatcccaactcaaagagaacctcctccacctgccctacctaaggtgcccgagcactctgtcaaacttctcgctttcttcacctgtctcgccggaaatctctttaccgaaaaccacacgtgctaagcaaaaacaccaacggtcaggagcttgcagaacggcctctgacttactcctgaggcggtgagcgcacagcaggaaaccccgcacgttcacgcaaacacatcttgcagaactggcgcggcgcggcgggaggacaggggcaagcctagcagaggaaacgggagctctgcacgtgcaggatccagacccctaggcgatgaaactgcagacctggcagcgaggcgcggctgtgacccgggaacattcgctgaacgaaatcttccggggcgaccgccgcacttaagaatccgcgcagcctaccctctcacgccgaccaccctcccgcccgccgaggctcaccttcggcgccttcctcttcccgaacccccccagcaccaggccggggaccaggggtccggccgcctcctccagggccggtccatctggggccgcctcggcgctggcgctggtgctgcgctcccccggcgcctcctcgctgctccctgcgctgggctcccctggcgcctcctcgctgctccctgcgctgggctcccctggcgcctcctcgttgctttctgcgaggcagacacccacccggcagcgcgtcagcaccgagtcgccggcgccccagagggagcccgctcgccccgcggcccacctgcgcccgcgtcctcgccgtccgccttccgtcgctttccctgcggcgcctccgggctccccggctccgcgtcgttcacccgccgccgccgccggggccgccgtcgcctcctggtcgccggctcggtcgatgcagccgcctcggtctgcgcgggctcccgctgctgctgccgttcgcgggcccggctctgcagccgctcgagcagcgcgcgggccctgccgtgcgccccggcctccgcgccctccggccccgccgcagctgccgcatcggggcccgggtaccgcgcgacgtagaacagcgccatggccagccgcacgcctgggactcgggcgtggcgcgctgcgatgacgtcggcggcacgcctgcgactcgggctccgcgcaaaagatggggttggggtacggcgcgtagagatgacgtcgggttctacgcgcagtggtgacgtcacgggagcgccggcggctgagaatccgcgttgttccgtgttgggggcggcatggagcgggagccgggcgccgcgggagttcgccgggctctgggccgccggctggaggcggtgctggcgagccgcagtgaggccaacgccgtgttcgacatcctggccgtgctgcaggtgggcctggcggcgtcgcagggccggagtcgcggcacgggagcgggacttgaatggggggctgcggcggcaggtccccaggaggttccgagacggcgttggggggtcagggtgggaggcgtgtgggtcacgggtcgggggtgacggggctggcgtcccgagggggaagggaacgggttgggggcagcctaggcaggggcgaaggtgacagttggcggccgggcaccctgccgccgcctctcctgcagtctgaggaccaggaggagatccaggaagcagtccgcacgtgcagccgtcttttcggggccttgctggagcggggagagctgtttgtgggccagctgccctctgaggagatggtcatgacaggtgagccctggagggccccggggctgctcttctctttccgtgggtcggagggaggctttgtcaccatgggatgagcgcccccaaccctggcacaggccgtgcaggctggtgggaggacgcaccaagcccaccgtggaagatggatggtggcgttggggcaggggtgacatgggtgccctgcagctgagtgtagatgaacactggacaaggtacgactttttgtgtgctttgcaccccttttgtaatttgatgttgactgatcctgacacggtcgcttaaactcggagcttcctttatgtccccatcctggggacgtcaggtcttggagtaaagagaggggatgtggatcctgctcctggcagcttggctggggcagtcctggggtaggaggtgctcttcctgtttgcagggctcagggaatgtgc

SEQ ID NO: 59263 - DNA, 739 bp, Homo sapiens
aatccccctcgtcacacattattttgtcacctgcagcttctggcctccagaacgacccccaggatgcccccgggctcacaccgcctggccctccctcatgcctgggcttggtcggaactgccaacacctggcacgagagggtgcagtgtatccagaatccggtcctgaggtgctgtcctgtcctccatgctgtccccagccacccctctcgggtcaccagccgccctgccgtgaggaggctcggggaggcccgtggggaggtgggaggcaggtaggagccagggaagcagcctcctgggccagcctgtgctctgcctgcttcctgagctgtggccactacagagctgtttatttttattgatgtggcaactgcactctgagggaaattactgtgttaggaaatatttccccgctaccgcagtcaattttggtttcatttaaaattcaaaagcggtgttggccgccttcccaggcagtgggggcacacagagtccgagttgtccctgccctcccagcccagctggctcccgggcaatgcagccacagcagacgcctcatggagagtgggatcagccaccgaagtcatgggcagggcgggggcaggggcccttctgaaattccttccccaaaccctcccatttgggccatgagggtggatgtcgccttttctggaaggcgggaagcccttgctgagcatcccctccatcccggtgcttggctgctggtgagccctggctcc

SEQ ID NO: 59264 - DNA, 1431 bp, Homo sapiens
tgactgtgaagggcacacggagccgggtcctggcccatttgaccggctcggctcacccctgcgctgcctgttcgcctgtgtccgtctgtccgtccatctgtctgctggccacagctcttccaccctcggggaggtgttcttccccctctgctgagcctgcatgaagacgcgtgcgctcaggccggcgtctgcagtgtagacacagctgcctaggctcacttgtggtgtggacgctgtgctgtgccggtgttgcgctgtgtccggtgcaggcgccgtcctctggcttctctggggtgtgtgcagcgtcgacgctgtcccggcggggctcggagggaaccgcccggcgtagtgtgaggggcggggccgctcctgcggagtccacggagctcggccggccgcgggggcctcttcgccgagggagtcggggcggggcccgtctttccggggacggagcacggaggagacgcagcgacggaggagtcgagggcggggcctggggcggcccttcgcccttttaagtcactgcgcgcgggtcccaggcggcgcccgtctcgggggcaggtccgcggggtgtgacgaatgttcccgcggcgtctccccgccctccccggcgcctcccccggcctcgggcagccgctttctgcacggcacctccgaagccgctgggcgtctgtaaccaacctgcacgttgtgcgcatgtgccccagaaattaaagtagaataaacaacaacaaaaccaaaagacctttttactttgacgcagttttagattcccaggacgttgcacagaaaatccggacggatcctgtgccctccgcccagctcccggggtcacaggcagcctcggctccgaccccgccgggcgcgcggtgaccggctgtgcgggttccaggggcggatgtgcgctttgcccggcccctctcccgccgcgcggccgctcctcctctccgccaagggccggttcaggcacaggccccgccgaggctgcccctgacttgagggctcacgcaccgggctgcttgcggctctggactattgtgaataaggccggtgtgagtattttactgtaagtctttggggacgtgtcttcatgccccttgggtgaatccaggtgtgagattgccgggccggggtgctgtgagttacctttggttatagggaggtggtgacccatggtggctccaagtgcccgtggcctttcgtgaccccgccagcagcgggtgggcctttggggcgctccgaggctcgcccgtgctgcccgtgggtgcttcagccagtccggccgccgtggctttcctctgcagcccccggtgcctgctggcgtcgtgcctttccgtgtgctcgttggccacgcacatgtcgaggggccgttctgacgatggactgaggggctcggggatagcacgtgtccagcggggcaggtcagccttt

SEQ ID NO: 59265 - DNA, 1187 bp, Homo sapiens
gcccggggctgagccgccccccgcgcccggcatgcccggcccggcccgccgcccgccgccgcccagggcccgagcccgcgcggcgcacactcagcccggcggcgccgcgtagccgagggagcccgcctgctgcgagccaggcgcggggcgtcaaggtcaccggcccgacggggcgcacgcgcggccatggaggccaaggtccgcccgagccggcgctcgcgcgcgcagcgggaccgtggccggcgccgggaggccgcccgcgacgcccgcgcccagagtccgtcgtcgggcgacgagcccgagcccagccccggcaaggagaacgcgggcctccgcggcgcgcccccccgaggcgccgcccccgcgccccgcaccgcgcgtcccccgcgccgccgccgccgcgagtccagctcgcaggaggaggaggtcatcgacggcttcgccatcgccagcttcagcaccctggaggccctggaggtaggtggacgggtgcggcttcgcaggcgttgaggcgagaacggggcccggagttgacgcgtcgggcgatcccgggacccctgggcttgcgaccgcccgcgccgtgggcagccctgagggaagccccggccacttggtacccgttccagggaccctgggtgcccaccgctcgcccagaccgtcgcatctggaagacccagcagcgtcgggtgggtttggggacgttttaagttgcagaggcaaaaaaatctacgcttcgaaattgggggctgtctgacagcaccgtcggccttttatcagttgtgtttctgtggccagcatatcgctctgcctggttcaggacgtgctagggagcagtgctggatcttagggaggtggtgataaaatggatactccgcgggccatcccgttccctcctcccttcgagggctctgctgagaaggggagaaggagggttaatctcaagacccctcttggtgactgctgcctgctgcatggttaatagattggccaaaaatattgcttgtctggctgacggacagtatttgctgagcaaatactgctcctcttacatgaactcagctgagcagagaaggaaattaaatgctgtctgagagttggggcaggcgctgtctccccaggactggcatgggcaggaatgctagcaagttgccctgcaccagggccgagacccgcccagcgaggtgtgc

SEQ ID NO: 59266 - DNA, 1101 bp, Homo sapiens
tcaggcgccggccaccgcgcccggctgtcgccctttctgactcagtttccccttctgggagcggggtggcaggtgtccgtaacttcttgttgtgaggaccagaggagcagcgcccacacagcgctcagtgaggccggcgctgcgcgcctttccccgggtggccgtgatcggaggcagcgcgttcggaccccgggccggcggcgggcgcgggtggatcggcgcctcggggctggattagtcgggtctgcccgcgccccgcccccgccccgcccgcgctcccgcctcccgcgcgcccagctccgcgcccgccgcctcggggcccgcgccgcgcccgacgtccgcccgggagcccagagcgcaccgagcgccgcccagagcgcgcagagccggcgcggcggacatgcgcgtccccggcccgagctccggctgagcagggcacgcggggagaggggtcgcctggacgggccagggccacccggggctcgcgctccacgcccgcgtccatgcagcccggctccggccccgggactaggggcgactgcctggggcgccggcgaggtgagtgcgcgctgcggactccagagagggaattgggactttggggggacaggggagggggagcgaccgcccccccagaagagcgggacgcccgagatctccgggccttctgcccacaccgcctctcccggagccaagcgcggagaccgcgtcctcccgggggcgcacgtggcggcgggcgggcgggggtgcggcgcggccgagggtcccaggcccgggtcagggcacccggggtccgggggtggaggcggggccgagcgttgtgggtggcgcgcgcctttgtctgcgcccaggtgcggaatcggccacccgggttcccggcgccgcgctcacctgccccgagttggagttctttgtctggggcggggcgcggctggcccaggctgcgccgcgtgtctggccgaggctgctccgcgggtcgggtcctcgcagacaaagcgcgccctgacctccgcccgccgccgggattgtgcacctcgcgggggctgaggcttgcccgggcgcccccgctgcctcttcgcagggaccctgagcctgcggacc

SEQ ID NO: 59267 - DNA, 1808 bp, Homo sapiens
ctctttctgtctctgtctctttctgtctctgtctctctctgcctctctgtctctgtctctccctctgtctctgtctctctgtctctccctctctccgtctctgtctctctctgtctctccctctctttctctgcctctccctctctctgtctctgtctccctctctctgtctctttctgtctctgtctctttctgtctctgtctctctctgcctctctgtctctgtctctccctctgtctctgtctctctgtctctccctctctccgtctgtctctctctgtctctccctctctttctctgcctctccctctctctgtctctttctgtctccctgtctctgtctctctctgtctctgtctctctctgtctctgtctctctctgtctctgtctcttgaatccccttgattattatttttcttaaattcctcatgttatctcgcgtgcactcaggggaaaggtggagctctggccacaacctatagccacctgctggggaagccgcagcagatcaggactcagtcagtgaccccactccacactcaagaccagccagaggaacccaaatatggatgcccacctcccccatgcccatcgcaggggcagctgagccccggcagtggcctccccacgtgatcagtccccgcacccacacctctgcctgcggctgggcagcctccccgctcccagcactccctcctgtctttcctgccactgcgtgagcaccacgaggtcaggaactgattttacctccctcacaggaagtcaaaggtcaaaggtcttagatgcccctggcacctgatcctggagccctgaccccagacaaatgagtcatgtcgacactttccaagatgaatggccacatccccagccatcaggcaaacttagtaagccctgtttccaatcatatcaagcctgttcaatataactttgtttagagatggggccttgctctgttgcccaggctggagtgcagtggcacaatcgcagctcactgcagactcaacctcctgggctcaggtgatcctcccagctcagcctcccgagtagctggaatgagaggtgtgagccactgtgcccgtcttaaatataatttttaatgtaactacataaaagctaaattgaatcacaactagaacttttctaaatttcaagcttgcagtatctttcctgtacttggaaccaggaaaaatttttttctggtctcaaaccttttcgtaggtccttgcaaagttcacaggcttcgtttccaaatggagcacgatgtgcctgacagatcaaagggccctgctcagcccaggaacaggcagctgcctgtgctgggaaagtccggtgtctaacaggtcacaggtcacaccgttcacagcagcgtttttcacgacggccagagggtggacgaatgtgttacatgacccctgccccgaatgtgatatgtacgcacaatgggacgtcagtggtcccagaaatggaaggcacctcggacccaggggccacacagccaccctgaggacctgatgctgagggaacgagcccctctcagaagctcaaataccgtttgatcccacgtgtgaggtctccagagtcgtcaaacctacagagacagacagtacgatggtggtgcccagggcaggtgggggttggtgtttgatggggccggttgacatttgggaagatgtaaagctctgcaggtggatggcagtgatggctgcacggcaacgtgaatgtgcttcatgccactgacctgtgcacttaaaaatcattaagacggcccgggcatggggtggctcacgcctgtaatcccagcacttt

SEQ ID NO: 59268 - DNA, 1285 bp, Homo sapiens
ccgtccacagcaccacacgcagcaggtgcacaataaacgtgctgctgaaagacgtggtctgtgaagaaggcgccaaacacagactggctcttcctgcctccctgatggttacctcttcaaagttggtgacttgctccacaggcactttctcctcttcctcaagggcgtggcgcaaggtcttctcaacccgctgcagcaggaagtcaaaggcggcaggattctagcacaacagtgagacgacggggtcagaggggaaacacacccacactagcctgcctcaggtttgacgctgtggctgcacgtggcaggttgtgcccgagaaagctccggaaggactcatgtgcacaatctgcagtgcactgccctaaagaagcccccggggggtgctgggccagagaagccacacccggtgaggggccgtgggacaggatggggagaaggggctttatttcagcccctgcagcttctgggtcctaccacagcacaagagtgggaagaatctgaatcccagggaagaagcacaccatcctaaaccggcaagggatatcgctgcggaaaaccccagactcgagggcctccacgtggcccccgacgtaggtctcagagtccagcacgtgtccgtcgtccgtcagcttattgaactcctgctcttgcttgttggggaagatgatgttggcgtggaaggcctgcaccatcagcaaggcctcacacagagtgccagagcccttccgcagcacctgcaagagaaaccaaggcttccagccaaaagcaacaccaaaggccctgacttgcaggcaaagtccaggaacctaagctgaacttcagtgtgaaaggagagaaaacctcgtggtaaatggctgcaaattctgcctcctgtggtttcttcctcacaccagggccagagaattcccaaaggacatccctgacgtcacacaccagaattctactgccgcctctggtgccagcactcctgggacatccacctccattcagctccagtgcatttggaatggggcaagggctgaggaggccagggtgccgacaggacagataatgctcacctcgtcgggctccatgggaataatggtgcacagagcaaagatgaatgggtggacgtacttcatgtacaggtagtaagtggcgacagcatctgacacagaatacgtggccagagtctgaggagagaacgccagagagcagggccatcaaaaatcaagagcccagggtcaagtgtgaagcacagaaagcaaagcctggcctgaccagcctgccgcacacacagtaa

SEQ ID NO: 59269 - DNA, 1703 bp, Homo sapiens
gcagtgagccgagatcgcgccactgcactccagcctgggcgacagagcgggactccctgcccaaaaaaataaaacagaggagacgaggtctctctctgtagcccaggctgatctagaacaggatcctgggctccagcgatccgcccgcctcggcctcccccagcgctaggcccccaggcagggtccccggccccgcccctccccgcaccctccccagccgcgcgtccaccccgcagggcctggcccgggtcccgccgctctcatcgcccccgccgcgcggcaggtcccaaacgcagctgcgcggaaggcgaggcccgaaaaacctcagaaagagccgagcagggaaaggccgcgcggcccgcctcgtttccccgcaaagaagccgcgcccgtagcgcctccgcccgccccgagcccctccgtcggcggtcggggcgcgccgccctaccccagtcaggcgcggcgagtgcgggcggctgcgggaaccgggcctccctcccgcctcggcggcgccagccgaggacggccccatggcaccctccggagggccggcccgagagcctcaggagggcgcccctcacctgctggcctcgccatccgcgcctgggtccgcgcgccgccgcccgccgctcctcagagacatggagccgttggctaccacctctgcttcaggggagaaatttggcgcgctcccacccagactcgcgagagccggaaatgccgccgtccatcaagaggcgcgctccgcccctcccccgccccccgaggcgctccaattggcgccggcgcccggcgggggaggtggccggcagggaccggggaaaagtgtgtggtaggcgcgcgcggcgcaccgtggggttgggaccgggcggcgctgcgggccgcggtggggccggaaatgtcaggcggtccccactccgctctcggcgcctcgggctccgcgcccggccagcctgaggtggggtcggtgcccccggcggcacggcgctggggaggcgatggcgccggccgcgtccaggctgcgggccgaagccgggctcggggcgctgccgcggcgggcgctcgcccagtacctgctcttcctgcggctctacccggtgctcaccaaggcggccaccaggtgagcgggggcgcgggaatcggacgccgccccggccccaggtcggccgcagcggcgcggggcctggacgggagcgccgggccgggaccaggctgggggcgcgcccgggtcagaacccccggagcgggcgccctccgacccggcgctgaacttcccgcggcgacacccgcgtccgcagtcagcgattgtgaggcgccttgcggatcccgccctcccagcgcgtggagggcccgcccagacccgggggtcggcgctgaggttccacccaaggacccaacaggggccccgcgcgcccggggaagccacggcaaggggagcgggtccgcaggcgcgggtgaagacagggcgaggggagcgggtctgcggggcgcgggtgaagacagggcgaggggagcgggtctgcggggcgcgggtgaagacagggcgaggggagcgggtcttgggggcgcgggtgaagacagggcgaggggagcgggtctgcggggcgcgggtgaagacagggccaggggagcgggtctgcggggcacgggtgaagacagggccaggggagcgggtcctcatggagcgtgtggagacagggccaa

SEQ ID NO: 59270 - DNA, 1295 bp, Homo sapiens
ggagcgggtcctcatggagcgtgtggagacagggccaagggagcgagtctgcggggcgcgggtgaagacagcgccaggggagcgggtcttgggggcgcgggtaaagacagggccaggggagcgggtcctcatggcgcgggtggagacagggccaagggagcgggtctgcggggcgcgggtgaagacagggccaagggagcgggtctgcggggcgcgggtgaagacagggcgaggggagcgggtctgcggggcacgggtaaagacagggccaagggagcgggtctgcgtggtgcgggtgaagacagggccaggggagcgggtccacatggagcgtgtggagacagggccaagggagcgagtctgcggggcgcgggtccgcacggcgcgggtggagacacggccagggaaggtgttttgagaaggtgacattgaacaggctgtgtaaagaagtggagcagaggctctcctggcacagggaacagcagggcaaaggtctctgttaggttttgaagggaaggccggcgttaaagaaaggcggagagaggtgcagcttggactcagtcccgagggagggaagatctgtgtgtggagaaagtgaaccctgagcaagaggcaggagatgtgaagggaatcgccagggatctgatcgagaaggtgtctaggtccgtgctaggaattttggattttatagtccagagagcttctcagaaggcaaatacaaaccaaggcctggagggagccactgggcctgttccacctttttatggaaatttttattgtgataattgtagattcacaaacagttacaagactaacatggagagattccttgcacaccttcccagtgtcccccattggttacattctgtgaaacgtagtgcagtatcgaccagggcattgcgtggacacagtccacagatcctattcggatttctccatttttcttgtagctgtatctgttctgtacagttttatcacatctgtacattcttgtgttcactaccacagtcaaaatgcagaacagcgtcatgatagggctgtcctgttgcccgttcataaccacacagcttcccaactcccaaactgccaaattatagtataacatcacagccaggatgttgacatagatactggaaagccacttgtccttacctgtgtgtttaagtccaccgtctccaccttttgatacaagaactatacattgcagccgctttaacaagaattcctaccccccgcccatctgctgcatggcctcagaacggccctgctaattcacctatgggaaagggacaccc

SEQ ID NO: 59271 - DNA, 2171 bp, Homo sapiens
cgcttcctgggttcaagcaactctcctgcctcagcctcctgagtagctggtattacaggctggagccaccgtgcccggctaatttttgtatttttagtagagaccgggtttcaccatgttggccaggctggtctcaaacttctgacctcaggtgatccgcctgtctcggcttcccaaagtgttgtgattacacgcgtgagccaccgagcccaggcccaagtgatttttaaatagcttaaatcagatcatgtcatttcccaattttaaaatgggcagagatggtccagcaatcccacttctgggtacagacgcaaaacaatcaatgaaagagagatctgcacgcagcactgttcacgctagcgaggagatggcaacagggcaagcgtccagcaatgggtaagcggtggggtcggtgcacgcaggcgtccagcaatgggtaagcggtggggtcggtccacccagggagcgctggtccccctggaaggaaacccaggctctaacgcggtccctctgaggaccctgctaggcgaaacgcgccggccatagaaagactgtcccgcaggagagggcggtgttcggcccggggtttgaggggtcgggaccaggaggagggacagcccggccgaacctgaacgcacttcaggccgcttgaacagcacacgcaggaactgcgccgacggaaaactttacttcgtgttccgccaccaaaaaaatatcgtttaaacaaacctgcggcagcttcccagctcccttaaaccaggatcccaagttctccgcgtctccgcccctgcacccagcctccggcctcggcaggcgcttccggtgcggaaccttctggaaagtaccgcgccgccctcccggcgtccccacaaccccgcccgcacctgcgcgcaccggcgctcgcgagcacaagtgacgggactggagcgtggcgcggcaggtggctccacgaaaacgccccttcgcgcaaggctgccccgcgtcctgccgcgccccaggaggcgggacttccgcccccgccgcccggaagcggcagccgggggaagcgtgttcctcgcggagcgccgtcggggccgtgggcgcctgcgcgggccggcgcgggagcaagcggcatggcgttccggcaggcgctgcagctggcggcctgcgggctggccgggggctcggccgccgtgctcttctcggccgtggcggtagggaagccgcgcgcaggcggggacgcggagccacgcccggctgagccgccggcctgggcggggggcgcgcggccgggccccggtgtctgggaccccaactgggacaggtgcgcgcggggctgtttggggccggggtcgggatgggggtcagggcaggtgttaccgttgggatcgagatcgggaccaggtttaaggttgcgatcgggtcgggatctggggtcgccgtctgctttccccagcggaggagccgctttccggggccgctctgcgcggagggttccgggggcggctgacccttcccgccggcttctgtggccgagctccgtcgcgtcctcgcccttctccccgcccctgcgagtccgccctgggtgccatcgccggagcgcgggccggggcgaggctgaggtggaagccgggcctccttcaggggcgtttgcaggagcgcgcccgcgagctgcgtgcggttattgagcgtttgaaatatggctcgtgtgattcctgaagggaatgcttagtttacgtcaatttaaacttaacgcaagcagggccgggtgcggtagctcaggcctgtaatcccagcgtttgggaggctgaggccggaggatcgcttgagaaatttgaaaccagcctgggcaacatagtgagacccccatctctacaaaaaatacaaaaaaaattggccgagcgaggtggcgcgcgcctgtggtcccagctactcgggaggctgaggtaggaggatcccttgagtccaggggtcccaggctgcacagtgtgagccgagatcccgccacttcactccagcctgagcaacagagcctgtctcaaaggaaaaaaaaaaaaagtagtgcaggtttttaacattagttatgtgttgaaatagtatttttagcatattgaattaaaagtatgatcgaaattcacctgtttctttttaatgttgctattagaaaatgtataatttcacatgttgctggc

SEQ ID NO: 59272 - DNA, 3637 bp, Homo sapiens
ggtaattacaaataaagttgctatgaacattaaatatgggtttttgtgtgaaaatagttttcatttgtctaataaaagctcaggaatgcagggcaggtttaacttcctaaaaacctgccaggctgattcccagagtagctgcaccacttaccgtccccacctgcaatgcacgaggcccagtttctctaaatctctgctgactatatatatgtatactatatgtgctatatgatatacacgtatcatatgccatgatatacgtatattatacatcatatataaaaacatatttttatataaaataaatcagtatttttttatttcagccattctcaaaacaccaccctcacccgccgccaccttgtccgcagctctgcctggatgatgccgctggtgacagtaacagcactcagaggtgcttaacacataccaagtgctgcacttacccaactcccaaaaaagcctaaccaggtatcactatcatccccattcctaaaagagcaggctgaaaacaggttaagcccacagcaataagtggtagggcccggtgcgatggctcacacctgtaatcccagcattttgggaagctgaggcaggtggatcacctgaggtcaggaattcgagaccatcctggccaacatggtgaaaccccgtctctattaaaaatacaaaaattagccgggcgtggtggcaggcgcctgtaatcccagctactcgggaggctgatgcaggagaatcgcttgaacccgggaggcggagcttgcagtgagccgagatcgcgccactgcactccagcctgggccacagggcgagactacatttcaaaaaaaaaaaaaaaaaaaagtggtagggccgagacacaaactcacacaattggacaggaatccccactcaatcatcagaaagcacctctccgcagtgactaacagtctgacaatttagagtaaaaacaaactcagtttctcccactagtcttgcaacatgcttcggacaccaggtatgtggggattttctccccacaaatcacgcaggtcgtcagttctgcagtggacacaggctgggtgtcgtctgtcatcctaattcagtcatctattctgacagcgtcttcctggagataccagcagacccccacaggttaacggctcagccccgcaagactgccccccacttccagtgcccaggttgtttgacctgcgcttgggaccgacggggcgtaacccggtgacctcctcaggttgcggtaatttgctagagtggctcccgaactcacagacatgttttacttacacttaccagcagagtataaaggattacaaagaatacaggtgaagagatgcgtgacgtaaaaccggggggaagcgcttggaaattcagggcctctctgggcaccgcctccaggaacccccacgtactatctggaagctccctgaacccagcccttttgggtttttacaggaacttcatttcacaggcgtgattcatcagccactggtgatcaacgcaaccttcacccctctctcctccccagaggttgggggtggggctgaaagtccccagaacctctaaccctgccttggtctttcctgcgaccagccccatccagaagctccctaggggctgccggccaccagtccactcagcctacaaaagacatcactttggaggttcccgggatttcaagagttgtatgccaggaaaaggggatggagctgaaatacacagttcactgtatcagttacctcaaacttaaaacgaccaaaacccacctctgatctccacatcacccagacccgacagtctaccgcaaagcaataaatggccaccttctccctcttcctctggccccaaacccctgagttacatttgccttttccgtctctgccttatgttccatgaccagtaaccgcaatggcttcacgttccaaacacatccgggacccaggggtttcctccccgcgccgccctcctttgggccatccctccccaggtctcgagagaccgcagcaagagtctccgctaacgcctcgccgggcccccgccgccttccccggaggctgctccagggcccgggaaagctctcacccccgaacccggcgtggcccctccgcccccggcccgggaagccaagtccccgcaactgccctttccgcggccggaatggcctttcccgaccggccctggtttccccggccgcctcgcccaactgctgccggctccaggggcgcggccgggaccccaggcccgaggagggcgtcggggcggggaaggggccagggtgcggggacccagcgaccgcctgggccttacctgaggcgggggcggcggccgcgcttggcggaggaactggggtcccgctgcggcccagacctcccggccgcgggcccagccgccgcaccagccaccgcacagcgatcagcagcaccgaggcgcccagcagctcccaggccagcgccgcccactcggccgccgccagccgcggccacagcatcgccgccgcccgggccgcagccgccgagaagcccgcgccccgcgccgcgcccgtcccaggaccccgcgccgggctgcccgcgccctgcctgacggcgccgcgctcgaggcggccggggcggcgcgggggacacggacggcggccccgctcgcggaggcccggcgagggcgcggccccggccctgggacccaagcgggcgggaacgggcgagcggacgggcgggcgcggcaggcggggcgcgggcagcccgacgcggggtcctgggaccggcgaggcgcggggagcgcaatgtgctggcgggggccggggctggggcccggggaggccaccagggcggggccgggcgcggggcggcgcttcttcgcgcctcccggccccggcctggcgtccgtggggcgctgtgcgtctccgagaacgaagcggcctccgggttcgtgtgctccgagcccgagtactgtttgcggccgtcgtcccgtcctggagcaggagtgaggaagcgcctctcactcccccgcgaacccgcagaacaggccgccggcgctatggagaccggcggagcttcccgctccttcaccaaggggccctgacgcgcagttgaaagcgcggattttgccgggcgcggcggctgcgtccggagtcccagcgccttgggaggcgaggcgggaggatccccacggcccgggagctcgagaccagcccgggcaaatattttgaaagtcatggtaaaagccgcaattacttttgcaccaacctaatagtgagaccctgtctcgaaaaagggaaggaggattttactgtatgtaatttagatgttttatttattttttgatgcggtgtcttgctctgtcgcccaggctgaagtgcagtggcgcgatctcggctcactgcagcctccgcctcctgggctcaagcgattctcctgcctcagcctcccaagtagctgggattacaggtgcccaccaccacgcctggctaatttttgcatgtttagtagagacggggtttcctcatgttggccagactggtctcgaattcttgatgtcaagtgatccaccagcctcggcctcccaaagtgctgggattacaggcgtgagccaccgcgccccgcctaatttagatattattaaatgaaaatgaaagacctgaaaa

SEQ ID NO: 59273 - DNA, 1776 bp, Homo sapiens
aagatattaaagggttataaagcgctatgttgatgtcgtttaaaagacagttcaaaataatccacgacgacgggtgtggctgctcacacctgtaacaccagcactttgggaggctggggtgggaggatcgcttgaggccaggagttccacaccagcctgggcaatacagcaacacacccagtctcttaaaaaaaaaaaaaaaatccatgagtcatctgtaaatggcttacactggcccagtgacaataaactccaacctcttaagaatccagcacctgcctacaccaacatccttaccgccatcgctttccccctttgccattacactgtggccacatcctccgccctcagggtcttcaaactttctgcctgaggcgcgcttttctcacaattttgcctggcttgcttctcgtcatagaggccttagcacggaagtcgcccgccccccaggctcccacttagagtagcggaccccacccaaccaccgcccggtaccctctcgctggcgaccctgggtgtccctgtcctaggtgggctccgcgggggcagtgacccagacccacaatacccaggacccgccacacgactgacattcgtcgggttcatacccgtgacaacgcccggccccactcgctctggccacctggaatgaagacaagtcggccagcgacaaagacaaacaaggaagtacacggactcctgaaaccccgacttcccacgaaccacccgacaccatgtcacgcctttcagctgcaaagggccaggctaaagcaagcactgcccgagtggtggcagtggacagcttcgggacaggccgcgctcgtcgggcgcagacaagcattcaggagggctcgcgggcaccggcatttacagagccagctccgccgcagctgaaggcgggcgcccaggcccgaggccaccgcagcgaggcgggggtgactggaacggggccgtcccgccacgctgcagggacgcgcccaggccccgccgccgcccctcgagcctcccccgcccatgcactgcgggagcgggagcgggagcgggagcccgagccccgaggcgccgcggcctccgagcccctcaccctgctgctctggcagccccggaggccgcccggcccggatgctccggcggagacgtggccgtgagaggggcggggcgagcggtgcatcggcctcgggtccccggaaacagcctgcacgcgctactttcgttccggaacagagaacgtcctcctcttcttcaagtggccaccctagggccggggaccctctgcccacagggtccggatcgagctcacctccgactgtgatgaggccgccttcagaaagtgaccttaagagtttgcggacctttccctagtagaaacgcaacttccggaactgcaggaccaactctttcaggaagctgaaccgagcttccggcggaagtggcgtggccggggctcggcatgggcgcggccgagctcggtgtgggcgtgacttccccgcccgccctagtcgggtccccgccccaaccccgcacctccacccggccggcgcccttcgcgcttcaggtgccagatcaaaggcgacgctgctttggaccctatttgcttcccctttaaaaagggcaaagctggacggcgcgggccgctggccgctggggaacggctttccaccttccctcatccgccaggccgctcttccagctgtcaggaaggaaatggcctggagggcgcctcggggtcctctgtgatgttgcgctcatctctgcggattttggaatacgcttcag

SEQ ID NO: 59274 - DNA, 675 bp, Homo sapiens
gtgtccccaattagcacctgagaagtcctcccaggtgagtcccgaaatcacatcagaatgttacaacacaccagaatgtgacaacacaccggaatgttaacacaccggaatgttacaacacaccaaatgttacaacacactggaatgttacaacacaccaacacaccggaatgttggaatgttacaacagaccggaacaccacaccggaatgttacaacacaccctggaacgttacaacacaccgggaatgttacaacacaccagaatgttacaacacagcatgtaacaccaaatgttacaacacactggaatgttacaacacaccggatgttacaacacaccgcgattgttacaacacaccagaatgttacaacacaccagaaagttacaacacaccagaaagttacaacacaccgcgtaacaccaaatgttacaacacaccggaatgttacaacacaccagaatgttacaggaatgttacaacacaccagaatgttacaacacattggaatgttacaggaatgttacaacacactggaatgttacaacacatctggatgttactcttcagatggctgggatgtcatccatcagactgaggtatgcttttagaacactctgctcctggtgaccagcctggccaacaacgtctctactaaaaatacaaaaatttt

SEQ ID NO: 59275 - DNA, 1965 bp, Homo sapiens
tccctctgagtactgccttggctgcatcctaaataccttttggtgtattctatttttgtttcatttgtctcaaaacaaggtccccgttgtaaagacttatttgacccaccggttgctttaagagtgtggtgtttcatgtccacatatctgtgaattttccacttttccttctattatttttaatttcgttccattacagtcagaaaagatactctgtacggcaacgaacgtgacaatattgcattctggagagtatatgaacacaactaacttatacagttgtaacgaaggctaaatgatgtgcgtgaatcatgcgcaagaatcggtgggcagaacaccgaataaataccagttcttacatgacatttcactccacggaaaaatctggagcgcacactgcaccgccgcccgtgtggcctgcccgcaacccggtggctctgcccggccccggcccccggccccggcctcagccccgcacctcgtctccgcccgatggtccactcccgcttcctcaggaggacgtgcggctcgccctcctccgcgcccagacgcaggagccgtccccagggctgcggcggcggcgactgcttgccttcctcgggccgctccatcgggattcacatctgcggagaccccggaaacgcccatggagactcccgaccccagaggccgagactcggcgcccgccccaccccgcgggccccggcccggccgcccgcgcccacgcagccccgcagcccggcctggacgccggcgggcgccccctcccacggccgcaaccaggtcccccttcgccgcccgccgcagccccctcgccagccgcgcttacccccgccccgcgccgaacccggaaccggctgcgccgccgccgctgtcaagagacattgcggctccctcagctgatccgcggggcggggccagaggcctctgcgccccgcgattggctggcggcggcgctcaccaagagcggcagctaaagcggagccgggagtggcccgcgagagtaggcgcgtggagggcgctcggccatctttgatcctgaccaggcgacttcgtcgcctgcggatcacggaagtggctgcggtcggcgccatgttatgttggggcagaagggacggggaacttccggattggaagccccaaggattctgagagccccgctaatctggggatgactcctaggagtagaagacggtccatcttagttgtcacgaggtagtgcacgtggggaccctttcgggtacagttgcacacagtggatcacacagatccgaagtctgaggcacagggcgcggtccgcgagtgggagcggctgcttgtgggcagggtggacgcggggccacgtcttggccggcgttttgcggggtcttcctgttctgaacgcgcgtaacttttgcctcagtatctcacttcttggaatccggcggcgttcacgtgtgtgctccagagaagggcgccagagggtattccctgaaagtgaaaggtcggcgaaagaggagtaaagacggcgagacgcgtccacgcagggggagtctgtgcggtttggaggaacgcgccaatgtctgcactcatgaggagcccccaagggcggttttaagagggtgaagcaggaccgggcgcagtgacttacgcctgtaatctaagtgctttggaaggcctaggcaggaggatctcgagcccaggagttcgagattagcctgagacctcatcgctaccaaaataaataaagtaggcatccatttgtgtaaaacaaaccatatatacacacatatatacatatataaacatttgtatatataggtataggcatagttatctataccttgtaaaccaaaaataaaattgtaagcctccccaaccaactgaatgaactgagtctctcaacgccaaagttaatctgaaaaaccagttcagtccctgatgggaagcagggtttggatatgtcccattatactgtcctccctt

SEQ ID NO: 59276 - DNA, 1958 bp, Homo sapiens
ccagcataggccaccccatactcgcctccgctattggagacaggggttgaaagagcaaccactgttattcagctgtcaaataaaacatacaactggacagagcaaagaaagacggttccaaagggttattggaagtggggaaaaaaagacgcggaagagggttgggaaggggaaggagaacgggcttctgggaagaaccgtgaagccacgagactcacgtgcatctctgcaaggcaaaaagggtttttctttcacagagaggtgtgaacaaggttagcaaagaccaggcctggccaagcgaggtggaagtgcgggcgaccagacagcagagcggggaaagcttgaccctgagccagcctgttctcaggcgaggctgcgtgttggctcaggctggggatgggccaaagctcaagaaaatggggaaaggaaagaagcttagctaaagtttgcttaaggagcattttgctccgaccgctcggtggagttcagccagtcaccgatgaggcaagcgacggcaacgtggcaggtctgtgtgaacaaggggcatcctggaggctgaccaaagtcatatagggaacgggagatctttgcagtgagccatttgctggaacccaaaagggtgggaaattcctcaaccttcgctgttttccaggagcacagggctctggtgaaatccaacactgtcacagccggcaggctttccagtgaatggaacccacacaagcaagcccctaagccctccaacgcaggcccccgcagaagcctcatcattcaccccgctggcctccaatgctcacccaaaggcatccaaatcattcatcagcagagtcctaatcgctgcagacaaatcctccacacggcctcccaggggcccctctcccctggggccaagggcaacctcgcgtccccttgccccgcccgtgctgcaccccaagtctacagcgacctccataggcccccagtgaatcgcccagctgaccccaaatctcccccgacacccacattcagcgccccgccgccgcccgccctacagcccccaccccaccctctgcctcccacccccgcgcgcccccagagcccccgcctgaggcccgccttccgcgcatgcgcccaggccggtccgcaggcctttctcgccccagccggcagccagctcgttcgcgctggggtcaccgcgagccggtccgcagcggggtcaccgcgatccccggcgcagacacagaggccgcccccagccccgccgcctcgtggtcccgcccccgctgcacgctcccttacccctcggacctcgcagggccgcggcggacacggcccgatcggggacgtgaacgcgcagaactacatttcccagcgtcccgctcgcgctggaactacacttcccggggggctcggcggtgcacccgccggggtcgcggattggaggtttccggttggaaaagccccttggcggctaactggggaggactggaagaaatctaggatggagccagcactgctggcccaacatgtctgtgagagaacctaaaggcgcctccaggaggaagcgtctgcatcttttccttgttttttttttttttttttttggaggcagggtctcgctctgtcacccagtggggagtgcagtggtgccatgaacgctcattgcagcctcaggctggtctccgactcctgggttcaaatgatcctcctgccccagcctcccaaaatgctggaattacaggcatgagtcactgcgtccggctgcttttccatttttcatcgtagctgtaagtaatatcggtaaatgttagtgttacgtgcgtccgtataggagaccacctgagcaggctaagtgtgagcaacacgcctgtttattcacttgggtgcaagtgggctgagtctgagaaaggagtcagcggagggtggtgggcttgtcattggttcttatagctttgggataggataggcggtggagtcag

SEQ ID NO: 59277 - DNA, 1547 bp, Homo sapiens
tttctcctttatgaagttggttactgtattatttggtgcactgatattcaaaactgttatttaaccctatgaactgcagcttttagctttacaaagcgtccttttttgctgtgccttctggtctgaaccctatcttgtttgatatcaaaacctcagcacgcctgcgtctctgctggggtcggactctgagtcagttctacaggccctgggaaactgggcgtccaggctccgaggatggtactgaacctggcgcagccgtgggagggtgaaccaggtgccgctggcggagccccctcccagccttcctttcccgtcaggctgtgcccctctctagatccgcggcagctggaagccaggcctgtaacgagggagccttctccgaggattgtgggagatgtagtttttccggcgccttcgcgtcctggcgcatcgacgcaggacgcacttccgcatgcgccgcactcccggccttagtcgggtgcgcgcgtgcagggctgtttccggcttagactcagtggaccggaatctggccagcgggtgtacctggctgagtctctgtggccgcggaggcgcggagctaagcggctcggattatcctgggcagaccagagacttgaccagctaaacacttccgtcggtccggggcgtggacggggccagatcagcctcctgctctcccgagtcagggccacggaaaggcacaaatccatccgtgcgactcctggtacccagaccgggaggttgtctagtcacgcgcggtctgtgttgggcgagagctgaggagccggcgtccctgccaacgactcggccccgggacggtcaggagcctggggccctggtcccgcacctgtcttcgggcggacgcatccctcacggtctctccgcagcccgcgggtcctgcccccgcaggcagcgcgcgaacgtgggcgtggggatggccaccagtttccggacagcttcgtgctgggtaagtagagactttccgtgtttaaaattcgactggatactgagggtggccacgttaatctcttcagggttactccgggaactgaactcacattcagctgtaattgtgtgcgtagtttactagactaccctccccaccaaaccaaagcgcctctgaagctcgcccaagctctggccctgcagaaacgtgcctgtggtattctgtgacgggcagttatactgcacttcatggccagctgcgggccctgaagtctgaggatcctccatcatttcatgttttctacacaaagttgtcttatggagacccttagaacttagctggagaaatgatcagttcctcctttttcgtttggccaaatgcttgtttatggagtgtccttttgtctgctggactctaaggctggtgctggcaatgcagagataaattatgtatgttcctaattttagaggagctttggtttggtggagagggtagtctagtgaactatggacgcaattacaggtgaatgaatagggagaaaaggctaggagcggagctcgagagtccgaaaggtaaggggcgggccagtggatcatcggga

SEQ ID NO: 59278 - DNA, 1387 bp, Homo sapiens
cgtctctactaaaatacaaaaaaattagccgggcgtggcggcgggcgcctgtagtcccagctactcgggaggctgaggcagaagaatggcgtcaacccgggaggcggagtttgcagtgagccgagatcacgccactgcactccagcctgggtgacagagcgagacgccgtctcaagaaaatatatatatatattggtggattcggtttccctttatgtttctcagaaaaccgtgtgagcccgtttggagtcactccgtctccaagcgacaggcacttccggacgcggggcactgtgggaagttgagttcgcggggctccttccttcgcgcatgcgcacatgcactcttggtaatgcttgcaggtggcccgttcttcctctttgtccttcgctgccacgtgagaggggagtgtacgcgtgtgcgcgcgtgcgagtgtgcgcgtgtgcagtccccgactcgtcccggcccgttcggagccgcccgggagcgcacaaaggccgacggtttgggcgcgtgcgcgggacacgggggacgggcggtgtcacgtgatcgcgaggccgcgggcgcgcgggcgcgactcggcggcggcgtcttttgtgagttcagtgagtttattgcgggcccggcgctgggggctccgggaatggcgggggaggcgcgcgggagtggccgcggggagcttcggcttcaaggccctgggcgtccgcgcgcggatgcgggtctggggcgggttggggctgggccgggtcgtgaagatgccgtgggccgcggagctgcgcggattctgggctgtggggcgggcacggcctttccggaggcgccgctcctgggcgtcctttcaggcgggcgtggaggcgccagcctcgggcgcgtttagcctcgggcgcgtttagcctcgacctcgggccagcccgcttgccgcgccgtggccctaaggagcggctgccctgctggaccgcatccaccagcagcctggctctgccgctatcgaaggaggcttttaaagcgctggggttacaggtgtgagccaccattcctggccgtgtattttttaatggttatatttattgactgttttaaattttttaagtgacttttgcttttggtatggtgtagcgaaatctcccctcaaattatacatatattcattcacctgtggtttttttttgtagacattcttagggtttccattattttaaaatttaacccactgaaagtagttgtatgaaatagctacgtttattttctttcaaatattcttgtattcattaaataatttaattttactgatggctttgaaatgctacatttattgcatgctgactcttgcatatttagacagtttgctttttttcatctgtataacttctctggagccagtgtcaaa

SEQ ID NO: 59279 - DNA, 1892 bp, Homo sapiens
atggattcgcctcaaattctttcttgtgcaagatccaagaaccctctcttagagtctgagatccggacccctttccagtagcaaaaggtcttagactgaagtactgactccacagtcgttgttaagaatcctagttgtttaatagaggcggtcttgggctcttgctgggccgcggtgtgttctgggaagtgtagtcacctgagtctccagttccttgtctctgggccgtgtgtgcacgccagcgaagcactgtgggagtcgtagtaggggaggaaaaccctataccctctggcgtgcggcgcaggagtttgggggaatgtagtcgccagagctctgcgttgtcttccggctttgggcgtggccacgatgcactctgggagtcgtagtaggggaagaacgtcctccgctcttttgcgcacggtcgctagaggttctgggaagtgtagttgcctgaagctcgtgttctttgtctttcgatgatgtgcgcttggcctcaaagcaccctgggagttgcagtggggcggggaaagccatatgctctctcgcgcggggtcgcggttgtttctgggaagtgtggtggcctgagttccacgttcttcgtttctccgctagttgtgcgcttggccgcgagacactctggcagttataggaacacaaaggtctgtgtactcttccgcggggggccgcggttatttctgggaaatgtagttgcctaggacccgggttctttgtttctcggctctgggcgtgggaggatagcccctatgctctggcgcaccgggccgcgatggctctgggaattgtagttgtcgcaggccctcgttctttgtctcctggcgttctgggcacggcagcgaggcgctctgggagttccagtaggaacgaaaagcccttgcgcgcagggccgcattggtttctgggaattgtagtttcttgaggccggcggcctggttggggtgacgtcggcgaggcttctgaagacgcaattcctgcgacgcccgcggaggggccctggggggcggcgccgagcgtctggcctgtgttggctgtaggcaacgaaaggagccctcccggtctgcgccggatggccccgggcggtgactcggtccggagccctggaacgctacgcccacctggcggaaagcaccacggaaacgcatccttctgtggccactgttaggtgagggggttctggggaggcgcgccgtggcaggaagagaaagccggcgccagtggtccaagcgcgatctctcagggcgccctgctctctacgtgggaggcgcggagcgggggccacgggaatccccagtgcgggaatctagtgacttgggcgcggcctagctggcctgttcgctcagggctcctttctctctctgccaggtctgccattttacacttttctgatctcctccttcccttctgtgagctatgtctcaggtaagctaatgattgataaatatatatatatatatatatataaatttttattttttttttaagagagagacagggtctcctcctgtcgcccaggcagtggagcgatcatagcatcctgtaacctcaaactcttggcctcaagtgagccaacccacttggcctgtttccgcttttctttgtgaagtgcagccgtgtttttcaggacttgggacgtggctttctttctcctacaaccacctgcctggcagaaccccaggaccctgtcccttgttcctccttttcaggtgcttatacttaagtatacatgaagagagtgacaggaagctatccagatgtgggcggggtttctgacctggctggcatgttttagggtgagagggtagggtgccagctgttacatcgcctcctctttcccacagtgttagaatgaggagtgctttacgttactccagcgc

SEQ ID NO: 59280 - DNA, 2036 bp, Homo sapiens
acccgggaggcggaggttgctgtgagccaagatggcgccattgcactccagcctgggcaacaaagagcgaaactctgtctcaaaaaaaaaaaaaaaaaaaattgagtcagaagttaaatgcgtactaaatattttaagaccaaatagcaccaaacttttggaggcgggcggggggcggtgaggggtggtgacctgttttacagaatagaagagagactgtgctgtccaaattattcatgaagcttgtaaaatcttgttagtataacgggcaaggatagtacacaaaaagattaaaacacaatcttgtgagcataggtgaagtcaaagggaaacagccaattgaatacaccagagtattaaagaaataaaaccatatcgcattcaaccacagtataaggcaataggtgaaaaaaacgatggctgtgattcaactcattactaggtttagagattcaagagaggctgctggacagaggcgtgcaccctttagccctcccgtgttgcttagagaaggaggcaaacgcgcatccccggccccccagcgctccctgcgtggcacccgcagccagcccgggacccctccgccccgcgcgcccctggtccccactcgctccccgcgctccactcgcacccggtaagtagcccctcctccctcaagggcctctcccaccgccgcctcccgggcaggctccctgctgctcagactcccgtgaggcgatccctgcacgcaggagaactcagcgggccaggctgatcccacgagggacttgtcccgggtgaacgagccacaggcccgcatgctcacccgtcctcagtgcctgcctccaggcgtccgcggtcccgcccgagggggacgcgaggccgaactacgtttcccaggagctcctgcgccgccccgcagaggggcctggtctgtgcgtcacggacgcgctctgggccgaaggcccgcagggtccggcacagagtggcggctgcggcgccggcgacgaatcgccggctctagggtcccggggcgcgcggctgacgggctgggggcggagcgtggcctgaacgccaggctggggcgcgtgcgtaacggtgtgtgttgtgggtgcgtgtgcgtgcgttcgcagcaggggcgggcgtaggaccaatgggggcggggcgcgtgcgcgtgcgtgacgtcaggccacggggaggtggcgccgccgtgccgagccggcctcagactcacctctgacgccgctcttcgcgctccgctggtgaatggagtcgcgttctctgttttgctgttgctgctgcctttgtgacgggatcgctttctcccatcgaaccttctagttgcttattgcaggtatatacgaaagtgctgaattttgtgtttgcatcgtcatcaggcgcgtgttgagccctttagtaatgtagcagtgtattagcttcgtatttctaggtagacggtaatttcgtcaatgaaaaaatttaacggtgatcgtcaccccttgcctcagtcactttctgtccctcgcgcggccccggcgttcacggcggacgttcttgttctgtggagaataacggctgcacctggagattgacgcagagtgggcggcggtggtggtaagtttgaaccagatattttcagtaatacaaaataaggtttcttctagtctaacttccatttttccccccagctgggatagatgtttaaaattttgcatatggcctttctagtatttgttgaaatagtgacgccgattcgtgtgtggtcttttaaaaacaaatcctgcatctctagctcttagcttcctcatctttgttttgttttttaatcagatagattaactgaaggcgtgtttgtgtggttaatctattttttttattttcagagacagatcataagtttaattactatatttttattttcccttgacactagatatatatacgccatctaacacataatatgagtgtcaaagataaggttaacatcaagatttcgtacgtagatcccacccaaagtgtatgcagaaggtgaacaatttcaattccagctatacatt

SEQ ID NO: 59281 - DNA, 1269 bp, Homo sapiens
ttactaaattttttcttttgtaaaatatatgtaattttcattaaaatattatttatgttaacatgtaatgggaattttacgaatctgttattaaagtgtaaagcaaaataagacttttaccatttcagtaaagcagggactagaacacttgtaacctaatttacatccctccaaccgttgagccattggtgtcaagtattttaattctctttaaaatttaaaacctgcaagcgcgggagctcagggacctggccaggaaggcctgagcttccgggtcatcttagcacgccccctcccggtggcccttggccggagccctccggcgcgggagtaactcctcgcagaggcctctgggagttgtagtttttttgcctttgcctctccatgacgcaattcctgtgcgacatacgtagcggccgccattgttccgcgccgatggcgagatccttgttcctcagatagcgttcatcgcccgtcgtggtcaacgggccagccgagtctggagtggttgcgaacccttctggctgcagatctggaggtggaggcagtaccctggactctattctgctgccccttcagggtttggaggagccggaggtgcggaattcctccggtttcaaggcggcgggacgggacagaactaatctgccttagctctctcctgctgctgacccggggcggttgcctgaccctaacctgtgtgttggtgagggtgtggagatggtgaatcccgtgctgtgggagggaaggagcctcagctccgagaatggcaggcagccctggtgcctcggaccctccccctctgggtttggggactgctgggtgacctctttcttcactgtgctctctcttctagcatccctcgcgtcctgtcacttccagcgaggcacacaaaactgaccgtagggatggccaccagggtccggacagcttctatttgggtgagtaggggttttctttcattcttgaaaagctctccctgaatgccaacgtgtgcgcactccatctactccagtctgaatttgccaggagctttctcaccccaccgctcttttaggcaactggatcgtcatttatagcatgttagactttccagaaatgcttcttgtcatccgacttccttttttcctcctttcatcaatctcttttctaacaactttgtacgctgaactttggagttaaacaagggatactcacacatctttcagttttttcagcctttatttactgagggccttctgtatctgggatctttaaaccttattttgg

SEQ ID NO: 59282 - DNA, 548 bp, Homo sapiens
acagaaggccagaaaacagcaggccagatgaccagaaagcaaaagacaaggcaagaaggcagaagaacaagacgaggaggccaggccagagcaccattaagccagaggccaaaaggaagaaggcagaaggccagaaggcagaaggccaggccacatgagcagaaggccagaagccagaaggccagaagccaggccagagagaagaggaccagaacaaaaggccaaaggccaggaggcagaaagccagaaggcaagaaggcagaaggccaggccaaaaggccagaaggcagaaggccaagaaggcagaaaagggcaagaaggcagaagaccaggagagaagacagaggccagaatggcagatagcagaaacccatgctagaagacagaatgccaggccagatggccagaaggcagaaagccagaaggctaggctagaaggaagaggtccagaaaaggaaaggccatgccagaaggccagaaagtagaaagctagaagaccagcaagcagaagggcagaaaggaagcaagaaggtgagcaggctggaggc

SEQ ID NO: 59283 - DNA, 1992 bp, Homo sapiens
gtcagacttccagagggcagaaaaccaagacagaatgtaagatggcaaaaggccaggccagaaggccagagggtagaaggccaggccacgtggtcagaaggccagcaggtagaaagccagggaagaagtctagaaggtcagtaggtagcaggccagaaggccagaaaacagaaggccaggccagaaggcagaagaccagaaggccagggaaaaaggccagaagcaagaagacaagggaagaaatccagaaagccaagagagaaggtcagaaggtcagaagacagcaggtcagaggccagaaaacaaaagacaagtcaagaaggcaaaaggccaggccagatgggcagaaggccaaaaggcagaaggccagaggccaggccagagagaagatggccagaaaccataaggccagtcccaaaggtcagaattcctgaaggcacaaggccagaaggccagcaagcaaaggccaggcaagaaggcagaggcccaagccagatggacagaggtgagtaggctgaaagccagaaggctagaagggcagaatgcagaatgccaagctagagaaaagagagccaggaaagaaaaagccaggccagaaaaggccagaaggcagaaagaaggcaagaccagaaaaacaggctagagggcagaaggccagaagacagccagcagaaggccaagaacgaaacaagaaggtgagaaggccaaaggcccagccagatattcagaaggcagaaggcagaaggccacatctcagaaggcaaagaccaggacagaaggccaaaaggcagaaggccaggccacaaggtcagaaggcaaaaggccagaaagccagggatgaaggccagaaggtcagtaggcagcaacaaaatacagaaaaccaggcaagaatacagaagacgaggcaagaagccagaacaccaacagaaagatagtagatgctcaggccggagcaccagaaagccagaaggccaggccagatgagcggaaggcagaaggccgggaagccaggccaggccagaaggcagaaggctacaaggcccaaaaaaagaagaccagaggacagaaggccataaacccggaggccagaatgcagaaggccaggtcaggtgcagaagggcaaatgacaagaaagcagaaggccagaaggactaaagctagaaggccagaaggcagagggccagagggcaaaaggacagaaaacagaaggccaggcaagaaagcagaagactagaaggaagaaggccaggtcagaagaccagagggcagaaggccaggccacatggccagaaggtagaagaccagggaacaaggccagaaggtcagtaggccagaaaacagaactccaggcaaaaacgcagaaggccaggccagagggcagaacaccaaaaggaggaacacaggaaagggggatggccaagctggagtgccagaaagcaaggccaggaagttagaaagaaggacaggaagacaggaggacagaaggccaacagccaggccagatgggcagaaagccagaaagcagaaaaccagaggccaggccagagagaagacagccagaaaacaaaacgccaggccagagggccagaatgccagaaggcagaagtgcaggccagaagacagaacaccaaaaggaagacatcatgccagagctccagaaagctagaaggcaagaatgtagaaggccaggccagatggcggtaggccacatggccagaaagcagaaggccagaggccagaaggcagaaggccagaatgaccagaggccagaatgcagaaggccaggccagaaggcagaaagccagatcagatcatcagaaggcagaagaccagaaggccagaaggaataaaaccagaaggcagaagtccaagtcagatggtcagaaagcagaagtaaagaaagccagaaggccaaatgcagaaggtgtgaaggcaagaaggcaaggccagaaggcagaaggccaggccagatggcagcagccagaaaggaac

SEQ ID NO: 59284 - DNA, 553 bp, Homo sapiens
cttatattacaaattgaagctgatgcttgcacaggggaagcatggagtggagaaatatggaaggcttgggagtgatgagagtttggaacagcccttgtgaggataggagaggaaggggctcaaggaagacaagacaaagcactaggcttggggccaaaggctcaaggagagtaccaggcaccctgcatggtggattgttccagcaggttgatggagcataggggcttcaaaggaaccggtgatgcagtcatgctgtggctggagtttacgaaaggctgactcaccaaaggtcaacagagacatttacacaaacatcctgaccccaagtccagtgctctttctaatctataacagggttcttcctttttttctttttctttcactttttttttttttttttgagacagggtcttgctcagtcgcccaggctggactgcagtggcatgaacacggctcacttcagtttcaacctcccgagctcaagcgatcctcctgccacagcctccccagtagatgggactacaggcatatgccaccacaccaggtttaaaaa

SEQ ID NO: 59285 - DNA, 739 bp, Homo sapiens
tcagtttctagagatttattgtatttatttgggccatgtttctccgcttctttgtatgcttgcaatctttttttaagcgttgggcatttcaggctggctttatacagggtaagaccttcaccagtcaacccgctagagattctagggctttttctaacttctttttggcaataagtcttttctgggctgtggatataattcctcaaaggtttgcttgcctcttttctgcagcccataatctcttgctccccttggtgtctgtctgtggtactacagtcttattgttgccataacaagctgtggcactcacctttgatctcagtgaccccagcctggcatttaaaccgctgtttccatcagcactccaagtcaggagagatagaaatctgctccttgggcgaactgtcaaaaggcctgcgcattggactcatggttggttcccttctctttttctctcttgagggagaagaggattggaaattttcttccaattataccacagtgtgctagggataataggtagggtgacaaataatctctccttggccacactttagtcagattcctctgaaccctctacttaaccaggacttgacctttgagctcctgtattcatctttgcatcacaaaactatttcttgcagttttagcaagaatcctccactcttgacatctaatcaaattcatcatcctccaccatcctccagatgacattcgatcatcctggtctgccttcagc

SEQ ID NO: 59286 - DNA, 1680 bp, Homo sapiens
cctactatagtgatggtacataggatgtatttaataagctcaacggtatatcatttactatctgattacagttgagtgaaaaaaaaaaaatcattgagccaactcaaagatctggtgatcctttccaaaaggatttgccggaccatagattgttcttcagttaaagctcagagatttgacgatgaggctcatcttacaaattaagtccactgttcaaagaaacaaaaatagaaagcttgatgccataaagacttcagttgcacatccgaaattcaaagtgagaaaaatatattatccttaaatgtattttcctagcagtatttcgctaactttgggtggtgtaatttttgtcaactcttcacaacctgaacaaatacttttaatcacgtccttctccgatattttcaatgaaaaggcaaagggcgctagaacttggaaaacggatgctttttaggccgctaaatttccttgtctttaaacaacactcattaaaatataagagcactgtgagttatgtttgattggatcatccacacgtgctaaacctatcaaaatcatatatgacttctgggaagccgttctgcttggctggggtttcggcagcagcagggttccctttcctagaaagtccccagctctggccctaccgacgtccgcacctgaggcttccctgctgggggatcaggcactgtcagctcctcggggccgccctcagccctgggacgccctccgccccaacgaccctcctcctccccagcgtcgcgccactcggcggcctcgccggctcccctcccacccttgaccttttccgccacagctacagaacgcccaagcgctcttccgcctagggtgccctccctgccccgcccacctgcgtcccgcgggctcagcggtgttacgccgcgcccgccttaatatgattggtttttgttcctgtcactctaggatccaagcccgccattggtcggcttccgttacgccgctgatgtggagtagggccgagcgcggaacgcgaggggctgctggggtgtttgtcgcagcgggttttcctcggcggtttgcggagctgctaggatggagcaggttgcggagggagcaagggtgaccgcagtccctgtgtcagctgccgacagcactgaggagttggccgaagtcgaagaaggagttggagtagtgggcgaagataatgacgcagccgcgagaggagcggaggcctttggcgacagtgaggaggacggagaggatgtgttcgaggtggagaagatcctggacatgaagaccgagggggtatgtggaggggccccggcgcggggctgggcggggagctccgggcctggcggggaggacgcgagctggaaacagcacgggcagacccaaaacaggagcgggggaggaatgtgagagttcaatgcaagcacgcgaaatcgtgggaaaagcgaagtgacatttccaactgcactcttagggctgagtgtgtgagggaagcttcagcaaattttggaggattgttttggccgaagagacgaagcagtttgggatgtggtgtgtggtgatcacaaggctgcaggcagctggtgaagggagctgctgcgctttggcgtgatatgatagtgaagtaatgcttctcgtcgtagtccactgtccacgccatcgttacagtgttttccaaaaccgtaacca

SEQ ID NO: 59287 - DNA, 887 bp, Homo sapiens
taggatcattacatgttttaatggtttgctttaacatagaatgacaacacatcttctaaaaagagactaaagtctaaaaacagaagacaagtttaaaagatatctgtcacattttgtaaatgtacaaaacttcatttattggttgccacaaagtttgagaaatttagactatatagaccaggttaataggtaacagaaaaacaaagtataaggaaagccgtaacatgtagttgtaaatctaccatctcaaacttttcctgcctccacatcatttgtaaatgcagaagcttcccatcagcaaagctgcatggcactgcgccacatcagagcccagcccaacctttggcccttggtaaggcattaacagcatatccgtaagtgccatgtgaacctcagaattcccggcagtccctttgttagaacacatactatttcccactttcagtcataatcagggctcattaaaagcactcccaataattttgcagtgattatttcaggaaaaactatgtggtataaagaaatcctattttgattcggctaataacttgtttatcttagacaaatggcctgttcactaattcaacaaaagcacaggaagcacctctatgagggtattcacaacttaagaaggtctcccttaacatctcagaaggtctgaagattgtgtattaggtaagaataattcagtctgacagaaagagcactgaaattcaactccagatgttcatatgctagtgcacaatcaccactagtgcagcagcaagagtagagcaagcaggcaatgagcagattctccaatcaagaggagactggaataagagggtgaaataaatatggaattttgaccattctagtttccttttgtgatcatctatttatatacc

SEQ ID NO: 59288 - DNA, 1735 bp, Homo sapiens
ttacttgagtacagagtttgggcacctaagcagtttgaggtaaatagcaggctgcactgaggtgagaaataaagtggcaggccaaggcaggaggatcgctcgtgctcaggagttcgagaccagcctgggcaacatagcgagaccccatttctattaaaataaataaatttaatttaaaaagaaataaagtggtctacccttaaacgcatataggtgtggttgaagccaaggatgggatgttaataattgtttaagaagcaagtctcctggacagaccctcacgaccagtgatacgtctggtccgacttaagcttcctttccaaatgtacatccaattcgttttttatggcacgatttttgccttgaagaattctcaccccaaaacgctgcccgcccctgtccccggaccctttcggtacccggggcaacggggaacccgggagcgctcgctacctggacagggtgcaccatgcccgatccagcgcagggcagcaggcctgcagccaccgcaaagcacgatcggcgcacggcagaaaacggcggccactgtgagcgcaggaaatcccgggaccgtgaactcgaaaccaaaggcgccgagctggggaagcggccaaccccgcacagaggaatcgatgaggccgagcggcgccacggttgccacaggttgagacagcgtcctaggacgaggctggcctcagccccacgaccccgcggccaccccgacagtccttttgttccctcgcgcgggcgcctgacactcaccaagcggatgaagccgaagccacggtcccggttgatgaagacttcgctgggctcgccatagcgttcgaagagcctcttgaagtcctcctccgtgatgtcggtgggcagatttcccacgaagaggcggcagcgctgcgtgtacgtcttctcgcccggcttgaggaaactcttgatgtcgatagtgaaccccatctcctcgtccgggtggtcctctggaggcgcgggcgcgggcggtgccggctccccggcaagagcgagcgccatggctgccgcggccgccggctcgctctcgcccaccgcggactccagggcgcgaaggcgggccgggtttttctcaatgcgcacttgcttcaggtttcctcttaacatcatcttactgagttcgcctcggacaccggatacaggcctagatttatagacagtgtgtctatatatatgtatacgtctctacataaacctatgccaacaaaatatcgacaatcaagagaccgctaggtaggcgagtcggcaacccgtcctcccccaactcacgcccgctgcagctgcacattcaaaatggcgctgccacaaactgcagttagaagaagagacgccggtgcaagtcccacccctccgccaaagccggcgccggaacgacgcgcctgcgcactcgcggcaccaacggaccgttgactgaccgcgcatgcgcataacgctgcgcgtgcaatcgacaaatctcctaggagggtgaagacgtcctttcccatcctgctaaaatatcaaaactgttgttggctgtactcttgggacaaattatgtgatgtgtgcagcagtgtgtgaaaatacaatgacttgagtaaacatccttacccttttagatatcaagctcaattttgttttgttttgttttgttttgttttgttttgttttgttttttgagacggagtctccctctgtcgcccagactggagtgcaatggcgcgatctcggctca

SEQ ID NO: 59289 - DNA, 1177 bp, Homo sapiens
acaaatcagaaacagccaaatgaagaagctcataaggcaaggtctgggagggtcccaaatgcagaatttctgggccagctttcagtggaagcagtagcatcacctgcctggcacactgatgtgttcaccaaccaaaaggctgcactgagcttcaaaatctagagtagttttatttgggtttcattacgtaggcatgactcattggtcatatgactgaactcagctccagatcccctcctctcccagactttgggctggctcaaagacccaagtttcaatcctatagttcatctttctggtgtttagactccactgtgagtcatctcatctcttggcgtaaattcaggtatgatccaaggagcttatgaatataacaaagatacttggaaattttaaggatttagagtctctcttccaggaaccagggacaaaaataatttttactacagatgtctttggtgaaacagtaaaagttattaataatttcattaaagtttagcctttgacatcttaattttctgtatgacaaactgggtagtatgcataaagtatttgtttcataccaaagtacaaaggttatcttactgaaaagcagaaaagtgcttgcacagttgctggactataagctgaactagccatttttcatggaataccatttttacttgaaaaaaatgacaaactatgactattggagacattttcttaaaaataactcaaaagagttcatcacttcaagaaaacagagtatttgttgctgatgagaaaatatgagctttcaagtgaaaaatcagaatttttgaaaacttggggcacatgttctcaggacctcctgagggctgtgtcactagccaaaaaaaaaaggcgaatttttggaagcctgtatccaccaccatgaacttgacagcttcctaaagtgtcaacatttaggatctgagtgaaccaatattttccaaataaccaatgcacaatgttattaatacaaaggttaaaaatccattcaaaatcaatagattttaaactaatagaccagtctgtaccaaatacagtcccccccttttttttaaggaaaaaaaaaactagcagggtgttatggcatgcacttgtagtctcagctacttaggaggctgaggtgggaggataacttgagcccagaagtttgaggctgcagtgagctatg

SEQ ID NO: 59290 - DNA, 3171 bp, Homo sapiens
aacagtcttcctcaaatacaaggcaaatatcaacgtcaaaacaacagattattcagtagtgtttctttttaatccaacagtaaaaaagtttttccaatctactggaaaagaaaaaattgttaaattcaaggcacttaaaagagagctaactttaaatcttgttctggaacttgagagagttccagtggtataaatgtcagcactccccgtgccttcccagggactaccatggcttggctctggggacaggggcacccaagcaattagcttgaaggccaaggccttcaagataacacaaaggcaaatccctcaggaagaacaccctactactgcactaattatattagacagcaaagcggggtaaaaaaaaaaaaacaactcacaatggagatatttccttcttaatttctgccaaagcctcacgacataggcttgaaggtgattcctggtcctagaatgagaattgaaaaccaatttcggtacaaccaatctggatgcacaaccaactcaacaccgtgaggtggcaaaggggtaagaggccaaggagttcctgggctctgctaccctcccccaccctaatgttaccgagaaactaagttgaaaaaaaagaactataggaaccgcaacgacgagacaaagctaaaagtgcttcgtccaactgcagtactggggatgcagtgggctcggggatccgaggcctgctcccaggacgggagagggaagggtaaacgtcgtctcgacgccagcaagggatttgtattccctcctaaatttgcccacccagcgtcatctctgtcactccaagcaccatttcagaggtaacgggcggcgcgcatcacctctgggcccacagttgcctcaagaagttgccctggggccccagcagtcgacgacagggccccagatccgccattaaactcgcccagatcagcagcaaagagtaaaagccgcgcagcgcctgggaaaagatgagcgaaggaggggacccagcggggcagaggcagaagccctcgcccgaaaaacctggggacctcggctccggcggcagggtggcagcgcggtcctgacagcgaagacccggccggggcgcccctccctcgcccaacccgccccccgccactatgcggcaggagagaaagaaaaatgccccgcgacctccccgggcggccggcaacccgccccgccaccccgcctccccgccggccccgcgacctccgccgctggcgaccgcctcacccaaccctcccggcctcgctcgcactctcccagcccctcaggccggacgcaaaagcgccggtgacaggagggcagccccgagctgccctcgaggccccgaagcggcaacggcgacggcggccgcgccgcggggtattaatcccgggtcggtgggagcctccggaggctgctctcacccatctccgcctccccactcacctcggcctccgcctcctcctccggaggctgcgctgctcccagccacccccactctcagcggccctggactggaaagacagcggggataagcgtcacccggttctggctgcggctgcgcggaacgaacaagcccaccccgcttcggcgacaagcacaactccgcgaggtccagtcccggcttttcgcgctggtgaggaggcggagaagcaggggacggcgcagcagagcccgaggaggccccaccctccgtgcgctcgttggctggcgagggagacgagcctgggcgccttgggcacgcccattggctccgacggccgtccttcagggcgccccctcggtggggtggccgaagagctgtccgtcaggtgcgggccacacccgcggccctgcagttccactcccgcctgccagccctcaactcccggtcgggttgtctccccgccggtctcccgcccccagctaccgggtccgccagggtcaggagcccgagattcgccgcccgtcgtagcggcccgcttcggcccctcggggcccggggctctccgggacctacacagcccgggagactccggcggggctgcctgccctcgcccgagcccgggggcccaagctgcggcagcggctcccaacgcctctgctcgaggagagcggcggcctggatgccccagcgccctccctgtccagttccttgaaggcccccaagaggggcgaggccggggaggtgctggagcggggccaagtgagctttcggggccgcggttgaactggagtcttgagtgcgctgcggtcagtggaggcccttccaccctcgccgcgccccgtggggaatagtcccccacctcccgccatggctgcagcaggaggagacgacgtcctccattttgtcgggacaactgtgggaacttgggacccctcaaaaccaaaccccgtggggccaggacttgtcccggaagccccgactgggctctgccattcggacaagggaacagccccagctgccggcgtctgcgtccgcggggcagtactggtcgggcgcgacggtggagacacccagacgcagctccccgcctccatcaaccaagatggagggagctgcaggctcccttggagctgggctctcgcgggttggaggggctgaggcctgccctggggcgtccctgggcgccgccgtcctgtgctagcagcccggggcgctggccctgcctaggcctttttactgcctgccaccgtctcctggtccggaatggttgatggagactccatggaggctccctccacagcccgctctatcgcggggcgcacccgctgcggcccctgcggggagcagaatcagggacagatggcgcccggtgagggcgggccccacaggccacctccacgaggggtcttctcttttgttcctcgtctacacctacgtcttcggcggatgtcatggtgctgaaccatttcccggactccacgtaaagatggaagcgattccgctttcgtctcgccctggcggttcttagtgggattacaattgaggatgttagtttggatgaaagttggtgaaatacttaccttatgtctggaaatacagataatgtgatttttaaaaaacacattgagccccgttttacttctgtggtatggtaaaggcacaggtttattcaatgaaaatcagacgttaaccatctaatgcaggggtggccaatcttttggcttcccggggccacattggaagaattggcttgggcc

SEQ ID NO: 59291 - DNA, 3353 bp, Homo sapiens
ttgtgttgaacttgaaactgtattatcatatatgtttattaataggcaatggtgtcagataatcgtgaaattgagaagtcgcccatccatttgggtgggaaaataaccaacatcctcagttgtaatcccactaagaaccgccagggcgagacgaaagcgacatcgcttccatctttacgtgagtcttggaaatggttcagcaccatgacgtccgccgaagacgtaggtgtagacgaggaacaaaagagaagacccctcgtggaggtggcctgtggggcccgccctcctcgggcgcctgtcgtcgtctgtccctgactccgctccccccggcggccgcagcgagtgcgccccgcgatgcagcgggctgtggagggagcctccatggagtctccatcaaccattgaggaccaggagacggtggcaggcggtagagaggcctgggcagggccagcgccccgggctgcggagcacaggacggcggcgcccaaggacgccccagggcaggcctcagcccctccaaccggtgggagcccagctccaggggagcccgcagctccctccatcttggttgatggaggcggggagctgcgtctgggtctctccaccgtcgtgcccgtcccctgtggccccgcggacgcagacgccagcagccggggttgttcccttggccgaatggcagagtccagttggggcttcccgaggacaagtttcccggccccacggggtttggtttttagggggtcccaagttcccacagtcgttccgacaaaatggaggacgtcgtctcctcctgctgcagccatggcgggaggtgggggactattccccacggggcgcggcgagggtggaagggcctccactgcccccagcgcggtcgggattccagttcacccgcggtcccgaaagcccactcggacccgctccagcgcctccccggcctcgcccctcgcaggggccttcaagcaactggacagggagggcgttggggcatcgaggccgcggctctcctcgggcagaggcgttgggagccgctgccgcggcctgggcgcccgggctcgggcgagggcaggcggccccgccggagtctcccgggctgtgtaggtcccggagagccccgggccccgaggagccgaagcgggttcggtacggcgggcagcgaatctcgggctcctgaccctggcagacccggtgggtgggggcgggggaccggcggggaggggacccggccaggagtcgagggccggcggaggcgggagtggaacggcagggccgggggagtggcccgcacctgacggacagcccttcggaccaccctaccgagggggggccctgaaggacggccgtcggagccaatgggcgtgcccgaagcgctccggccagccttccccgtcagccaatgagcgcgcggagggcggggcctccccgggctcggccgcgccgccgcctcctccgcctcctcctcctcaccagcgctaaagccgggactggaccgagcggagttgtgcgtgtcgccgaaggggggtgggccgggggaggggaggttcgttccgcggagccccagccagaaccgggtgaggcttatccccgctgtctttccagtccagggccgccgagagtgggggtggctgggagcagcgcagcctccggaggaggaggcggaggcggaggcgactagggaggcggagatgggtgagggcagcctccggagcctcccaccgacccgggattaataccccgcggcgcggccgccgtcgccgctgccgcgtcggggcctcgggggcagctcggggctgcgctcatgtcacaggcgcctttgcgtgcggcccgaggggctgggagagtgcgggcgaggccgggagggctgggtgaggcggccgccagcggcgggggtcgcggggccggcggggcggcgggacggcgggacggcggggcgggggtgccggccgcccggggaggtcgcggggcattttcctttctctccggcggggggcgggggaggggcgccccggctgggtctccgctctcggggcagcgctcccaccctgtccaccggagccgaggtccccaagtttttcggggtgagggctgctgcctctgctccgccgggtcccctccttcgctcttcttttcctcggcgctgcgctgcgcggctcttgctccgcacgtattgtttggctgggtctctaatggcggacggggaggcagcgctgccggtcgccgactgcaggggggggcaaacctcaggcccagggcaactgcttggggcaaatgtgggcgatatcggcccagcagtgacgtgagccgccccttacctctgaattggtacttggagtgacggggatgacgctgggtgggcaaatttaggagggaatacaaatcccttgctggcgtcgaggcaacgttttcccttcccccctcccttcccgggagcaggctcggtgtccttaggccccctcccttccagattttgcctttcacatgggttttggccccaaatatgtattttgcgctgttttgccccacttacgcaggagggggctgttgtgcgcatggtgggggtaataatagaaggaccgaacctccttgacctcttattcccttctctgcctccttctggcagaaagggttgggttctcccaccaggttgtgtgtttttgatacatttttcttttttcctcctatcccaggaccaagaatcgccttcagccctgtctggtgcatccttggcagaaagtgaggaggaaaacacccccattgtgagtcctttgcccctaatttgttgctaatagaggacattgtcaggttgtaggggttaagctatgggacctggccctccccgttgttttgagggggaggagctttcccttgggtggcagctgcccccagggcgaagcctgggtaatggctggtgaggcagctgggagtgggcgctgctgtttccaccgctgcagacatcgctcctgctgctgcaataccaacctcagcaaccagacgacgggcttctgcagctgctcacgttacccgggaggaggggtggtgcgaaggagggcatatttctggtgccctctagagttccaaaatgggaattaaagttatttcttgttgaatgctgtgcatgcaacctgaacattttttcttccttaaacaatggctaattgattgaaggaattggaaacatagaaataatcatttatatttttgtttatgtctgctggaaacacatattttgacacttatggctcatgagttgctagatctttttcatgtatttgcttaggaaagggagtcaactcctctagtactatcttgttcaccaagtagtatgctgatcagtccagtgtactgatctagtt

SEQ ID NO: 59292 - DNA, 1283 bp, Homo sapiens
ctaccagtgaaaatagctctattgaatcgggggtgaggagtatcaattttcctacaacttctgtgtcctgctttattgaccagccgagcatcagtgacataaatggggggcctttccgttccaaagcagatattctgggctatctgacctaactcagaggaggcagcctcaccatcccacacctgtcatcctagcgctcaggccaggcccctggcggggagcctccaagggatgacagcgtggcccgcccgaggccacagggaggtgggcgagctgtcaccttcgatgggacagcccgggctgcgtcctgagcacccggcctgcccaggtggcctggatcctcggcggggtccccatccctctgctccgagtgcgccgagggccgcgtggagcccggagcgccagggagggagcctggagggccgcctgtcttttcgagctgcgcttccagggacttcgcgtttgtgcctggcgggctgcggttggaagaaaagtgccaacatggcagctccagggtcaggccccttcttccaggaggcgtttctcagccacaccaacgcggcacttcttttcccttttggcacagaagtgaggaagagcagctgagctggtctcggtctcccagctcctgcagtctgaggaccccgggatgctccagccagggcagacccgcgcggggggtgcccttcccccacccccttccctgcgggatgcccccttccctcgcctcccccgcggggtgccccttcgcttccctccccaccccttccccgcggggtgcccctcctcccggtgtcgcctcctttcaggtgcctgcccctcccccatgtgtctccgcccacgtccgccccacccccacgcgtgtcgcccccgccccgtgtcctcccccgcccctgtggaagggaggctggggctcccgggaccagcagggaagcagctggcagagaacgttgagtgttctctctgccagggccttcaccacccttttcggggccctcaccccgacccacaccgcttccattcttgggtgcaaagggccttccttaacagtcggcggcagctctggggccggcgcatttttttctgtgggggacacccggcacaagaagggtggaggaatggggctgcgcgtcactcccacagcttcttagagagccgttcgcaaggaggaccgagtgtcacgtgagtgagctggaggaggtcacgttaccttcctcctgtgagaggctcaaacacagctcaggattttaccagtatggagagaagaaaccttcaggcggggc

SEQ ID NO: 59293 - DNA, 1530 bp, Homo sapiens
catagtatgcactcgataaaaaaaggtttttgagtgaatgaatcaatgtatctgatcccagctctgccttttactagctctgtgacacactcagatacttagcgtctctgagttttaccttccacatgtgcacagtggtgctaagtgttaaataagatttatgggaggccattgaattgggctgagctcctgcactaggccccagtaggccagaccaaaatggaatcacttgtgctaagtgccacgtaatcaaactgaaacttaaacaaaacaggaaaatcccccaccagggccagttttcctgaaaaaataggagactaccagcaaccagtcaaaagggggccagtccacttgagcctgcataagagaggtttcctccgcttaaactcatacaaggaaatgtggaggggtccaggttgttggcgttttgagcaaagaattgaacaaaacgcacaaacaaagcaaggaaagaaggaagcaacaaaaggagagatttatcgaaaatgaaagtacgctccacagggtgggagccgctggagcataggggctctttttacagaattttctggggtttaaataccttctagaggtttcccattggttacctggtgtacactctatgtaaatgaagtagtgacctgcaaccagaggctgaggtgaagttacaaaggttacacccgatgcaagcctctgtttgcaaagtgaagttacaaagttacagttctatgcaaaggaagacttggcccacaatcaagctgattggttgtgggaagcgaccaatcagaggctgaagtgaagttacaaagttacaatcctatgtaaacgtctgattggctgccctcagagacactttcaattttccatctgccaggcagaaaagggtgggggtttgcaaagggagtagcctccggttttttgtttgttttttcttttttgagacggagtttcactcttgtcgctcaggctacagtgcaacggcgcgatctccgctcactgcaacctacgccgcccgggttcaagcgattctcctgcctcagtctcccgagtagctggggttacaggcgcccgccaacacgccagactaatttttgtatttttagtggagacggggtttcaccacgttggccaggctgggctgaaactcctgacctcaggtgatccgcccacctcgacctcccaaagtgctgggattacaggcgtgagccaccatgcccggctacctccggtttttttgttacttaggtgtgaaaagttggggttttccttttgatttagttctaggaagtcagcgtgaaatcggccttaggttccctgcctccagaccctattctccgcctcagaaagtcacccaatgataaccaatgcacttttctcaccacacgatttcctcattcctgcttgagctgccttaccaaagccgattgttctgcaacacccagccgagtgccttctgttttgtagtctggaggctgcctgtttcatacattgctaataagagtcaattaaatctttaaaactcaatttgtcaaa

SEQ ID NO: 59294 - DNA, 1712 bp, Homo sapiens
catagctcactgcagcctccacaccccccaccctcctcaccctcactagtagttgggactacctacaggcgttgcatcaccatgcccggctaatttttttttaaacttgttttggaggcggggtctcactgtgtttctcaggctgatcttgaacttttgcactcaagtgatcctaacacttcggcctcccaaagtgctgggattataggcgtgagccatgtgcaggacctggaccaagtcttgattctctctggttcctcccaactgaaacatcaggatgccgccccgggtgtccatggggctggggaagttgctgagcaaccttgccctgcgagagcgaaggcgggcgtgtccctcgggggcgtaccccgagtgggcagcagggccagcccgcgcgtccctcagggtcaatgctggggccctgagggtgaggtcagctgtgaggtgaggtctggtggccgaggggaggtgcccagcgtgcgcgtccgcatccggcgggcgacagagcagccccggaacaggagcttcccggcaccggccgtggcgtggcgccctccgctgggccgttctcccccgcagccgctaagtcagcatcgcctactttcccactctcgagtttgcccctctttgctgcccggcagctgggtgtcccatgtcccctgcccgccagtgtgcgaccgcggcctcccgcggggcggtgacggcccctctccttcagcctgaccgccgccagctccctcggcgtgtccggggtggccaggccttgtttagagtagctccagcgtttgaatcgcgcaggcacaagaaggccgtctcctcaccgcgggccagcggggccggccagggcccgggcggagggggagcccgggttccgcggtcgggttgtggggccggcgctgacctcaccgcatgggcccctgcggccgccgtggcttctcacgcggcctgactttggactcgagtgcaggctcttagctgaatctctgtgtagacagggtgggtgggactccgccctggggtggcgctgggggctcgggtctcccgccgcaggcctgtcagcggggcgcttcccgtcgattccaggagcgcccgcgtctctgctcagcgccacgagtccaagcgtgggggaggacgagactttcaaggcggggggtgacagtgccatccagcccagaatacccacccccagtggcgggctgccgtgcccaggccctgatccctgcccctgcaaacatcactttctatcgcccacggggctctgcagatgtggccaggctaagggtccagagttagggagattgtcctggatgatccgggcggaccctaaatgtcatcaaagtgtcctcgtaggagagggagaggaggcgaccgtgggggcagaggctggaggaccgcggcgcccgggacctgcccgcacctgactgcagccaggtggcgccgattccggacgcccagaactctgtgggaatgcagctgtactgtgcggcgtgtaaaccaccgcatctgtgggattttgttaaagcagccacgggaccactccaccccctccagctgtggtcctttacccggcggcggccacctggcagcagcccggttccccatcctgcggggttcctcccgcccgcagaccggctcggccataaaaaccttgctgagaatcaaagagagagaaatatatggaacggaagagtcgacgattttgtgtaaagttt

SEQ ID NO: 59295 - DNA, 2081 bp, Homo sapiens
attgttattttataaagcttgagttgaagctacctgttttaaagatcctttttcaggaagaggagtaaattaagatttactccccaatgggctagggggtcatgggttaagaggggctcagaagcaggacgaagttgttttcaatattcaagtcagaggaggagctgccctcctggcctcccgaccctgggcggttacatgcagcttcctaccgggcccacgccatcctgcaccgcctggagggctgccagaggccagcggaggagttggttcagttccttagggaagacactaggtgaatcaccaggatccagaaaaggcaaaagggactcttcaccccttaaatttctccacccttaggtgatgggtggtcgaccttgcctggctgtccccagagggttcctccacccttctcaccagtgtctgaaattgtgaccgactgtgcacagcagtttcgaaagggactctaaggtcacatggggacacggccgtaccacgcttctcaaggcagtcccaggtgcatggccacggaacccagctctcagcagctgttagttaggtgagcgctgttcgggctgccttcctcctccagtggggcaggatcgaggcactgatggaaccgtcctgaggacgcgggtctcagccgcacaccacctcttcgcgaacaagggtcctaaaaattttccttctaggcggggagcacagcccggaaacagaccctcgtgaagtgtttaggaaaaagggaagccactgaaatcttggccccggggtaggccgggatcggctggctccgcgttagttctaggcaaactccgcccaaatctctgcccggggatttttctgcagaagccgctccaagaggtaaaggtcagttcctgcagcgaaggcttcctgcttcaccggcgaaacggagctttgcttcgaagctaagctttcggtgaatttaaaacgtttggtggcagtgggtcaagtagccaggcggctgcgctagagtaccccgaagggacatcggcgacaccacaaacctcgcgctggcggctcgcccgcgcctttttcccctcccgcgcgcgcccggccccactcgcaccccgggcggtgccatcgcgtccacttccccggccgccccattccagctccggagctcggccgcagaaacgcccgctccagaaggcggcccccgccccccggcccaaggacgtgtgttggtccagccccccggttccccgagacccacgcggccgggcaaccgctctgggtctcgcggtccctccccgcgccaggttcctggccgggcagtccggggccggcgggctcacctgcgtcgggaggaagcgcggcggggccggggcgggggtctcggcgttggggtctctgcgctggggctcctgcgctcctaggcgggtcctgggccgggcgccgccgaggggctccgagtcggggagaggagcgcgcgggcgctgcggggccgcaacacctgtctcccgccgtggcgccttttaaccgcaccccacaccccgcctcttccctcggagactgggaaagttacggagggggcggcgccgcgggcggagcgcgcccggcctctgggtcctcagagcttcccgggtccgcgaacccccgaccgcccccgaaagccccgaaccccccaagtccccttcgaggtcccgatctcctagttcctttgagcccccatgagttccccaagtgcccccagcgccctgagtctcccccggttaccccgagcgccgcctcccccagccccttggcggcccgggtgaagcgggggcggctgagagtcgggaccccccaggaagcggcgccccagaccccggctccggcgctgtgccgtgggcggggttcagggatggctgtggtcgttgtcctctgtactccgcatagtgcgagaggacttggcatttatgagcgcttctttaattttttattgttagagaaacaggcattcctccaaggactgaagatctgttcgagtcgcggaggctgcgcgggcccgcgaggctctcgcagggggacctaggctgggtggcggggcagtgccctctggaatgggggttaacggtggc

SEQ ID NO: 59296 - DNA, 604 bp, Homo sapiens
attcctggcctgtctcagcttctagaggctgcctgcatccgtggctcatgaccccttccccctccatagccagccaaccctgccccacctgtttctgccatcatgtctccttcctcctttatccctctaaggacccatgtgattacaccaggccaagccagctattccaggataatctccccatcttgccattcttaattcaattacatctgcaacgtcccatttgccatgtaaagttctggctcatccaaagctatgccaaaaatctggacatctaactgtggttgcaggtatattgttctgaggatgatatgcaatttgctcctgccaggcacttgggggtgctaccaaccaaggaaccaatctgaattcttggcttgggggttttccagatgacacaggtagtatgaatttgaggattgctctatggttataaattctcagagaaactcttcctcccctccactcagagtcaatgcccccaccggtgaccctccatttaggggatccaagttctctttttcgccaatgatgtagctgttagagaactctagcttctgtcagagatctccaattagattcccatcttgcacagactcgggtt

SEQ ID NO: 59297 - DNA, 1680 bp, Homo sapiens
ctccaggaccctgctgtgtggtcccgagggacgtccagtgaaagctgcggaggagcttccgacatctgcagacagacccctgtgttctctttagggccaacaaatccacatgccacaaatcaaacccagccttttggcaacattttgtcccagttagattaattccaattttttttattcttttggaagaacttctgcatcaagctttgtagaagacgtacataaacacctagaaaagatgtgccaatcaaccgggattttcaaatgccacacacataccaggctgtggcattgccacacttaacagttaacgtcaggttagaggcactagtagaaggctgcaatgtgccagttctacctctagaggtcagcctaacactaggactcaaaatactggctcctaaccagtaaagttaaatttttacttaaaattagagaaaaggaaatgttaacaattctcacggtaggacagggtatgggtgattttaattttttttaatgtttctatctttgaaatgtactcaaaaggagcatgtatttatttttaaaaaagactgaagaaattggaaccttgtgcactgatgatgggaatgtggaaacggcacagctgctgtggaaaacgtatggtggtaactcaaaaagttaaaaatagagccaccatatgatccaggaaccccactgctgtgcatatatccaaaagaactgaagcgggatcgcaaagagagatttgcacagtcatgttcctagcagtgttgtcaacaacagaagaagcaagcaatccaaaagtccaccaacagatggagggataaacaaaacatggtttcacacctacggtggaatcttattcggccccacaggggaaggaagtcctgtcatatgtcatatgccaggctggagtgcagtggcgcagtctcagctcactacaacctccccctcccggcttcaggcgattctcctgcctcagcttcccaaatagctgggactacaggaatgcaccaccacacccaactgatttttgtattttttagtggagacgggttttcactctatgttggccaggctggtcttgaactcctaacctcaggtgatccacctgccttggcctcccaaagtgctgggattacaggtgtgacccacctcgcccggcctaggatgaactttttacttaacattatgcttaagtgaaataagccagacacaaaaggacagatgccatatgactccacctacaacaggtacccagagcagtcaaactcacagtgacagaaagtagaatggtggatgccaggggctggcagaggcacaaaagaagagttgtttaatgggcacagagttcagttttacaagatgaaaaagctctgcagattgcacaaccatgtgaacgtacttaatgctactcaactattatacacgttaaaatggcaaagatggccaaacttcatgagaactagaatttagaaataagtcgatttagggtataacaagctcatagattttacagaatgacttagaaaatcgttttggctagtatattcccgttaattcatgcaataatctaggtcctggactttgaattacacacagtaacataaagcacatctatttatctctgctccctccagaaaccttagtaaaaccaggctaataatggatctttttttaaaagcatagacctgtgcc

SEQ ID NO: 59298 - DNA, 1226 bp, Homo sapiens
tatgcagcaagatcactcggaatcctgccgcccagagtcaaagtattaatattttggcttctccccaatactatggatatataattagcatatatatgacttttacaaatcagataaaacaaggctatttttatttgggaagaaaaataaggcaaatgaagcaattatttgatctgtcctaatgacagctaagtgatagcaggatctgtgaactcacagggaagtcagattgaacaacccggctgaacccgcagccactgccatgaactttgggcaacagacacgggctttaataattttggctggctcagctgggctcactcatgcggcttgcaatgagtagtgggttgtctgggggctggtctaggatggcttccctcatctgtttagcagtcggtgctgtgctggatggtgctggctggtagctgggccacacacctcccgctgactaggctgggctgaccagatgaggagggaagaagggtccccagcaggaagcgaacgaatctcaatgcacatgcactttccaggccttctgctgtgcatgccacatgtgctaataaccgactggccgatgcaagcccgtggctaagcccagagtaagggggtgagaggagcaaagtcacaatgcacaggggagtgcagacagagacgggaacaatttgtgaccatactcagttattctggccaacagtatgtgggaaaactaaaggtttcaaatcaggagaacagaccaatccagatcaaaacacagttcaagattaggccagggcagagacctaggtagcaagttaaaaacaggtcagagacccagttactggaaatgcctgcgtccaagcacaagaaattcagtcacttaggagacacagtacaggcctacctagtttcagagatcactgctggtggtttattaactcctagtccattcagaaagatgattcacttttaggtggagctgggtgccagggtgaccatgtacagatggtggagaaaccaagatcgaagcgtacaggcccctaaagatggcgatttcagatagggactcaggccagacaaggcagtgtgtttggctcctggagttggggtggtcaccaagatgtcaacacagcctaagtcagggcggcctggtcccttgaggactagaatggcccacctgctacgtggaaatgagtctagctccaaatcttaagaactaaaacactcctgatctgtaggtccgtgttaca

SEQ ID NO: 59299 - DNA, 567 bp, Homo sapiens
atgttttacacatgatgatgctattgtggttatatagttttaaaacagtccatatcttttagatactatacatgctgacatatttacagacgaaatgattcaatgcctggcatttgtttcagaacaatccagagaagggagaataactgaaaccatattagccatgtgttaataattgttgaagttgagggggtgggggaaggtactttaaggttcattgcactgttctctcaactttaacacagtttgaaatgtttccctaacacaaagttaagagagagaatatggataggaagaaagaaactggagacaatatggataagtttattaagttttgaggagcaatgtggcaattaccagagggaaaaatggggtcaagagagggtgcttttctgttttcagggaacaactatatgtttgctggctgcggggtctgaaccctggagaggggaagcaatcatgagggagggagcatggtgctttggtctggggctaatgcacctgcctccatggcttgggtcttaccccgctgctgttgctcagggaaaggcagccccctaatcaaac

SEQ ID NO: 59300 - DNA, 2743 bp, Homo sapiens
ctcgaactcccgacctcagatgatccgcctgcctcggcctcccaacgtgctgggattacaggggtgagccaccgcgcgcggcccaaagtgcactttttaatatgccttcactattcaaccacgggcactcatgggccagaaagaacaaaggcacagttaactccactgctctggagaaaagaaagctgacaacaaggaatctgatgccttccttcagtgggaaggaaacaccctgacattggaagtggtctccacaccgggttgtacactgatggggggcggagtcgggggcaggccaacacctcaacagcagtcaccaaaaaggtgcttttaactatcaatagcaagtattaacatgtttatagattgctgctaacagctggccaaagaaaggtacatacaaatgcccctttttaaaaaacaaaaatagcaaggattgtaaccgtaggggtggggggcggggtgggggaagcacacactaaaaatcagtttgggcagaatttaagctgttaaatggacacacttagcaaactctctgggctccatcggcccccacctcccctctggaaacatcgcctcgcccaggaattaggactgcgtgtatgttcgcctaacacctgctgcggcctccagcgacatcgtcgccgacaggactgcgctggcaccctccctgctgggctagtcctgtctccgtcactaaacgcctgtgaccttaggtaaactgcttagtctcagtattctcattcgtaaaatggggatgagaacacagtcgtcgcaggatcgcagccagaattcgtttcattcaacacggtgcctggcacttctatgtggacctgcgggcagacgcggcgacattcaacagagtccaggaaccgcaggccccgcggcctgggcggtcaacctcggaacctcctgcaacgctggctcccgggaagcagacccaactccgcggggcgcctccacctgccaagcccctccagccgcgcctctccccgagcccgccagcgccgtaggggccgcagggcgcagggcttcggaggaccggaggccggggcggggacagcgacccggcgcccaccccgagggccccacgcgagggcaccacgtccccggcgtctccccgggctccaggggcagcagcgcggctcggagccctttacctgccaacgatcaccacgcagccggccgcggaggacgccatggttgggccggggacgcggcgccgcgggcgctgggaccaggcgccggcggagctgcgagctctgggctccggggagggcgggtcccgcgcccattggctgcgcgcgcggaccgggagggcggggagggccgcttggtccctgagtggggtgcgcgccgcgggcccgagacaccgggagacacacggcgcgccgaccctcgtgggcaggggcaggaccagcgcgggggcacgtcggggggtggaaagcgggaagaccacgcgcttgtgactgtcagcattcaccgtgaagtccgtgtctataggaggggacacgggcaggctggcacgggctctagcgctaaagcaccctagagaaactgtcagagaatgtcccctttgctaattcgtctctgaaagacgcctgccgctgccgccaactgcgaactgggcgcagggactgcgacagcagtgaaagagaacacctgatgcgttcatctgcgctacggaaggacacgtctgaattcctccacggagcacactctgcactcggtttatgtatcagaaaaaggaaatgccctcgtgccctgactcctggccttcttggagcccggaacagaccaagaggaaggggcatcacacattgcctgacagtggtgtgcgtccacacagcacaagctgaacgggaaatgacacagtcattagacagaggagacagtactcaagctggaaccgcagccaacactgagatgataaaaggaagtcttcctttgtttcccctgagtcaggaacgtggaaagagaaatctcaggggaggggttaggtttttttgttttgttttgttttttaaagaacagtttcacaaattatcgataaatatttgtaaagtattcaacctcaagagaaatgaaaagtaacacaaggaagataagtcatctctcactcatcagattggctaagtcacatggattgattatattcccatatccgtaatggagtgtttcggacatgcaacttacacacagtagaaggcaagcttaaatgttgaggactttttggagggaatgttacagtacattgttgagacagccgctagcctgagcaaccgcgcctgctctggctgagaatacaaggctccaaagcttccatcttctgatggagcagtttctgtagtcagttacacaggcagccaatataataatcaaggcacccagggagtgagcatcctgtgactgctcactaccggaggctatgggggcagcagactggcttgtttgctgctccctgcaaagtcatgcctgaaatcccagcgctttgggaagctgagtagtaaataatagcttgaggccaggagttcaagaccagcctgggcaacaaagcgagacccctgtctctaccaaaaaattaaaaaacttatccaggctggtgccgcctgtagtctcagctactcagtaggctgaggcaggaggattgcttgaagccaggagtttgagaccagcctgtgcgagatagtgagaacccccccccccgcatctctagtgtgtgtgtatatatatgtgtgtgtgt

SEQ ID NO: 59301 - DNA, 3974 bp, Homo sapiens
gaatcatcatctctgcatggaaaattaaaaagaaaatggaagacataacaagtatgtggataattctaaatgtttacataagtcaactaaactattgggttattctttgttgtagacattaagaattttcagtagtaataaggctgggagcatgactgtggcattttaaaaccagatttaagtggaaagaatgatccaagacaaaaatcaagattaaacaaagaaagaagaggcaaaagcaaccaactgctttgcactaactgtatgactgcgttactttaccattagaaggccaggagcttggctttttcatcctttaagtcacgaatggtgctaagtcattatctatcttacctagttcctctctgacaaacaatatgctatgaaattaacagtcggactttagtgagtagtcctttctttaaaaatagacttccttagggccgggcgcagtggctcacgcctgtaatcccagcactttgggaggccgagaggggcggatcacgaggtcaggagatggagaccatcctggctaacacagtgaaaccccgtctctactaaaaatacaaaaaaattagccggacgtggtggcgggcgcctgtagtttcagctacccgggaggttgaggcaggagaatggcgtgaactcgggaggcggagcttgcagtgagccgagatcgtgccactgcgctccaccctgggcgacagagtgagactccgcctcaaaaaaaaaaacaacaaaaaaaggcttccttagataaactgcgctttagtttatatgctgccattagggcctgtgatagtagggacacaacttgaaatgccccatggtttcctgtatgctacatactaattccgacttgctaaaggctgcggtttttgtggtgtgagtggacataggactctttcatcagggtaatttatagtccaatgtccatttgttttagaacagactgaaattgctggcaggctaaagttaatttgtaatttgcaagtaagaaatcttgcaagcctggtttcaaagtctgattttgggttaaagtgtgagtacactgtgtagtcacaatttaggatctaaagatcctgtccaaaggccatgagtatgatttccctggacttgattggtgacagttagaaaaacagtgtttttcatattaaagaatatgggtctcggccaggcgcggtggctcatgcctgtaatcccaacactttgggaggccgaggcaggcagatcacgaggtcaggagattgaaaccatcctggccaacatggtaaaaccccgtctctactaaaaatacaaaaaattagccgggcatggtggcgggcgcctgtaattccaactattcgggaggctaaggcaggagaacggcgtgaggccaggaggcggagcttgcagtgagccgagatcacaccatcacattccagcctgggtgacaagagtgagactcagtctcaaaaaaaaaaaaaaaaaagaatatgggtctcacttaggtgactcttaagggagagagtacagtacatttgaggcagaatatgtgaaattgggcctacctattgtctttcttactttttttttttttttgagacagtctcattcttgtcacccaggctggagtgcaatggcatgatcttagctcactgcaacctccacctcccaggttcaagcgattctcgtgcctcagcctcccgagtagttgggattacaggcacctgccaccacgctcggctaatttttgctttttagtaaagaaggggtttcaccatgttggccatggctggtcttgaactcctgacctcaagtgatccacccacctcggcctcccaaagtgctggcatccatctcaaaaaaaaaaaaagaccaccattgtgtggtgttttgttatggcagccctagaaaactcatataccagggactagggaaagcctcctagagaaaggaatggccaggctaagatgactgtaggaaagcccattttaggacaagagaatagcatgtgtgaaggcctagaggtgagagaggttatggtaccttgcagtgacttgaaacacgctaagtatggctggagcataataaataagagaggaggcgaagggagataccatggacagtgaaacttcaatgggtagctgtcatttttggctgcccaacatctgaacacactttccactttatgagaatccctaaataggtgggaggagggttaaagtgagcagataccccatctttgagctcctggcagctacaacacggtacactgacctacacacagccaacttgtgttcctatccaggactctgacttgggaggtaggcagataaaggggaggatggttaaaaatggttcacagagcctgtgggagatccctgtgtccagtggggcagaaagtgcccaaaagaagagtgcagctgtgtggcaaccagtgtccaatggcaagatggcaggtgtcaagtggagatcctgcccacaacctctgactaagtggggtgaccaacttgtcctgaggaaactgggaggattggtctctgtcacataagcagatggtccctgtgttagggttttgactgtgccttacctccctgagcttctgttgtttttccaagccagttccttagccttctggacaattctatgagttacttgatatctttccaaaaagactccttttctgcttaatcaacaagaattggcttttcttggctgcaacaaagaatcctgagtagttccacaggggtcagtcatcctgtgaagggccttctaagccacactatggagtttagacttggtccaaaagtcaaggtgtcgcggggagtggggaccgtgtggagaatccattgagtgagagcaagctggaagacagaagagtagagagaaagcagggagaaaaggctgtggtaacaaggcaggtgagagaagaggctgcctggaccctctaggttgtagggggaaggagagaggtgcaatgattggagagaaatgcagcaggtcggttcaaattattgatgaatgtcagacagccaagaaccaaaaacactgacctcccactgacctcagggaaaccatgacagcatcagcctcacgtaggaaaccagcctgcaggggcccatcctccaccaccttcgctgaataaatgttcccaggctggtgctcactcattcctggctgcaactgcatcaccagctgacctgggtgaaaaaggaagagtaacaagcctcttgccagagccactgagcctcacttgcaggccatagccaaattctgttagaagtgtatgtcaggtctaaatccacctcctctcacacctctgttgtccttggtcaccacccagactacaggtcattctggtcagcaacatatcctggtccaatctcccctcaagcccactggaatttctgttttgtgattagcagatgccccatatcttccacttattttcccaatattctcctcacttctgctttcacagaaaactggtagtcttttgaggatactgtttcccttggagccctatcaggtgaaggttatttattctttcacagctcagggatgtctgagtcagaaggcagggttggtggtttctccttggtttttccaccctcttgcagatctgctgctgtgaatcttaggccacctggtatacccttttccaaatctcttccagcttcctgtttgctttccctcagtctttgccgcctggctcacagcgacctctccacttattccagtggcttcaaaccttggactccttatctcaaatggcttcctccagaccacacccttcatcaaaccctgaaccttgttaccaactcaaaactgttctacttccggccgggcgcagtggctcacgcctgtaatcccagcactttgggaggccgaggcaggcagatcatgaggtcaggagattgagaccatcctggctaacatggtgaaaccccgtctctactaaaaatgcaaaaaaaaattagctgggcgtggtg

SEQ ID NO: 59302 - DNA, 3462 bp, Homo sapiens
attagtcaatcagaattagtttagcctgtgccgtctaaccttagccaacaggggaaggacacagcagcaggtgccacaagcgtcaggaataaaaaccccttcgcctcccttgtccaggtgtgtgctcaccattgctccatctgtgagggcgcacccttctatagaagtaaattgccttgctgagaaggaaaaaagaaaattttatagttgagtgctatttcttttgcggcaccaaaactttatttataatgctggcaagcctaaaatttgtaggtcaagttagagacccaggaaagagctgaaggcagtctgggggcaggattccttcttcctcagaggaccttagtcttttctcttatgaccttcccttgacgggatgaggccaacccaccttgtggaggaccaactgctttactcaagtctaatttaactgttaatcacatcttaaaaaataccagctatcatagtactccagaacaaaggcagtcagtgtctctgctcacaaaacacgggaaagtgcaggtgacccatggagaattgtcccccaacactatgttttttctttttttggatggagtttcgctcttgtcacccaggctggagtgcaataccaccatcttggctcactgcaacctctacctcctgggttcaagagattctcctgccttagcctcctgagtagctgggatttattacaggcgcctgccacctcgccgggctaatttttgtatttttagtagagacagggtttcaccacgttggccaggctggtctccaactcctcacctcaggtgatccgccagcctcagcctcccaaagtgctgggattataggcatgagccactgcgcccggccaacactacttattttataaaaactcattaattactggtgtctttagactccctctgtccctcccctccatccccaacatttacttttaaaatttaagacaaaacttaaacattaaacaattatgaatttaattcccccatttatattacattgattaagctttacactatgacccaggttctaggtggttgggacacaatggttcaatccctgtctagtaaataaaacggacaccttaagcgctacaatcaaggtgcgcacggggtgctacagaacaatacgcagacaggaggaggtggggggaaaggtgagacttcccaggcaggtgtcatcccagaataacttttacacagggtgactaagcgagttagtgactgcgcggaaaacgggcttccaaggttcacaaggctcgtgctgcggctccgggagttatgtcacagtaagcttactatcatcctttgggcatctgctttacggatgagttcatcaggatttaaaggatcttggttccatatccttccccttcctcacagaggccgccagcccggagcccctctaggccctcctccctcctgcatctactggccgcgagcctttccctccccgcccccttcacacaggccgcccccagcctcccaaccccccggttccgttccacgggaggccccggcctccctgccctctcctccaccgttctacccgcatcgcccggcttcccgcaagccgctggcaccgtcccctcaacaccctccgcccaccgccactcccttccactgagggggaccgggctgccttctctctgacccgccgttctccgcccccacccacttccccaggcctcccgcaccacccccttcccgccgcgctctctcccgcccccgcgcttccggccccgcccgcccccgcgcggaggactgtgggagcggcttccttggattccgcgcttggcaacggctcggcgtcgcgctttggccaaccgctgcgtcgtccctgggcccgaataactgtcgcccgcttccctcagcgtgaggtaggagaagggcgctggggcctagtgcctcagggcccctggcagccgtgcccctgcggcgtcctgtgtggcgcatcccgccgagggcctcttcgcccgtctcctgcccgcccctgtcggccccggggcggtctgaggcggggccccagatggactcggcctgcccctgcttttcttcctcaggctcccgagttgtctactcagaaacgcgggcgttgtttctcacatcggtgtccccagctcacaggcttttcttgctcctctgaactgggacgggcgtcgctgaccgcttggcgatgtcccaagtcccagtcacgcctgacggggaaacttaaaacccagttagattactgcgccagctctggaatcgcacagcagagatggtgcacatcgctctttaattttcttgttaggtgaagcacttcaaattgcctgatgaaagttgaatcaggaatgaagataaaagtacacaacaatgcagaaagcggtacttagcctcacaaagatggaaacattccaaaaacgtgaagtactgttgtcccaagattctttctaagcctaaaattacacttttactagtccgattttctggttgtgagttttttttgtttgttttttttttttcgagaaactgcagtaggcttcttggaagtagaccaagggtgtccaatctttggcttccctgggccacatcggaagaagaattgtcttgggccacacatgaaattcacaaacactaaggtagccgatgagctttaaaaaaaatcgcaaaaaagaatctcataatgcttccagaaagtttacgaatttgtgttgggccacattcaaagccgtcctgtgccacgtgcgggccggggttggaaaagcttgaagtagactgtccatagtcagtagaagagtattaaaaaacatacctttcacttaaaaaaaaaaaaggttttgccagcatttgatttatattaaacataggtggcatcatccccagattatttcaacatggaaaagtttgttacatgtataagctgctttggaaattgcctggagaatccagaaaccctgggttgtataacaacagttgttctgccacccatagctattagccatgcttgattcccttcaactttcctggcctcactttccacatcttttaatatttgtatgttccacaagatgtctattcaactaaagtctcaagtcaaaccttttaaaaatctggttacaacctagcagaaaggatttctcattctaaaagttgcttccttctataacttatgtgtcaactaagctgacttaaatagggttcataatcagaaattatggttcagaatagtggttctcaaagtggtccccagaccagtagcctcagcatcacttgggtttaagaaccactggtttagtattatctgagctaaagcttttaattaaaaatattttatatatcttttaccagtgacttttaatacctttttttttctttttgagacggagtcgcacgctctgttgcccaggctggagtgcagtggcggcaatctcggtttactgcaagctccgcctcccgggttcatgccattctcctg

SEQ ID NO: 59303 - DNA, 437 bp, Homo sapiens
cggagttcaagaccagcctgaccaacatggtgaagttctgtctctactaaaatacaaaaattagccagccgtggtggcgggcacctgtaatctcagctgcttggaaggctgaggcaggagaatagcttgaacccagcaggtggaggtggcagtgagccaagatcacgccattgcacaatgagccaagatcacgccattgcacaacagagcaagagtccctctcaaaaaaaataaaaaaacctaaagaagtattttctcatgataggatattttttcctgttttctgctattgtagataacattgtagtgaaaaaatttatgcataaataattttctatgttttgatcaaacactacctgggatagagtcccagaaatggaattaatggatcatggatcatgaagattttcttttttctttttttttttttttttttg

SEQ ID NO: 59304 - DNA, 517 bp, Homo sapiens
ccgcggggcgaggggaggcgcccgccggctccgggcgccgcgggcgggacacgggcgcggggcgcaggcgggctcctccggcgcgtgcggacgctgagcgtggcctgtccctcaggtctggatgctggtagccggcttcctgctggcgctgccgccgagctgggccgcgggcgccccgagggcgggcaggcgccccgcgcggccgcggggctgcgcggaccggccggaggagctactggagcagctgtacgggcgcctggcggccggcgtgctcagtgccttccaccacacgctgcagctggggccgcgtgagcaggcgcgcaacgcgagctgcccggcagggggcaggcccgccgaccgccgcttccggccgcccaccaacctgcgcagcgtgtcgccctgggcctacaggtgagccgcgggcgcgtcctggcggggcccggcaggtggggagggcagggctgggcggggagagtgggtggggccgggccgaggccgggcaggcggggagggtggg

SEQ ID NO: 59305 - DNA, 1662 bp, Homo sapiens
gaacagcatgagcaaaggggcggacacgttagcttgcagcataagcagggattagctggcttctcaggggctgtggttagtctctttttggataaaattactcaatttccatgttatcaaatttacttagggcaaaaccaccatactgtaatttcaacattcattcttgtgtgaaattaggttaagatagtgtgattcagagcaaagagcattaacctaggagccatcccagactccagtaaaccgcaggagagcaaggctccctctatgaatgggtaaggcctagatattctccaaatactttttataaattgctggatgattctccccttaatccaatttacgtccagaaaagggccaaaggttttcattctgttttcatctttgagtccccctgcctcaaacagttccttccttcttgctttccagaattctatttatcctgtttttaaattaactttaaaaaggaggtaatgcttacaatgaaatgcaggtcgtacgtgtgcagtgcgacgttgtgatgtacgccccatgtaaccacaacccctataaggaaggccttcctgtctgacatgtggctccctcccggtagggacccgctatcgtcccagcacttcttctgcacctccgaagctactgcccgtttcgcagtaaagccgcccgcgtcctagtctactccacctcgcagcacccgcatcctgcaagggacctgcctcagaagccccagcgacaggcgccgcgggtgcccgccctccaggagcggacagtcaggcctgggcatttcgcaaactccatcagcgaacttctgagggcaaagatgaaaaggacagcaggccgagtcctgtttctactcggagggaagggaggcctccacgcgctgccgtagcctgggggttaatttccccgtcagcaccaaggctgcctaaggcccgggcgccaacgtgcgcggcacaggacgcggcgccttccggcgaccgggacgcgaggcccaacagcgcctaacacagcaaccaggatccactctcaggccggcgccagctccttccctcaggaatccgccagccactgctaattaaactcttccaccactaccaccctggaaaaaaggtgagaaacaaacacacaaaaggcacctaacccagtccaaaacgcctcggcggcgcgcagccaaccctacagctgcgcccgaacccgccactcaccagccgcgcgtgcgcagtcgcccagactcgccgtgtgcagtgggagtggctagccagtctcgctagcgcaggcgcaggccctcccgcccaggcccttgcgcaaggcaggccatctccccgcagcgtctcaatcccgcgtttacaacactgagggccgtctccagcctggagtcgttccttcgcttgtctcatcagccgcccccaagaatggtagcaaaaaaacaacaacaacaaaaaaaatgaaggccctggcagggcgcggtggctcacgcctgtaatcccaacactttgggaggccgaggcgggcggatcacctgaggtcaggagttcgagaccagccttaccaacatggtgaaacctcgtctctactaaaaaatacaaaaattagctggccgtggtcgcgtgcgcctgtaatcccagctacccaggaggctgaggcaggagactcgctggaacccgg

SEQ ID NO: 59306 - DNA, 2440 bp, Homo sapiens
ttttatgcctgctagtttggcagtaaatgttggtgagaacatggatcattgagaactcacatacacgtaatacactggtccaatcactttcggaaaaatttgacactactatcttctaaaagtgaacatttacatactctctgatcaaaaaattccactcctaggtttatactttaggagagctctcagtcaggcatggtggctcatgcctgtaatcccagcactttggaaggctgaaataggtggatcacctgaaatcaggagttcaagactagcctggccaacatggcgaaactccgtctctactaaaaatacaaaaattagccaggcgtggtggaacatgcctgtagttccacctactcaggagactgaggcagaagaatcgcttaaacccgggaggcagaagttgctgtgagccaatattacgccactgcacttcagcttgggtgacagagcaagacgctgtctcaaaaaaaaaaaaaaaaaatctattgaacgctaagagccaggcactggaatatggagatgaataagatactttctttccatagaaacatctgtggcctgtttatatacttaacaaagcatgtgctttacagccatcatttgttaagtcttaacagtttatcttgccaaaataaacagactggtaacatatcacaagaggaatttaggaatagcatcctctgactcacccagtctccaaaaaaaaaaaaaaaaaagcaggatattttctaagacctatcttggttgttttttaggtacatatctaacacatgttatcgtggtttaattattcatatacataaaagtataactaaaaagtaaaagtcttatatgcctttctattattaaaaaaagttttcaataatccctcctattaacactctgatattagaacagaagatcagaggtagactgcaagagcctcaactcattggatggcaatttacagtaagactatggacttctaaacagccttctggtttcttttggagataatataactcatcgagcaaagtgtgagaaatatggttgttgacaattggcaactaaatctttcagtctaatcacagaaaactgaaacctaacctagcgctttttcataataccctggccctgctccatggccactctggccaaaacccagcagccaaggcagcagcacgtgcacagagatgactaaggagaccaagctagacactatgtgctcatgcccttggtattgtcaggcctgctgccagagaggctttggagaggggcttagagcttacgagactacttgaccccactttactccatctggaaatgcagggtggagaaggtaatcaaattatgatatcagcacttatctctcaatgcccataattaccttggaagtatatagagcaataaatttgcaaccctttagtcatagaaaaaaatcttttacgttttggtaattatgttgaatacataattccaaaatagtggttacttttatttatgaaaatgctgtcaaatgaagctttgaaaagaaaactttcaatatatgaaatctgtcccctttttgacatcaaattgaatttcagagattaaaatctaacaacactacacgattccaactacacgacattctagaaaaggcaaaactatggagacaggcgaaagatcagtggttgccagaggttgtgaggggcagggaaggataaataggcagaacacagaggattttcagcacagtgaaactactctgtatgataccttaatgatggacatcacacactggtccaaacccatagaatgtacaatgccaagagtgaaccctatgtacactatggactctggatggcgatgatgtgtcaatgtcgtttcatcagctgtaacaatgtaccactctcgtgtgggatgttgatgggtgagggtggggaggctgcatgtttgagggggtttgtattttcacccaatttttgctgtggactcagaactgctctaaaatataaaaagtctttatctatatttatatttatctatataaatctaatatcaggtactgtaaaaatatgagctaaatctcatgctaaggtagttagtttgttttcctgtgaacagcaactaatcatcatgacaactccaaatcctttcaatgaaattggaaagctttttctgttgatcatcaagattatcttcatatgtaaacataaataacgtgttagatatgtgattcacagacaaaaaatgcagtgagatgaatatgggcaattcattttcacagaaaatcttatgtctacagaatatccttcaaaaagttccttttatattattctttacaacagtttggaagtgaaaacagcttcaactatcagagattgtagaagctgcaaaaaagtgcccaaaacactggctgggaagttcaccagcagcatctgcttatagactcacttggcagaaataagtaatg

SEQ ID NO: 59307 - DNA, 1905 bp, Homo sapiens
tatctggtgtaaaatattagaactacaaactacgctagaattagttcgaatattctcaaatgtgatgctcaaacaccctaacaccaaaccaaaaggaaaaaagtccaaaaaggtaacaaagctggctgtatccaattcttagaaagtctgaatcaatccaggtatcaaatgaacctctaacttcccaaaacatctacaaacaccgaagtcataatttgcaaaaacaaagctgagccagcaaatagaaacactgtttactaactgaacgtagtttatccttacttctcctccttgcatgtaatacttttatcctttgactcggccttctcaaattcccttagtaaacaatctcatcaaactgcttattgtagtgtaagcatgaagtcaaagagtagcatagactcagttctccaaatcgcgggagctttaaggagcttagcactagaccaagttttgccccaatgaccttggtctcaacgattcccctccctccctccagccggcccggcccttccacgtgctgccggctgcaattactccagaggtggctgcatgtcagggaagcgctagaggatgcgaatgcacaggaaacaagggttgctaacagcacccaggctgtgccatccaatccctcccgacaccaactccccaagagcgctcacacagccctacaaatttcccctaccgaagccctgcggggataaccccaactccttcccggcgccttgctctgcgacccagtctgtggggcagggtgtaaggtgaagaaattctctttgctacaccactatattcccacgcccgactggggtgctgggcagccaggggaaggggacagctcctggaaggaggggacgacggcaggaggaaagtaggctgaagaatcctgcgccacgccaccgccacctcctcctccacttccaggctccctgcaggcccttgccagtcgccagcccagcgagcagcaaggcctggagtggcagggccgaccgggggcccgcgaatcccggggtctgaggggcgcggcgtcctcaccatcagaactttagccgcgttctccagctgagcgatcacttctgggggccccagcgccgccgccatcatggtctctcttcaatgacgcgccatgcgctgcattctgggagcgggcgccgcggccggccaatcgccgccgcgaccccggagcctcacgcgctcccagggccgtcgcagccgctgtcgacaccggcgtcgcggcctcggcgggtctggccgggctgccgggttccgggtggctgggaggggactagtgtgagcccggccgccgcgctggggcgggggcggccgcagccggcaccgggcgaggccgaggcggtctgcccagactgctgcagccgcgcgccccgctaagctcccagccccgcgcatgcgtggtgtccggcgccccggcctcgcggtgcccccggccctctccccactaccctagtacagcccgcccggggacccgcagatccacgacgccagttcgctccctccgttctcagccctgcacaccgcctcccctggctcctccttgcccttccacgctccagcgccgtgcaggatttcctaaacttggaatcgctcttcccgctttcccctcctcagagcgcacctcctttcaaagtatctctgtctcctgcttctctgttccttcttgccatgggagaacattccaggatagaacgcttcgttttctttctttctttttttttttttttggagacagggtctcactctatcgcccaggatggagtgcaatggccctatttcggctcactgcaacctccgtctcccgggttcaagcgattcccctgcctcagcctcctgagtatctgggattacaggcgcccgccaccacgcccggctaatttttgtacttttagt

SEQ ID NO: 59308 - DNA, 807 bp, Homo sapiens
tgccgactggctgggagactgagatttgttgcaggccaactagtgcatgtgacccagtgtcagatatatccccaaaatatccctggcaagtggcgggatgatctcctaccccttcgcttgagcaggccggaggccaggagctgagactcctcattctccatttctgtttaccttctccccagctgggaacaaaggacaagaatttgggagtgacaggcatgtggccacacactcaaatgcacttgtttatacctgtttgtttactgtttcagcagattcttgcttagcaataactgagtttatctccttgtcttaaggaaactcttaagaatgttattataatgtagtaaaatttaaatgtctcttgaatgatgaagcactaactaatgtgctatatctaaatgtagaaatgcacatttacgagtattgtcctctcccggcattttcatctgaacactcagtctgttgacaacactcaaaaacttcataaaagatcacaatctagcacttaagttctacagataatgttgaaatcttgcacaagatttaggaatctcaggcaatgacatgcataacattgctattaggaaatgtgtaatatactcttctgttactatcagtggaaagtcaaaaaacaaacaaaccatagtgataagagctgtgtgaattaaggaattttagagctgaaagtgaccttcgaaatcctagagcctcacccatttttaccttctaataatcgtgctgtaaaatatcacacttacactgtagaaaatttggaaatatacagaagatgtttaaaattaggaa

SEQ ID NO: 59309 - DNA, 560 bp, Homo sapiens
gttcccagtgtcccaaggacaccaggggtgtggcagagcttgtgtctgctccccggctccgcctcggtgtccctccaattcctgtccttgctgagctgtgacgggagccaaaggatatgtgttctttttgtttgtttgtttgttttttctcagcaggaagctgacggctgcatcacatgatggtagttgattttttacctggtatttgggtagattaaggaaaaaaaagtttgtgtccaactaattattgactttgtgtgtccttcccaaagcaaggtggtgtttactttgaaaagacactccatgcgactatgagataagatttaagatcaaagggttcccagggagaaaagaaatggcctcagcctacaggctaaactgcctttaaaattcagagcctgccaaacaaacagcagcaatgagtttctctgggcaatatgcaagatcccaggaagacaggaccagaaggctgacgtcggcccgcgtcccatggctcccggtgcgtgccgccagtgcagggcgaggccctcctttcatctgcaggaacccacctccaggtc

SEQ ID NO: 59310 - DNA, 692 bp, Homo sapiens
tacatgtgtgcaactacgtaagtgtgtgaatatgtgcatgcatgtgtgcctatgtgtgtggacgtatgcatatgtgcgtgtgcatgtatttgtatgtgcatgtgtgtgtgagtgtgcatgtgtgtgaatatctgtatatgcctaagtgcatgtactgagtcaggactgagaaccattgctcaaggccatgcatgcacctagatggcctcaagttcctcaaacacaacccccactagccccgaaagcctaaaatccctgacatctcacttttgtactgcacggttagaaggttcttcctgtatcctgcaaagattggtccaggtggaccttggacccactggcccttgttctaaccacgcaaaacacaccttgtccctcattcaaaatgtttgaaaagatcaaatgaactgtaccaaagtcagaggaaagctttttgtttattgtcagagtgcttttaggaatcccgcgtttactgcctgagccacagaaatgtaatactgaagggggagagagatgaggactatgaagcaaacacacacaaggccaatttagatatgagagtggggatttatgtgtttttataatactggagtgggtataaacagagctatccaccctgcgagagaataaaagatcctcattatgttcataaagggattttgcagattatttcctgctttaaaggaaataat

SEQ ID NO: 59311 - DNA, 2347 bp, Homo sapiens
ataggggtgagccactgcacccagcctttttttttcgttcttttttaagcccatcagctatcattagtattagtgcattttatgtgtggtccaagacaattcttcttctaatgtggcccagggaaaagattggacacccctaaataatccctaagaccctgagaggcctaccatggttccctggatggtaccgacacaaatgggaattcagaaaagaaagaacttagcgggcactgggatgaatggccgtagaaggccacaaggatgggtcgtggaagtgggactcgaagggtggaccacggctggctggggaatgcacttcagggggcgacagcatgagcgaacccagtgtgggagaaaacctcatagcctggtggcaggggaggtgcagagggcagacccaatgagaacaggaaggctgggccggtacaagaaataagtggagatcagattggaagaggatggtgaagacagtggctaccaagacacttgccattcaggaaaagtccacccggggaattactgggtcagggagaatccaggtatagtagagcagggtgttagcagcaaagacacttaagagaaaaaaaaaaaatagcaggccaccggagaaagtactcattaacagaaagactggaagtggagcctagagccaaagacaatgtaagctaggaacctttgttagaccagacctggttgagaaagaaagagaaacagggaggatgggagagaatagggggtagaggggcgagagaacacacgctcctggtgtagaggaaagaatttggaaactaccaaggaaatcctgaaaggaggagtcagctgagtccctgctgacttggtttctctttctactgtgacctcagacagagaggtagagatgtgcacgggaagactggaaacaaacacaccgagttcaatacagaaatacccagtcacagggtggggcttcttactctaacagttccagcctaaaatgccagaaaaatagtggaaacaccaaagcaggagagttgaattaagccacttggcatggagaaggtgacagacacacacggtatcgctgaaggctcttgtaagcgtctccaaggttgacagacggcacagagtacaatttgttccactacacttggccacattcttgggcctactagatgccaaatgccactagctttacaacagctctctgctgactaacagcttttataagccaaatgaagttgcttccaatttacattaaatgtgtacttcttggctggagaaatttgtcactgttaatcatttacttttgtacaaaacaacctttatttctattacatgattaataattcttctaatgtcataaccacccaaatatatatcaaaaccacaaggacacacacattccacaagtttgagcaaatcttctccatgtgatttctgtgggacaggggaccagtcgcacccaggctggtaggacaacgatcttattattaagtaaagcacgtcacagcaccaggaagcccagctctccagcaactttacaagtttctgagcactaatgacacatggcattgtggtcagactgccacctctgcataccaaccacgggccagttactttacattctttctggtcagcgggaaaactcataacataggagcaattatcatcccaagtgtgtggatgaggactcctgaggctcagaaggtgcatggtatgccctggttgacacagccaaggtgacacatggctacactatggctttctaaccaaggtccagcttccctttcttccttactgacagtgcccagttgcattggggtggccacgtgcccaggtgaagtacacatttccaaggctgcttaaacccccatgaccaagtaactgggtcctgaccggggaggtgttggggaagctccttgacaaaagagccagagccagagccggcacgtccttccctggctcagacctggaacaccactgcagaggtgccgtctggtgcacgccaagacggagtcacttgctaagggtggcagatagagagagaaggtgcctattcctgatgacactgtggactgccgtgccaccacagcctgctcatcttcagcatccttcttactctgcctctgggggttaggcctctgcagtgggatcagctaccagtagcttgatttagtgcttgtctgcttctgacacctggggccgctgccgagcctacacagctaggctcgttgctgggggaggatacagaggggagaagaatttcctgccgtttcccacagtacaggaaagtcatcaagaactcttaggaaaaaaaaggcatccgctaacaaataagtcaattatagaagattacaaattgtaa

SEQ ID NO: 59312 - DNA, 2302 bp, Homo sapiens
aacaacatttttgtcaaaaaaatctgcaagttaagttctttcatggtgatcctcgcaaaatagcatttctcatccaaaggcctcagaacagccgccagccgccgagctaactcgggaccctgttaccggctgcttggcgccctggtcgggtgggttttaccttcttcagggtccattcctcgcctcgccccccgttcccaaccctcgggacactggagacttgcatttcacaaacgggtttgctccaggccgcactccatccccgagggaaagctccccagaagttctggagttgggctgaaggatgtgatggcaagatgtgaatgatgtcagaatccccatctccagagtccggctggggagctaagcgcaggtgagcttacatcagaagagaaagccaaaccccccacacgtcgctaaactagggcacgggaatggcgtgttatgcaacggccgccgttcgcgtggccacgaaagcgctcctgcgcctcgggccgcgtcccgccaagaccgtgagcaaactcgcagagttggcgcggcagccggccgggagacgccgagcagggcctggccgcccgcagcccgggaggaacggcgcccccagggtccggtggcctctgaggggctgactggcccgtgagccggcggcgcggccgcggggaacggggtgggaaccgcgcggcagtgggtgaggcggcgcagccaccgggggctgaggggcggcgcggcctcgactgcggcaccgccgtgggtccgtcggctcgcgggacgacggggcggccggcgggggccaacagggcgggctctgaaggactgattggcccgtgggacgatggcgcggccgggaggatggccccggatccgtgggaccgctgcgccgccggaccgggggtcccgaggctgtcaggggcgcccggccgggcgtctagtgaaaagccgatcccccggagacagcggaagcagaggcgcgcccggcgctacggcctttcgggtctaggacaccgcccccggcccgcgccgcccctgccccgccgggatcccggccgccccggtcgccgcacaacaaagcggcgcagccccgctgcccccgcccgacgccggcctccaacttccccggctcctctggaaccggctccgcgggctccgtacggcctggactacgagccgccgggcgggggcggctccgggcgggcgcggaccgtgggggcagggcgcagggctccgtccggacaaacttcctcggccgccccgccgggcgcccttcccggagcctcggcaccacagtaggtgcgcggagccgcagggctcgaccgcttcgcggaaactctcgccaccctccgagctgccgccccgaccccagctcccagccccctcacctccaggggcgcggtctacaccctcgggggcgtcctggccggcggctcccgggcctctcgcgccgggagaccgggcactggtggctggagctgctgctggccccgcagggacgggggagccccgggcggcggcggtggcgtggacggcgactgctccatcttcccggggcgctcacgccgcggttccaaagcgcagacccaagtgggacattcgctacattgttggcattccacgggcgtcacgtgaccccgcctcccgcgtcactctcggccgcataccagtccgggcggggcgcctgcggcccctgctcctccgcggccgctccgcccagccccgcccggccgtgcttcctgcctccggcctcgaccgccacctgcccacggcctccctgctggcctgcggtagctcgccagggcctctcggacctatttgactggctgctatctgcccccaaacttgagtatttgccctctcgactgcatttgtattaaaagttggtaactgtcgttaaagccactattcttaagtatctcataccagtcttggtgaaagaaaaaaaaaagttagcaggcctgaaggagccaccaagttaccaactagtggctggacactaaaaataggggcagaaaaggacagacggctattgggacagtggaatcaaacaattaagaaggacgtttgccagaagcggtggctcacgcctgtaatcccagcactttgagaggtctaggcgggtggatcacctgaggtcgggagttcgagaccagcctgaccaacttggagaaacccccgtctctattaaaaatacaaaattagccaggcgtggtggctcatgcctgtaatcccagctcttcgggaggctgaggcaagagaatcactggaacccgggaggcggaggttgcggtgacctgagatcgcatcattg

SEQ ID NO: 59313 - DNA, 634 bp, Homo sapiens
tttgcttttagctattttggaaaactgaatctccaggaaaatacagcaacagcctctaatgcatagttagggaaggcccagggttccagcaactttccagggcaaccacctgaccagtccccgcagacctccctttccagccacctccagagactccaagtgtagcttcattctccaaatagccactctgcttctcagatgagtaataaactatgtggttgcgtaagtcagaattgctcaataatttgagaagattcattcccagaaaagctcaaagatacactatgaagatacaaatcacattctgcatttacagaattcttgtgttgacacttacgttagtaagagaagaattgctaaaacaattttttttcttaccacgtcccccgaaagcttactctgtctgctgagtgagctatgacagcaacaccaactatttactcatttctcattacgtttacagttggctgcaacttccatttcatttgcagacctgagcagaatgctgctttgtctataattaaaagaaacatcccattgaaaaggtgaagttttaattctatatgctccaaaaccttccatttaaattttttatcaaacgtttgcagtaaacattggtaaaacttgctttagg

SEQ ID NO: 59314 - DNA, 1059 bp, Homo sapiens
taaagtttaaagaagacagactaataaaataatcacagaaacgaatatctgctgcgaagcagtaggaagtgccctgcggtctgtttcccctagcagagactggccttgtggcggaagacccccgcgcgtagggagggccggtgcggcgactccgggcggggcgcgctgttggtgtccagggcgcggagcctgcgccagcttcacaaaagcggtgtggacgcctgagccagtccgctcttgctggacggctccccatagtttagcccaaaaatccccctctgggtggctctggcaggagtgatttagggccacaattaggttggacgaggagtggggacttgccccgagctgcctttgcagacccggcggcggcgttctccccaaggctgcccgcttggctgcgcggctgaggcgagttgaggacccagcccgtccccaactctcctcacccctccgccccccgctcgcctcacccctccggcccccgcccccccccctccgtcccccactctcctcacccctccgccccgcccgctcctctcacccctccggcccccaccctcctcacccctccgccccgcccgctcctctcacccttcctccccccgcccccgctctcctcacccctccggctcccgcctgctccacccctctgcgcccccccacgacccctccggcccctgctccccacacccctcctccaccctcacccctccgcctcgccccggggtggggacctgcccgggcggcttccccataggccagtgctgggcccgcggtgcttctagcggcccagggaaacgttttaattttcatttattttaaaatcaaaataaataattgaatgtgataacattgaatctataataataaaaactccagtctgggtcatgttcgcctttagacactaagtcatgaaaccacttacatcttcaggaggaagggcacgtggaggctgcagtcgtcgcacagtgcaggggcggaggggcggtggctgaggctgcagggaggagaggggaggcccgggggtgggggggcggcccagccaggccctgtgag

SEQ ID NO: 59315 - DNA, 1950 bp, Homo sapiens
cggccagagttcttaatttttgccaatctagtgagtgtggtttaaaaaccaatcaattgaaactaatcgtggttttaatgcatttccccgattcgtaatgcgcttgcgcaccttacatgtttgttgactatctggattttgtcattgccaaagcacctgttcagtaattttatccatttttcgattgggttgtctgtttagatcctatatattctggataattgcctttgtcaatcatatgtgtaacaaatttctactgtgtggcttctctcttatgatgtattttatttcccactcttcagtcgtaagatggtatcacttgtaagttcagtcatatacttggcattttgggttcatcatggagttatgtattttgaaggtcagattatttttgtcgtaacccagtcaaatcaattgcttcaagttagttgtttttgtatcatatattcccacccataagtcctgaagatattctagaacgttatttcctacaagttctggatttgctgtacgcgttcaggtctctaagccacccgaactgtgtgtggctggaaggatcgctccatgaccacgtacgctggcggcccctcttccggcttacctcaggggctggtatcgcgggcctgttctttcatcagaaagatctatattttgctaataaaggaacgctttgtgtccaataaggttttcgtcattacgcatgaaaacgccaccttaagcttatgtcgcctgtgaatatttaagggaaaaaaacatcccggcaaccaactgctaggcgacggacgctaagcacctcctccccgcggacgtcagcacccgccttttcccgaagtcgcaacacgcaggcgcgctccggctcgctcaccacgcacggaagtgcgcctgcgccaggagacgccccgcccagcccctggccgactataaagtgtcgagcttctcctcgcgagagacttagtgctcatgctcgctgcaggggtcggaggtcagggcgagcgtctcgcaggccgtaggaggaagatggcggtggagtcgcgcgttacccaggaggaaattaagaaggagccagagaaaccgatcgaccgcgagaaggtgaaggccccctccgctttggggtccgggaagaggttggggatgagtcccgcagggtgcagaggcgcggcctgtgtgctggaggagatggtgtttttggtctcggggaggctcggaggccgcaacgcctcgggaagagagatgagctccgggttcgcagctggtgtttttaacttctgcccttccgttttctctctccctcagacatgcccactgttgctacgggtcttcaccaccaataacggccgccaccaccgaatggacgagttctcccggggaaatgtaccgtccagcgagttgcagatctacacttggtgaggagggcggggtggcctcagggacccgggccgggaacctggaacaacagttaattgcctttgccagtgtagagttattctccctgatttcaatttcatttctccacttggggccttcggactcagctttcaggaagttagaagtttttgttgttaggtgaaaggagatttgcccgtattgtaacgcttttgtgattaatgttgcaacttttgggcggttaagaatggacagacccaagattgctgtcactgttatggctgctaggtacaaaagtgataggtagataaatatgttgtagtatctgccctaaagggactcatagtcaaataaattgcactaggacaacatggtaagggagagtgatgctgtcgagtggtatttgttattctcaaagagcatttccacataatattaagccttaggtaccaaagcaccaaaagtgaaaaataaactaccaaaacccgagttatttcttctctaagggttattggaaaagcttttgatatgtgtttagtgaagatggttcctgaatgtttatctctt

SEQ ID NO: 59316 - DNA, 1394 bp, Homo sapiens
cctgcgcctcggtggcagccgtccacgccgtcagtgcctggcggttcccgtgggacataccgtccactcgccacgcccctccgcccgcggcgcaccccacgcaccgtgccctggccgcccgcctcacgcaccgctttcctctccgtccagcgctcgctgcagccgggccgtctcgcagtccagcgtgctggccagagaccgcagcttcccgcagaagctccggatagggtccatgctgagcacagcggggaaggactccaggcgtacgcagaccccaccgctcagctcacagcctcccgccactagtttgaatctcggcgccggacgcgtcctcggctctgcgcaggcgcagtcctctctcgcgagagccgaagtctctcgccgaggccccaggagaccccgcgagacgggtgcgcttacgccacggcgtctgctggcggccgcggagacgcagagtcttgagcagcgcggcaggtgagtagctgtgcgaattcggttctctagggagctccttcttcgcctgctggccttacctgggctccccgcttctctggaggggaggcggtgcgggaactcccgtaggcgtgagctggagcgcgcgcccgctgctctctccaggtccggccgcgccagttcgcctccgcaaagcccgtccctctcttccgcaggcaccatgttcctgactgcgctcctctggcgcggccgcattcccggccgtcagtggatcgggaagcaccggcggccgcggttcgtgtcgttgcgcgccaagcagaacatgatccgccgcctggagatcgaggcggagaaccattactggctgagcatgccctacatgacccgggagcaggagcgcggccacgccgcggtgcgcaggagggaggccttcgaggccataaaggcggccgccacttccaagttccccccgcatagattcattgcggaccagctcgaccatctcaatgtcaccaagaaatggtcctaatcctgagtcgtcacccttggattttatggatcacggagctgaccatctttacctggtcctggaactgaaaaactgtagcttgtgtgaaaatgagcctttggaccagtctttattaaaacaaacaaacatgagtagtctgcatatcgaatatctagagctctaaacccccaatacttaaaagtctaattgctgtcctgtggtttcattagtctgataggaagatagggatttcctcagtcacagatgatattttgaaggaaagctgcaataaagccacaatgatttgaggtctttgcttaagtatgagatacttgatgggggctttatcatgcaacattagtttgcttaccttaagaattgcccaaaaatgaaagaaaatatgagcttttcagttaaacatactcctaaaaac

SEQ ID NO: 59317 - DNA, 1393 bp, Homo sapiens
gcgataggatcatttgaggtcatgagttcgagaccagcctggctgacatagtgagaccctgtcctgaaaaaaacaaaattcagatctggtacacagtacttggtacattagatccagctaacaaattagctgaaggagataaaatgcaatacagatggcccctatgttattttaaacatatgcaggtcataaaaacaaaagtttaggaggaaataagtcaaaatattaacactgatgggcttggagatggttatttttccacatattctataaaattttaccctatgcataagcactactgtatttttgtaataaaaaaaacccaccaaactccaaatttgcctccctactagaatatgtattctatacttatatgaaggtagaccacagatcatctaaaaaaaataacaaaatgagtaatctaatacttagaaagttaagtaactgtgttactaaaagtcaaggattatctgggattccaaactaacgatctttccttcaacatattatctccttacatgtacacaaagacttacattaagcacaagcatagacagcataaagtccaagaaaattctattaactggtataggaactgttatcaaagatacaacttgtgagtatattccagcttttatcaatatttttgtctgccctgtatgcacagcaaataatgggagaggatgaagtgttcttgtcaagtgtaaagcatataaaatgttccttccccttgcactttcccatcactgatttccagtgctagatattaagcatatgtgtgagtaacacttacgagtcacaggctgagcagtgatgcgcccgatcaggtttaatcagctgacatttttcacaatatctgatagctacatgaaagaagtaaaaggaagatgctgaaggatgtacaaacttaactaatttgacattaaaacttgattttctaaaaaaaataactctgggtaattgataactaataattttaaaacaataccaacaataccaaaatgtattatactagagagcttctcaaatcaaaatgtcaagagataaaagagaacatcagaatgtagtttgctcagcaatttttagatgaaaagtagatgcaaagcaaataaatgactcatacaaggtcaaacaccagggtgagtagcagaactagaccagaactcaagatttagtaagtcccaggtccagtgtttttttctattataccacaatgcctacagtaatatcaaaatttagacttttaaggcatcctgtgggattgtttttgaaattctgaaatagttttattaaaaaaaaaaaacactttttatctgccatccctaccccagataaacaataaaactgggaatgcatttttgaataaaaactctgaattgttttccactaaatc

SEQ ID NO: 59318 - DNA, 821 bp, Homo sapiens
gaaagaaaggaagtactaaaaaaacaataaggacacatcaaagcacacagaaacaagatggaaactggctcctactggccaaatctgggacaaattgaacaataaaatacgtgttagattataattcacaaaatagaatttgccggtgcatgctgatatatgtgagtgaatcaataaataagtaaatgggagaaggataatctcttccatacagtagaattctaactagtaaatgtagaagaaatcatggaattagaaaaccaccatttggcaaccaggacagtaataactgtttcaagcaagaattctcaatagatgctaaaaggagtaagtgaaagtaataacaaacagattattcacagggtttcaaaatgtctcccaataagaaatgactcaggttgggttctctggaatcagatgctaagacagagtttggggtgcaatgtatttactagggaccagcatatgtgaaaggaagggggaagaggtataattgggctaagggagcaatctcactgcaatatagtcctggcttcagcaaccggcagggagctctgaagtgggcagttccaccccatctcactcaggcattgtgtgcaagctgcaccaggaagggtgtgaccttgggtgatatgagtcatgcagaaagtgctggaagctatctgctgactgcactgaccaaaactgagcaacaagtccttcctcaaaaaggaatccgtgtgatgtggtggtctaatagaatattaattacaaagaaaaactgtacctttatagaatggagaaacatagcacacactaccttgggtgttgatcaacattaa

SEQ ID NO: 59319 - DNA, 1334 bp, Homo sapiens
taacacgccaaaatatgagtataagaaatataagcctccttaataatcagccaagaaaaaaataatcaggttatgtctcctcccacccattctttctgtcttaaccttctgcaaaagccggctggattcagagtagaaataaacgaattttacaatgagtcgagtaccaccaaaaatcaaaagtgggagcttactcgtcctccaggtctgacccgcctccagcccgaggccaccaaaagacacacctcccttcccccaacccgccacagccggctctacaggtaacaggcgtttcttctcgcgcagtttgaacaaaaacaatccagaaggaacagatttggttttttaaaaaaaatgaacaaaagccaaaaaagccacaaacacaacctaaaccttctaagaagctcgactactcccgttctgcacgttccttcccagaaggatgcagacccccggtgtcggcgggaaccaggaagctcttggggcctccctgggccagacctgcacccgggaagccgccgcaaggcttcaggagccccaggtcgccccaaggccgcgccgcaggattgaacaaagcggcgggtgcagcaacctcggcgcttccgagcgcgttcggggccggacgcccggcgtccggcgctggctccagaaaggcggcgggtgtggggcgcagaggcctatctcgcgccctagccgcggcccgcgccccgccgcagtccccggggacggtactcacacacgcagagctccaccacgtacgcgtagtaggaccagacgaccacgaaggtgatgaagagcaccggcacccagcccacgacgcgctggcagcagcgccacagcgtccagggcgccatgttccgctggcggctgccgagccccgcgtcccaccgttctggggagcgcgggagccccggcgacggtgactcggacgctccaggcggctgctggtccagctcccccgcctccgaggcaggacttgtgggagcaaaagtccgaggcgccgccgggactcctcccgtcccggcgcccagccaggccccgcccccaccccacatcccgtcgcccccctccccccgcgtccgtccccgccagcccgcccgccgcgggccgcgggccgcccccggtctccgcgtcgttggggcggggtttccgcggccggggaggcggtgagggggcggggccgcagctcgggaccgcccatggggcgtggcggggctggatgcggacaggctgggcggacgcgggaggccggggaaggagaggcgaaaaacacgcccttgatggatgagagggacaggggatagcttttgtggatcgagactcaataggggagg

SEQ ID NO: 59320 - DNA, 915 bp, Homo sapiens
ttatctttacatagtcaattaacttaaaaaagaaactgatcattatttctatgcttgtcctaaagttacgccacaaatagtcattaccatgtacccttttatttttagacaactaaaattagtcttatctgtttttaaaaagcggattaatccttacatccaacttaaagtagtctagaaagcaatgattgacattttgaaggcagaagaggatcaagaatttaaggtagcaaaatggatggtgtctaagagtttcttagaaatcagattatttctaaggggtgttatctgtttgaaggctagattcctttttggtctttcaaaaatctgttaaaaaaaaaaatccttctacttgaaactgagtgagtaaagaaggtaatgtttgcttccctccagctagaagtctggctgccaaacaggtaagccaataaaattcaatactatgtgaatgaaataccacaataaagtcatgaattgattgaataatataacaccagaattacaggtaaaaagtaaattataaaatctatggaggcagatttcatacctgtcttacttttatgtaggtcagtgctaaacatttaaatatttgttgaatgagtaactgaataaacaaatcagaaaagatttcacaatgtcttcttatccaggtccctgtcttttggataaattattatatccccactttacatgtaaaacaaattggcaagaggaattaggtaacaatatgggccttgaaggatttattttcatatctcatatagatttttcaaaaacaggtgttagactctttgaattccatgacagtagtaaaaagagcctgcggcctactttcaacacttaacaaaactgaataattatgcatggtacgattatagaggcagttttgctgcttttcattatttaatgtagatt

SEQ ID NO: 59321 - DNA, 1222 bp, Homo sapiens
taaggtttataatcatgcaataatgttccttaaagttgataataaaatctggaaatcaactggttaatttttgtggctgacacattcgtgacttaaaaaagcaatcgacagaacttcatcatgctatacaaagaaaagatcgtaaaacttagttgcaaagcttaacaaaggtatatcccacaggggtaactggacgcaaaccacctgcggatgtgaatgccacttcactgaccagagaggtagcaagaggcgaggcgcagtgagattctgaattaggagcctcgaattaagacacgcccacactcatcaccactaaattagtgcggccagttttgtgggccgtggtgttcagcgtccgcggggttctcccaagggaggcagaatctccggtcaccagcctcgaaggccctcggggactcaggccgggggccggtccaggaaggagcgagtcccaccagtcgcagggcgctccgatccgcagcggcacctccacccacggctccgggagagccgcccagagccaaaccactccccgcctaagggcgtcaggggagggaggagcttgactggggctagcagaaggagttagtcctgtacctgtgcggagactgtaaaactgccatcccgcgccgcaacactgacgcggctgtggtgccaggccgctcctgctcctgccagggccgcgccggccactgccgctgccaaggggccgggactccgcacagcctgtcggctgacagcgagcccccgtcgcagttttccgccccaggccgccacccgcgcgcagctacccgcagccgccgccatctttgcggaagcgcagctaggcggcgcttctctcccggcgccgccgcctaccgcttgggaactctcgcgacatccgacaggcttccgccccgcctaccgggcctgcgccgtgggtgcggttgctgaggcgacgctcgcagccgcaagaggtggccttcggttccggggctgccttctaaggctgtggggatgggatgacaggaagagtatcaagacagtataatatgacttcctagtccaaaacaagatagtgccctcggttgtgtgggcaggtttctccttttcattttttcaccttgtaaaactgtgaaacgttttttgaaatagtctcttctgcatctgtgttgttcatgtcttcctatgcttatagtcttgactgttctttcatttctgctaaaacaactctcagacaagg

SEQ ID NO: 59322 - DNA, 603 bp, Homo sapiens
aagttggaaaggtgaggtgctgagcccaggtccacacagctggttctgaggagcaggccagtacttgagctcagtttcgtgcattcctagtccctttgcctttcttgcttttgctgcccgccttgtcaggagaatgaaagaatcaatatgcgtggagtgcccaccctgtgcaaagcaacagcctgttccctttagacgaagaaggcaagaatccaggccaaggggtaagctgcttcagtgctgtcattctacacggtgaccaaggttgttattttatattcaaccttcttgtaaggtcagggaatgacaacacattattcatcctttgatgtttgctaagcaaatataaagtttgtaagttggcgtgaacccagtgttggtttgagaactctcaaattgcagcttgcagagttgtgggtgagggtaagagatacagagatgtgataaggaaggagcatagcagatctatgcaaaactaaccatttgtaaattgcatggaaaattgtgtttttgcactgttgtgttttccctactgcctttcattgcatttgtaaatggggtgcagatttaagcccccagtatttggcagtctttaaagatagt

SEQ ID NO: 59323 - DNA, 1115 bp, Homo sapiens
actccccaagataacaggttctatattaaattatgtctaaagattctttcagtgccaaatttctgtatcaaaaatggagaaaaaacttccaatatatcaaaggtgaagatatttaccaacattctacttaaacttattacataaatagaaataaatgagtaatgattaaatcacttcattgatgatgtctaaaaaaaaaacttctgactccaatgtccaccaaaaaaaatctctgaatttcagaaagtgaagattcagatgaaatgatgggtggggttcggggtgggggatgcaaacggaaaaggcaagtgatgaaaagccacaactcaggacaagcacaggcggccacgctgccggagtcattcgcgccgcccgcggaaacctgcgtcgcccaccccgggccctcgacgcccgccgttcctccgcgtggcggagcccagcccagcgcccccggccaccgcctacctcgcggccgccgcgccacagccgctgctccgacaccgggaagccagtctccgcgaagatacgttccttcacatcgcgcacggtccaggacgccagcgccgcgacggtcctgcagcccacgcagccggggagcacggtcaccgggacccacctgtggaaagcagagggacgctcagtcgggctgcggctgccacccgcccgcccagcgcccgcgcggcctccacccgcgttacctctcccacatcgcggcgcggcaggcgcccctagcgcccgcccctgacgccggcgcccgatcacggccggccctaccgcgtccacaggccccgcgcgggccgggagggcgggatccgcatggcgcagtcccgtacgcagcagcccgcgccgaggaggaaacgctagaggaagccgcggcggccgaggagcaggcgggggcggggactgcgcgctcccggcccactcccggccctgcaggcgccgcccgcggggacacgcccacccgccgggaccgttagctggggatccgccccgcccctcccgccaggccccgcccccagggaacgcccatccaggccccgcccagtcaagttctgtcttgcccaatccggacagttagcgaaggagccgccccgccccactcgcccaccaggctc

SEQ ID NO: 59324 - DNA, 988 bp, Homo sapiens
ccgcaacaccaaactgagctgtgttctaacagcatttagtcaactgcagacggtttttgcaaatattagatgctactacttttgctgatctaatattttttaacacatgaagtgacatgaaatgtgttcatgatactctctgcccactgattcatgacctcctctcatgcttcaggggtcaaaacaatcagtgctgtccagcagctgttagggacaggggctcccctcctccccagcttggaacctcaagccactgcccacagctagcaagcagatgtgccacgcagtgacctcttggccttcccagcaaaaatatcctattttggcatatgggcttgacccacagtaggaaaacttggcactactgtacatatgatctcatttaaggagtaggaagataaacatgccagctgcacttactcactgatgggaaaagttctttgagttacacagtttcaaacaggaacagccaggagactggggacttaaatcataactattgtataaataatgggagctgttccctgagctaaacgccgccctttggcagaggtagagccttttggcagagggaggcaggagaagagtgtgggaagtgaagaagttcctgaggtgacaaagtgaattgcaccggagagaaggggggataaagctgcttcccagaaactaggacagcaacacctggctggtccccgaggacgaggacgggacaagaaaggcctctcctgcaggaatgaggttaaaatacaatcaggaaccacacgaatactctatctcctctgatatgctgtcttgtctgtttgtttaagagtgtctttgggactagtaaagcccctcttccctgaaggattccttcgcttttcatagttttcagtgctgccgtgttcacagacacgcctctgcagctgcacctggcagaacagcttgagtttccctagaaacgctctttgagaaaggaatagaggcagaattgcccttggtgatctcc

SEQ ID NO: 59325 - DNA, 1399 bp, Homo sapiens
acgttcattcgtggtgatgctaaggaccggaagggtctttaaccttttctctccctcctagctcagccctcacggaaccctaaaagctggctaaggggccattctcctcgccacctgggcctgcgtctgccgaatcgcttcctaaggactttgactagaaaccaaaggtcccatttttcatctgccatttatttatcattgcataacttaggtaagtccctccgccttcactgtcagttcttcactcattgttttgcatccaaggagtctggaaataagcgggaacaccctgcacgtgagaggggccctgaaattcacgaggggctggggctttgcgtttattcctccagttccgcctgcagcaaccctgacgatcgagcagggcccgcgggggagcgagcggaagcgggcagcgtgcgctgctgtcccgctacccagcccgctaggctgcgcagctgcgtctgcgggcggggagccggggcggccgtgggcttcctccgggcgcgggctgacggctgccgcctgtgggcgccccagccctgcagccgagcgggaggggcggaccagcgggtgtcgggagcaggctgcagcggccaggcctctgcggcttctcggagtactgggtccactggagagcgaagagccgcggccgccaggattcccagcagcggccgcgtgttgagagcctagaagtggccccgaagccgtgcctttcccgatagccaagcagaagtaggacttgaagcaccgaggctgggatgcccatgctggtgacgccttggggctcgcagttatacttggtgaccggtctacacggcgattcggtgctttccggagtagcagattcatctatctttagacccaccttcgtccttcggcggtttagcacggcctgcgctttcctgcgagccctgctgtcacccgaacagcctgatgacttcacgctcaaccactggagggcacaaccacatcatttttaaaaaatagattcctccacttaaaggacatggttttgggggaaagaacatttaaaaaatgtaaaaagatatatatctatatctatatatctatctcagattgttctgatataaactcaggtgggattcttcaaaacaggaggctgttccagtctcttcattttgcagctgagaaaacgaaggccttggagcttgagaactccagttgcccaaggcacacaggtggtgggtaaggaagctgatcatgtctccaaagaatccttccatgacccaggaggatccggtgggagagcagggccgtccacagctcagctaggacacaagaaggcccggggtggcaggagccccactgtgtgctgcggaggatggcagaggaagtcagcattgtcccgaaactgcaggatcatgtgatgtgatgggaa

SEQ ID NO: 59326 - DNA, 2162 bp, Homo sapiens
ccaggagcactttaaatatattcatttcaaccactatgtgctaagaaactgtgtgttagtgtgtgttatatcaggacacatttcacagtcttggatgttttgaagcctgccttttcttgtgagcacgttcagagctatacatccatttgctttatttgctgatcttttgaagatgttactagttgtggagaagtgatgtattgttttgttttaaataaaacatcaaagcctttctgttagaaaaggaacaatagatttttctttttatttaaagggacttttaaagagaagtccttttcccctacagactgccattatctacagttgagtcttgtcattcatagatttttgatcaatgatctataaacagcaggaaacaaagaattatgcattctgcaagtggcttctgatagatagcgtttctctctggcttttgtgttaaatgagtggtggcttttagtatcctgggctttacatttggattgaaactgactgaccttcaaagtctgtgtgatatctcattaacagtagcatctcaacaggtatttttcaacccctgttgattacagtaacaagtactttcagacatagatttttctgtgtggggtgtaaaaagattaatttttaacaggttgacatatctaggatcagtgaacaaagtatttaaaaatgccatcatgcccaagaggaaaatagactgctgatggaaagagtgaaactctgtaaaatatttgaagagatttattctgagccaaaaatgtgtgaccagtggcccatgacacagccctcgagagatcctgacagcatgtgtccaaggtggtagggctacaagttggttttatacaatttagggagacataagacattactcaacattggttcagtctggaaaggcaggacaactgggagtggggagcaggtaggggaagggggattccaggtcacaggtggattgcaggattttctgattggctattggttattatctaaagacctggagtcaatagaaaggaatgcctagagtcaatagaaaggaatgtcaatagaaagggttaagataaggggttttagagaccaaggttttatcatgcagatgaagcctccaggtagcagacttcagagagaatagattgtaagtgttttcttatcagactgaaagagtctgttccatcagtaattccggaagggaggagggtaccatgaggcatgtctggcgccccctttccatcctgtcctgaactagtttttcaggttaactttggaatgtccttggccaagagggggggtccattcagatggtgggggcttagaattttaattttcgtttaaagatgatgacattttcttttcctcaaacattcttcttttcccaaatctcagtgaaaatctgaatgaaacttcacagattctgagacatgagtgaatagtttctaagaaattactgtcttatattcatcctttgaatctgcagaatataaccttaagttaatttttggagaatcagaccataagatgaaagtcctattagccttaatatttttgttgattaagaaatcatttttccatttctgatttcatatatatgaggaatttagaggttgtcactctatcccaacaggaagtaaaaagctgaacaaactgaaaagtccgcagctcttagatctgcaagagaagtgaggtcgcaggcagctacagagaatcacaatacactgctgcagaagcctcccctggagccagcaccagggtgggaaacctgcactgttattgacagcctgctgtagcctaggtttggaaaagtctgagagttaaaactccaggaggacccactcatagagcaccctcccatgcttttgtgagttttacttccaggaactcaaaccgattttcatagtaaatgtcaaaatcaaaacaaaacaaaacaaaaaaatcccttgtttttctgacaggggaggcagaaaaggaacattttgaaatatgctagagtgctctttttcttaacaaggactgccctcaagagaaacacatacaccaaaggctcacctgctggggttttatcagagcctaactgacctggggaagggaaatactgactcagtctgctccagccattctctcccatttaagggagaggcactggggaagcttacagtacagaggcacag

SEQ ID NO: 59327 - DNA, 1246 bp, Homo sapiens
tccaccctgcagaattgttagaaggattagaaatagaaggcatgtaaagtgcctagcagagtgcctaagccataggaagtcctaatggaatattggacattattgccaattgatgattttgggggccagtgaaaacttggcatgactttttcagagtgtggccaacaggcctccaagctcctctgctggcagccggttcctgagtccttcctggctcaggggaactggaacccgccctgaagagtaggctggcccctgccagctctttgcttcttctggtgacaatgacaactaacattgagcacttactatcatccgaaccactctgtaaagtagggattcctaccaccccctcttaacaaagagggaaactggttctcagagtggataaatgacttcccagaatcacccagcttgtaaatgaaaggactggaattcaccttgcagctcctctgccccatgcttaggtgcatgtctgatatcactgggaggtcaccgctggggcttccgtgattgattgatgggaatcacagggactgcctccgtccgtgtgtgctgtgtgcccacttcaccctcaccctaccctcagcagaccccttgctcctggaagctgcctgagttgcctgggttttcgcatccctttgcctcagctctctggtctgtgctcagggtgttccctagtaaccatgacactgtttaggagacctagactcttactctaatgattaatcttgtcattagcatttgttcaccttcagataaggggctattgctgtggattgctgaggaacacaaacagcaggctgactaaccaccaaggtgctagcaagagcccaggacagagcaacgctgtcatccagtgtctcacagacacttcagaaaatcccatcctgacttgactgtgactcacagggcatagtaactgccctcaaccttgtgttaagtgaggtcattgtaaaaccggagctgttctatggcatgccatctccttgcagaaatgcactcactgattgaagaattagcagtctacagccagatttttttaaaatagcagttttcaaacactgtgttcattaggctaaccagtgctatttggattcagttcagttaaaaattcctcttcattgggaggctgaggcaggtggatcgcttgagctcaagagtgtgacatcagcctgggcaacatggcgaaaccctatctctaaaaaaaaaaaaaatacaaaaattagctgggcatggtgataca

SEQ ID NO: 59328 - DNA, 530 bp, Homo sapiens
atcatatctgattaatctcactctcctcagaggagccacctctactcatgttgtaactcctccacacagagcttcagctttgtacaacctgtttccacacataactttctcaatcctttcttgttaatttgaatatgcccactctttatcctggaatgttctcttctctcaagtacacacactagcactctttcaaaccataggtcaaaccagaaacatgccaaataaggatgtttgccttttctattattatttagcaacagtttgaaagttcaagccattgaatcagctgaggacaaacagaaacgtacagctattggaaagcagcagcaaaaatgttatttacaaatgttgtgagtgatgtgtatgtagaaaaccccgaaattgtggcaggtatcaaagatagtatgttttcattagaatttccagccacaaaaatcaacaaatgaaaacaagtaacttccttatgtatcagtgataatcagctagaaaaaggtgggaggataaacatcccattcacaacaacaaaa

SEQ ID NO: 59329 - DNA, 1190 bp, Homo sapiens
aacagagttttgtgttttaaaacaagaaagcccaaagctttgaaataaattaattaatagatgatggaatttcaggtattaatgaaattaccattactcgactgcaggcagccgtgtccttgcaaaaagaccatgtgatgccgcctgtgaacgcacagggataggcctcttaaggcaggactgtagcgctggagctaaagggctttagcaggggtgcgcctgagtgtatgcagagggcgggtcctggcaggacgaattcaccgccactgccagaacgaactattcagattcacgtggagcaaggggctcatgcagaagcagttcccggacccgacactctgggtaggagaccactaaacccggcccctcaaagcagaggtgaccttgccctcatcgagagcgcacacaagacgccactgtaaaaggtgggttcgctgctcgcctcctcccaggcccaaacaatctcgccctgattgttgctggccgcgcggagcaggggtcggcttagctcggggactgaggggagctcctcctgcgccgctcacccggcgctcgccgaacaggtccaagcggctgccctggggcttgacattgaaggcggcgcccacgggagaccagctggtgctgacccttcgggcccggatcccggcttcgaggcttccccggcccgcccggcggggcggcagagctgctgctctggctcccaagccgcccagccttccgacgcacagcattctagcaccagagcagtcccttcctccaacgcagatccctgccctgctgctttcgctgggagcgcgcgctccgcgtttccaaggcagcagcccacgccgccccacgtgacggccccgcttccgggtctgggcgcggcctcaggacgtgggcacgttgtcgtccagagagcaagagcgtcgctccccctcgccttctcggccgccctcccggtttaccgccccctgtgtccagagtaagaaaaggctagggttgcgcttccctcccaagttgactaggggtgggcgcgagtaaaatcatgacatattcgaattccagtggacattagatattctttgagagacggcaggtacttgagtaaacaagaaatgcccaccataggcctgaaggagaagtttcccttttaacctactctcttggtaaatttatcctgcacttctctgtttggtgtctctgtc

SEQ ID NO: 59330 - DNA, 3951 bp, Homo sapiens
cagagaaccctgagattttaaaaggttaaataatttgcttaagtccacaaagtaacaaccaatcttagaataataattgaataaccgttcaattctagctcttctagtctccaaagcctatgttttcacccagtttaccgcattttcttccatttctcaatatcttctcccattcaaagtagcaaatggttttaaagcttattttaatttatttagttgtggctgatttattcattgattgattgataccatgcttagaactgctgcggaggggaggccctttcatggatggcatggatgccagcattgggactggcctgtaggttaggcaggacctcagtctgtggcagtttcttagggcatttagcacagaccaaggtctggtccatagcataactggttgggagactcccttccattggtttctttggatttgatctgactctagcacaccaattcatgctagcacatctcctaagccagacttccaatgtattagttcacaatgagagagagtccttttcggtaacttgtgtccactttcccagatctttccagataccaagacaatggggaaaacacatctatgactagacatatgcttggcaggaattactgccaagatttaagtaacttaaagaaattaaatggcctttgagccatgaaaaatctggtgaaatgaacatttttaataactgagatttctaccacagaataggtcaaacaatgaacatacattgagcttatgtcaggcactgtagatgcaaaaatagctaagacctcatatgacctgcccttggggaatttataatcttggaccttctctctcccttaaacaatcctcagtcaacactagaaaattatctttcttatatctacatccagcattctgcagttaatttcagagcagtggatatctactctggacaccctctggatttccaagatattctgtgtaccatatttacaagctatcacattaggtgagttccttctttgggtcaaggttttccttcatttttggataattcttcacccacagttgtcctctgtgttctaagttctgacaatgattcttttgcttggccaaactttagtcaagcttctgaatcttctgctatgcccatcttgcaaaaattcagtttttgcaagaaccctggtaagtcagtttagtaagaacacccatgcttggtgtctgattatcctccaccatcccccaggtgacgtctgatcacccggcttctcttcagcaagaattctggtaggctggttcagctacaaccccacctcaccctgacgttccctcttagtgattttctgtccactgactcccaccctgctccttggctataaattcccacttgcccatgctgtattcaacactgagcctgctctctctcccctatggcaataccacatagcagtggtccctatacccattgcaatggtcctgaatacattctttctcactgtgatgtaacaagtgtcatgggaatatttcttcttaaacagtccacatggtattattcttaacaaccactcatatggcattaggaataaatggaatgttgttggaatcagttcagctctgtctctgccagagatttcataaggagtcgttacaaatatgttgggtttcctttatacttgttcacagggtaactgactgcaaggaaaggttccttccctgtcgtttctgcagtaatggagagtatagaagattttggttgaaaataaggcattagagtttcagaaacatgggaaaatccagggcacgagcagaataacttcaaaataactttatatttgagagttaagtttgccctaaaatgtgactgaacttttaaatatgagtaaacctaaatgtgctcactacattggggtggccttaccctagtggcttgccagagtccaaggtccagtttttattcttacagttcagtttagttgagtaagtaggtctgagacttaatatttgttttctattaattggtcaccaacactgggaatactggggcgtttgataaagtcctggccagggagaatgactcatttgtctcactcattttgggtagattggaaaggtttgtgtaatacaatacttttcatggagacaataaaaattcagatttttttctagatacataaagcattaatttaattttttaaaaagatctgtctctcagaggcctgcactaagtcctttgatgttaggtagcaggtgaaagtccccagacctgcaaggtttgagtatcatttgaaagcaagaccacttagctaaactcccactctgtgtgaagccaccaaattggacagaactgctcaaaacatagaatttcaaaaatctaataaaaatgaaacgaaagcagtcaagtatagaagaaaaaaagcaatcaagtcaagaggcaggcatggagaggctcctttctatttgtttctgatagggccagaggggctcattgcatttccctctgttcttgatggccagaccctcgtggcatcagagatgaactctccttttctattaatgactatgggaatgctggctgtgcagagaggtctctctggtaccttcccccacccagaatattctgctatcctcttggtttcagctcggactgacctggaagaagaccctgaggagaacccgggcacacagcagccattccagtcctcagcttcaagggggctcacgaaggttgtggatccttgcccagcctgcagtggggacctggtgtggcattgagtggctgtgagtgctcagtgtcccccatctcatgctaagcacagcgaagtagggggagattgcgtagtgtgctgatggagcagttgcctccacctggctgcgtgtccctccgtcatgtgacaggtgagccctgccatccagcctgtgacttcctcaggaagtcagtgccaggggaaacgtgggaaagggaaatcaggagactggagcaactttttggctattagagcttatttggcttttatcatgtatcaacaatcatctttttactaaacagaaaagaagaaggcaatggtgtttttctgtagcaagtcactatttatggaagaggagaccctttatctgcatcgcaattctgaagattccactttgttccagtcattgttgtgggcacactttcaacatttgattaagagccataagggtggcttcctccacccacagaaaaattcctctaaggaatcatgagaccgtcgacatttagcagctgtttaaaagactgtttagactcctgggatgatgatggggaattcctggaattatggtcttgggcaagaagggaactcaagtaggaaagtcagcaatctaaatttcaaacctcagggaaccttctttgtataacctgataatctccttcgctcaacacagtgcttgctgagtgaaggagtgtaatggaaaagaaagttaataatcccttgtgctctggatcaaaaatgaggtaggagaccaaattttccatcaaactggttgggtccaatcacttaatgcaaaatgcttacttcagggtctgtagcacttgttgatcaatgtacctaacaggtcttaatagagaaagtgatcaattcaagcagtgtcttcccaaattctatatatatataacagatattgctgcataacaaaccagacaacgcttaatagtttaaggcaaccgttttattattccccagagttctatgcgtggaccaaggtcacttgggccctagtcttgtgatgtcacttggaccacagtcattgggaggttcaccaggtggaagcctccatgacagctcaatcccatagctgccagtgggtacggcacctacacgtggctgcttgtatggcctgggattttcacagcacagcagcaggggctgagaggcagagtcctaggagtgattgtccccagagagcagaagcaaaagctctcatcagtcttctaagaggctgag

SEQ ID NO: 59331 - DNA, 809 bp, Homo sapiens
tcagctttcttacctggctagaagtggggaggttgaatgcacttggtatctaagcacccttatagacttcccttgccacctgggcccacggtgggagtatttttctctatggccactagatgtcccaggagcacccactttggggctgagctgtctaagacacctggggctccatcctgtcgtccttggaatctgctgacgtgaggaaggcaatgtttgggtttcacttctgtatgattttggggctgctgtctcagccactgagactcagacaagaattttaagacaccaaaacaaccccttagttttcttgatggctgtttgaaaccaacagaaccattcacattttcaggaatggattcttgttaatgccatgaagtaggaattcacaagggattttccaaacattagtgaactcacaaaggaagtgttattatggggtgtctatgtgcttgaggcatagagagtctgtaaaaatgagagagccacagctgcctctgtgtcgttggggtgacggaggctcctggacagctctgccctgcggggacactctgaagaacaggcaccctgtgctcagggccaccgtgaaccatggagagggcagcatggaggaggaggtgaagaagcccacaaagaggagtcaggtcaaggacaccatgagagatccctcgtctgccacttccaaggccagaagcccggagttcccatcacaccccacagcaactatgcagtgtgagaccactggttcatttagccaggaaaagggaagaaatctttcagggtggatttaaagagaactgcaaatccat

SEQ ID NO: 59332 - DNA, 1263 bp, Homo sapiens
tgagggcactccactcaccatcccagcattattccaggagaccccagagatgacttccttaatgacctgaggtcttcgttccctgcctgcctcctttctgaggggctgcttcttcactgtgtggcctcaccgcctccagtgggtgcctctggagcaaacgtgccctggatctgctccatctctgccatcttcttcaagtcagccatttctctctttgaccatgcctgcctacccttccagcactttctcttgtcagtgttcactgcacctgttctcctgcctcatcaggccactccagattattttccctgtgaatggaccagcctgtcacagatcacttaatgcgttctaaagctcacagtacgtcagtgtaacaacagacaacaaagctactagaatggctacagtctccgtttcgtcaagcccacattttatgagttagtgactagaccacattcagattacatttaaatgaagtacaattaaatcaatgggagagcagtaacctcacagtggagaaacctggctgcaatggactaaatgtttttgtctccctgaagtttatatgttgaaatcctaacccctagtaagaggctgttaggaggtgaggcgcttgggaggtcattgggtcatgagggtagggccctcatgaatgggatttgtgtttttataaaagagcccccagagaactcccacgcccttattgccatgtgagaacatagcaagaagacagacatctacaaaccaggaagtaggccctcaccagacactgaatcttctggtactttgaccttggatttgccagcttgcagaattgtgaaagacaaatttctgttggctctaagctacccagtctatggtactttgttacagcagccaaactaaaatgctgctgggtgccttcttaatcagcgatgaaggtcaataccaccactgatgtcatgagcatgtcatgtacccccagaaggatgtgacttcacctgtggggtaggtatttttttcaaaaagcctcatgtccagtctaattataagaaaaacatcagacaaacccaaattgaagaaaattctgtaaaatacctgatcaatactcctcaaagcttccatgaaaaacatggaaagcctgagaaactgtcacaggccacaggagccaggataatgaaatgcaacgtgacatcctggatgggaccttgcgtttatattaacattatgtaactttacaacatttatagtctcaatgtcagaaactttaaatctttataactt

SEQ ID NO: 59333 - DNA, 2224 bp, Homo sapiens
caccttttggctattgtgaatagtatggctatgaacctgggtgtatatgcttagcacatttaattgtactcatgatgactgtcccttatgcagcacttactatgtatcaggcactgctctaacacacattaactccttaaatcttgcaccaatcctgtgagttaggagttattattatctaaattttaccaatgaggagtaaagtgattaaaaaaaaaacccttgtaggaattagggaacttgctcaaataactgaatcctggtggccattgaaagaaaaacttcagacaattggatttagcagagtttaattgagcagaggaagattcttgaattgggcagcacaacctcctgttagccagccagaataggtttggagcaactccatgctgccacgtggtcagagaggatttctagacagaaaaaggaaggagacatacaggaaagggaagtaaggcacagacacagctaggctgggtgcagtttggcatttgccttatttgaacagttggctgcctgtgattggcgaaactctgtgattgatgcaaagtaagttacagtctgtttacacctgcagtttggttatgttttcctctgtatggaaaaacccttaggccaaggttagaatatgtgaggaggcacctttaggccatacttaactgaacatggtagacccaggtcctgtgccccagtcctgctctgctagaggcctttcttgaccacccagttactcttcatcacagcactattttaaatctgtatgtagctactattactctctaacattttagtattaatttagtttttcttcatagttaatctcccactaaaatatcagttctatgaaagcacagacctcatgcttattttacataattatatctccagagcctggatctcggtttggcaaatagtagtcactcagtaaatatttgttggctgaaataatgaataagcctgggcaacagaaagtcttgtaataataaaagtaaaaataaaacaaatgttaataaaggggaaaaatcttttcattaagccaagggtttaaataaactcaagacttaattagaattgctaaaatgtcctatttttttcaaatgaccccatgacattttgataccagctagctgggtttgctgatgagattagtcataatgctggcactgtttctacttcacagaactggaaaagttatgacaacgttgcttatcccgctttttaaaagttaagtatttagttcaaagaaacatgactgttgtctgtaatttcagctggaggtaaaatgagtgacagtttttcaccttgacctccaattctggagtgcaaaaaaagtggacgggaagcactgttctttctgccgctggtcttgcagcagcctgtgggtggaaaggagagctgggcctgaaagcatttgccgccacgctgtctccctttattgatgtctctctcctgggagaagagagatttctatagaagaaataatttctgcagaagaattaggaccaaaaatagtctagaatgggggaaaaaactaaatctagcaaatcatgcggtggaaacaccttctgtttccattgatatcttaagaatgtgctgcccaaactaagctgaccattttgttttcctctcacacggaaacacgtttccccacttgtaaaacagagaaaagaggactttgaaattcattaaggtaataagcaccactgatgtgcattcttgactgagaagttcttagaaattcttgaggaaaacaacagaaacagcagtgtacatgcttttatcatttaagaactgccacaggtgcagttcttaaaagttgattattaactatgcagcctgaactcctgggaaatgagtggtttatctttgtgtgccaggttatagccccgtgcctggcagactctccgtccctgagtgacagactaagggatgatgaaataaatcaatgggaaagcacatctgcaactgggcaaggacgaggggaacagacaatgaaaacagctgtcccaaaggatggccaagtgcctggatttgtttttgatgttttgcttctcaattgttgttttgatattatttgtgccaaaagtgaaacaaagctcctcgttaactgagaagagtgaatatgaacgaagcagcagaccccgggacaggaaaccaggccactgagggtcttgtggctctggtgacccggggtctggggtggtgctgtgggggatgcaaaatg

SEQ ID NO: 59334 - DNA, 619 bp, Homo sapiens
tgaatgcagaaattcgaggagaaacagcgttggccccggctgaaacggtgccagtggagttgaagtgaaatggagatagaattaatagggcttcctggagggattaaatgcagagagggagctgtcagtgcacccggcatgggtggctgggtgggtgtgtgaggtatttaatagttctcatgcactgacagttcactatatgccaggctttgtgctaaacatgttgcatcatccatttagtcctctcagtcagcctgtgggctgggtgcttacaaatgagaagctaaataatttccccaaggtcatgcaactagtaggtgactcaggaaattcgcagcctggtctactcactccaggacccaaagttcaggggaagaccagaaaacaaaattggcagaaaagagctaaacctcagttttgagtgtgtgggtgatgaccactttttcctagctcaaaggcaaaaatactagattctggggagactgcagcaaccacacagcctagtttctaagtcctttgaatcctaacatgaaaactgataaagcaactagaacaactcatggacgacacttacagcaaaactaggtgcaagatagccaatgatttcaaacaagaggag

SEQ ID NO: 59335 - DNA, 320 bp, Homo sapiens
cctgtaggtgcattgctcagcagtgggtcaccagccacatgtacagaacagcactcgctttgtgtctcactgggtctaagtactgacaattcggtgattgtttgtttccaatgtggaatcccctggttctggggccgacagagctggctctcgttccagggcaaacttaacaaacaagttcaaggtgagggccatgtgcactttacagaggtcccacatgagagctataaaaccaagaacctgccaaaagacacgtgaataataggtagtcctgtagagaaagagacaacaaaagaaaaatcttgttcctaagttcactg

SEQ ID NO: 59336 - DNA, 3168 bp, Homo sapiens
aatgctttttccacttataattaaaattgtttcaagaagactactctgattaattggcctggtggtatgtgtgatgcatgtctcgtactttaggcagaacaggatgcagagaaggtggaaaggagatagaatgatgaccgtattgagtaactgggccatgacagtgagtgtagtctgctttgctaaatgtgagtttctgtaatttagcttgtaggtgactggtaaataggggcagagtgtcaccatcatgtgaaagttgtgctgattcatagcaatttctgccctacacgttaatgctggccaagcttgtctatccactctcttctgtgtgctcccttctccgttggaagtggtgattgctcggtgctctcaatctgggagcattttgcccttgtcttcatatctcagcagggtcaactctcaagctgttaagccccttccaggaagccacccacaccttttaaaaaaacttgtagtaaatatacagaacaaaacgtaccatcttaaccatgtttaagtctattaagtacatttatattgctgtgcaaccaacaccaccatccatctccagagctgaaactgaaaccctgtacccattaaacattaactccccgttccctccacacccctagcccctggcagacaccattctactttccttttctgagcttgaccgctctagatacctcatatcagtggaatcgtacgggattggtctttttgtgattggttcatttcatttagcgtaaggtcctcaaggttcatccatgttgtagcatgtgtctgaatctccttccttttaaggctaatattctattgtatgtatacaccacatttttttaatccattcatccaccactggacacctgggttgtttctgtcttttggcttttgtgaataatgctgccatgactatgttgcgtacaaatatctgttaaagatcctgctttcagttcttttccgcatacacccaggggtaaaattgttgaatcatatcatttcccatatttttaaaagacattcctgcacagcatttgcagttgtagttccttgctaggaatctaatgtgccttttcaactgcctatgtcttttgattacgatcgttactattgttagggctctggtgatgaagtcctcagggttcaaggggtctcagtcctactttcatgagccccgttgtcttttgtgcacaatttcacagaacacaaggcttttttgtttttttatttttttttcctgaaatgcatacatcccatcagagcagaaatggccatagggttggaataaataggctggggtataaccctgtgctgtattacctaattacctcagaaaaatgaaaccatctcagttttctgctccttaacactgcctcccagggtacctgcaggagtttctgacctgaagcatcaaacacaagcccttggtgtacacataaccagtgtgatacgttaggagtttaatatggttgaccagaggcttttagtcagagggagaacttggttgaagagttgagaatctctgcaaggaactggctcagtctttttcttatgcctacaactgttggcattgtacacaaggcttaatggaccaaacacatcagacaagtaaaacacctaaacaggagcattctgtcctagcaatgagtgtgtgtccagagagatctggaaagcttgaggaaggcagggaggggtagaacaagggaagtaaggacacaggagctgctgttcattctggtagagcggcttgtttattattcatggtttccatgagtgtttgtttataccaggaaatgctctcctatgcatgccacatgagagcagggctctgtgactcagggttggtgactgggcttggaggaatgtaggctccgtccacaaacaaaggagaatgaggatttgaatgtcacggtaaacttatttgtgactaaggaggtagtgggcaaaaggggggcaggaagaagccatggggcagatgaaagaggcgtcctgtctgccccctgcctgttgccatcacactgggtcgttttccacattgctgatcactgcagtgtgttccagtgatgggctttatctcattagtgagtcctgaaatgaatttagcaaatttccaccagaattaaatacaacaacccaagagagaagagagaacaccgaacacaccccatgaagtaaaggttggcatcgtttgtcattctctttatgttctcatatgtgagatcgtgggggtgaaatacgcatctcactgtgggctgtggtcggaagtttgaaaaacaccctggcattttgcctgtcttctgttcctggaccttccctttctgttggtgagaattttgtgtccaaatctggccaagggtggactctgaagagacaatccctggttgactctagtgttcattagaggagttctgctgccactttttcaggaatcagagatgccctgaggccacctaacactcctagatcttctgtcactgtggtgtagtgcagcgtcctgaatttggagctaaaagcttggatttgaatcactggaaatggctgatgggggcgggaaagctcccacccatgtggggaagaacccagagggagagcggcttgtacaaaggccctgcggggcggatagagctggagagctgcgggtcaggttgtcacaggccttgcatgacatgcaaagaaacttgaactcggttgtgtgggtgctgaggcctgacaggagttgggggtgtttcagaaagagctcttgggcagcaggaggtggttggggaggaacacagagatgggaaggcctgcatccaggggctgtcggggagggagagagctgctgtgccacagggtggctgtggggagggaagggagagtgtggggcatgggagagtcgggggactgtcccacagaaagctggtatctgcctgactggtggccaggtgtgcagcctggaggagacggagctgggcaatgctgagattcttaggtggactgatgggggacagtcacattagaacatggtgggccagaccctctgtcctgagacacattggctctacagtgcccgtctcccgtgctctcctcccacagcctccacttctccaaacaccctgggtttctccctgcccagcaccagtgcacccaccgcatgtcctcagtgctctcaagtggcatcactgctgc

SEQ ID NO: 59337 - DNA, 2485 bp, Homo sapiens
tccattagctgcctatcagggaacatggagcactggggcacagatcccagcacagaagggtttgcttctcttctgtggttttcatgtcaattaatgattaggccttgagcctcacaagaaaggtgataggcctttgagtcggtttactgcaacagtctactcaagacttgccccaggccctgggaaacatgtaggtttaaaaatccctaccctgcgttttcctttcacagggagtgaacttctggcccaggcagtgggcagtggggcacggttgccccggagatgagactcctcttcccgccctggggggtgggggctggctggtggctgagggaactatttttgtttgtttctttttttaaaaaacggagtctggctgtgtcctccaggttggagtgcagtggcgcgatctcggcacactgcaacctccgcctctcgggttcaagtgattctcctgccttagcctcctgagtagctgggatcacaggcgcctgtcaccacgcccggttaatttttatttttattagagacggggtttcaccatgttggccaagctgctctcaaattcctgacctcaggtgatccgcccacctcggcctccaaaagtgctaggattacaggcaagagccactgcgcctggccggggaactgtttttgatgggtggggtccccggctgtggttggtagtgtgggggcgtggccgagggtgtggcctgagggagtgagctaaccgggggcgtggcctgatatggggcggggggaagagccgggctgggggcgtggcctggtggggagcggggctggggcgtggcttggctgagtgtgctgccgcggcgcgggaggagagtgtgcgttgcgctttctcccgcgatcgccctgccggtcgctagctccgagggcgcgcactggatcccaggctcctccgagagtgcggcgacctcggggctccgccggcaccggaggtggctctgagggcagggacgtgttggacacgctgactttgtaggctccgccaagaggcgccgcaggaggtaagacggcttcgggcgcgcggctctgccgggcgggcgcgggcatgggctgttaggtagaatatcgggaggatttgagtcccagtggactgcctcggggcttcgggatgtccagctcccagctgcttggcctctgcttcccccgccggtggaggctaccgggtgctcacctgttaggtccgtgcgcccgctccctgcccggcggtggctctgcgccctctgggccacccggcaccatcgcttttgggaggacatgcacgtggtgttctcgcaaaaggccgtttccagccggaagcctgcagggaggtcgccttgtaacttcacccgcgctcccagctcgcggggcctggcctacaggggcggccgtgggggtggcagagtctggggagcctggcgcggcggagccctgtaacgctctgctccatcgggtggcgtggctggtgcctccggggacccggagcgatgcggttggagagcttagtttagaaagcaagtttctcttggtaccagcggagtctcgtcccaggggaaagattttgggacccggtgcccatcgtctgtggactgcagggaatgcattggcggagttggtttggtcccattctgtgcaggaggtgggggaattggtactccagccccaggcaggtagaagcccgcgctgctgccagcgtcagggggagctcgggtgacttgggctgggccacccatctgactgcaaggttacagagcttgagcaaatttcccctccctccaagtgcaggaaaaccaaaccaaagcaagcaaacaaaaccctgtgggtcatttgcttcccagcattgcatagggatgtggataaatagaataatactgtgaatttattcagctcttgttcccatggcttcccatagccttatattatgcacctccccctgccagcattttctctgtccccaccttcggtttttgctgcctcgtgttttcttctctgtgaacctttcctggtcacccagcgatttgctctcctttattccccttgctaacaggcggagaaatctcactccttttctttttccacctttcccaacaaattctccttttttcctaatgtccccctcccccgtcttgcaaacttcctcactgcattattctcggggtgcctgtcatgcaccctccctgttctctgccctcctcccgcactttagagtttcatgtggctttgtcttattatcccatatcctaattctcatctacctcccttggcccccacgtttgccatctgcctccacccagttctcccatctccttccttatttgtgctcccgtgcatatgcaggtttcttccttgtttccccatgtttctcccacaggtgctttcttccctttgccctacttctccctggcaggcgctctgcccagccacagcctgccccgcctggagggcacaccttgcctcagtgccttctgctgcggttttc

SEQ ID NO: 59338 - DNA, 1639 bp, Homo sapiens
ggtaaggtggttgaattaatgacatacatgaaaaatatgtgaattcatgtctcgagtttatgatttgctctctttctgtgaaaaagatagattatgtttttggttttgttttgccctgccagcttccaagtaaccacttactgttaaattggccccagtacacttcagtgtttgttgcaaatggaaagaattgattcactatatttttttctgctgctgaatcactaagcaaaactctaccgctggggaaacttttgtatcgcagcacacaagcagcccagtatgatggtaaagaccaacctccattgtgtggtcttaccattgtcactcgcgttacccacggactgaatagggtttagaaatacaggccttcaaaggaattgccgttgcttaaatgttccatggctgcttctgaaataacatccctccagccctcattcaaaacaagaaagaaggaagggcatatattaatatctgcaacttcagtgatattcaaaagtattatatatttaaataaggaaagttaaaatccattttaattttaaaaatttgaagttaaataattcaaaatatactaaaaaataaaaagcccacacagtattctttaaatggtatgttttaccatctaccagacctgctttctacctttgacttttcttttttgttgttttcttttcttcttttttagattttctatcagattcaatacattttacttttctaaaacaaatctaaaatccccagagtggcctgctaggctcggcttactaaagagcctgcttgtgttgccaagttaggattagcctggcattgggatctctgcgtgtccttgggccacgctgtcagaactttggtttcctgcccttcctagaaaaggcttgggctctttactcggtggttgcctgaattccagctcttggctgtggcctgtggttggaatgtgatggaacacgaatggtgtgcttgttataccaggctgatgtggagtgaggtgctaaccctggaaagctccccttgagttgagtcttagactcctggcctcactgtagattaaacagtgggattctgggtaagcaaaagtggcagcttcttccgaccattttattttttcatgacaagtcgtaaggcgtgagtagactggtttcaaaatcagtctgggttctatttgttgtatttctgactgctgtcctcactgaccggcattgagataaacagctcgaaagcagacaccttctccagactctgccctggaaatgagttgggacctgcagcctgtcctataacttcccttcccgaggtcatgtggctccgggagcatcaagatgggggtctggcacaggtgcccagtgtcgcttctcagcgggaactcaattctttcctcctcttctagtctctctcctctcactcaagctctctgcagaatgggaggtgagggaagaaggtaacctcctgcagacctttcttctcagtctagagtcttctgcttccagaggtttcaggtggctcagtgagtccccactctcctctcctgcctggctgctctgcctgcagactccactcggcattaggaaaaatactcagggcatgagcacttctgtgccatgaacacctgccttctgatacggagattgtcttggag

SEQ ID NO: 59339 - DNA, 3957 bp, Homo sapiens
cagtgttgtaacactaaactttgaggcatgtatgactgtgtttgtcttttttgttttgctataaaggaatacctgagcctgggtcatttataaagaaaagaggttaaattggctcacggttctgcaggctgtacaggaaacatagtgccagtatctgcctccagtgaggcctcaggaagcttccagtcacagtgggaggtgaaggggaagtaggtgtgtcacatgatgagagaggaagtgagagagagacagagagagagagagagcgcaggaaagaggatgggccctttaaacagccagctcgaagtgaacttacagagtgagaacacacccattaccctggtgagggcaccaggccagtcctgaaggagccatccccatgacccaaacacctcccccaggccccgcttcaacactggggatcacatttcaatgtgagatttggagaggacaaacatctagaccatatcaatggctgtcttttttgaagacatttcctttaattttttaaaactgtcatttctagtaattttgttctgctggggttaaatatatttggctgtgcagattttatcagtgttagaaaaactcagcatgttgcgccacatcagtcgggccaggtaaacaaagctagtccattacaccaaacccaaagaaggcaaaggcagctcaccgagggctcacagcagggccttggtgcccagggtggcttagtgcattcaggggcaccattgtttttatcagtacacttggaatcagggcttctgaggatatctgcttacatatattcctcattcacataacttgccagaaaagatatagagagattgctgcatacctggatgacttcaaggtagtaaagctataacttttgaggggttataatttccaacacactctctcactgagtctaaactttttcatctaattttcttttgtttgcatgttgaggtgcatttggcagagggctgaatttttcacatataaaaacatatatgaaacatttttcaatacaagtcaaatataataaacacacattttcttgaggatagacatcatcctttatcacttccctctgtaaaaccaccatcaaacccaaccaagactgaatgacagaactagaaacatttaacaacggcatcatcatgccttaagcttagtacacaaaatagcgttgtgtttaagggttgaaacgctttctatgttgtaagttttccaagaggtacaagtcaaggctttcactactttatacaagcttgtccagcccacggctcacgggccacatgcagcccaagatggctttgaatggggcccaacacaaattcgtaaactttctcaaaacattatgagatttctttacattttttttttttttttagctcagcagctatcattagtgttagtgtattttatgcgtggcccaagacaattcttcttcttccagagtggcccagggaagccaaaagattggacacccctgctttataatgttctctatgggctaatggtggccgtacctgtcagcactcctggggtgagaagggggcggggtgagcaggactcttctctgtgctgggagtagaggcttagaggcactcactctcatcctggttttgctccatgtgacttttaaaataatcacgggcgcttcctcagacacagcgtcacatggtgttttccatgtattgggtcacttcccacacacagcacattgagcagacattactcccccctctacccaggagaaaactgaaacacacaggaagtggcgcgctcaaggtcacccagaaaagccagctgccttcacaggacagtcttgagaagtgtggaggagagcgccaagggacagtaacagagctatgagggcttccttacctgtggcatctgttgacgactgtgtctgaataagttttgagtgaatgggtacctggtgctggcgcttgctgagaatgacttattttggaaggtcagtgttaaaatcatttggatgtggaaattccatacagaaaattctctgggaaaaatgtttggttttgccctgaacccaaggagccagattactttccttattgtacccaataattacttacttattgtacccaaaactgctgagctcaacagaacctgcacctgctgtgcgggtcccagctgggccaagcagccaccagcccagaaccatttggtcaccagcagataccctcatttggatggaaagtgaagagaaaagcgtacaatggagccaaccaaatcacaaagattatcacttttttggtggtagtgttgccagttttgatttttctagagtgtctgtttaacttgttgattttttttctctctgatgtgtaattgttgttatccattaacttaatgctgggcaacagcatgaactcactaatcacagtgaggagttttgttttctgtgcaggacaaagttcaacgctctgctaatttcatgatctcagttgtgaaggtccaagtgactggacctaatataaaatcgtgtccaccatggtatgacctctctggtgacattatgaagacttgaaaaggcaggatgggtccagattttttttttaataaaatacttctttagttattttgatgaaaggcagtgtaaaaggaaaatccattgttttcctgttgttctgagttgagtcaagcgacggagtctacggaaaatgaccacttctttactcttccagagtcctagcagccgtatgggtcattcctcaggaaagtgcgggtgcctttgaaagtgggcactggggccgtctttgaaaggcacgtgtatcgagcattgtgttttgcttctccaggggacctgctctgtcactgcatttgttgccagttcgggcatttcccccgctttctgtagctccttgtgtgccacctttcctaatcataagccctgaagttcccctgtgacgtatttttgtgctgctgagtagatgctagtttgttacaaaagaccatacaataaatgcttttgtgtgtaatagtgcccatcacacatgataggcactcagtgaagttttactgcttgctttataaagaaattttttccacaagggattttatttcttagtgaagtactgccatgaggatgatttttagggccctataatttagattttcctgattcaagactgtaatttattcttaagctatctggagatccacttaatgagaaataaaccttttaagagggctgaaagaaccaagattttaaatggccaaattaaggcttttatatcacctctggaaataactactcgtttaattttaaatccattaatagccttctgtaattttgacataatgactattgataagtcctttatatggtctcatttcagaaatcttaaggaaataattggtgttaacgtaataggcatcgtgttttaaacatcatatgaaacatcataattgaaggtttctcaattcctggatttaacttagaacacatacaaatagatgcagtttttttttttcatgagccctgtgttagtcagggttctccagagaaagaactaaaagaatgtgtgtgtgtgcgcacacacatacatcaagagacagagagagagagagagattaaggaattggctcatgtgattgtgaagcctggcaagttcaaaataagcagggtaggtcagtaggctggagtgtctggcaggcgttgatgttttaggcttgaatcttatggcaatcttaaggccaaatttctttcttttctggagacttcagtcttttaaggccttcaactgattagaggaggcccatccacatcatctgcctcactcaaaatctactgatttaactgtcaatcacatctagaaaagatcttcacagcaacatccagactggtgtttggccaaataactgggcatcacagtcctagccacgctgacacataagatgaaccatcacaactaccagtgaggaaacgggaatgttacg

SEQ ID NO: 59340 - DNA, 515 bp, Homo sapiens
cctgttaattagatgcaaagtggttccaattccaagttgcaccactgtggaataaaatacagaatatagattgtgcctgaggaatattgaagtgaaacagtgtaattcataatccccagtgctcctagcactccagtgagtgaatataggtggagtctgagttctccaagagtgattttcccttcccatgtggatgacagctcacattggcttttctccagtggatcggttagtcatgcagatcaagaagactggtggggactttccagactgatctttagttgcagataggtgtcaccttcttgtccagagggttcccagacattctcagttcatgcaccctggtttctcattaagacttttagggagcccataggccaaaagaaatccctgacagttccatttattaagtagttttaatcagctggctggaaagggatattgctaagtgtggagagaaacaaggagaaagttcagaaaagtttcagcttcttcagaaattaccgcacttggtt

SEQ ID NO: 59341 - DNA, 1094 bp, Homo sapiens
agaccctgtttaagaaaaaaaaaaaaaaaaaggtcgagggaaacaaaccacaggtacctcatttaaatggaggacatcagtgttcctttctaagctatgttcactcagatgatgacagtcgtaggtagctttgcctgcgttccttgcttcatgtggtcctgaagtgcttatgtaaccaccccaggggcaactgaggcattggttattgccaaaccacctgactctgttgcatcaggatacttggcctaagaagaactattgggacttagagagttgattccatatcgttaaagttctgacattctaatcggaaaagaaatgaaccagcagactttgacaggttttgtggggaggagaggagagggaaagggtgaagccagcattgatttttaaattaagtttaaacacagttaagtgggtcacactgaaacacatgcctgcgcagtcactttgccagatattgaaaaaaagaaaggctggctttgtttggtggataggcaggctcagcctcctgaatcttgcttacttcataggtaagggctcttgctgagccacttgtgttattgacccctgaagttgctgccgttgggagaaaccacagtaaacaacagtcaaacaaaaccagctcaccatgtggtagatgtaccatgaggataggcatgtggccggtggtttagaggagctgaccttggagcgggtctgaccttaggtgcaatagcacatcgcagcagaggaagttacagtgatgacacctgtgtgctgccctgcttgggtcggcccgtctccacagcaccaaggacagactcctgcacggagaagttggaggaggaagatggtcaggaggctgaagtgactgcttgtattaaggaacattgtgggggtgagagggtgatgagagcagctcagagatgatgatcatagggaggagagtcacaggatgccagagacacagtacccacttcggaacactgcaaagggtctttttttgtttgtttttgttttgagatggagtctggctctgaaacccaggctggagtgcagtggcataatcttggctcactgtaacctccacctcctgggttcaagcaattctt

SEQ ID NO: 59342 - DNA, 760 bp, Homo sapiens
tggaaacacattttatgcaaagacaaaaaaattgaacactaaaataaatgcagcaaaaataaaatgcaacacacatatatgctcttacacacagttattaagtatgtctaattaagctgtggatgtaaaagctacatcattccctttaggggtattctgtgctgactgcactgttgggtgacttagcctgtgaactcagtgaacacagctccagatttgggccagtctgcctctgccaagcagagacattgtttttgctccagtgaccatcacagtgccttcaggattagggccatccatctggaaaattttcattgccctgaatggtaaatgtgggggaggtgcagtcttgtggtgacatcagttttggcatgggttgcaggcatgaggtagtcctaaccgggaacttcattgttactgctgcaatcttgtttaccaccagaaaggtggtggacaggccatggctgtaggaagtcaagacgcagggcagtcttcagggctgagggctgtgactggcaacagctcccctggagccttccaaggttgctgtgagattggaggaagaggagctcagaggctgtcactgtgcagaggttggggacgcaggcagggaggggcattatggaggatgccagcatctttcgcacaagctcagacctacctgccctttcatctctcactacaccagcctgacctgcaactttagacacagaaggaagattttcctttgtggtctaagacctgcctttgcaaatccttg

SEQ ID NO: 59343 - DNA, 1271 bp, Homo sapiens
tggggtatcagacctgagatgtgcaaagccagcagccccttcagccagtcattcaacagacacatgctgagaacacagtgaaataagacaaggcttctgcctatagagaactttccatgctcctcagagaggttagtggagaaggcagacaaggaaagcagaatgaccgggcagtgtgggaaacattagagaactgtttctaggtatttcaaacagagaatctaatacaggggttatttttatacagctgagaaacagaagacagtgcaatagcaggaagttgctaccagcccctgggctggagtggtaaacaagagggcgtgttgcttgagctgggagttggtgctgcccacaggacctcggacctgggagggaggagcttcccagcagggctggagccacagagacaccacagctgctgcacgtgcccacaaaatactgtggcaactcccttcccccaaccctcaagtcacctcccaccaccactgcccactgccaaacctggacagaagccatttgtcaggaatctgggaattgtggttcccaaaacagagagataacaatggctggagaaagagcctgagagcagacaaaactcgcaaaggcatggtggtgtgaggatcatgacaaatagctcagccctgctggagggaaaggcgtcctgtattaggcacaggacattcaacatctcctcaaagtccacaggcagccagtgaccctggttcagtgacacacccatctgcagtgtggaatggactctggcagcagagtgaaggatgggtgggcagtgagccagaccatggtcatccaggtggaaggtaatgcaggctgggaatgaggcaccagccaccatgccgacaaagggctggtgggcatgcagtagagtcgcttagacctggtgtaatctgtagggaaggaagagggtctagcatgacccccaggttctggccaggaggtagcagtgctggggtggaccctctgatttccaccctgctgggctgtcactacagcaatggtagtaagctactcagcctcactgggccctagcatcctcactggcatgaataggggtcacatgttccctagggcaacattctgtgcagctgtgatttaagggtctgcactcactccttcagcattttggatttcaatatgttttctttcagtgtcactttgttatcatgtaaatcaagcttctctaaccagtgggccgcaggctgcatgtggcccagggaagctttgaatgtggcccaacacaaattcgtaaactt

SEQ ID NO: 59344 - DNA, 522 bp, Homo sapiens
gtatattacaaaaaccttcctgcttttttgtacatttaatctgttctatattcctgaatttcaaatttaagtttttatttaaaaattactggtcagaagcttttttgtttgtttgtttcatttttttgtttgtttgtttttggtgcaaattctcattatcaccaaaaaaaaaaaaaaaaaagtttcattctaaagttcatacaccctagaatccagcttgtagacagtggatttcacaatattcctatctgaaattctttcttagttctgttctcttcctatctctggcagagttcccacaatttataagacttgctacaaaaccactaattgaattgcaacccttggttagttaattgaggtcaaattattagttctaaataatgcaacttggtatgttactcagaaattccaggaaaaggctttttttccataattttcagtttcattcttagcagcacacaacaatcacgttgttcagctcaggaacaaaatactaagtcactggtcgtttaaaaagca

SEQ ID NO: 59345 - DNA, 2551 bp, Homo sapiens
ggataactgatacgacttcacatcgaagttaaatctaagtgtgcaaagcacagcattcttaccctcagagagtgcacagtcttgtttgaaggcagccatataaagctatcattataatccattttggtaaaaacaatttgatgagatgcctgaaggcctgtggaagcacagagtaagggatttcattcattgcagggggctcaggaaggaattcctggggaaggagacacctgcagttcgtctcaaagaatgatgaggtattagattaaggatgtgtaggcttttctaaacccactttcaccttaattttactaatttatcgcactgagctttccttccaatgatactgttctacttactgtagagtgatcagttaccccatttgcaaggaactttgctggtttcaaccctgaaagtcccatatcctgagatacccttcattcctgggtcagtcagacacctggtcccccaaatgtactgcctcccagttgtactgtgtgtcgttgactgttgctttgctcttgccagtttcttatctagaatgagcgattaccttatcattgccttgaattcctcatgggacccgcacagacgcttgtacccagtagatgctcatgaagtgggtatatgcataaatgttggtacctcttcctctgtagacagcactgaaatacagatcactgaaatgactgactcaagagccatatgacagcaccaaggttaggccgattcccatgtcttgggcccttgtttccttcttggttataaaaggtcttatagtgccctctggtggtgtcaggaagctgtctaatcccctgaattacaaggcagaaatcatgccttctcttctgtattcagtgcgagtcataagaagaccattactactaatgtcagtgcctgtgaactggacttgaccttttgattaaacaatctcattcatttcatgattctgagatgctgaaacaatgaaattccctatcccttctagagcacatgaggttggataggtgatatcaaatgttgaacttactttgcaactggttacaggcttcatatccagtctcatcgcagagatgattcaagcctctgcttatgtggctcatccaaatgtaacccccagctcctctggccccctaattcctccattagaacattaaactgcagagggcgtgtggtagcccatcagtcttctgatgaatggaattggctgatggtctaagtcatcgtagcctcccttgtcccgggtggaatcaactctttgaccctttacctatggctgtctgtgggaatcccttctcactggaaatgatgtaggggcaaataaaaatagaacccatcaagaacatggggcgtaggagcagaagagagatgtttctgtttgcatggggtcagattctgcacttgatagggatacgctaaattgggatctgatctcaagatctttaaaaaatgtcctcctcttgttcctctcttgcctttggcctctgtggccttggaggtaatggcattgactgatgtctaaagatttttgggatttatttacagtcagggtcgtgaggcccaggaattggagtcagatgcctggggtacagatgcccattgtgcttctctgttcattagtttactgcagtggagaagagtgtgggctttgtggggacagctgcaggactcccaggcaaatgacctaacctgcctgagtatccatctggttgtctgaaaaatgcaagtcattctgtgacctcttaggtttctgtgtgtactcagtgacgttatgttttccaagaccttagggcagaggcctgacatatagtaagtacttaaaagttggtagtcttttatggttattatcataatctatcattcattcatccagtaactatttattgagaacggggggctgagacatgtaggctatcacttgaaggctaagcaggtcttggcctgatgggaaaggttaagggggagcaggattttcatttttcaggggagggccatggacccaggtgtggggttgaagggtttggacacagatgtgcatgatggggaaagcatggacaagatctgaggggaagggatggacacaggtgtgtggggaaggcatggacacaggtgtgtgggaaagtatgtatacaggtgtgtgcagtaaagatatggatacaggtattgggggaaggtgtggaagtggatgtgtgggatgggcatgggtgcagtagtgtgtggttgtcagggcacgtgggaagaggaaaaagatgccgaatttgtttaatttgaattcttacctctgaattttttttttttttttttttgagacggagtctcactcactctgtcgcccagtttggagtgcagtggcgcaatcttggctcactgcaacttctgtctcccaggttcaagcgattctcctgcttcagcctcccgagtagctaggattataggtgcacatcaccacgcctggctaatttttgaatttttagtagagatgaggtttcatgatattggccaggctggtctcgaacgtctgacctcaggtgatccacgtgcctcggactcc

SEQ ID NO: 59346 - DNA, 1006 bp, Homo sapiens
tatgcctttacatgtataccttttgaacaaaatcactcttttaaagtgatttcataaatttatagctaacttaatgtaatctcataactcaaatttttgtcataccacagtgtgaaatcctaactgtatttttgaactaagtgacccctgtgcttttctcttgtgaaataaataccttttgaaaagctctctgaaagtttaactcaggttttggttttgtagttaaaagcagcacacaccatttctcctaccttcactgaaggctctcggcagcacctgatggcttgtgagtgtgtttgtctttggtgtatataggttttgccttagtttagaattctctcctgaagtcccccgcaatgtcactgtagccactaacccttggtcacacggagtgtggagccagctgtcagtttctgggcaggctctggccgggaacgcatacaacgtcaaagcagtgaataagcgatttctgcagttcccgtagctgccagcctgtgcagtcctctgtgatgcttggggaccggctcctcggtcacaccccagtcctgctctgaaggttgccgttttccaaacagaaggatggtagctagaggggagatagcaagattctggagtctggaaagccttcacttgggtatgtgtgcaaagaatggattgttgtactgtgacatgttgccgattcagctctttccttcccaagttgcagttcttcccctctctctctctctctccactctctctcactctctctctctctctctcactctctctctctctctcactctctctctttctctgctgcttgtcaggtgtgagcctgtggggaaaagctcactcttctagtaaagggtgctgaggatagttttagttgtggacatagtcagttgaagaaattggttttgtttatggcacagttgcttgtttggagtagaaaatcataagaatcaagcctgaaccatccttcctgaggaaggggtctgggttttgctgctgatattgttactag

SEQ ID NO: 59347 - DNA, 587 bp, Homo sapiens
aagtcaactaggtgaaactactagcagacccagctttcccataataacctaatctgcaaattgttctattaaagtctcattgttttcaggatgcaatgaaagtggatttcaaaaggctttggaaaaataagtggaacatgactgatcttgaaaaaaaaagcaaaagcttaaatatttgatacaagtttacttagctacaacatactttacattgttgcctttagttatctcacaggcactgacattttatatttagaaaatacttttaatctttctaatctttttttgtaaatattagtgtccattctgtatgactcgctaacctactttgcaaggctttgggcaacattttagctcattaacttcaagatgatgtgtcatctgtataggtcaaagaatgggacttctgaactgaggaatttgctgttgacagccaaagtatagtgtacaagattgatgtaacttgatatgtatttttgttgaagttttttgtaaaaaaaaattatttacaatgttatttgaatgatttttttaaatgctgtgaatctatatttgttgttttgtatattaaaattcatttgccaaac

SEQ ID NO: 59348 - DNA, 2121 bp, Homo sapiens
tacatatgagatgtggcggacactgggctaggggctggttattctctaaggcaaatctgcacagtcactccagcctgtcccccttcccagcttcttccccaaataacattcacagagtgtcttccacccaaagacagcagggaacagccccgattcctaagaaaccctcagcgcgcctcctcacaaactcttggctgctccataaaccattggtgtaggtggaatcaagtggcttcctgcttcacaggtcttcgtctttaccactggcatttcctcctctcggaaaaccctgaggagtccctttctgggcagtcttgattctacagcctccgccttccgaagtgtgtgagtcagcacacgctaagatcacttttgatatacagtgggcattcaataaaagcttgcttactaaaaactctcacgtatccattaaagcccaggattacagaaaagccttctgacactatttgcattttggactcaaatggcatcagtaatgcacctccctaatgggtttattaaacccttaaacaacaaaggtactacttttatttcactcctacatgatatacagtagctctacgcacacaaacaagacctaatgtttacttaataaatgataaagtcagatgtaatgagtctgcaacacgcacatctcagagcgaacttcccctttatcatagcactatgcttggatattgtcatataattgttgtcatccagcagtccagaattgaaagtgcttgggcttgaatatttagcagcgccttagttttctagaacctgtgatctaccaactcgatccctgggtgaaccattcggccctcctagcaggaattacttaactgagttagaggttttcaactttggacctcaacaaacacattgtttctatcacggtgttcccaatgactcacgaggtcagatagtacttcctgattactcaccaaaccaccttactttttgcacaattcgaaacctaactttaggaaagaaggccgtttggcatactggaaacaagaaacaacgcgtgctactgcgaaccgcaccgcacggggtgcggagacttggtgtgactgtcggctccggtgggcgccccccaccgcacccggtttctcgtcaccagggctgcgccgcggggcagagcggaacgaccgcaatatccctccccgagggcgctggctgcactagctagtccactcccgagcctagcagcgccgtcaggcccacagcgccaacgccgcgcagggcaagggtgcagccactggcgggaaagtagtacgcgggccacttcctggctaggactacagggacctttgcagccccccaccccgcagcgcccacgcacctgcctagaggatccagctagctccggacgctccccgattccgcgctccttgctcgcggtacttccgtaatctaggctctccctgcccccggggctgggcgggcgccactgcgccggaaccccgccccgcaccaggcgggcgcagcgtcccaagcagggacgatagccggaacgcgcccggaatcgggtccgccaggtggggagcgggtccccggcctctggcggggtttctcttccaagatcagccggagggttcagggctttcagtttcatatttcaggagggattttgtcaatgaggattaatacaaagctcggctttgagagaggtgggtggatggtgctgtcctttaactgagaaatggaagggattcacaaggccgggaaagaagaaaatttcgggaaagttcgtggaaacaggagagtgagataataaatttactttaagccttcctgcgtttgaaattcgtgacagtgtaactagttggaaatatatttatctgccattcaagagaggcagggggctggagatacagatctgagattcactgaaatgggaataaagcaatggggaagattcagatttttaggatactgaataaaatgagaatagaaaggatagagtagagaatacagtggaaagggtatggggttgaatcctgactccacaatttattaccaagggggctggggacaaggtaatttaccaagtttcatcattacaacctactctatagggttgtctaagaaacaacaagagattctgggggagga

SEQ ID NO: 59349 - DNA, 1609 bp, Homo sapiens
cagccagcaacgctacttcaccaccctgctccagcggactgcggctgccgcgctgcccacaggaactcaagttccgccacagccaggtcagagagacagacaccccagagaggccggcttccccagctctgcgaagaacaaagcagcgcgaatgaacgaagccactgaactgccgtgggcctcagcgcgcccgtgggcctgagcgcgtcccggcgccccgctccctcctcgccccgccgagccaaccccgaggtccgagcagagtcctgcccgcccaccgccgtccatctccggcgcagggcggcggacaaagagctcctccgctcttttcgcccacaaattaccgctccgtgaagcctgggcagctcagcagcacgaaccgacacctcaatctccgcagcatttacaaatgggccgccacaatcgccgcctctgtcggagccccgcccccgtcccgaggtcctgtgggaagtgaggatctcacccgcgcgtctgcgctaaagcgcaggcaccgctgagcccagtgaaactacaactcccagtgacgccacagcgacgggcgttgcccggcgggggatggactgcgcgccgccttccgaccagcagcgggccagtggtcgacgtaggcgggcggcgtggcggggcggaaaaccgtttccgggagagaccttccgtggtggacgtcgccccaggctcccacacttagaaaactaaagggaacgcctaacggagcgatggatctccgtgttcccagcaaagcagggagcacggagagtcaaagctaacatagagcccaaccgacgcttaaaggaggtgttttgggttttgttttttttttttctatttgcgtacggtctattttgtcgtttttttggtttggtttggtttttttctttgttttccgctttggctgaggtgacttagtaaaggagaaaaagggcagtccgctacaccatttcgtaagacgaaaataaccctatgagaattcactccaaaaataggcatctttcatctctcctcaaatggctaatcggtggtttggcagagtgtgtccattagattctgaaactagtttgaatactgacagtgcagaattcaagaaatttttttgttttgtttcgttttaactgccacggccctttaatctaggaagttacagcaccgtgagttaccacagtactacatacctggcttccatgtctgattaaacagcaggccaagtaaaatgtttaaagaaatcaaatgaagtgccatttataaccgttataactgaaacaaacgactgctaaagacaaaactatttcacagaaatttggtcctccaaaatttgttttgctttctacttcaaaaagagtctacttctctaaatcaagatttcggttttgcttcttttttcaatttttcttttctttttttaatttttattttttgagatggagtctcgctctgttgcccaggctggagtacaatggcgcgatctccgctcactgcaagctctgcctgccgggttcacgccattctcctgcctcagcctcccgagtagctgggattacaggcgcccgccaccacgcctggctaatttttttatttttatttttagtagagaagg

SEQ ID NO: 59350 - DNA, 705 bp, Homo sapiens
aggcaggaggatcacttcagcccaggagttgaaggttatgatcacaccacgagactacagccagggcaacagagtgaaaccgccaactcttaaaaagaaaaaaagtgggggaggacatcagggctagcctggccaaggaatgattcctatagatcagtcagagtggtgggagaaactatagggaaaggagcagaccttctgaaaagtcggaagcctctgcatagcctccagggagaataagctgaaggcagctgttttctgaccctgaggcagagggcaaggagtaggtaccaggaagcataggggaatttatcgtaaataggcttgtttacttacattgaccaggagctgacctttgatcatccacatgcgtgacccgttccctgaaaggggaacaataatgttaattacccacagattgtttttgctccaggctttcagcattatgtctatactgaataaaagcaagcagctccagctgtttgcctgctcactctttggccgctagtgccaagcagtcccctagctgctcttacactgcatatctgcgtctgagtactcgtttcatccatcgtccagccagggtctgtgggacagacccagcaactggtgccctgtgtgaggaatgctgcaacagatcacgatggaacccccaaaaatgaggtgaagagactgtgcgggaagtaagtaattggtgcccactca

SEQ ID NO: 59351 - DNA, 1306 bp, Homo sapiens
aatgaaggtcttccacacacaaaaattaagcatggagtgcaataaggtcaatcgaataaagctgcatccgaccttttaaaatatggaataacatttttcccttctccagaactcttgactactgacacaggacaatgcctgaagtatgaagcacagacacggaaacaccggatgcgaaagactggagaccgagacagcaaagggaggtggagcggagtgctgatctcggttcctccaaaactcgtactgtgaatctgtgacacgggacaatgaaatgtgagcaaggacaagcttacacagcatcataatgttaatttgaagacggttttccggttgatgaggcaacgaaaggctgaaagactccaaagttaaaggagccccaattttgcccgagaaaacgtagagctaggagggcggtgaccagttttcccagacttatctctacgcactccaagatgctgaaagtgggacccctgctcctgtaggtacaggaggcctctgcaccccgcttggcccaagctaaccctgccctcccagaccaggcctggccagaccctcccgccccgggccgggtctccgccgggccggctcccagccccagtcaggccagcagagccttcgtctcctcctgcctcagccgggtcagagcagggcccctgaagactggcgatcccgcgcccgactaccttggtcgtccggatatgctccatcgcaaggagacgtcagccggcagccggtctcacaggcgtaccatacggctacagaaacagggcggtgacagcgacagagagcaagcgggaactccctccaccagccagcgccgcgggtctgtctgccggccccggtggcgtcaacggcgcaggtgcagccggtgagcgccgtctcctagaaacacttccccaaaccccgcggcctcccgggggactcggggcaggcagacagagcgtgtgtggaccgagagcggcttgctggttcgtcccggacagcggcggatcccacagcgccccctgctggaggaggccggtactgctcaccaccccacccgaggcggtctttgtcatcccgccgagcggacgcgcggggcggtcggggaggaagactgcgtgagaatggatcccgagtaaagggttcttgtggggtgagggcaagagtggaggatgttctgaagtccatcgccataccactggacagcaccaaatttagtttgagctgcagttctactcataagaatgtattctaaggaaataatcagatttggagttattattctaaggaaataaccaaataaggaaaccagccttatttg

SEQ ID NO: 59352 - DNA, 2004 bp, Homo sapiens
gtaatgtaacaatccctgagggaaaaataaaaactaacactatgatgacaaccctcgaatgcaccaccaccaggaagcctttcctgatgcttcgccagagaggttctctttaaacgcgaatttttcttgagttatcctagaaatgtaagttacacctcacatttcgccttctttcgtacatgttcctgtgcgtttcctaatccttccactttgtagttcctccagcaccggttgtgtccgagggcccttctggcggagccacactcgctcggcccaaggtcccgccctccagcatcaggatgcacggacagtatttgtggacttgaccgcatcccaggaaatccagcgggcctggccacttctgggcgccaggaccacagccggccaccccacggacgcctgggacgctcttctgggcccccttcggggctgggcgtcgggctcgcaacaactgcgaccaactggctccgcgaggcctggggcgcaggggtggggctcacgtcgtgggacggttgcatggattattttcgattgatttccgaaccttcaggaagcagacacgctccccttccttcttagggatggggcggcagccaacgaaagcccgaagccgcctccttttctgagtggggagcttagagatgctcaggagggacctccccgattctgcgattctgagcatcaattttggcaggaggctagatagaagtagcaattgacattcatcaccctaaagtgcggattatgtcagtacagatgctacgatagaagaactaaaaaatgacagaaatggttttactgtttttaaactctgggagcctactcctttaagagattaggcagtacgcctattctcgcctggtcccagcgtaccttgcgcggctcgccgtcccccactcacgtaccagggctcattgcgtgacggttacacttccggcgggctacgtgcgcgcggcgagcgccgggcgtacttttgcgtggttgctccaccccctcagccttgccttcgccgccgttggggctggaagttcccgccaggtccgtgccgggcgagagagatgctgcccggcccgcctcggctttgaggcgagagaagtgtcccagacccatttcgccttgctgacggcgtcgagccctggccagacatgtccacagggttctccttcgggtccgggactctgggctccaccaccgtggccgccggcgggaccagcacaggcggcgttttctccttcggaacgggagcgtctaggtaaccgcactttctcgccttcctgggccggattcacccccacccccacccccgcaaagctcccttggtgtccccatcctgtctcttccctctggcttccttcccagtggggctggagagaagcacttaatctagccgcccggcgtcgtaggcctctcgccgcggtacccgggcccagcgcggcctggtgaagtggagggcgggatgggttctgtgctgtgaggtttccagaatccacgtatagttcaggcattatttggacctagtggggtcttgactgcgtggaagggccttggggtctaccccggagctttagcgatgtgtcagtcttaggcatagaatgaacattgaatgaatgaatgaaattatagcatactgtggagttttatgatagataattccgatttcattgcagcatttgcggttttggatatgacggtgttttaataactttgtggtttttaaccagcttttcaagcttttgtgccacatgggaccttatctgtttttgttaaaaaaaacaaaaacacttttttacagtgtttattagtggtaattttctgcagtatgtgcagattagtatatctgatgcgagaatgttgtgttgtaataactcaatttgtcttttacttaaattacaaaacgtaggtagcatgttccttgtttttgtgcaacccattagttcaggtggcgacaaaaacataactatccagaaagaaacaaagtggtgagacattttaatgagagattta

SEQ ID NO: 59353 - DNA, 2122 bp, Homo sapiens
catggtgaaaccccgtctctactaaaaatacaaaaaattagcctggcgtggtggcaggcgcctgttatcacagctacttgggaggctgaggcaggagaatcgcttgaacccgggaggcggaggttgcagtgagccgagatcgtgccactgcactccagcctgggcaaaacgagcgaaaccctgtctcaaaaaaaagttgttacttaaagtaatgcattgtcaacagaagtgtagaggccatgattctaaacttgtgttctctacgcctaactacgaaccttgtgcctttccaaaaccaaaggtcacacttctggaaagttccttcctccctcacattcaatatctatttagagaacacacactatgtcctagcttctgctaggttctgaaaatacagtaagaggcaaaagagccatagcccctcccaccccgtgcccttatgaaacttgcagtctacataaacatagatatgaaacaaacacaaaatgtatgttttaaccctaaaatgcgatagggaagccagtcagacgatttactcgggagtaagaattcaggtcattcaccaaggcgcccatgtcaaagcttcatcacccgcctcgcggccctaaaacgtgtcagagtcatgatacacacaacgcagaggaaaagttcaaaaacagatcttaaaaagagaagtgaaagcaagcgatcaaaacatttctggaaatctgacacatctggagtgccgtgtggagacgccagggcgcgtggagctttgagcagttaaaaacccagaccgggaggccagtgcgtgtgtaagaccgcgtttctctgcaaggctgtcccgcggcaggaacgcgctcgttgggccgcagagcaagagcgggacgcgccggggggcgtctgcgtggcacgtgggccccgcagccagtcgcgctaccgactggcagtcagcggagacgcttcggagcaggtctgttagggcgcgcgcacacacatgcacgtgcacgagcgcacgtacacgcgcacaccgccagcgcggaccctgacggggccgagcctcggaattgggcctcctcggccgccgtcgtcttctcagctctcacagggcccgcagcggcgctataccttcggccacaggtagcgcgttccttcgctgtgctgaccgtcgatcccgggggcgctagagcgccggctccggggagggcagggaagcgtcagggacctttcttcttctttttttttttttctttttttgagacggagtctcgttctgtcgcccaggctggagtgtagtggcgcgatctcggctcactgcaatttccgcctcccaggttcacgccattctcctgcctcagcctcccgagtagctgggactacaggcgcccgccaccacgcccggctaattttgtgtatttttagtagagacggggtttcaccgtgttagccaggatggtctcgatctcctgacttcgtgatccacccacctcggcctcccaaagtgctgagattacaggcatgagccaccgcgcccggcaagcgtcagggacctttctagagccttgcttggcctgaggtccgggactggggctgtccccgcttcctgtttctgccatcagtggggccacaggcctgaagacggcttgtaccgccaccttgggcgcctctgctcctggctgcgacgtggggcgtcctagccttcggaccgggaacctgataggagacgaatagaaagggggaaagccctggaaaattaagccggcacaagaagggggaaacgtttggaggtcaggcaaggctgatggccttggggatcgcggagcaggaggcttactgggatgtccagtgtgagaatgtcagcccgtgagctctggtgtgcaagaaaaatgcctcttttctggatttcaggtgaatttctgactcctctgggctacatacgaccacccttccctggccccctctggtgaactggttataaaagaaaaattaccctagttcttcctgcggtcccctccccagggattaggccaagttctggaagcttattgggtgacttagtgggtatgttaatggttaagtaacgtacccaaggtcttattgccaatcagtggcaaagtcaggattcaaatgcagatctcttgga

SEQ ID NO: 59354 - DNA, 2207 bp, Homo sapiens
tttttttcactgtggttattttattatgtcattttgaacaaatgacctagtaacattatccactcaaatatgaattaacactactaaaaactcaagatctctatcttcagattaagaccataattagcaaagagcatatttcgtaggtacagcaataataggatttttgtaataaataattttacaagttgaagcctatcataaaatcaagttaccctaatattatttaaaacttgagcttctccttaaaggtaattttcttatacagttaatcacaatgaaaacaaagcgaataccttattttcctttcaacacgcttttaacatatgccatggtatccatccttcaattgtttgtgccttttttgagagctgcccatctgaagcaataaaagagagttgaataattcaataaactgtttctttaaaggccaggaacgggtggtagtctccccactctgctgcaaagccaaagcaaattctccagtggattttgttagacacatctagaaaattagatccccatacaattaggtcacgaaaacctcccgcaaggcccctaccttccgcaacaaacttaggcctttcgtcctacactgtcactgttcctgggtttacgcctcctctctcaaaggccttccttcctatcccgttcccattcggatgttaccagggttaggcgtctccggcttacttctaaaccttgactttcttgccacccccgccctccgtcccgctactggtttctttcccggccgttgcgacggaagctcgcgccgggggacgatccccactacgataaataaagtgggctcaagaggcccaaccaacctcttcccaaccgagcctcaagtaacgcttcccttagagacctagattctcacaaggaagcaggtgatagacggtgcatcccaaccaatcaccagccagcggagcgcaataagaaggcagttaaccaatcggagaagagatgggtggctcgaaggatggcctgctttccccggcgtctccaggaagtagtggtgggacccagatctttccctcgagcccacctctccaggtcttgggccttcgccctcctgtccggagaacgtgtgctgtgggcggccgttctctcgggtgctggaggctgtggttgggaggcgggataggcttgccgccgcgcctccggagcccgctgtgccctcgaattggccactgaggagagaagccggaagcccgtgctgcagcgtggggtcgtccagctggaggggatactcgggaggaagaacggcaggccccagcccttctttcccgacagccacgccgcccacttggcggcggggagtcgctccgcagccggcccggagctcgcccgtgcaactgaaaactgcgtccgtcgggagctagggtgcctggcgtcccgcgttccgccctcttgcgccgcccttacagtgcctcctcctcgaggccaaatgcccggccgctcagcgctcgtggcagccgcgtagttgcagagacacggtctgctttccaggcttgggaagtcccagcacttaactctgcgcgtcggtgtcgctcgtttgccagccagactataaagtgcacccaacggtgtatgcgtctctttacttccgggtgtaacgtactacccagccaggccctttcccttgctgtgctttggaacctggaaattacaaaccctaataaattctgaagtctgtctgtctgtctatctctatttgagacaaggtctcatcctgtcgcccaggctagagcgatcgtagctcactgcagcctccagcgatcctccctcctcatcccagtagctggaactacaggcgcttgccattaatttcacattttttcttttgtagagacgggggtctcgctatgttgcccaggctggtttcgtactcggcctcaagcaatcctctcacctcagcaaaatgggattacaggcatgaggcaccgcaccccactatattttgtgttttttcaccttcccgctaggaaagcagtttgaaactcccaacattcctccctctgattttatttctgagatgtgaggcttactaaacttacctcaccgttagttaagatgctgagtaggtctctgtctaacctggtatagtcccctttcctgacatccctaccatctgatgacttcatcactggagagtgctcacaatgccgttacttgttattcttccgtttgttctttcattt

SEQ ID NO: 59355 - DNA, 2111 bp, Homo sapiens
cttcctgtatatggataggaaaggtttggatggtcatctgtcacaagagtaacaatgtttaggagtagcttggacactggtcattgattcacttttattggtgcttgtaatgtcagtatgttgacatcattgtgcagcccttatcagattgtgaacaccaagagtaccccaactgctggcccgcgagctgtttacaaatatcataccggcttttatcgatgatagtggcctttaaaatctggagttcagagtggcacaaaatgtgtttctaatgcaaacgactctccttcccacgtgcacctctttgatcaagtttgtggctgaaatcagactctagttagatcgctgtaaaaataaaaataaattttccccaaatgattgaaacgaatttcaccctagactacgagtcccatcatgcaacgctcccatattcccaccgtgtggggcggagtcgtagaaggggcggcagcggcggcggcctgtgcattctgggtattgtagtctggggcccggccaccgctggggctggttccacgtggtgcatttggcggcagctttgggcagtggctcccctgctccctccacacggtcctcagggtgccagcgccagcaggggcggccagccaccgcgggagcgggctagagtgtggcccggaggcagcccgaggcttcgcgacgtttttgcgacagccgcggccgtgttccgcgagtgccctccctcctcctctctttgaggaggtaccggctgttgtgcggctctgcccttctgtttgagtgtatgggagagtgagtgagtgagtgagtgtgagcgtgtgtgtgagagcgtgaggcgtgagtgcgcgtgtgagaggacgagagcccgcctggccgccccgccgctcccgccgcagcaggagcagaacgcgcggccggagagagcggcggagccggcgcccagggagcccgcggggacaagggcagagacaccgctccccacccccagccctcgtccctcggctctccttcgccgggggatcctccccgttcctccacccccggccggcctctgccccgccgtccccctggatgtccctggcgctttcgcggggcctcctcctgctcttgccgcatcagtcgggctggtgctgcggccggcgggcgtagagcgggcgggttcccgggggctgcggctgcccgtgcttccccggtccccacccctgccccccggccccccgacccagctctccggcctcagaggctgtgacaatggactatgactttaaagtgaagctgagcagcgagcgggagcgggtcgaggacctgtttgaatacgagggctgcaaagttggccgaggcacttatggtcacgtctacaaagccaagaggaaagatgggtgagtgtgtgtgtctgggccggtgtccgcgctgggcggcgctcccgcaggccgaggcaggtagcccggagggagagcgggccgccggggtgccgggctctgacttcctcgacgccggcctctggctccgccagccaggtttggggaggaagtggtgtacgagggatccaaacccacgagaaatcctgcgtgccgcgtctgtgttctgctctggtggtaagaggcaagatgagcctctgcaccgtgggctgtatacttttcaaggatttcaaagctgattcatgaaaaaattcgttctaaaacgccgggttaaatgttttttgtttttttttttccttggtcgatttattatggtaaccttctggggatttcctcacccgcctctggagtgtcatccatcggtctagaaggaaggctgtgatcctttcccccaccagtttgtgatcgattttttatcaaatttgtattttatttgaggaaaggaaggcagcgagtgaatgtggttctggagagagttccccatagtgatcatctgcaacataaatgttgcaattgctatttagatattattagctgtgaatttttacatagaacaatgggggtttggtgcagggtgggtggtggggaagaaggcaagtgacatagggactatctcgttcaggcggtttcccccaaatttagcggctggcagtgaactttaaataatccctttgctttaaatattcttccctagtaaca

SEQ ID NO: 59356 - DNA, 1238 bp, Homo sapiens
gggcggaggaccaagggtgagagccaccgcctccgcaatcccccgcccctcggcaccgtcgctcagcgcgctcgccggctccctattggccgaggcactcgccaatcctggtgaagcggccccgtgagttggccctggttggtggagccggcactgagcccccctcctgctccggccgagcccccccgccgggagggggcgtggccgcggccgtggacgggccggaggcggcgtcgctcgcgccgctgcgtgcggtgtggtgcgaggcgggtgcgccgggcggccgcggcgcggcgggaccatggagctcagagcgcagccccggcgccggcggcgggaccgcggaccggtgagtgagggctgcggtcgccccggctctccgctgtaggctgctgtggccctctcggctccgggccgggcggctgtcgggggaggggcggccccacggcgaactgaagttgctgcatcgccgcgcgctccggccgggcggcggggcccactgcgggctgcggcgccgcctcgcgcctatccctgcagcccggccgcattctcccggccggctcccgcgctggcaggggcttctcgccgtcacggcgcggccaggcggcccttctctcccgcgcctccgggcctccggccctttgccgtccggtgcgcgctccctggactcgggacagccacccgccctccccgccgtaagtggcgcccgggcctccgctcgcgccccacgcacgacgccccgggccgctccgcgtccgggaccttcgcatccgttcagtgtctgcgcgccctcgctggttctggtccagctccgcgtgccccccggccccattcggccctcgccgccctggcctgtgccctcttggtgcccgcgtgcgtgttggttgcgggcgtcctctccctcgaggctgcggtgccgcgtggctcccggcctcggagaccaggccggactcttggagtgcaggggaggaggtggggcggcccgcgagtgcgggggaccgcgcgcacggagccgcggcgcgcggggtatcatccccgggggtctttacccgcgcgcctgggctttagcgagggcagaagcttcctctcagtttgtggtgctgacgtgcaatggcgattgcttcttgatttggcccctctgcaagggagagttccctggtggagacgagagttcttaattattcagaaactatgtgatgggcttagggatcaatgggagcatcataggaattctttct

SEQ ID NO: 59357 - DNA, 787 bp, Homo sapiens
caacttttaataaagctttaaaaagaagcagtgtggctctagaaggcagtgtgcgaagtgaggagtttaggaagctgaggcccttcctttggcggtgggaatgttatgttagtgagtatcttttgggagttgtcagtaggcacttaactccaagcagagtgctgtaaagtggaggcaggcagacatagcccttgtccttcaaaatgagaaggccacactgaggggaaaggtcagaggaagggcttgggccagcattgtgtcactctactctatgggccctggctacttttgcttgggtcactttcattccgagggcaaaactcatacatacaagtaaaacatggttaaaaagcccaacatctgcagtatacacacatttagttttgtgtgtataatatagtctgtgccacatgttttagtgctatcatgcactgtgctctaattacctggcatgcagcaatcagagcaaaggttaccagcacatagaagagagaatcattaacactgtcaggttctgcaaactggttgttctgaaagctcaaaggtcagtctttaatggctgcatagtggagaaagaaatccactacaaaatctattcagttaattttgtatagtcaactacctctacctaccagtaatatcgttttaaaatatgtaataaagacttaatgcagttaacatgttactctacatcccatgaacccttactgcggtggagaatgaccacagttgtgggcttcagtttatttgccccattacagtgtattctatgcatgaaagctgttat

SEQ ID NO: 59358 - DNA, 723 bp, Homo sapiens
taaacatctaaaactgccaacatgagggtgggctagccattggatttaggggcaggaatagcttaggagccccagttggtttcacaaatgatacaaggaacaaagggctccaggcaaggggagaaaaaggcgtccatcaagccaatttgtttgcctgtgtgcaaggaggcaagaagtcatttcgggattccgccctatcttatccaccctatcttatcaggtggtaaatctgtcctttgatcttgtcaacaatgtggaaagttggagacagctgccaccacccctagtcagcagtgcctcaccaaccctcataaaacatttatgaaacccgtaataaacaggctgataaggaagagggctcaagatttcaaaagtcagcagctccacagaaaatgcccttctctaccgtcaaggtttctttatttgaagagcaaacacaaaccatcaattcccactggccataaagtttctgagcaaagagtttcaccaaaccctgagattagcagaatttgtttggagtcttacccatgttcagaaaccacctcccctccccttcccgaaattctccacgtggagaagggcatagagggctgggatgagaagaatgcagtcagggagaaataaagagccatttgatgccccaaagtaaacgactattctatcattgagtctggaaaagagaagaaggcgtagcattttagtagcacgttgtaaaatataact

SEQ ID NO: 59359 - DNA, 978 bp, Homo sapiens
tttgttttttaattttttgtgtcttgacatcttaggcaagaaattcagaagcccctctcagaggccaaggcagacgaagtgtgctcccctcccatgctgcctctgtgcaccttcccacgcccacggagcctcttggggccaccctcccaccctctgttggttcctgctatctacagagtgatcctaggcaatactgtggctcgggtcaggccaaggggagttgtgtggacctgctgaagagcagggagtttccaagctcagcgcccctgctgtttgctcacctgtcatttcagctttgtgacaagcctgacatgaaaaggggagagggcacatttttgacaggagaggtaatttatcagaaagctgccggtgataaacatgcctgttgggtgttcgcttgcagccctgggcctgccacgtggccagtcccctgttaatgcataaccagtgagtgccactcttggacaggtgcacagacctggctgtaccccaggcccttgcttcccactcctgatgaggccactttatcctttgcttgggcacagaccctgcccacagcaggtcaggggagctgaaatccaggagaggccctgcaggctgctgccccaccctcggccttcccgtcagggccggtgtctccaggcctcagtcctccagcggagggtggggacggccacagagatgggtgtggctccacgcatgactctgaccctggaggatggcggggcatcagaatcaggcacgatggctccatgttgcagaaaagaaagtgcagcttgaaggttaaggggtgacgtctgagagtgggagcacctcctcctacaatcttaaatccacttcccaaggggaagagaaaccactcactagtgcacactggacacagggccagtgaaaggctcatgtttttatgggaaagcagccttttagagtctgttttcttccagatgaggtatatacagaatgaggagccccagggag

SEQ ID NO: 59360 - DNA, 1897 bp, Homo sapiens
tcactctgtcgcccagcctggagtgcagtggcgcgatatcggctcacgacaagctccacctctcgggttcacgccattctcctgcctcagcctccccagtagctgggtttacaggcacccgccaccacgcccggctaaatttttttgtatttttagtagagacggggtttcactgtgttagccaggatggtctcgatctcctgacctcgtgatccaccagcctcggcctcccaaagtgctggtatgggagatttaagggaattttagaggtaattgaaatgtggacatgatttttgcctttcacactgatgtcagagcctatcctgtgtgtagacgccacgcacagcgtctgtgggaaatagatgcgcacatgccgaccgtacttgggctgttctcccaggatttgtctccccaaaacctggactgttcctcttgtgacttctttctattgttaccactttgggcctcaaatatagagaagaaaaaagcacaaagaaaagagaaaagggcagcatgtcaatagggttcgttacccttagatttaggggatttttttttctgttccttacataaacatattcaggtcaaaaaataatatatcatcccacagttaaaaaaagaaagaaagaaagaagaaagaaagaaagaaagaaagaaagaaagaaagaaagaaagaaagaaagaaagaaagaaagaaagaaagaaagaaagaaaacacacaacacatgcaatacgtcccgggcgccactcagtctgaagctggcccaagtttatctctgactgtccactggcagtttgaaacattgcagctcactgataaccagaaatgagtaagcactatgaccgttcagaatgtcacactgaagcaccaataaaaagctcataactttcgcaacagcagagttatgtggccagcatgctggggaaggaacgtttacattacccatctgcaggttacaaatgactgtttaatcagcgtcctccttacctaacttggcctgcttggccctcaggcccgggcggcccgagagcattccacggcacctgcaatgctttccaattcccggaaagcagaatgcagccaactgaaaattcctggagccagttttctcagagatccacattaaaccagaagctacgtcactggagtctgggaggatctcaggttctgagcagagctttctcgccccctcctgctgctaatgagggtcaaggtgcttcctgaaagtgaggcccctctggggaacttgactgccatcaaggtagaaaaccctggaactggaaggcagccacatgctggctgatgcggagattattgtcatttaaaaagtgatgactgtgagaaaaaaaattataattgatttaaaaataaaggactagaatgagatctcttgataactctccccctccccacctcccattcacccaaacttgagcccagccctcatgcatatgggatcagcccaactggccttctaatagagttcagcttccagggtgtgccggtcactttgccccgtgctcccagcaaatggtcaggcagtgatgctttttggtgaggatgataactttgggttttggttttttctttttttaatttttggtgtaatttatacataataaagtgcataaaccttaagagaatgttactatctgcacacatcagtgtgaccagcaaccgggtcacaataaaggcatttccagtcccctaggggccccgttatgctctctccctgtgcccagtcaaccacatcctgccacttgactggaagacgtagcaccattctgactcctacctccatgggtttgtgctgcctggttttgaactttatacgaatggaatcacacaccagttactcttatgcgtctcgcctttcccactgcactttgtctgcga

SEQ ID NO: 59361 - DNA, 1395 bp, Homo sapiens
tgatgcccaggccatgaaaccggacccagagggcagcagctttacccgtgcagctcattcagcacctaccatatgctgcaggataagtctaggagaaccggccttcattgtctctccctatgcgtcccgcctggtccttgaaataagtttggagttagagactagttctcggtggggctgttgagacctctaaggcagcaagttcacacttcattacccgctgctatgaccagggaaacacagattccagagataggctgtctctctgagcaaagtactgcagtaacgagcagagactccaaagccagaattatgggctccctgcccggttctgtcacttcaagctgtgtggccttgggcaagtcacccagcctcactgtagatctgttttttcatctgcaaaatgggacgacaatgctgctactgttaatgatgatgaaacagctactattggtaaataacttagaacagtgcaaaacacaatccactcgtgattttttaaccaacatcaaacattattaaaaaccttattaaaatttttaaccaacatcaaaccttattaaaacatctcagcctctgctcttggtcctgagctcatgaactgtggttgccactagagcaactgttaatggaaacacaaatttctgatacagattaaatattgagctgaacccactttcactaattcaacaaattaggctttctttgccttactcccaaagaaagttttgatcttctgtcctcttgggaccttgtcaggtctctgaccctgatcctctctgctcctcccaactgctcatcagatatcagggtcactgcctctttggccccatttctgatggcctttgggttctagctgctcttaacttctgccagtaaaaatcttggctcctattacaacttcaatgtagttcaagtcaatgctcatgtattaagcacctactagcccaaagcacttaaagagatgcgacgatattcccatgcataccctcgggtgaggtgcatgctgggctcattgagttatcacacaaaatggaaaaaaccctctggctgagacccaaagtgctgcaggcagagtcacatgcaggggcagaatgggaggcagcctcagagaaggggcggcctttgaccttaaaagatgagagttcagtaaggagagcatgggtgcagagctttgaaagcgcaagatgtttatttagtcatccattcattcaacaagcatttactaagcacttgtcatgtgccaagcactgggtttgcattcctgctctgtcaccgtatgatcctggtgtatgatcttggatgctgtaacctctctgtgccccagttccctcaagtataaaaccataacacttagctatctcacagattcgagtgctcttcggacagtgcctg

SEQ ID NO: 59362 - DNA, 1215 bp, Homo sapiens
ccgccaccatacccggctaattttttttgtgtttttagtagagacggggtttcaccgtgttagccaggatggtctcgatctcctgacctcgtgatccacccacctcagcctcccaaagtgctgagattacaggcgtgagtcaccgcgcccggccaactccaaagttcttatttgtttgtttaccttttggatcctgtttgtatttctgtcagtgactttggggatgatgtagataaataaatgcatcagagagcacttgtccattcataatggcccctggtcttcaccacctgtgagacagtaagacagttggtagtggcaccatttcacaggtgtggaaactgaggccagcaggtggaagaaccagactattggtgcttcagtaactgggcagagctcgggggagaacccagctacctggctggtcccatcctggggtctcctggcaccctgtcccactatggtgtacccagccctttctggagaaatgtcaccttggagcacaagtttacaatctgttgggtccaagagaggaggaggtcactctgttttctcctgtaatgcaggcagggccagaatggaactggcacaaaagtgaatggaaaaggtctggaaacacgccagccccagcagcctcctccccactcccagctcctccacaacactggagggtttatttgttcaattactctccccaactttgaaccttgttgctattctagtttgcacattcctccaaagtcattcccctttttgctagatgacaaagttacagtgagaggaaagaaaccagggtcagtggttttgtcaaaccagcctagctcagcccaggccatcgtccactgagttacgtaaacaagacctcaagcagacgaacgagggtctccttcccttctcccctaccccagcccctctccagactcccatcccccaacctctgtccagttgaccaagatccctctggatagcaaggacctagctccggaaaagtgctctgaacgcagccacgctgttgagtcaggacacccggctgggctctggtcacggctttgttcattgtgcaagtcaaggacagggcacaggatgagtcccctcctcctctggtcatggaatcttcacttgtactctgcaaggatggactgatgtttcaaggaccaggaggcacgagtgatcctatgaaatgggtaccctgcccgtaagagcctgatgacacac

SEQ ID NO: 59363 - DNA, 662 bp, Homo sapiens
gctcagatgagtggccttgggcaagttatttaacctctctgagacctgtttcataatctgtaaaaatcacaagaaaaccaacattgggttgttggggagattaaacgaagtaaagctcttctcccagtgcctgtttcaaagtgaactccgggtgaatggcagctacagggtagtactattgcccttgtcatgctgtgacctctgctgcagtggtgaggtttggggagcgtgtggcattcaccgggtgagttgggaacaccattgcatgagcagaagttggcaaactactaggtgaaacttagctgtggcttgttttgtaaataaagttttcctggaacacagccaggcccattggtttatgtacggtcggtcgatggctgcttttgcaccaaacagcagtggagtggttgtgacagaggccgtatggcccgcaaagcctaaaatatttactatctgtccctttactgaaaatatctgccaaccctgcaaatacagtggccagaccaggcttcacctgaaacacgaaggagaccagggtggtcagcactccgcagaccattccaaagaagcaccggtttccctaggtcctggaaaattcccctcccccacgatctcctccaggattcctctggctgcctgcggtgcagcagggcctttctttc

SEQ ID NO: 59364 - DNA, 2645 bp, Homo sapiens
taataataataatagcaaataaaaataaatgtatgcataatttttgtgaaggatgttagagaaatgctgcaaagaactttattccattaatgtagtttcggtcttttcaacaacaagaaagcaccactctttgataaatggtggggaagtagaaaagaactggctgccaactggcatgaagcacggtcacatccaaaacatacgagtggagtgaccaacatgaaaaatggcagagtagaaagctcccagggttagtccttccaccaaaaccattaagctgaaaaatacatcagaatcaactattctgaaccttagaacctaatcagacattaaacacccagggcagtagttgatgaagggagaagagagcacagcatgcaaaccagctactattccctactcctcagcatccccagaggcgggcacaggaccacctcctagagcagctgcctagtaacagggctggcagcgggaaccttgccctcaacaatttaggattgtgcattttgctcagttctggcagtagcctggggaaacagcacagattcttgcttttgtttctgtccccttaggctgcaacctttcttgtttttttccctttattgagggggatggggatccagacattatactaaatctctatcaagtcatagctgtccagagatagtaagacagaaacttcagtgaccacacacaacaaggaatacagactttgcaaaactggtttagaaaagtcattatacaaatggatgactgcaagcctcaaaaaagcaatcactgaggaggtggagaatctgattttcagagtcaccacattacaacattcaaactgttcagttctcacacacacacaaaaaaaatcacaaaacatgccaaaaaaaaaaaaaaaggaaaatatggtgtatttgcaggaaaaaagaatttgacagaaaccatccctgaggaattccagacactggaatgactagtcaaaggtattattaaatcaatcgtatcaacggtatcacactggggtcccaaaacaagagctgagcacgcttacttccccacgactaacgtggttttttcagtgagtcacttgttgaaatctcaaatttcctggatgagaaccatttctgcagggatcaaatgaggtcaaatcacaagtccaaaaagattacacaagtatcacaagtccaaaagattagctaattcttgaaggcaacaacatttaaattccaccactttgcttcagcaagccgtgacgcttaaaaacaagggtgtcagaaaaattctggatgaaaagatcagttcatgaaagtaaggaaggaatagtgttgtgcagctatagaaataacaagagctgaatgacactcaaagtttatgtgtggcattttcaaaatgcagtaaaattcattttttaaaataagcacagatttacatatgttaaacacaatttgaatacaaattcagaatgcaggaagcagtcaatatgggaacttgagtgtgggtacattacaaagaagaaaggtaagaactggtaagagacactttagccatagcaggccagaaggctgcacaggtgtgaaaccctcctggtgagagggtgagcagtgagctccaccaccacttctcaaaccacgtgactctgggtgagtcactttctcagtcttagtttcctcaccatatcatacaggaaaatacctactctgcctacctcggggttacagaaatcaaatagtgaatgtgaaagtgctgtaaaacgtaaagcattatgtaaaggtatgactagaaacatgagtcatttggatttttctaagtaatcattttaccaaagtgagcaacgtgatggaaacttgccccagtagagtgaagtaccttgttcaagtacacttggttttgaaagccactatgtaaatggaaaagagaccactctttaacctatgtaaaagtctgaggttagcttcctatggacagttaaaatatcagaacaagcaccaaatccctttcatatgctttgtataaaaccttttattttataagtactctaagttcacaatctaaaaataattcaaactgtaaagagggtgtaaaactcaaagtattattcaccactccctctcttaaggttcatttccctggagacaatacccattaacggttttagttcttaataatgattatcataactttaaataatatattgcatgcctcagtcaacagctcttaattctgtgcttttgcaagaagagaaattgacacacacactacctcccaactctccttccacaggccacctcctaatttttattacgtgtcactgggtagagtattgttctagtgcttctactggttctacatctaaatctttagctagatttaccaattctcatatagcacgtaagaaatccgggctatgaaacaaaaggaaataagcacattcacctttcctgctatccctcatttcctccacctcccagccacttactcatatattcagggattataacatttacattagcttctataattatatcttccatgctttatctttggtgtattcaaaaagcaattaactagaaagagtagatacttgaagggtagctaatgtgtgcaaaggagattggcttatgaagtagagaggggccagtagaaatgttagtaac

SEQ ID NO: 59365 - DNA, 2768 bp, Homo sapiens
aagaaaaatatatacaatgtaccacccttagatggaaaatttcttggggatctcctatatgaaatcagttgcataaatagggccagtgaggcatgaaacacaagatttcagaagtctctaataacaaccactaggcccacgttgcaaagaacaacttttttcggtgatgactcataaattatgatccctacatataagctcatgaggaactaatgaaacgaatttgtctcatcatgtggaaaactgtggtccttctggccacgcacaaaacaccaagttttaaacgcgcccacgttttgcttaattcgggacttccagcgggcattagcacttttcccttacagtctatttaaacgccctaggaaaacaaataccatcgccttggcaggcggtccccgcacagacagacctagctccagccacatacagatgtgtctggtgggctgaagtaaacaaatgacaggaaagctaatgctgcttttcaagattaacgtgcattcccagagacaagactgccacctggacacacggctggaaacgggagagctcgtgcctctcagaggagaaaatggagagaatttcaacagtacttatttaaagtttccaccttcacacacgcccctttcccccagcgcggggtcggggactcggcccagccagcggcgcgaggaaatctgcacttgacttccgtcctctcccaggcgggaatgagcgctgcccgccccggccgagacccttccttcctgcccgccgacccccacccctcccggggacccctcccgctcggcgcgcgaccagaaggaaatggagcccgcgcggctccgcgccccctccccgacgaccccggcccggggccgcgctctggctcgcgcgcgcccacccctcaccccggcacaggccgggcgcgcctcggccctcgtccccgcgtcccgagcggaccccagcagttcagccggggactcccggaggccggtgcccgcccgacgccgcgtctggcacggtcgcccactcaccgctaccctcgcgccgccctggcccaccaggcggcgccccctccccagccgcctgggccgctcacccccgcgctccccgcctgcgcgccgtccaaccgcccccgcccgggccgcccgggccgcccagcccgcccgcccgccccggcgctaggccccgcgagcggccactgggagaggcgggtccagcgccgcccgcccgcccgagaggtcccggcagccccggccgcccgctcgccgccacctaccatggtacagatggaggcgaatttggagactgtcattaggatttccatccggccagcgccatcttccacccaatcacagcggcggcggcgggcgggggaggaggggagccgggccgcccgctcgcaccgcagcccgcgggcggaccccgagccgccgcggacccaaccaccgagcccgctgggccgccgctgccgtcgtcgccgccggcgctcaggcactcccggcctcgggccccagcccccgcctgccggccgccggcccgcccccggctccgccccggcgcagggcgcagccgctgcctccgggcccgcgcctgcacgcgaagccgccctccgcccaccccgcccagcgcacaggggagcgggctccgccgaggccctaatgcccggcctgccaggcagcggcgcggccaggcggcgcagccccgcccacccctcggcaacccctccgcggcccttgtgcgcgagccggggaactccggtccgtccccaccccgcgcgcggcagagggcaggaccgaaggcgggcgccacctcctgcccgcgtccctgcggtcctagagccggggacccagagacccccgcgtaggaaggggtgcggcggggaggcgcgggggtggcggcggcgatctgggagaaccctggaggggaccagctgcgacacccaccgcgggcgaggggacggcgagcccccgctgcctaaacagaaaacggaggcgatgatctgggtaactacgggcggagtgggaggaaacctgctctgcacagttaagataacccgggtatgcgtcccaagcacttggtttgtttctttttacgtatattggatgaatcaccggagtcaaacacaacttagaaaaagacaaaataattaaacaaaaatgaagaggcaaagaacaaattacacatgtttaactctttgaattaagaagaaagataagtaatgggggaaggagaggagcgaaacctgttggcctgttggcgataaatttataataggcttctaaatatctgcacattgagctgcaaaatagggaggatctcaagccagcagtgatgatgatattaccagagacaggaagcccgcaagcaagaaaaatgccctgtgagaaatccttaggcagtgctggctactggcatgggtagttcctctttctccttttataaaattcatatttgcaccctgttcttcatgcctggcagctcagctttattttttcctatttgagaaagtagttcaagtgagtagaataacttcataaattattatgttagaaagcttgtgatattttctgattgaactcgtgatggggtacttttctgggttcccctaattcagtggggttgaggatctgaattcaggcagagctgtaaaatcagaaatgcctcacctcaagggttcaaagcactcaaaaacaaaaagcattcaaacaaaatttaagtgaaaaatagacttctggtacatgaatactgtttccatagtgattccattataagcttgcttggggggg

SEQ ID NO: 59366 - DNA, 3397 bp, Homo sapiens
caaaaggtggaagcacccaagtgtccaatgatgcatgaatgaataaacctaaaatgtggtacacacatatatatggaatattactcagccataaaaaggaatgaaggctgggtgcagtggcctatgcctgtagtcctagctactcaggaggctgcttgaggtcaggaagttgaggccagcctgggcaacataacaagacctatctttgaaaaaaaacaaaagatgaaaaaaaaagaagtaaaattgtgatacatgctatgacgtggatgaacatggagaacattttgttaagtgaaataaaccagacacaaaaggactaatgtatgatttcacttatattaatatgagatagctggaatcgtcaaattcataaaaataaaaagtaatatagagattatcagagagggaataagggggggataaggggaagttactgtttaatgggtacagcgtttctgttggggatgatgaaaaagttggggtataaataatggtgatagatgcaccgccttgtggatgtatttaaagccactgaattatatgttgacagatggctaaaatgataaatatgtgattttatcacaatcaaaaactaagaatctaaaaaaaaaaaaaaacccctcacaagggacttgaggacaaaacagaatgccaatttgttaatttacactgatttccttcctcctccaggtccccagagcaccatcacttctaagactgtgacctgcttacagatccactcctctgcccccacagtccacatgtccaccctgggggccatggcttattgattcttccatgtatcagcccaagaatcccctgctgccttctgaataaagggtgcaaatacacgaagcctgctcacgaatcaacataaaacttggcttccgatcccgcttccctgcctgtctgcttccacacttttcactcacggactttcctgctcccccgggcaccttgtctccttttccatctgtgctgaccctttggcttagtgactcagcttttggattggccacttggctgggcccttggtccctgcaaaactgagtttcctgtatctgtgctctgtcaactctgagtcagccaaacagctgaggtcattctctacttgtcaccaccgatgaggacggagagccaacaccaccagtcagtcacccaagctggaaatttaagcatcatcatttcttcttttccttcccagccctcccatcgctgcttgcaggccagtgagttccaccccaggaatgttccaccccagtgtatatatttccttctgaagtcccatccccatactgcttgagatcggggctcataattcccccaataaaccactgtccagcctcctgcctcacctctatctagcctctagtctgtgcctccagttctttacaccctgccacagtgactgcaagtctggtcccagtgctgccctgcggagaaacctccacaggttcccactgccaggggaccaagttgaagctctttgcgagaactgcgccctctcgctatggccagcccaccactccagctcagccctcctcccacaggccacacttgttcaacacgctgaacctttgcctttcccaagggcttccaccatcctttaaatctgcccacattgttccttctgccaagagtgaccatgtggtctggtttgcccagaacaacctgtttacgcctattttctggtgtaattattaattaaccaccctccccctccacccgcccaagtgtcctggtttgaacaagttacatggtcagattacatttgccttaattcttcacctggcaaatctctgctcatcctccaagatccgcttcaatgtcagaagctctgggaagcttggcccaagtgctgacctctacttcaggactacctcagactgttatgtatgacttcatgatggtgtttaccagcatgcactgttatgcaatcgtttacatgtctagtcatccctactagacttttggagtcttacatatgctcaattaatgtttgctgaggaggaatgaaaaacgaatccattaagtagttactaagtaagggccaggtgcagtggctcacgcctataatcccagaattttgggaggctgaggcaggcaggtcacttgagctcaggagttcgagaccagcgtggccaacatggcaaaacttcacctctactaaaaataaaaacattagctgggtgtggtggcttgtgcccgtagtcccagctactagggaggctgagtcaggagaatcacttgagcccaggaagcagaggttgcagtgagccaagctcgtgccactgcactccagcctgcgtgacagagcaaaactgtctccaaaaaaaaaaaaaaaaattactaagtaaaaactatggctaggcatggtagctcacacctgcaatcccagcactttgggaggctgaggtgggcagatcgcctgagatcaggaattcaagaccagcctgaccagtatggtgaaaccctatctctactaaaaatacaaaaattagccaggtgtggtggcttgtgcctgtagtcccagttacttgggaggctgagacaagagaatcgcttgaacacgggagatggaggttgcagtgagccgagattgtgccactacactccagcctgagcaacagaacaagactccatctcaacaaaaaaaaaaaaaaaaaaaaaaaaaaaaaaggactacgtgccaggcactgttctaggttcttggcaaaacagatagacatccactccctcttggagtttccatttaagtaggggaaagagacagaagttaatttctgaacgattcactgttgagggtacaggtcgaggatttcctttgattaagcagtcttgctcctggagctggggctaggactcagctccccataagccacaaggctatgtgagggaagagggccccatcctggccaaacaagcattctgagagtagggaagaagcatggggccaggcaaggtggctcgtgcctgtaatcccacagctttgggaggcaaagctggaggatccctggagtccaggagttcgagaccggcctgggcaatgtagcaagactccatccctagaaggaattttaaaaattagccaggtgtggtggcgtgcctggagtcccagctactccagaggctgaggcaataggatcacttgtttacagttgtatatgctcaacaccagtgaaccttgtcatgaaaacccctccaccattgctgctacctaacttttgctttaagcaacacagatttttagctatcatgaaatcaaatcagtagaaagtatacccagagagattgctatcctttaaatattaaaaattaaaacaaaaatcaggccaggcattgtgactcacgcctgtaatcccagcagtttgggacaccaaggtgggcagatcacctg

SEQ ID NO: 59367 - DNA, 759 bp, Homo sapiens
tcgcatgcctcagcctcctcagtaggtgggattataggtgtgtgccaccatgcctagctaattttttttgtatttttagtagagatggggtttcaccacattggccagggtggtctcaaactcctgagctcaggtgatccacccgccttagcctcccaaagtgctaggattacaggcgtgagccaccgcgcccagccaccaccatcatgattatctattaattgagtactttttagtctaacccaaccataattcaatatagctgtccagtttaaatttccgatattgctattcatatggcttatccttccacaagagttaactagcttttgtatgaataaaccttgtttctctgcccctgagaatttgattatgctgtctcttatctctaccccgccctcaaacattcattaaataaatatttgtgcaacacctactaggtttcagggccaacgctagtttctgggcaatcagtagtgaacaagatacacatagttcttgccccgggaaggttatgataccctcccctctctacctggtggaatccatttactttaaggtaaagttcaaatgtcacctcctctgccaagtcagcctgatctcttcaggcagaaatcaggcttctataatattctctcattcttttaagattcctgcttcacttcatttgcactactcctagaaaacataccacatggccaggcacagtggctcatacctataatcccagcacttttggaggccaaggcgtgtggattg

SEQ ID NO: 59368 - DNA, 1911 bp, Homo sapiens
aatagaaacactctctaagggccattgaatcagttaggattaggtttagctacgtgaaataaacaaataaccatcccaccccatgcccacacactcagacacatacacacaaaaaccccagcagtttagaaatacagaaattagtttctctcacacataaaataagccggaaagtaggcagcccaagattgcacaatcacctggattcaggctcctttctccctcctgctctgtcggcttcctggtcctggaagtctgcttggctcctaccatctcatctcctttttccaagcagtgaggaggaggaaggtgcaaaaatgaacctacaccttaccatttaaaaacacttcacagactggcctttgtggctcacccctataattccagcactttgggaagctgaggcaggagaactgattgagcccgggagttactgagaccaggatgggcaatgtagggagactctgtgtctacgaaaattttaaaaattagttgggcatgatggctgacaactgtggtcccagctactcaggaggctgaggcgggaggatcacttgatcccaggaggttgaggctgcagtgagctttgatggcaccactgcactccagcttgagcagtaaaagcaagattctgtctccaaaataaagaaataaataaaaatatttatcagctattacatccaacatttccattaacatcccattggccaaaatttggtctcatagtcttgtctagcaatcaggaggctaggaaatagtctttattctgggtgggcgtgtgcctagctaataactgggggttctagcacaaacaaaggagagaatggatattagagaggaaaggagcattccattccccagctgggtggataacaaactgcctctgagcaagaaacataatgaaaatattcaaacacagggaaggctgccccaagattgacttatttgtttatttatttgttagggtataattgtcaatggtttacttattgtgtcttatagaatcataagctagattatgtcctcagccctcctggaaatgcttggcagagtgtgcgtcccattcaacctccacagcgtaaaggaaagggaaggcacttggggagatttcaaagaaaagccaccaggatgactaatagctcaaaacaataagacctaggacgcactgttaaggaatgagtcagccagggaaagagatggctagagggtgactaaataatgatcccttgctatacaaaggtctctgcacagaggaggagggagtaggagcaggagaagaaggaggaagatgaccaggagtatggtcatctccactaggggttgaacggaaggaaacgggagcaggagtgacttaaagatacctgaaaggacaaatgtgctgaaggggatgcttgtcaaaatacaggagatggtataaacatatagcacgtggggattatacattggcatctctgaccaccgtggtatttgaatgtgctcttcactaaagcaaagcttgagagtttgcggggagggaggggcattcacaggtggagggagggtgaacgaccagaactcctatgatttccttctctgtgcctcagtttccctcatggaataaccatgtgttggagttcagaaaagagatcctatattgatttgaaagatacactctggttttgcagatgtacagaaaataataactaaacaatatcagtatgtggcagaagagatcctaccagtagaaaggaatgccctttctgcattttaagatctcattttttaaattataaaaggaatataatggctttccagtcaaggtggccccataagatgcatgccatctgctgcacacattcaacaatgtcaaactaatacacaaagagaaaaccaaaaaagatatagcatggctcagaaacaagacaattattt

SEQ ID NO: 59369 - DNA, 3392 bp, Homo sapiens
atattagatacatatatatctattggttctgtctctctggagaaccctaatacaggagccaagtgaggttgacatatttatcaccctgccttctctcggcagggttgctgtgggttggctgctccaaaggcaacactttccagcacctcatttacagctaatgacctagaaaattctttcactaccccccttctatatcaggaaaaataactaaaagcagtttgccttcgtgtgtcaaggacagcaatatatcttaactgtcctgcctcagggctaagtcaacccctgctgtcataatataatatagaggaaccctgtttgtcttgctgttctacagaaagtcacatgggttcattacatggatgatattatgctaattggatctagtgagcagaaaggagcttagatccactggtaaaacacatgcttgccaacaagctgggaaataattccctgggaagttcagggtcctgatatactgatgaagttcctgagagtccagtggtttcttggaatatctccttctaaaggggaagattggccaggcacagtggctcatgcctgtaatcccagcactttgggaggccgaggcaggaggatcgcttgagcccaggagttttgagaccagcctgggcaacatagtgagactctatctctatgaaaaaaaaaaaaaaaatccaggcacagtggcatgcacctgtagtcccagctactcctcaggagtctgaggtgagaggattgcttgagcctgggggcaaggctgcagtgagctgtgattgtgccactgcactccaacctgggtgacagagagagatccctgactcaaaaagaaaaaaaacaaacaaacattaaaagaaaaagggagagatcatgagatcatgcttaccccttgccccacctgtcatgtaggaggcacaatgcttagtgggtttctttggattttaaagacaacatgaatcatactttggtgtgttcctctaatctcattactggattattcacctgataagactgacagttttgagtgggcacagagtagaaagaggttctgacaagtccaggctgcatcacaagcagacccaatggagtggaagaatctgtggcagacagagctgctatatggggaccctagcaagacccagtgcaacccgagtaaagctgtgacctcttctactgacaactgtttttcacctgaaaagcagttcctggacttacagggcccagatacagactaggcatctgactctgggtcacaaatgactgtgtgatgtgaactgcacctgatgacctgggcccactcagcagtgttcattgtaaaatgtaaatgtactctagtatcttttcctcccccaggacaaagctcatgactgagatcctataacagaagacagattaacaagagaaaagcatacacatttgtttaacatatattttacatgacatgggaatcttcagaaatgaagatcaaaaaaagcaaacaaaagaaaaaacgggaaaatgtgtattttcaggaacacagaagtataattggaggacaaaaggtctaatctaatgtcaataaactggggggaacttagcaagggctgtttgttcagattcttcaaggcatctctgtgtcttcattcttttcctccaggcacagggcaggacccctctggaataaggatcttataacttattttcagaagaaactcggcccaggttttatggctcctttgggggacaaagagcaaggaggaattctttctagtttctatgacctccttctactgtttcctcaaatgccaaggtaccatattttcaggtggcatttcctgtaccacatcagtgtgtatgagatcaggctctggcagatctggaaatgacacagaaacttcaggaacacatggtggtccaggctcccgtggtacctttcccactgtcttattgttcctctctcaacacatacccatggccttatggggagttccctgcccccactaaatagaggagggaaaggtgtgggtcagctttattaatggatcttcatggtaagatggaaccagccagaaatgatgaggtgttgaactataccccacccaggaatggccagaaagagaggggtgaaagacaatctttccagtgggcttcgggcattaggtctggtttatttgcatgaaagggaagatagtctgagcaatgaccctctaatccatggttagtcattgacagattcatcagattagtcagcaacttgggaaagagtaaactgcatatttggtgacatggagggctgggggagaggtgtgtggactatgcacagaatgtgaggatgtttttataccatgtaaatgtcccccacagcatccactgtgaaggagcctctcattaatccttttggtcattgggctgccctaacaaagtgccacagcctggatggcataaacaatagacatgtattttcttacagatccagaggctggaagtccaagatcagatgccatcagtgctggtttcttctgaagtctctcttccagatttgtagacagttgccctctcttgtccccatgtggcctttcctctgtgtgtgtggagagggagagctctctgatgtttcttccacttcttataaggacagcgatcctatgagattaggcctcaacccttatgatctcaattatctcctgtctccaaatacagtcacatgggggaattagggcttcactatatgaatttgggggccacaattctgtttctaacaataatcatgtggtcaagatgatccaatctgtggatatctatcagtctctttccctcacttcccacgtacttgcttaattggcccatgaacaaagcacacatatggcagggatggacgctatgcatgggctcagtagcacactctcaccaagactgatctggcctctgccagaactcaatgtccaatcggccacagcagatcaacactaagaccctaaaatggcaccgttccttaaagagacccagcaaagacatctgattgcaggtagataactttggatccctttcatcaggtaggaggcagaattagcctcacagagacaaatatttgctccaagtatggatttgcctttcctgtccccagtatgtctgccagcaccaaagttcatggacttaaagaatgtcttgtctatcccaaatggtgtcaaaactcaaacatctccctgcaagggatacacttttcagaggtggcaatgtgacagcgggctcataaccatggaattcactggttttatcacgattcattccctagaaaaatatggattaattgggccaggcgcggtggctcatgcctgtaatcccagcactttgggaggccgaggcgggcagatcacaaggtcaggagtttgagaccagcctggccaatatggtga

SEQ ID NO: 59370 - DNA, 2627 bp, Homo sapiens
tagcatgagatgttaataataggggaaactggatgctgggtatatggcattatctcaatttaaataaactacattaagaaaataatatctatttttaaaggtgtagtgaataaaacaatggccacccatatatttaacacccggtttaataatggtcaatacagttaaagcctccctttattgtcccctccttaccagatatgactgcttttctcaacttgattttcattctcttgtatttcttgacttctttaactacatatgtatgcataactaagcaatatatagcattgttttacaagttttagagttgaatgtatatgaattgtcatactatttatttttctacatctttctctttttgcctcatcacatttctgagttcagtcttcttttattggcgtataatactacatcctaacatcccataaggtatttattctgttattgatggacgtttctaattttttgcttctacccacagcgctgttacgtacatccttgttcacttaccaaagtttctacaagacatataggtaggagcagagtgctggggtttagtaattgaaaacttttactagattttgccacattgctttcccaaagaggttttaacatttgcgcacctactagcaggtgcgtatgtttagacgtgtggaggagaaactatttaaagacatacaaactagataatatacttgcttcattctcgtttgaccttcgtacccaagcaattatttctgcaaacaaacaaataaacaactactaatagcacttcccgcaccgccagccgcagttttccctgcggagacgcggatacaaggcagcttccggcgaaggcggtgacgcaaaggatggcgtaagcacgctcgggacgacggcgtcctcttgatcgcccttgaaggcccctttccgggctgtctgacacgatgcaagtgtcagcttgtgttggccggttgcctttctttcgcaagaggggaaaatatcctcacagactttctgtgttctcagagacgatcttcttccctagaaagaagtcgcttacggttggcgtttccctcaggcagcgccgtgggcagcccacaggcccttgtaaggcgcgcgccgcggccccgcctctttcctttcggccggaaccgccatcttccaggtagggcctacgcgtggctcccgggcgctaggtgttcgacagacttgaaccgcgaccttgtggcctcagaggtcgttcattgggaccgtggggagactctctaacctgtttgaggtccattggcatgggcgggttaaaccatgttctgccagacggggagcagcgtgcgccgggtcgggtctgggccgtgggctgagaaccggactgcgatgttgcggccctgcggggggacatttgcgagaaagacgagactgagtcgcttggggtgaggcgactcgagttaatctttaaaagacttcgttttatgttcccgtggctgcatctccggtactgtgggtggcccctctcacataggctgtgtgggggccgcgtggcctgatgcctttctaactcctttcagtgtggcttttttattccaaatcttgcgatgatgttgggtgaggacttaaggggtagtaggaatgggtttaaagtcaggcgtcggctttaatcttctgtgaagcctacaggtgtgaaaacccgggctctcggtcggagagtgggtcccggagtcgtcctgggtgatgaaccctcactgcccttagttaatgcataagacgatttccgactgtttttaaaattttgaccccacatggtgatcggacgaagggaaagtgttttgaggttgcaacaccaatatttgcaccaagaggagatactgttttgcgaattctagggcagcatgctttgagtgaagggaaacatttagccatagttcatcattttgtctagtttgtggacgtcaacagagtcgagcaaactgcaggttgctctttatggtggatcctagttgccatgattttaatactcttacaaactgtaaagcatcgttttgaaaagtgccttcagttttaagtgtatggggtccatgcttaaaatggattccaaactcagaaagatggatctagtggaggattatgggctctggaatcaggaatgagttaactgattatgccacttggtgattccacaaagtgacttgaatctacacagtatcaccctttgtgtactaacttagcacaagtttttggaactttatacacatctaaaggctttggggattggaacagagtacctggcatttaaagggttcatccattgtaacaatggtttgactttggtgagttaggtgaaacatgtcttcttgctatacaatttttataaaaatggtactttgggagccattcttaaaggattgttggtaaacttagaaaccaaattgtgttagaatattgtcaacacgtcaagcctgactgctgtattttaccttatggtaggagtaatggccaggaatggcatttctgccctataatgactaaagagctatcaaaactattgttttggcctttttgggaaacaaaggaaaggttaatttctaaatgcctgtaggtgaattcttagataatgataaattagctgccggttactactgagcact

SEQ ID NO: 59371 - DNA, 988 bp, Homo sapiens
atctgtcccattgttgcagaaacatccaactgattgcactttttcttcttctctcgtcaactcgtaactcctatctcaagttcacccacaggtctagtgactccggctggctgctgcggggcgaggagactcgcagaatgcctgactagaggccactcgcgcgctctggacggtggccgtatctccagggtctgagccccggagccgcagtcctgccgcagagcgcctggagccgcgagcagctagcagcccggcgaagcgcacagcctcggcgatagtcagctccgcggcctctgctcccgcccctcccggccgctccgggaaggggcggagacgaggaggagctgggacggccgccgcgctcccgggcgcaccaagccctttaaaagccgcgggccttgacagttctgcaggcagccgccgcggtcccggacctctagtcccgcactcccagctggcgagccggctccgggtgcggcgaggcccagccctctcggattgcgcgccggaccccgggacgcgctccatgcggccgctcagcatgtccgggcactttctgctcgcacccatccccgagtcctcctcggactacctactgcccaaggacatcaaactggcggtgctgggcgccggccgcgtgggcaagagcggtgagtgcggcggggacccccgggcggcttcgctccccggctccggccgcgaccactgggggcgctgcggagagagggcgcctcggccgaagcagagggcgcgggtgcaggtagaatcgggctgctttcgcgctgggtgggtcccggtccgtcccggcctgcttccctggcgtttcctggtgcatctactcctgggatctcggcgggattggcgcctgttcggggatggggtgcgggagaggtgtcccgccagtcgtactcgcggccaagcccgcggcaccacggctttgcggagcctctggaagcgagcagtgcccacggttctgcacccttcactc

SEQ ID NO: 59372 - DNA, 825 bp, Homo sapiens
gcctcttcagagctgccgcaggacctgcctcattcagatggaaagcaaatggcactggaagaacgtttcatctcctgcatctgtgggatcagccccagtacaggcaaaaatctcatgctttcataccagcccctctggggctttcatctctgctccaaaaaaatggacagcttcaaaaattcaaaaatcaattggaatggagccagctctgtccagcgggttattaatggccctggagctgactaatcctatttgcacagccttttggtaaacagcttcaacaacaactagggtggaaaagaaaacacacaccccatccaatcaagacaaacttcaagtattgatttcactgcctccttctcccctgctgccacttttgaaacaaatttagagtatgacaccagggtcattgatcattgccaaacccccacgtcaccaggtcctgactatgttctgctggaatagtacattgcttcattctgctggaataacttttccaagatttcctgaggtagggaatataaattgctggatcccggggaagacggcggggaaaagaatatctggttgggctcaggtactccaggtagctcttcctgactgatcacttctcaggtgccgcgtaagcctccacaggagccgtgggtcctccctgagccctgcaaacagatcccattcctgccccagagtctttacggagaggcttccaggtctccattaaacttctttctgctttagcttctgttctgtttgtgggaaagacaaggagagccatgagagctatttcagagggaccttgtctcatcagtctacaccctgggcttg

SEQ ID NO: 59373 - DNA, 790 bp, Homo sapiens
tatttggattatattgaatctatagctcagtttggaaaataagtaatttaacttttctaagtcctttttctcttctgaaaaaaaaaagaaaaaatggtgactgagcaatttttaaactggaaaaaatcactacagaaatgctggatttttattataaaatgagaaggaacacaggcaaggactggggcaaggtcagcctacagtggatttccagaaggttggagtgactctggaatctggttgccctcaggcggcactggcccaggttgctggagcacgggctgttcggctgccgctggttaggagtcaggctggcttctaactcagaggcttgagtccaggaagaagaggccgtggggttttcctgcaccgttgttcccatcccatccccaggggggcgccacattccttctgatgattgtgtgtttgccttcctgcatctttttctttgtagactggaaactgcagagcaatcacattacctttatttttcaaatgtgtccaccgtgtgtcaggcccagctctgggtggattcacctccccacttgttctgtacagaatggcacacttggagagaggaccagatgtgccaatggggaaagggcatcaagacagtccctcgtgaccccccactgtctctagggtcccccttctgttccttggagcacgtcctgagccaacctaaggccatttgtgtgttcatgtgaccagggcataaaggggacacaaccttctttctctggagtcagcctgtttagcaaacgcgagggtctgacacctcctctctcca

SEQ ID NO: 59374 - DNA, 4051 bp, Homo sapiens
cagtttggctatggatacaagattcaacaaaaatcaactgaaagcatttagtgagagtcggttatatgggatttgtgattaagagtattgtatatttaattgtatgtttatttgtaagttgcacatcacacatctgtatcaacatttataataaacatattaaacacgcacacacacagacacactttttacccctgaaagctggctgcaaacatctctactagcacaccactgcatacactggtgtaatgtaattccagacttctaggactggagcctgcaaaacttttttgacagcaccctactttgacaagccagaaacttcatggcctacctccctcattcactttccatatggcgtaggaaaagggatgcccacatacatctggcagaatcacatacatttttcatttagcaatagcggcatgcgtggttcatatttgaacctagtgtgtttatgtgttcaagtgtagttaccagaacagcataggcagatgctagaatataccatcacacactaaccagacaacacacagtgaactaagttggcaataaagacacaaaaccaactgtaagttataattcaaaagcaagaaaagcagcacttataaagcatgacaacctcaagacagcactaatagcaaattgttcctcttccaaactgcaggaattccaactatgctgcatatgtgggccacagagctaagccgtgcacagcagccagatctctgggaaggaactgaagttaaacccttggtaaatgctagttctgtgctagttttagtgtgtgaataataagctgtaccgactcctaatgactcacttcttaggtcacaaatacttaggcttatataaaaatgaaagtgtctggaactgcctgtcattgacacaataggcatgcaaaaagaacctgagtgatctgcttagcaggaggcaggctgggcattgggttagcagtactggctctagagaattctaccgcataactgatatcttacacagaacagctctcttcctggcttgggcttcactaaggccatttctaatcaccaccaagtttgatttcaactttggagtcaatgcaatccttgtgctaaatgagatccttcctggtagttactggcactgtctggcatatttgtggaagcattaactccttgaggtagtcaattagttgctgctggagctaagtccacgacagaatttctgcagtcagctctaggcaggcccacctcctgccacactgctctccaggcacatggaagggtttccctcaccaccagtttactcctggggcctagctcggtctcaggcaggagagcactcaggaagacagccatatatcactccactcgaggctgcctctggtctggaaattgtgggtctgcttcaccgtgtgctgtaaagagcttatatttccgtttatttgtttctccagatcgaaacagcattggcagagggacagagccagcaccgggactgaccaggagctgttcctccttcgcctcattttagagttgatttgggggttaaaggttacgctttttgagagaggtagtaaaacattaattatgggtaaagttctttctctcttgctccatagattaactggctgatcctgtttgctctatgaagtgaaccatatttgctaagggtaatttgaaatcggcagtgcaaatggccccctgacttcctcctgctgttgggcactgtgctgaggtgagtgctgcagggctcatggtcatcaagtccccccagtgggacaaatactgcatatcttgtgagaaccactggattactaagatgttagcagccccatggacttcccggagcctgtccctcgtcaggaaatgtgccatctaacgcatgcacatcagttcacagtgatgcacagtaaaaccgaaagccaagggtctgattaactggcatcactgaaggctctggttttattcccatcctgggtgacctgggagcatccttcagattgtgcatctagggtatgatgggtttatttgttcatcaccgtcttcctcgggtgtagagcagggtctggcatggagcaggcgttccgtatttgctgagcgaacacacagatcgtatgacctgctctacacctgttgcttgctgccttcacgtcacttacggtctcactggggagatgtgagtgttacacgtgagaccatgagacagcaggaaaagactagcagagccaggagctaaaacatgggcaaggccagcaggtcccggcaggaagtctgcgggctctgaggccctcgtgggcacagggctgaggttgggcaggcgcctccgcgtctgctgggcaaagatcaggttggcgccggggtgggaggctggacaggtgtggaggagcaggaaacacattccaggtttccctaaggaaatgggaaaaaccagttgttttaaaaattgaactgaattctttctttttttctttttttttttttttttgagatggagtcttgctctgtcaccaaggctggagtgctgtggtgtgatctcggctcactgcaacctccacccgctggaaaaattgaactgaattctgtcttaaccaacttccagggcatggccaaagtcatctgtagcagagtatccccatggactgggtttgggactgtaacttagtgcctggaaacattggtaccaagctgaggctcttatggttccattgttcgtggtcttgagacttggccttcataaacacagctcagcaaaggcgtcgttattgggcaggccactgcaaacttgcccaaatctgtggaagcacctggtgaatcccgagcactctctaagcagagtgagaagaaccctgaagccacatttttgaagtgtctcttatgagcgttgaagatgggggcatctgctgagcttatgcaggaggctgtttgcttatttgagggctgaagtttgtatgaagactggcggtgcgtgtgtatcaccagtcgtagccgaagcaacttggggaggcttttcacggttgttcaagctgtttataacagctgtgtatccacaggtgacactagtgcttggagcagcagaggagccatgcttgggcagcagctgctttgtaatccatgcactgaaattctgtcccctgtgctgggtggggatgctctctgtggtgtcattgaactcagtgtgtgttgttgctgtttgcaatgtgctcaatggctcagatgcaatgatggatgcttccaggagaggcaacatgagtccttgaatcatacaaattcatattccacagcctcatgaagtcatctctgctgaatcaggtttctccctgacatggagggtgtggccacacagcatctgacagcatggagagagcaatcagactaatttcttattatgttctaacaatataaaaaatccaaactgcataattgaggcaaataataaatctttctggaccatgattacccaatttgactgtttactttaatcaaatcacaaaataatgatcgaatttggatttaattatgtgcctataaagataaccaagaagcaaatgtaagtaactgtcagtcaaagtcttctcagacaatagctcgcattacaacacgccaattacatttttatcaggtagttaagttaattacctgtggtaaatgtgttagtgggacaagtgtagattgctgtaaacatttgctgaccactttaaaatgctgctggaccatatgggaggattcaagggtacaatagcatgcagatgtatttacacctgctaatgccatataaaatccaataaagtgttcatggtgaaacctgtgtgtctttttttccaccacaagatggctctgtggtggtttcttctcagaaaccacatgggtggcaggacaaattcatggttgtgaagtagcacacacactctgggcaatggtgttgtggaaactggacatttggtttgaaccagtgacttcagcctcccttccttgctgagagaaacctctccttcccaccctctcccccaagcacccggtgcctttggcttccctctgtcggaggctaaaacagcatctgggctggccat

SEQ ID NO: 59375 - DNA, 3456 bp, Homo sapiens
caaggacattttttaggcatgtggtcctcataaactaagatactcatattcattcaggcctctcaaaagtgcttctcaggttttgatatgcactgaatcacctggagatttgtttcaagtaggtcatcaaggctctagggcagtgttcccaaacttttcctttttttttttttttttttccaaccacctggtcagtttgccggggtggggaagggtaggatggggagacatctgtatttattcttttagagctcggggtctcactctgggctcaagcgattcgcccgcgtacctgggactacaggtgcgcactactgtgccaggatagtggttcccaaacttttctgcgcattgaaatcacctaggaagtttccaaaaatactgatgcctgtttcctacccccagaaattgtgatttaagtggtccaagtatcctctaggcttcgggattttgtaaagctctccacgtgaatctgagcttaggaacctctgaactggggcttgcagcagaagcacgtaaagcacgcaaagaaacgaaaccacacaggtcacactagtaatgtggcaacaggctaacttaaattatgtaaggctagtgctttccagagtgtactggaggacgggaaacaagccccatttaagcagtgcctcgggatttgagttgcctgtgaaacgcagcagccttctgccgaggacgcagaaacccccgcctctcatccagggctgacagggcacgggccgcgagccgcggcggggcctcctggcgcatgcgcgatctcccggagcatgcgcagcagcggcgccgacgcggggcggtgcctggtgaccgcgcgcgctcccggaagtgtgccggcgtcgcgcgaaggttcagcagggagccgtgggccgggcgcgccggttcccggcacgtgtctcggcacgtggcagcgcgcctggccctgggcttggaggcgccggcgccctggatccgccggccgtggtcgccgagtcggtgtcgtccttgaccatcgccgacgcgttcattgcagccggcgagagctcagctccgaccccgccgcgccccgcgcttcccaggaggttcatctgctccttccctgactgcagcgccaattacagcaaagcctggaagcttgacgcgcacctgtgcaagcacacgggggaggtgaggggggcgaggctgccaaccctgggcctagggatggcgcgtggccccggggtagccactgcagtcgtggccagggccgcaggccccgctgtgcagcgcgttcagctttgacatccaggacttggggaaggagctgaggaagtagacaggaagttgtaggaccttcgttctgcgaccttgatatccatggcaggggctcgggatttactaagcagtcattgatcgtgagtctcggccagccaagtgcctcccgtaatctgcaaataagtgtgaggtttgagggggcccaccgctactagacacctgccaaacactggcccctggagctggtacagaagatgggttacatgtaccaggggtcgtgaaagcagcatgtgctcatttcttcgtaactccacactggagagagcagtgagcaaaacaggcaaacccaaggtttctgctgccatggacctttgttcctgggtcgagccgaccacaggataggtgggaatgacatgcagtgttgtggtcaggaaaggcctctctgtgtgagccgtgtaagaaggaaggatctagccatgcagacatttgtgctaggtagagagaacacaaagggagcctgtgacccttggggtgggaggcaggtgggtgtgtttgggtgcggagatcaccatatgaggtctgagaagtaggcccattaggagtttggattttattttgagggcaggagaatgtcagataccatgatatgacgtggcagcccatgtcacacacaagtgaggaaaacgagggtcatggaggtcaaggaatctgcccagcttcccagtttttggcagagctaggcttcacactgcctcagcttaaagcccttaatttcttaaaccactgggctgcagtccatacctttgccccttgcacctcctctaatttatgggccaccttctccaggtgtcctccggggcctcattccttaacctctccagcactggaaggccgaccgcttcttccttgagaccttctctggttcttttcctcttcctcgtctgcccttttcgttggatcctcttctgccctctgcatgttccaccccgcccagctccctcttgcggtcttacatagccaccggcatgactcataacatcctttatgctttgcccctctgcccttcctcttgcccgttctagcctctaaattctgggctctgtattaccagtagatccacgtaagagcttgcctttccttttagaccggtgtgctgtattttggatactggcgctaccagtttccttaatacaggttgaaaaacttggagtcatctttgttgtcccagatctctcatgcagattaatttgacaaatgtttattgagcctactccacgcctgccgctgtgcaaggttctgtggctccgcccctggtggtatgtagctcactgtgttcctgtttgcttgttttgctcctagtactctcatggaggcctcggtgcctccctcctggacgccttggtagtatgcttttcatagtttgatgcaccaaactggttatttggttatttggggtgtgtgtttggcttttactataggttcaaaatgagtcaccccctcccaactcctgggttacaaaaggtggttgcatttagggtgttgagctgttttctttgcttcgccctggcacctgtgagctttttcaggtgtgacacactttcctatagctgtgcttggcattatcctagcacagaccctgggcttgtctgggatgagacaggcctccctcgttcctctgccctaggcttgcttttttacatgttaaatcatgcggtggtggggatccatgcagacaagccatgctaacagccagggcgtctttaagagggggttgctgtgaaagcctgctgccgggttgggagcaggttaaaaatgctatgcctgcttattttaaatgctgttcatggaacaaaaatctgtgtagtgactttgtgagaagttgtgatgtttatgttgtgtaactttgtgcaggaacactgcgtcttgcagtgggtgcacagctctgagtagaaaccacctcttcataggaagcctgtggccttaacactaggcagtttaagcttttaaataataccagagttactaactagtgcagaagtgacatgctttttcttttttcctgctagagaccatttgtttgtgactatgaagggtgtggcaaggccttcatcagggactaccatctgagccgccacattctgactcacacaggagaaaagccgtttgtgtaagtagagacctgtttttaggcttttgaagtgggttgtg

SEQ ID NO: 59376 - DNA, 2797 bp, Homo sapiens
aatcctatgttagtcttcttccagaactctagtgatgggatcactacccatccacaacctccagtcacctccaagacacctttgacgcctccactttcccagtcaacccaacaccaagcctcatcgacttcatttcctaaaccccactcgaatccatccagtcctctccgtatccactgtcaccaccgtcagtttaaaacatcgaccacctcgtttggattcctgccagtctcctaactcggcttgagccctggcaaccagttcccactgcactgcggtcactacacccaggaccttcctcaccttaaataaaactgccccgagattaaagatctacaccttcgccaggccaaaaggcccttcccacctctccagtttcttctttatgcctaggccacactggccattcggtttttgaaatacagtactctcgtccttggtttaggaaacgccagatccttagcgcattcttctgattaccttccaaactaagccagttctcccatccctcccccaatttactgagcttaacactgaatgcttctacagtccagttgacctttcctttaaaacattcattacaattacagttttgtgatgatcttagcactgctgttctccatcactagaccgtaaactctacgaagcaggaacaaaatggacttattcgttactgtgttgtgcctgacagaatgaatagtagtcgattttcagattcttctctccatcctctacttttctaagacttaggcctttcacaacacgtacttgaaactgagacttctcagtaagagaacttcgtttacttggttcaagtcttaagccacggagcccactaaatgacaaatgagaaaaaaaatcccagtcacttcgcgaccttcccccataaggcctcctcccgcaacagcaggcagcaagaacaacgcatttgtccagcatgtcctgcgcaggcgcccttcgcctggctcgctctgccccacctgtgccaggcagtaagccgcaagagcacttccgggagcccccgacccggttgttggtaagtcggcggcgacgcccacctgcagaacgggaccggcggagcgccagggctagagacgggacgtagcgacgtactgcgtgcgtgcgtgcgcacaaacgagggcgcgcatgtcgggacggaactagaaaagctcagtggggctggcggcaactctaggtctaacatccctcggaagttcgtgcagcggcctcgctgaaaatggctttacagcccggcagaaccctccgactccgcagcaggacctgcggagcctctccgccctcggtaccggcgggacggggtagccctgaccttccgggtgcctcctccacaggggcgccccctaaggccacgccctcccgatgccggtccgcgcaccgctccgcacgcctcatatttagcattacctgtgctggggcaagcgattgacatactgtagcggacgcaagtacagcggatctgcggcgagtccccttcgctctccgtagtgggcggggcttcaccccgcgtcctttaaaggaaaggtgatgggcggagccacgtttttctactgttgggattcagttccgccgacagaaaatgcggagaacgcggaggaagtccctgaggggaaattgctgctcacctggctcccgctgctccgcaggtgcggtgaaggctaatgtcgaatttctgcagcaatcggagcagcccttactccagttacattaacaccaatctcggtctcccactagggctttataaattgctttcataaacgtctttttaatgtaacactgaataaaatgttttataagcgtcttttataaggatcgtaagtgaaagggcgctgtctccgatttgcaggtgagcagacagcttcggagtgagaacggctccccgcgggtccccggtggcgcgcggctcccggaggcaaaacaaagctggggccggggcgtcggagcctccgcgttgtagttgggagaggttcgaacggggccccagctggcgaaagggaaaacggacccggacccggacccgtggagcctgctcgaaagccgggtgctgggggtctgggccccgtgtcccccctctttttcttcttcaataagaaattcctcaagggcagactgcgagtccacagtcgtgaagccacctaatctggcttcatacctggaatgtttggattcctggtacgaagaaaaactaacatttattggctacttgtccactggaaggcgttgtcttatttctcattaactccttgagtcagcattacgtcttttattacagatgacacaactactaaagctttaaatagttctttgggagcaaagacgaaatctccatttcctttttagctgctggtagctcgacgctcactgttaaaatagggaggtaatgaaacaactcttgtgtgagaccgaaagtccaggtgtgcatcttggccatttccaagttaatcaagaagaattaaggattcattttattctatcaaaattatttctcaatgccaagatattttgtgtgacgtagattcggggacagactgagtagcacaatacctgggaaaagttaggtgctcagcaattataattgcccacatttgtgattgcttttgcctatgtgccagacactgttctacgcactgaacatatctcaagttattcaatcttcaggacaaccttatgagccaattattattattacccattttacagatgagggaactgaaacaaatttgcccaaggtcgcacaactagtagcagaatcaagaataaaaaagccaaaaaaccccaa

SEQ ID NO: 59377 - DNA, 1079 bp, Homo sapiens
attgcgccactgcactccagcctggatgacagagggagactccatctcaaaacaaaaaaaaaaaagaatgcaaccctatactatttttaaacacctatgtgagacgtagttacaaggctgtttaaggaggggaggactgacagcaaatagaatgtttgtgataaaataaatttgtgctctcacagtttcccatctttgaggcaaatggaattaaaggcaaattattccatttttgaaagttcctcaaatgtggaatttcagatgtttactgtatagggaagtagactttcaactgtacattggagtcattgttttgctgctttttcaccttgcaagttgctaggttctgctgcaaagatttttaaagcctgctttgttagcagcctaggacacatccatgaccttaccaaagtgaaagtgaaagctcttagtttttctttttttttttttttgcaacagtaaatctactaattttacagtcagttgaacagcaatagattaatttgtgtaaagtctgcattcacaaagaaaatctaaacttcagtggcttgaatgcctgaaactgcagtgtgatatttgaagggtagacactcttacaaacttgcccaagaaggatgcaggcagttcactgtcacctgcttctcggcacaggtgctgacccctcggtcgactcggggcctcctgatggggtagcaggaaggctgggcctttgtgtgctacagagaacgcttttccaataactgggctagttctctccagcagccacaggaaacagaagaaagaagaggttaagggccgccacgagggtcagaatgggttaaatttagttaacatcagaggttatagcttttaacaagagcttcaagaaaacttattcgaagatgcaatttgtttcttctttgtccactgttatttttttccccctattgatagtgacagcttaacaaagtttttatatgctaaaggttttcatcccttagagaataaagaactgtgttcctaaaaagagatgcaggtggaaaacttcataaagcttccatgatttccaaattgggagctttgaaataggctccctgctt

SEQ ID NO: 59378 - DNA, 1126 bp, Homo sapiens
cagaaaccctcttggcaaggcctgaatgccctacctcagctccatcagcattaccaccacctgaccttgtcctgagccataagccctggtgttagctgtggatacaggagcaagggcttggggcaggggtgaaattctccctagaactacaactggaatgacacccagcaggagaaagcctcaatatgactgtgtaagatcacggtggttcaggaatcccttttttcctacactgtcctgagcaggctgagctcagaaccacgaacatctgcacacacgggcagctggccccgtcaccggcctccaggggcagtgcccccgccattattagtcattactagagcaaacattagtacaagtacacacacaattgcagaatcattgctctgattggaaacactggtgtggagtcttgcaagcattcactgggtgagacggaaactgtgaacttgtttttctaggctcagacacttctttcagatccagggctgacaaagaaaggcccattacgtggggcacctcccccaggacttcctcttcaaatatcagctagatcaggttccttctatgcaaatcatttgcgcatttatcctgcttttcattaacataatatctcctgagccatcaccctagcctctctcctttaaacatttcacagtcaaacggagctcaacagaaagaggggtgataccagcgtctttgttaaggcggtagtctttattcgtgtctcctctgcctgctatatattactgtatgccatagccacatccaaaatgctttattttttagtgaagaacaaaataaagctgagatgatctactcctggattcagaagccccaaaatctcaaggaaattgtgaattctacctgtatgcacacagtacacgatactatgcttgttatctatgagacgggccagatactaggtagaacctaagaataaattgtgcagcggatgcgttctttgcaaaagacacttattactgaggacacatctcctctggatggagaagttattctgtgtaggagggggctgaagtgggggtttctacaccaccctttctgggagagcatgcttcattgctttgccaggtagggtcaggtggatggggtgggcaccccacag

SEQ ID NO: 59379 - DNA, 1263 bp, Homo sapiens
aggaatacaaattataattaacagaggcccagactggttaagtaacttagctaagagagtgattaattcatttttccctactctgtcctcctaaaatgattttttttcatctttatcaatataggctgacctggagcataccactcccaatcacctttccatacattatttagatgtcacttactccttgcaaacagtgtacattctccatctgcatagcattctatatagaatgtcaacatttactttttaagaactggttcttccttcgtaaaccaggtattaagaatttacaatcaaccacctcctctctgctggtgatgatgtcttgccatgacaccttctcttttcttctcccagtgcccgggctttgataagacgctgtacactgagcgaggacttttgctcagtggtagaggctggcagaggggttaaagtccagggatctagagccagatagtcctgggtttgaatgccagccaaccactttcagctatttcattgtgggcaagtttcttaacctttccaagcctcagttatcttgtttgttttaaaacagggataataaagaaacttacctcataggattgttaaaaagattacataatgcatgcacagcacttagcaccgcgccaggcatcctgtaagctattgtacattcattcatcaaatatttatggagatcttactttatgcaaggtattgttatgactgctagggatataacaataaatgcaacaagatccctcccttatggagcttgcataaatacgatctcaggtagagatgagtgctatggagaaaaatgaagcagagtcatctaatgacaggactggacctgagtaggctgtgtgggaaacttactcagcgctcaatgtcacatcacaacgtgatgaatgaaatatgtccaatgaaataactcaggttcagtttctgtcatcagattaatgaaacatagctataagtgacaagacagtaaaggtaacatttcagtctagatcgggattggcaaattttttccgtaaggggtcagatggtaaatattttaggcttcaagacccatacagtctctgtcatgatgacatcaactccgctggtgtagtgtgggagccagagagtacataaaccagtaagtgtagctgcactgcaatgaaactttattttcaaaaagataatgggctggatttagtgctgacccctgacccctggtctagatcatgtccaatgtcatcaacatgaatcacatcattaattagaacaaga

SEQ ID NO: 59380 - DNA, 722 bp, Homo sapiens
atttagcaactttctctcaaatcaaacttttacactttggatctcaaactcaagaaacacacatctaaatatttaaacttgtgggtcttggttaacaatggcagcaaatatcacccaaagagcattacgccaatcctgaaaatcttttggttgctgtttccatggaaacagcctagatgaagaaaacctaagagtaaagaataatacattttttaaaaccactttatcttgttttcccctatcagttagccagcatggcacataactaacaggcacatcagttatgtaccagaaaattcatgactcattcaacaaatatgtgttggttatctgctgcatgccaggcactgcaccagaggatagggttactctggagagctcacagagctcagtctagcacaaagacatttactagccaatgacacaaaatgatcgagaaatttcacattcttttgtcatattatgtttttgaaattttacatgtcaaaaacagtgtacattttatacttacatcacatttcagttgggactagccacatttcaaacccaatgccaacaaaaggctagtgtcttgtactggacaacatgggtacagatattccaatggggacgaaaagcatgcatatcaggagtaagtcgtttcctcaaagaacataaaatctaaccagtagattagccactatacatgcaaaatatatatggtacagaaacataaccgtaga

SEQ ID NO: 59381 - DNA, 955 bp, Homo sapiens
acacaaatctaaatattaattatcacatttatctgcaaagttatttcctatcataaaaatgggagaaatgtaaattattgctacatttaagaatctttttgcaagacacattgtttacacatattctattcaagcttattgaaatgtccagtgttataatacatttctaagaatcaatttaacattcagctgtaatcacaccagcacagaaatagacaaatttgtgttttcttgtatttacttcctctactgctgcttaagggaaatctactatggcattcctggtttctaaaaacgcaccacaacgtcaactgatgagtcatgggtcacactccaagttcttatgtaccaaagaaatcagggcactaaagtcttacacaccaattttaaagactgcctaataagctcggttacaaaccaagagttctttataaggtaacacagatgacagtttttaaacaaggcgtgaaaaacttcaaaataaaactgcaaattccacaaagagtgatagaattatttactctttttcagactcctaataactggtagggttttgtttttcttaattgagaacatacaaacataaagcactgttgaaatactgacaggtacaaactcaagtttgtaaaaactcaacaaactcctagcttcctgaaagtccaaattatctgagaaataattttctatatgccttgttttgactcttaattatttccagttttcactatttaaccatttcactgactgggaaacctccaggagagggtacaaaagggcaggaagcaaagatgacaccatttgattcctttgggcattattagttaaatttccgtggtgaagagacaaatagctaaaatgaaacctggagatcagctgtagattctagtaaccagcataacagaccattgagatttaatcacatcatctaattttcctcctagcatccatcattatc

SEQ ID NO: 59382 - DNA, 5857 bp, Homo sapiens
ggtcttgaactcctgacctcgtgatcgcccgcctcagcctcccaaagtgctagaattataagcgtgagtcactgcacctggccaaaaaattcctcttaataacttcttagaaggctaatacacaaaatagccaccttttctgaatccaaccaaacaaaataacttattaaccacagattttcctactgctttgtattttctgaggaaaagaaacaggtgccaggaaagctaaaagggatgtcttttgtaagactctcaggccctcctacagggtcaatttaggtaggcctgccccagtcttctaattctacatgcaagatacatatgtattactttttcaaacaacactgcttcctaaatagaggagaacctatgaaatgagacctgtgattcttttttaaaaacctagatgcatttggatagaggaaggtgggcctgtgaactctagccctgtaagcaggaaggaaagttaaatagttcctcataatacaatttaaagatatcgggtggcaattgtaaaggaaagaaagaagaggggaagaaggccaaagagccaaccagattacaagagcctggagtcctcctttctttgatggtggccaaaatatattttaaggatagaaatgcctaatattcaatgtcaacacttctgatatcgctccactgtgaaccccttcaccctccccttcctctaaatctctcataaagcttaccatactcataaagcctttctgtgaactctttttcttttctattctttcctagctcctgtgagacacaactatccaacaactgcatcatggatctctcaaccatccatttagcacctccttagattagtccaaaactgaacttatcttcccttctacacctctaccatcaattgtttttaactgctccttctcatatcctccaacattccactagctcattaatgtcatcatctaaaggaacaactaatatttactgagcacttggaatgtgctaggtaccctgccaaaggcattacatgcataattcctcaaaccctactcaacaggtacgacaatcatttcccaaatgttaggaaatcaaagttctgtcaggatagttattctaagggtaagtaatagaattagaatttgacccgttttaatttcacagccagcttacccagtacatgtcaatcaatgcctgaagtcaaacaacccaggattcatccttccctccttaagcctacccagtcacttacctagtccagcctcctagtcatacctcttaaacaccacgtcatttctccttccactgccagcacactagcatttactaagtccttactatctggcaatcactattctaagtaatagacatgttttttcaagttctatcccccaaactctgagatgacaaacctaaggaacaaagaggtttcagtgtatgacagagcctgattccaccccaggtaatctgaatagagaatccctgagcacttaacccctccattagaacagcctccaacttagtctccatatcgcccatctggaagcccaccatcctccagacgctgcagatatctttctggaatgcttacccgttatcatgacattctcctgcttaaaattagcagctcagtatcactgactggataaagtccaaatttcttaatctggtataaaaaatccttcatttttctgttcaagtcaattcagtaaatattttagtgcccaatgtaagcaagaaaaggtgccaagtgttctgaaatgaataatacatgtccctgactactacctccacctcggacactgggtccttcggccagacaagcccatatgcaaagctcgtaatacaacagcccaaagacacatacatttatttttaagtggcctgcgtgctacgtgcctacaatgtacgaaatcccaaaccaatctgaagactaagtgcctacgtaacacctattcttacaggtctccaggcagaaatgctccctaagttcaaattacttcagggtaactagtgggataaaggcatggatcagtttccaaatgagaaaactgggcaagaagcaacccccgccatcaatggctggcatgcagtaggtactttatcagtggctaaatgaataaataatgaaaaaatttcaaagttgatgagagaaacaagatatatggagaatgtaacacacaagtgggccgaattaaaagtgatgttattctactttggttctcatttggcctacttttaccccatgggaaaactcacatgtgggactcggacaagctaaaaagccaaaactttgttattcatggctcaacaaagctttgacaagccaaaaaggataccagattcccgcttccttctttacctgccaaagtccattttctaaagaggtgtgggggtgggaatcaaatctagcaaagtaaataaaattgatctactgagatccaacttcattagtgctgcatcgaagtacatgcaaaagaaatatcaaaacctgtcctgggaagaaggccaatttacaagtaagtactattgccgcaagaatgtgaaattcttaaaggcagttccaataagctggagctcacaagtgttcctcctcctgcaccgccaccgcttttcactcaactttgtttctgatttctgtgattttaaaaagcataatatacacagcaaagcccatgcataagtgtactttagctcctggtacaaacgaacgtctggattcataaacttaacgtaaactgaaatactaaaagaaacactacatgagtcaaaagtccttgtttaaaacgtggcatacagctttgaaaagcgagtgatgtatttcctgaatgatgctttgtgtgcaactgcttccaaatcaagattcatatttttaaattaccccctggaagatgtcaaatctctctcccaccctctccagcctaaagagaaaggtgagaattcacaggcaacaggctggggcggagggaatgatctctccccatccctttccagagaacaaaacccgataaaggcagctagtgccactctcattgccgacaccacacacacacagaggaaatttaaacactcaccccacctctcccttcccttaagaagcaaacgacgccaagctctgcaccacggtggccggaaccagcaaacgctaacagccggaggccgcccgcctcccgggcgcctgcaggcggcgggcaccgggcgccgactctccctcctggaccagacccacacccgagtccacgccagccccgcagcccgggcgagcgaagacagccgcgaaggaccaaggctccggggcgagctgtggcgccgctccggccgcctcccggggcgcggcgctgacccacacccagctgacgcccgcacctgaggcggctgcccgcagccagcgagagggcgcgcagcgaggcgggcagggcaaagttactcactgggaaagcgcggctgcccgggccgcgcacgggctcctggcgccgctgctcggcaccagctcccgctctccgcggcccgctgagggagcggagagcctgcccggctccgctccgccaggaatcgccgccgccgccgccgccgccgcggatttcctggcaaaaagcaaactccggccaagacttcacttctcaaccgcccctgctgccttcccgggggcagcgccaaggccgagcggcccaacccgcacccgggccaatcggaggtagcacagggcgggaggtgggcggaccagagggcggctccacctatccgagagctcgggaggcgggccagaagggacccgtcactcccgggttagagtgagaccactccgccctcgccgcccgcctcccccactcgccccgggctgtccccgccgcccgcctgattcccctgcggaagccccgctggctaggtgtctgcgcgcacccccggccgccgccaagagtggcacagctggggaaggagtgaacatccagaggaatcgcggggcggggtggggggaggccaggagaacaggtggcgcagggaagcagaaacgtagttgcgctggacagctggagtcgggcagggtcggggccagcggcgaggggacaagaagggccgattcgagaggaagcgcacctgagggagcacagcgaaggccgggacgcagggagctggatggagagcgagcctgggcggcgaaaggttgccgaggcgggggctgggcgcctgggaacaaaggtgagggcgggttccgcaggtgaggaggtttgaggagccactggggagaaagggaaaaggaagtctacagccggagaggacgcgctctgggggtagaaggaatcctaggacggaaaggataaggtgggaaacagttttctcccaaactctcactcccccaaaagagacatttctttcttgccctattttgacccagttgaaaatgcaactgcaagctccccggtgaaacaaataccgccttcaaccttcgtattctgtggtgactcatctcgcacgtgacccccctccctcttcaaggtgtgttgaccgactacagtttaagcctgtcgtcccacaaaaggcccgggagggccggggtcccaggaagggccatcctgggtcaacaccgccccagttgggaagtcgggccgctttcggacttgccactgggaagggaagtgatttgggggcggcaggtaaggccgcgccccttcgccatcacctggggaaaggtaccagagttgagccggggcgcccgcaggcctgtctgggcctcggggtaaggcggcgctggccccgccccctgcccctcccgccgcgagtggcctcgcgtggtcgcccaggtgagccgcggggccgcgagccaccgctcaccccgcgtcggggcgggggctgggggtggagcctcatgccccgccccgcggctgggccctgccgcgccgctgcggctcctcctccctccttccgtcctccgcgccttccgtcggtcggtccttgcttcctgcttcgcctccgcgcctcgcgctatgggacagagcccccgatccgccagcaccacctgaggatccagaaaccgccccagcgatggaagaggatcaggagctggagaggtaacggccgaggaggaggcgggcggagcgggccgcgcccaaggggagcgggtggccgaggggcacgctgcctggcctggcagccggggcctgactcggggcgcagagaagaagcatggagagagaagtggggaggagacatgaatgtgtttcagttgagaggctgagaggtacactagctatcaaggagggaagacaagttgggagaccagagttaagtatccgaactgcccacccccgttacaacagcagtgtgtaaaaatcacgccccgggcctctgctcctgaggacggtactcgtgcctctgtccctgtaactacggctcaccttctttctatgtgcagactgctcctaaagccactctgtgcgctgagctctttttctccctgctgcttgactcctgaaccttccattctcctagtttccttctcttgcaaaatggaagccgtagttgggcctgcacattgatcatctgtatcctctatttttatactagagcaatcgggatttctatgcctttcaaccctctcttcatcctctagcaggaccagtcctattctaatcctatcccttgcttgtgactctaccaaaaaatatttttgcaaacacttaagtttgtgtttttctaagaaaactccccttgtggccagtgtggatggtcaaatggagcagggaaaaactggaggcaataaattaaatatttattgatagagtttgtggaggcaggaaaatgagaggcgaataattctgtgtagctggagtagattaataataatgtgttgcaatgtgatatagtaaatgagaaaaagcta

SEQ ID NO: 59383 - DNA, 1072 bp, Homo sapiens
gaagaagaaatatatttaaatatttttagcttattttataacttttacatgtttggaaatattgtatggggacttcatgtgcccctcagtgggcctataagaaaggagcagttacatctattgatgtggagcaaacagggagatcgggaaaggcttggtggagaggtaatgtgagagctgagtgtctggtgtaaaggttgtgagtggagagtgatttggacagagggcataacctgggcaaagctcccccgtgcatgtaacagcaaatgtagtgttggcagttggtgggagtgtctaagccatgttatgtctctggactgtcagagccaaggccctagatgtggttatcccacagagcatctgtgtggcaaggccttgcagagacaggccagtggccccactgtgacatctcaccctctctgtagtggcaccctccactccaacactaggcgctgtcatctcaaaacacaattagcatctccactaagaaatggagttcagaggatgttaacaggtatatatatacaatgaagcaaaagaataatattggaagctaaacaaaggccatttatctctgatcagtagctcactgaagggaaaagtgttttccagatctgaaaccttgctgagattttcagacagccctagtagatcaaagtcctcaatcctgacaggaaatattccagctctgcctcattctgtgtccttggtcagtgtctgtggtttcccagtctgccctaatgtttgatgacactaaggatacgtgttgctgttgtgcccctgtttgtttggccactacaggggattgctccctcaggaacctgtagctcttcatttttttcattacatttatttacccagtgacatactatatttttttcttttatcttcttctcacctcctttgtctttcctcttcttccatctcacccatcatcatctattctgtctacagatgcagtatttttatttttaaaaccttgcatttgtatcatgtcccacacatacccagaacccatttattccccagatcttaacttaaccatgtatgtgccaggcatagagaaaactag

SEQ ID NO: 59384 - DNA, 841 bp, Homo sapiens
gtcttcaacgtaccctgttggctggcgatcctgtgtcactctcagataggtcctattcaggaaatattttagaagcaaaaggtagcaggtctaaatctgtggaaagttagatactactacctctatccttcagcaagagagacaaaaaagatgaaaagcttataattctagccccagtgagtcttcatctctccagtggcagattcttgagcagtcagcctttcccatggcatgtggaacccttccatcacagcctctgagcccacaggtttcaaagtgaaggaaattgctttccttttaaagtttaacctggatagaatgccagatctcaaatctgacattgtgtcatgggtactttccaaagcagatttaaccagtctcatgatatttagggtttatatccatttatgttgttagcaccttaaatctggctcttaccatgtgagctagcataactttctagaaacaaaaataaactaaatataaaaataactagccagggtgagaaagtcgccccccaggtcagagctaagacaggaaatcagctgccctgtcctgtggcctcctccagtccttcccccagcacaccttttgggcatagacagtgacagacagtgcagacacagcaggcagccgtggcctatgatcttatgctcaatttcagggctcagatggttaccctaaagctgatacgagaaaagccaggaatggtggagtgtctaatgccagtttatcatgtcatctcaaatactgtggaagatcgggggaggcgggaaatggcagtaagaaataatttcctaatgtgatgaatgagaagagtgaacttttctaaagagttaat

SEQ ID NO: 59385 - DNA, 710 bp, Homo sapiens
aaaaagtctcccttggtttcataatgcagaatgttgaaagtaaggctctccctatgacgcccttagccccacctccacccccaaataacgggaaatacgggccgtcttctctgaaggaagatttttgggtttatccgaagaaggcaggtgtaaaaagcgactgggaaacagcaatatgcccttctgcctctcctctgagcagagcgaaaggctgctggccacgggaatgtgggtctcggtgatccccgcagcccgcaggccccacggacccaggagaggccggcgcggagcctggggcggactaacagcagagggcgccatagagcaggccgcgcccggcaggtgcggcccccgcgcccgggtgaagtccgctggccgggagcagttccagccagaccctgcagctctcagactggggcggccctctcccttgccctcctctgctcggctgtgatttcgctgtgcttctgtgggagaaaatgctataagtgactctatggacatccgtaaaaataaatgccagctactatgactattcaggtgtacaggtgacatgcgatattcagaaagaagctaagagtctggggtaagggtgggaagggggatgtggttcgttgttttttgtttttctgcttggcttgtggagtccgttcagtgtgtagtgctttttgtttgtttggttggtttttttaatgtcttaggttaaattt

SEQ ID NO: 59386 - DNA, 958 bp, Homo sapiens
cagatgatcccatttataactgaccgctcagcctttcgactgtaatcactggtacttaatttgtgatccatcccccttgagtcttctgctgacctgtgaaaaaagtgcaacaagatcctcttatagttgtcagaaacaagaaaaaagtagaaatcaagagtgaatttaagtttactcataaggggttatattaggaagctaaaaacctttggcagcagccaccaataagatgacctcataatgtgcgacaatctttggactctcaactgtgaatatttgttcaaatgaatagtttgatatgatatctccagttgagctgaagacaggtaacaaatgtcaaatatggtagtttttctccaactatttaatgactaaacaattaatactacttttgaatttaaaaaggaaattttgtgtttggattgttgaggctattttatcagcagcctcctaattagtcctctggtctggagtctggtctccctaatgtccacggggaataccagggctaagatattctcactacacgttcctccagcaccacacgccacaaatacgctttggtaacgtctgtcttcttagctagactaaaaatttgctcatggcagggactattgccttatcttcagagttctaacgttaatgctagattcaattggagttcaaaaagtgtgtgtttggtaaattaaaaaaactcaaaaaattgggtgaaatgtaatactagagaacgctagtaggtggcgccatgttttgtttatgagctgaagaaagaaaaatctccagatagttgagaaaagaaactcaagacacaggggtatttagatcacaaaaccaaccttactaaatgaaatacttacctaggtacctggaaaaagatgtactgcccaaggagcccctgtgagaaaatctagctgctcatgagaagttcctttttgacaagtacttttctgaaagtttt

SEQ ID NO: 59387 - DNA, 2503 bp, Homo sapiens
ggatggagaagttacttttttcttttcacatttctgcgttgtttaaccttcttggaaggaattgtttgtccaagcccttagctcaaaccaaactagactttgctatgggaaaatgagtaggctcgaattcgcacacacatcagggaacagtgaccttgatactgttacgtattctttgtacaatattggtttgttgccttttttaaagtatctgttgaacactggtaaattttgttccccgcctctctggtaatcgctcgacctgttctttccagcaggtatttctcctgcagaacctgctggctggcccccgcccttatctctggactgctttggaaccagcgcggcttctgtgtggcagctactgagtgcacgctcgacctttgccaccctccgcgctgatggaaactggaggaggatgtggtttagacacaatgtggcccaagcgtccttgtttcctgaatataccccaaagtacaagtcccatctccagttttgaaagaattccccgaggaaaggggcttgagtggagtgggtggaggtgagaggggaagatgaggtgttggagaagcccggcgcacggggcctctattaatattaacttttattaagagttggcctttccccggggcttcacaaagcaggaagtcaagggcagtggaacagggaagggaactggcaggaagagaagaccttgagtaaattatttagctgtgacacgagattaagagtgaccccaccctcctccctgccccacacaccataaagtgggcccaggttggggagcagcgctccagctgccactaatcatggaagcccagaggcgaaatcagcttcccggggacccagaaaattgctggagtctggcgaggggcaaatcaggaagtgtctttgtcggagatgggacggaacccggcttcggggcgcaaccgggctctgggggagaccgcgtttgtccaggtggcaggccgcgccttctgatggctgtgaagagaaggagcgggggttttaagagccacagcgccaccgagagagtggaaaggagtagattagctcgcgcctgctatgcgaggcgactccccccgagacccacccgcagcccagcgcccttggccaggaggcccggaaagccaccgaggcggccgaaaggggccgcggggcacccctcagcccctcctgcggcggctccggctgcccctgctcagcctcccgctccccgcccggagtcccagctctcagatcggccgcagagctgggaacagaggccgcggggtccaggccgttccgcccgctcagccggagcagcagcgccgcctgccgggggcctcgcgcaggcgagacaggccagacgccggaggccgcgggcggctgcagctttgacgggccgaacacaccagcgctcccgttccgccttttgaaaatcaaatcccttgggcctggtgccaccatcgctcagcccaggtcttcgacgacgggtcgaaggccagtgctccaggccttcttcaccgagtggcttcggcgcttgcggcccaggttccccgcacctccgcgccgtagttgcgcgcaccttttgaaaagcttggcgtcttcaggtataaggacaaaaacaaccgcggacatcacaccattccaaagaagaaaaagaaagtgcccggaatctcagggcgcgacttccggggcgacgggcggcggcggagaggcgctccccgggcttcctacccggcaggaggccgcggcgccgggacctcgcctgccctcaccgcgcgccacctctcgggagacgccgcgaatctctccagggaatcccgggcagcggcgcagacccagcaaggaccggcagcaggccgagaccggccgtcttgggcgagagcagcgggacacgagcccccgggcgcccgctgggagcgcggggaggctctgggctcagggaagctgcgctccgagtggccttggaggacggtcaaggagcccgggccccgcggcggccgggagtggacgcgactggtccgcgccggccgcaggggaaggggcgggtcggcgctgcctgagctctatctgctctaatggctggggtagatccgcggagatacttgaataccaggccgaacgcttccccaaggcgtgttgtagacaacgggcccatttgagcatgtgcaaagaacaaatttcatccatttttctgtctaaaacattcaaagactcaaatctagacaatagtttctctgaggtagaagtgttgggggtggggggtgggtgggaataaactaaaagttggggtaatgagcttgtttcttgtctattttgtctgactatagatttacaaaaggagcaccctgctttactcagtaataccaggccctcctagaaacttacccaccagcttcacatggcatgatcatttgatgaatcgctttttagtttcccattccggacaaatatccacccaagagaaccaatcataacactggatgtattaacgcatgtcaagactctcacttctctg

SEQ ID NO: 59388 - DNA, 1318 bp, Homo sapiens
cacttttttaaacctctgttccacaatattgacaggttttattctcatatttatcctaaatttctagtattaccatatattaatactgtgcccacattactgtaatttttagaaagaaaacatcgtgtgcaaaatgacccttttagaatggtatagtccctctcccccaattttgtttttcttaaacattcaacaaacccaagaatctctcctgcctgacttagttttaacttagtttcaacaggcccacgaccaacgtagaaaaatcttgcagcgcccgggtttgggctcagccggagtcggcagaggcgcttgcacctcccaactgggtgaaaactggaacctttccgggttcacgagcccaagccccatctcttcccagagcgcgcgcgccctctggcgcctgaaccggcgactggacgcggtggaggcgtgggattcggaggccgggaccccaagctctgcgctggaggcgtcaggagccgcgaggtcatccggtctcaacctcaggcgcccctgtgcaggcctccctacactcctcaagctgcgctccctactcgtgccacatcccttgttccgtaggtattgcttcgggggtgacacagttggcgttagaagcgcggtggcctcacttgccggagagggtcttggttttgcgcctttttccgtggcccgggaggcttgccaggcgctcgcagcagcgagccgggtgcttgcatctcagagagcagccgagctcccttccctggccccgtacccgcgtgcaaggggaccgagccccgggaaggggaagaacttgtaatcgcttgcagcgggacaatgtcgacttttgaacctctaaccactaagcaaacaacccatgtgctcttgctccactgtccaaacagggtttattgacaggcgtttcacggcaacgcatagcaaccccggcggctagggggcgggcctgtgggcgcggccggggcgcggggagacctgcggggcaccggggctcagaccggccctgacccaggacccctgacccaggacccctcgcccagcggacccggacacggcttcctcctctgcccggcaccccccgaccccacgccccgcactcctccctctggcttcgaggccaggcgcccgcgggccgggccaccggagcccctttcccaatcctggagctgtatacgccacccggaagggccgcggaattggagaggtgctgcagagggtctatacctcttgctgtttcccggctctgctcatcttccccaactgcccttaaggcgcctccgtgggcgcgctgattaggctctcggatgttggtgggaag

SEQ ID NO: 59389 - DNA, 731 bp, Homo sapiens
cctcacaagggatcccaggcctttatgctactacaattagccaagagccaaggtaacacgctaggtgactccaacagtgaacaggggagaaaaggcagactttaagggatacaagttaaaataaacaagaaaacatatataagcacatcttttcaaatcttttttttggtttgttttttctttaaaaggagcataccgacttaaattccagaaattccattcctttggcaacttgatatgcaaagcaaagaagatcttcaaatgtaagcacattcaagtcctcctcttcttccagccttttttggttttcatattcaatttcatctgtaaaatagagccagtcttcacttttgccaaaactctaagaagttgccttattaaatctctatgggaaggttattcaagccagagttaggtgaggtgctaagacatgaagctatcgcattatcttcccggcagcattagagatgacctgtttatgctgcctatgaagggtcactggagacttgttttggttagagataaactttggaactgctttgatgaccgatgacctcctgattgattagtcaggagttttagatacttctcttttgcactaggtagggctgtcacagtgggaaaggaattaatattaattgtctatcccttttttttttgagaaggagtctcgctctgtcgcccaggctggagtgcagtgacacgatcttggcctgctgcaactggattct

SEQ ID NO: 59390 - DNA, 558 bp, Homo sapiens
acttaagagaagaatgtatttgaccttaaaaacaaatacaaataactggtacaagttgatcacagagacgttctccaagaccctatcaaggggcccgataccccttgcaggccatttgggtactgtttactacatagttcctggaaagcgcgtgccttctctacacctaagggacaacaggacagccacaagaatgtaaaagaaaggctgcgttaagagggcatttaattgacctatgtcctttgccccatctcatttcggcaagaggacaaggacagcagggggcagcaatcagcatagagctatacagggttaggacattacccacacatcttggctaagacatttttctggatgagatcgatgttcctcacagacagatcaatgtcttactaaataatctgtagatagcacataacattgcaattctgcttatcatattgtgaaacaaaatagataagatcaaatgttcttttcccaagcatttcccaagaataaatttcctttaaaaaaatttttttttaaagaatttcttggctggatgctgtggctcatgcc

SEQ ID NO: 59391 - DNA, 2337 bp, Homo sapiens
cgatctgccgtttgtgaacctcttttacagagaaaaactagaatgttacttttcctttcatagcaattctttaaaatttctgaaagcctttaaaagggtattagcgcaaacatcagagatcgctgaggttaaaactatcttttaaaaatgaatttcaccgtctcaaaaaaaataaaaatgaatttcaaatcaaggctaggctgattggagaaaagcaacctagtatatttataaaggtcttccagtgctgtctaagcagtgttgtcccaggtggcatcctatttttcataatttaccgaaggcccttggtaatataaatacagagaataacaggtgctgcactgagcagggggtctgtctaaatcaacctttttggctccattttttgacaaagggccaagaggttagcgtaatcggtccagtagttctcattaccttcgaggggaaggggaaagaggagaggggcgaagaaaggaaacggggagaggaagtgtggcaaatagaagatattcttcaggtagagccagggctcgggccgcgtccccaggtggcccctccaaacgaccgtttaccttgtcaattttctcttttcaatgaaaaaaaaaaaaaagacatctggctttttaagtaagagaatatacaaataaggaaggtatcaggtctcgtgagaattcggcgccagatccgcgtccggaaccccaccgagagccgccggtccaaccgccgatagctcgcggatgcccccgggggcccgacgccggccaggcttcccctagcgctcccgctacccataagccctcgcgtctcagcgcgcacgcgcagcggcgacggccgtctcaggaagaggaaaatggaataaacaactcggaggaaccagagcgcgagagagcgagtggaggcagaatttaaaaataaaccggcccctccgccttccccacccgcttgccgctgccgctccctcttcccctgcccgcgccctcgaagtccccgtctgggcccgcgcgctcaccccgtcgtcccgcgcggcccctttaagaaaagagaacgagagagtgagtgagagaatcccaactctccccctaccctccctccttctaccccctcctccctcccctctcccctcccccttctccccgggcggctccggctcccgcagcgggacagacccacccgcccaggcttttatccggcaccggcagcgtcttcctttcctcccccgtctatggtggtggcggcggcggctcctcgggcggcggcggaagacgaggctgcggcgttgccatgaacagtggcggcggcctcccgcccccctcggccgccgcctccccttcctcctcctcgctggcggcggcggtggcggtggtggccccgccgggggtcgggggtgtccccggcggggcggcggtaggagtgaagctgaagtactgccgctactacgctaaggataagacttgcttctacggggaggagtgtcagttcctgcatgaggaccctgccgccggggctgccccgggcctcggcctccatagcaacagcgtccccctggctctggctggtgcacccgtggccggctttccgccgggagccgtcgcgggcgggggagctgggccgccccccgggcccaagaagccggacctgggggacccggggaccggagccgcagccggcggaggaggcagtagcgggggactcgatggaccgcggctggcaagtgagtgtttttcgggcggggcgggccgcggcggcggagggcaggcctgggccggatgaggccctgctgccgacgggagctgagcacggcccgcgggctccccccctcacctcccaaggcggtctgagaggcctaggccgggcctgagccctccttccttcttcctgcttcccctccccactgccttcggcaagtcggagagcgcggggaggttgggttcccgggaacgtgggtgggaggactggggtgatgtgaagggggggcggggaggaagggggatgggctgtggcgtgcggagtgtgagaaagggggtgtcgtttccggggggtgtggaaaggggctgggtttgcaggcacatgtgttttgcgtgtccttgtggagtggcgtctgcagagtgttgaggttccctagtggggaggggtgtgtttgtgtgtgtgtgtgtgtgtgtgtgtgtgtgtgtgtgtagggggcgggaggtgaggggcgggcttaaggcttcgtggagtaggttgaaagaacggaaaaagtttgtagaaggcttgcgggagaaaggttttgcaggcaggaaatgctttctaaggattaggagggagcggactgtcgcgttcaaagtgtgctcaggttta

SEQ ID NO: 59392 - DNA, 1240 bp, Homo sapiens
aacttccattttccctttttttatcttgtctgtttcaaaatgtctgagcttaatgtttgactgaaatatttttattaacctgtatttttagtttaatctatatttaatcttttattatgtggctctattgtatgttttcgggggcggggagcttacacaacagaaatttattgtctcaggtttggaggctgaaagtctaagatcaaggtgttggctggattgccttcttctgagggctgtggaggataatctgttccatgtctttccccttagcttttggtttgctgacaatcttggacatttcttggcttgtagaaacatcttcccaatcactcctgtcatctttacttgatgttttccctttgtgtgcatctgtgttcaaatttcccttttttataatgtcaccagtcatactggattaggactgccctaatgacctcatctttaattatatctgcagtgactctatattcaaatgaggtcacattccaaggtacaggggattaagacttcagcataggaatgtggtgggggttgggagggacagttgaacttctaacagttgtgtggttaaacaaatgagataataacctgaaatgccttatggagcttcggagttaggtagagaattgagaatttgaacttgttctcttcatgactgtctccacagaagctttatcataagggcaggaagcacagtgtttatagtcattaattgctgttttctgacagtttgactttttccttggtttgtgaactttcgagggagttccagctcttcaaacagacagtatgtcttgtccacctgctttggatttgagtcttgttttacagacagcttctgtgggttttataacagatgtgtaaaatattccagcctacctttttatcatttattttaaaattaaaaagagaaaaacctacatggaaagtttttcctaacacactctattacaaagagcatattagtgtttcatcagaaaaagcaggctactttttgcaaataaataagtagatttggcacctaatatcaactgggcatgccagtatactgaattaacacaacaaccttggaaagtagatgctactgttttagtgttacagaggaagaaactgagacttaagtatactgttgaaggttagtagttggcaactggctgaaacagacctcatggtcagtatttgttaaaagtctatgctcattccacaatccgataaagaaaaggatggtgtgagtatc

SEQ ID NO: 59393 - DNA, 430 bp, Homo sapiens
cataccgacctcatgtggtattatctttgctacactttgcagtttcgtgtgaaacttatttttggtctttaacaaagcatgtccatgtttatcttaaatgctgaaaaagtttaatagtttaaaacaaaactttttaaaataattaaatatacaatgaatgctgaaacataaaagtcagacagaatgttaccttaacaagaaagggcttcctaaagatcaaaagattgctgtttgttttatttgctaaagacaaatagcaagtactttcactttaggggattcagattgctattgaaggagcctaggcatttttgttgccccacccccacctagataaaggcttcctctacctcattcatagagtgggaaacttgcttattgatactaaaaacattgactgcgcatttagaaaaatggaatgctgacattt

SEQ ID NO: 59394 - DNA, 2352 bp, Homo sapiens
taggccttctttccagttccgtttttgcacaagcagatctgcacgtaatgttgttttaaatatcctactaccccaaactagttcgctcttatcttttagctgtcagtccaaagattccctaagatgtctccatcctgtggcagcagactataaggccgttttattacattatatttgaacaatacagaatagtgtaatgagcatggattctagactcataaatatgtccttaggcatatttatttaagcccttcatgtctcggtttcttcacctgtaaattgtacttgtaaggttattgaaaagattaaaagagataaaggatgtaagcacttagaactgtgttgataacgcaattcaaagggcccaacatatgtcggtcatgatcacatttacttaatttgtagtcactatcgtcccctctctcccctctagcctccggagtacccctgctcctctagcccagaggccacaccggcctggtccttttttgtattcctagcctcagcacagggttcggaacataccaggccttcaatattatgttttttaaaaatgacaaaagccttgtgtcccaattttgctttattagccgaacgatctcaagcaaatcactcaaaccacctacgcctcgtttacccttctgtgaaatgtaatagctacctcagagaggttttgtgttaaataaggcgatgtacctacaaaagcacactgcacatcttaaaatgccgtacaaaccgtagatgtttattaataaaccggagtccgtgtcttccctcccctcaggcacgtctcgtcccgacccctccctcctcccagcccacacccttactgcgcccttggccctgggtcccttgggattgcaagcgtgggagcctcggccccgcgcagctccctccggcgtcccgcgccctccttccttcctcgccaggacggacgcacttccggcggatgtgggggccagccctcggaaacggaagtgagcggcggggtcgactgacggtaacggggcagagaggctgttcgcagagctgcggaagatggtgagtgggtacccgggcggctggagttccacgcgggctcgggaccgtggctcggcagaaacaggcagtcgcctcccaacccgtccccggtggcggcggcggcggcagcgtggggctgaggccggcctcaggcgccataatctgtcgagtcacggggtttgggtgggtcgtgactgtcgccggggcccggcactagtcccactagcagtgcttcggcttcatcctgctcctcttagctcggtttgcgcccttccatcccttagaccccagcaggcccagacctcctccccttacttggcgcagaagtggaaaaggcagccgtgaaagtgcaacgttctgtggggtggcgctggcgaccctttccttgacgggtaacctctgggagcccagagctctcagactcctcatctcccccagcccccgcccttgtaactgcctagtaaacagcccacaactataggtcgcatttgtgtaacgcagctttgctctacaaacttttttgagagcttgtagtgtgctagatgttagaggggaaaaaatcagacagttgctattccctgtttgccagtattgttagtatatctcctccctccttctcctccccaccactttctctttctttttaacttagaagttgtggtatttgagaagaacactgagtcaccattgccacagactctgatatcggtactgctggtaggccatccatccaaatctagaaagtttctattggtaaatactgctaatcgttatctaaaaagttttttaggcactctcaaatgtaactagtagttaggttttcgtagatttgcctttctcggctccttcctttattagaaacagcaagtactaatcttgatattttacagaaggaaattgggaaaaatgacaataacagaatccagaagtcagaattcaccttttctttgtgcgttgaaaccttgttactttacaataaagcagtccagaaggaggagaatgttcatatagggaagtaatagaagatacatttggaaagcaacaatcacacatctctgctgaaggtccccaacttctggtggttcaacaatcttctgactttatgatggtgtgaaatccatacacagtcagtagaggccatatttgagtaccaatacagccattctgtttttcactttcagtacagtattcaataaattacatgagatacccagtactttttaataaagtaggctttgtattagatgattttggccgactgtaggctagtgtaagtgttctgagcacatttaaggtaggctaggctaaggcctgatgtttagtaggttaggt

SEQ ID NO: 59395 - DNA, 2187 bp, Homo sapiens
tgacactgtggtgaaattttccgagagaaaggagaagagctagtgtcacagagcaggagggtgttttaagaagaagaggcagatttgaaaggtgtcaggaaacttcaaatgaggtgagttcccagtaaaggccattaggtttgggatttaggactttgatggccgccctagagagaccaatggatgatgagttcacggtcctctttaactcaaagcccggtatacattcccattttattaaatactatggatattgtaatttcttacctcctggaatgcaaaaattgggctgcttttgtttttttcacactcagaaatattgctatcagatgaaaaagtgtagttgccagtttcttcccatattctccgataaacatattgcgttgtcagtggaccggtcaaagtcatagcaaatgcactaaggaaaatggcaggttctacaaataaaatcttcatattgcctgggtaggtagctgtattctataaaaagtgaaaacggagaaagatcatctgtctcatcccagaggctagatattcaaagatgggtaagtttgagcaattttgtggagtaaatgtttaaacaagcaaactagagaacagaaaaggcagtaagcactttctcagagaataacttttactttggagtagagtactctgtaacaacctgaggctgccatgctttccatttttatgagtaggacattgtaggactcaagccgcctttgagtctttgaaatcataaactgtcacccatcttggttagccaatgatcacagtacagttcccacactgtatattgccaactgatttttcgtaagttcaacaatgaggttccttttgggaagcgacagttgcacaattgttattgttattttgctgcgtattaaaaacggacagggagggggcgttttaaaaagcagctcccaatcgaaagggccttatttttaactcaccccacgattacagtcttcctgccaggctgggtacaggtcgggccgtgccaggggctgtcgcctcggatgccctgcgctcgtgcgcgcccgggttcaagggcagcctctggactggggcaacagaggacgcgccggggacagtaacctcggactacgcggccggcgctggggtggggagagtactttcccgtcgaactcgaccaaattacgcttgtcggggagtctcaagcgtattgtaaagcaaacctcggcaagcgcacttccgcgtcccgagtgacacctgcagggttctccggcagccctcggcttccccgcggccctgcggacctcggcctcagcgcggcgcggcggggcgcggagcagctgctccttctgcgcagtggacaatcggccaatcggcgcctccgtcggtcggtcagcggccctgccagcgctaggcgatgactcggccgcagccagctgagcatcgctgtccgccgaggaggcggggtcggctgccgcggcgctgtcactgttctacccggctctcctgcgattgggcccagcggtcggtgccccagcggcgattggtccacccggacgtcactctcccctggagagtggctagtggatcgtgcacccaccctcggaggcccggagtggatcccgcgcgaccgagcagccactcagcaccgctgttgagtggtgggccgcgccgcaggctcaacagctctggagttgcaaagcatttctgaatccgaatatcctttctcatagaaacacataaaacaacagttggaaaagtaacatgtttgggctgtagcccccagcaggatcccggtcggcccgcagaagaggggaatgggcgcaggtggagggcataggaaagagagtgctcaatgcagagttagcggagggttggaatgtggtcgctggcttttcctggggaggggaggggggacttgggcaaatcgttaaattttcatgaacctccatgtctttatctgccacgtggggatgataagtcttacagggttgtctaattaaacactcagcatgtatacacaacacagcccctggacataggaggagttgtcagtgctctccaacacacccaccaggaacaacttgtagtaaaagaattgagctactacttcttgaagccaggagaaatgcatgcatgaggaaccgtgggggcatctcagtaagaaggtgttagaatttactatgggcttgcgttatgtgattttgggaa

SEQ ID NO: 59396 - DNA, 346 bp, Homo sapiens
tggagtttttaaggagcagtttaaggaggcagttaagaagcttaagaagttttgagaaagaggagctcagattgctgctcatgctgcaggaaggtaaactgccctctcttatctttccactcctacagctgctcccatgttactcagtttttaccactggtgtcctcgaggtcactgcactgcccagggttatgaaaacaggacagtcaccagctcagggagggagaactgcgcccttggttatctttaaattaggggagatggaatttgtctggtcagcattcattccaattctgatcaattatggttcagtttatttcattctccctgcagccctgatgataga

SEQ ID NO: 59397 - DNA, 653 bp, Homo sapiens
cctcggcctcccaaagttctgggattacaggcatgagccaccgcacctggccagtgctcccattttatagagaaacacagtccctacaggcagcgtcctgtttttgggaaaagctctgggggacaaagccataaacatttccctttcctttttcttcccatatttctggtcctccctgctgctttatttcacaagaaggattagttaaattttgccaggaatgaaaggtcatcttgtgccagtggcttggcatggagaacaccagggactgtgggcatttagtgagtcaaagatcaaggccaaagccatgaagtcccatgtagagagattgctaccaaatctcaaaatctgccagcactgagctttcatctttgcataagatcattttctttattactggatgttcataaagagtcacagggctgtggacaaaatagtctcaagtattttctcttcctaaaattcaaatataccaccctctctgtgacctcgagacccataggcatctggcaacttcaggatccagttgcaagttcttaaactggaaacagcatggcaggtttctgttgtccttgtctctgtagtcattggccactcactgccagttccatctggccctttccccatgtgcacatatacctactaaaacatta

SEQ ID NO: 59398 - DNA, 1245 bp, Homo sapiens
ttcagtgagtgacgatggtgccactgcactccagcccctgggccacagagagagagagaccctatctgaaaaaagaaagaaaaaagaaaaagagaaaggaaggaagggaggaaggaaggaagggaggaagggagggaggaaggaaggaaggaaggaaaagaaagaaagagaaagaaagagagaaagaaagaaagaaggaaagaaggaaagaaagaaagaaaatattgatggccagagagagagagagaccctatctaaaaaaagaaagaaaaaagaaaaaggaagaaagagaaaaaaaggaagaaagagagaaaaagaaaggaaagaaaggaaagaaagaaagagaaagaaagaaggaaagaggaaggaaagaaggaaaggaaagacgaaagaaagaaatgctgaatgttacagatattgacacagacattcctacattggaatgcatattccctctgggcttttacagttagggaagtgctgagtcactgcctggcgtactcacatgcctgtagtttataagccagccacatgctggcagaaacagtgtagaaccagtgggccatgtggacctcttgccacccacaagcaaggcgggtgacagggcagagagctccttagcagttactagcaatggctcgcttggttgaaataattttttgaagcttttgacaaataatataaagattactaagaaagcctggcggtttgcagcaaaaattatttgcttgggcaaactttagtcaggctctggaatcttctcctagggccttctatgcacttccttgtaaaatctagttttagcaaagaaccctgctaagtcagttaagcaagaatcccccacctacaatatctgatcaccttcatgtctgattgggttcttctccctccaccagcccccaggcgatgtctggtttcctggcctgtcttcaacaagaatcctgttgttggtttagctaaagtctttctcagtcctgaagttccctcttagtgattttccctccaccgacccccaccctgctccttggctatacattcctacttgctcatgctgtattcagagttgagcccaatttctgtctcccactgcaaaatctaattgcttggtggtccctatacctatagcgatggtcctgaagaaagttggccacaccatgctttaacaagtatcactgggtcatttttttctgtaacagtgactacatcacatggcctctgacagtcgccggactccttagaagggag

SEQ ID NO: 59399 - DNA, 1782 bp, Homo sapiens
ctaaatagtgcaaagaccagcaacatcgtttcatctttataatggtaaatgtttattccattgctgtttgaatcagtctgcagaagtcctctggtttcgcttgccttttcaaacctccaggtgcaccgcgtgagggagtctgagcatttcaggtaggactggaaaaaggtctttgagaaatcattaattaatctatttaccttaccataagagcagtcaaggctcgctggaacccctcggacagtggggaggcacatttggtgctcattaaacatagaaataagcttgcttctagaaagaaacgcctgccttttgcgcaaatcttttcagagactggctttgggctcctatgaatcaggcaccctagcgtcctccaaagttcttcccgatgctgaaccccaatgcctcctgctgcgcctaattcgaagcggctccctcttctgttctgagcggaaaacagcggaacccattcctggaggcctgccctggaacggccaactcattcttactcctttctcctggggtccgatgctagggcaccacggtgaccagccgcgcagcgggcagcggcccgcgccgcgcccaccgcctgcggaggctgggtctgggtctgggtctggggctggagctggggctggggctgaggcgggagctggggcgggggcgggggctggggctggggctggggctggggctggggctggggctggggcgggcaggcgcgcgcgcaggagcgggcgcaggggccgtcggcagagggcgctacggctcccggctgcggagctgcgacgcggggcgcggggcgcggagcgcgggccgggaggaggcgcctgggtctcggcgagtgcgtctccgggcggccgggagggggtgcgcgcatcagctgccccgcgccgcctaccgctcgggcccgctcgccgcccggccactgtcaccgcggacggcacctcgcgggcgaggcgcgccggctgcgtggcgcgctgcgaaggttgggctgggcggccgccggccccgcggcttctctttgtccaggcgaggcggctggaggagcagccgcggccgcggcggagccgggagcgcctgggcgtcgtgcgggcggctccggtccccggctgcgccccggccctcgagcgggggcggcggcctgggcggtgcctgcgccgaggtgagtgcgggggcgcggagcggagcgcagccgcggcgcgggcgtgggcgggcagaggtgatagcgagcgccggcggctccaggtgcgggggcgcccctcgcgctccacctgcgccgccgccgccggctctcagggcaagtttatctccccccttctgcggaaacccttgaccgcttagcggagtacagacctgtcggtaaatagaaaactcgagctggagaggaggaggaagcagcgtggcggaacccggcccgagatgagcgtctccgtgagggcagtggtggcctcttggacattacatctttcttggctctttttgacccaggtgagcgaatcctctgctgcgcggtccggtggggtcggctggctctgctgccgccctctggacccgccggagacaggtgagcggagttggggagcgcgcagccgggctcggggcagcgccgggctggttcggcttctcgtctccagagcgctgatgcttcctgcccacatcacctgctctggcttagggactgcagctcttttggcaccttcgcttgctgccaggttcaacacccactgctttagaggcgttggtaggttagttaaggcgagttctcccctacccaccccc

SEQ ID NO: 59400 - DNA, 558 bp, Homo sapiens
ttattgggataaagggactggtggattcagtaaatgtcacatgggcaattctcttaagatgatagaaaccatataagcttctttgttgtcctttattaaatgatgcataagactgtgcaatttaccctgcaccaatctcttgtatgtactgttatgtagctgctgtagccaggaattaaacctgtgatctgtttgatatgaggccagattttattaaactaggtcatcagggcacacacgggggatgggtcatgctggcactgtgtcgtctttggaaattaactgggtaagcatgccagtaggcaaacgaaatggctttgcttctgctattagaagcagatagcggggagctgtgtaatatttgaacatgcatccagttaatgaggaattacaatgagaatcctggaaaagttcctgtgatactcatattatgtcaaaggagttcatcatatttgaaattatcacaggaattacagaataattcaaaatgaataggtaattattcaaatgttgtatgagttattgcttcaatgtgcacattcttaatacaatgtggat

SEQ ID NO: 59401 - DNA, 1993 bp, Homo sapiens
gtatgttgaaataacattggggtcaatgaaatgtattattaaaattaatctcacttgtttgatttgaatttttttgttgtggctactagaaaatctaaaatttcatggatggctttcattgtatttctgttgactagcatttttctggagcagcagcaccatctgaaaatgtgttagaaatgcagattcttgggtcccaccccaggcccttggaaccagaaactctggggatggagccagcaatctgtgttttaacatctgctcaagtttgagagccagggctctagagcactctgtctcaatcagtttaacaactactaacactaaactaacaggctgctttatcactgctgccaagcaccttgacctttaatcacagcttaccgcaggaaggactgactgcaggtgcagattagcacaggcactcgcagctgtttgggcgctctcttgctttgctctggattctctgtctctccactctctgcttatgtggcttctcacccactttgtttctttacctgtttccagctctatgttcagtgggcttgacaacagattccactttcccttctcctcgctccctggggacaaagggagtccttcttgtcagtttctgctacttgatgcacttgagttaaggacgatagctgagcactcatgtgaactttgctgaattctgcatcgtgtcttcattttgctcaggcaggaagggaggggaagatgtgaagaattaggggaagggtgctaaattatcattggttttggaaatctcatgcagttgagaatctcttgggaaaaatgagactctaaatttgttcctctctccttctacccctcctttcctttcttccttctgggggaaattttggtttcttcctagtatccataaaaggggtctttatgagacttctgcatctggttttgatgagaccagatgtgtttgagcaaatcattcaccttctcagtgcttctacctcctggtccttaaggtagaattaacggcttccagtgctgcatcacagcttgcagcgcactctctgtcatggagtgaaggtcagcgtgcctacgatagagttgtttggaagccccgttctggcactgacatctgatggagctgtatttgggctcttttcgaacccctatgacgtaatttgtcaaatgaggataaaggagatcctcaatactttctataaaaccatctgggccaaatatgtgcatgaatttgcgcttcaggttttaagattgtgcctgtgttgtatataacatgacattcctaaggaagggctagggcagcgccctgtatcagatacgttatttctgaagtgaaacatgggcattcacactaaatgagatttctcaaaaagactataaatagcttcatacatttgggttgtgttttcctgtcaaatgagttataaaaacaacctcacagcttttagatcttttggcattcaggataatggataagggattgtggactttggtagtgcctgtgttgtctgaaataacagaataaacccagattagcaaatgtgtggcttttattttggaatggctgaggaatgccccagattaggagaagattccaaagagctgattcatgtgtcaaccttttggagttggtatttttgccaacaacctgagagaactatatgtcagtgtccagaaatatatatggacattcccagatatcggagcttaatgttaagattttaacattaagacagaaaaagattatccaattcagacatatctttgaatctggctgtatatgcatgctacacaaagttttatttctttgaaagcagaacacaaggtagttgcaaaaatccaccacagtgtcataggttcattgtgatgactaaatgggatactgtactgaaagcagttagcacagagtttggtctttaaaaattcaataagtgataatttggtatattgttataataactggggatgttaataagtagcattgtctgttgtcattccagtt

SEQ ID NO: 59402 - DNA, 1020 bp, Homo sapiens
accacattgatatttctattttaatatttaaaacacaaacctttgggtgggtgcagtggctcactcctgtaatcctagcattttgggaggccgagaatagcggaccacttgaggtcaggagtttgagaccaccctggccaacatggtgaaaccttgtctctactaaaaatacaaaaattagctgggcatggtggtgcatttctgtaatccctgctactcaggaggctgaggcaggagaatcgcttacacctgggagtggaggagccaagatcatgccattgttctccagtctgggcaacagagtgagagtcgtctcaaaacaaacacacacacacacacgcatacacacacacacttgaaaaacatatttttctgaatgatgtattgagagccctggataaactgggagtctccttaaagggtaaaacccaagtgttctcagaacatggtggtagtgtccccgggcctcccgcctcattccctaggctgccatccccctgcagatgcccactgccctcattccagggggtattgtccagccaggtaagtggactctgtgactctagttgcttaggtcaacacaccattgccaaatatttgactatgtcatccttttacagaaatgacaaataattctctcccttgttaataaggtaaacacattagcttggcattcaggatttttctcagtctaccctgaacttcttacccgaagcctcattattccattggtaatgaggaatggaacagatattcaggaaacttctattttaggactaggcatgttgttgcctgtttgaattagagggtatttaagatgaagaagacttggttctttccattacaggtcatagattagtggaggaggatactgatattctaatttaatgtaaatcattacaatatagtgtaatttaattgaatgtaaattattacaatatagtataatacttaaagaagtagagatatgaaaaaataaaacacataaaatctggttgccattaagttggctactatttt

SEQ ID NO: 59403 - DNA, 2424 bp, Homo sapiens
gtatagccagttctgctctcttttggttactgtttgcatagaacatatttttctatcctttcactttcaacctatttgtgtccttggatttaaagtgagtctcttgtaggcagcgtatagttggatcatgtttttgttttttatccattctgtcagtctcttttgattggagagtttaatccattgaatttaaagtaattactgataaggaaggactgagttctgccattttgttatttgttttctatatgccttataggatttctgtccttcacttcttgcattactatcttctttgtgtttaggtgattttttttttagtaaaacattttaatttccttctcatttccttttgtgtattttctatagtaattttgagattaccattgagattacatttaacatcctaaagttataacactctaatttaaatttatgctagttaaacttcaataacatacaaaatctctgctcctttaacagctttgtttctaccactttctgttgttgatgttacaaaattacgtctttatttgttgtgtgtccaaaaacataaactaataattttgtaatgtattagtctcttaaatatgtaggaaaaaatgagttaccaaccaaagttatgataaaactagcttttagactaataattgcttttaaaaaattgtattagactcttaagtcccatagaaaacaaaaagttgagttatgcatcatggttacagtaatactagcttttataattgcccatgttactacctttactgagatctttatttcttcatatggcttcaagttactgtctaatgtcctttcgtttcaacctgccctccttttagcatttctcgcagggcatgtctgttgattaggaacaaactccctcaacttttatttgggaatatcttaatttctcctcacttttaaaggacagtttcgccagatatagaattgtgatattgtgaaatatatatgtggtcattgtccctgtttactggcatatagctcctaaaatccttggaatctcctgagcgataagagggtcttttgcatgttaatgagatgacaagtggctggtggccccttagatagcttcaggatggtgtctggtcacccgaatgaccaaggcttcatcaggaggttgggactttcagtcctaccctgcagcctctgggcaggggagaagggccaaaggttgagtttgatcaccagtgactaatgattaaatcagtcatgtttgtataatgaaatctccataaaagtccaaaaggactggtctcagggagtttctggatagctgaacacatggagatgcctagaggttggctggcccaaagaggacatggaagttctgtaccccttctcccttacctcaccctatacatctcttccatctggctattcatatgtattttttgtactgagttttgtgagccactctaatttgttaattaatctagcaaattaatcaaaacccaaggaggatatcatgaaccctcagtcagaagtatatgtgacaacctagtacttggcaactggcatctgatatgggaaccagtcttatgggactaagtaagcctcagcctgtgggatgtgatgctatttccaggtagacagtatcagaatggaattgaaggatacccatttagtgtctgctgaagaattgattggttgctggtagagagaaatctccccacaatttggtagtcagagatgaaatattctgtgttgtgtagactgtgagtggttaagcagaggaaaaacattttgtttttttctgctgcatccttataagaactcttggttgacagttttttttcttttatcacattgactatatcaacccactgccttctggcctccaatgtttctgatgtgaaatctgctgataatcttattgaggatccctagtatgtaaccatttatgtcttactgctttcaaaattatctctgtcttttaacagtttgattatactgtttcttggtgtgggcctctttgagttcatcctgcttccgtgctcatcctatctccctgcttcttggatgtttatattcatgtttttcaccaaatggggatttttggccattatttcttcatatattctctctacctttttccctcttcctctgggactaccgcagtgtattgctggttgacctgatggtgtcccacaagtcccttagagctctgtttacttttcttcagtcttcttcttctttcttctttcttctttgttctttcttcttctttcttctttctccttcccctccttcttccttctttcttctttcttcttttttttgagacaagtctcaccctgtcgcccaggctggagtacagtggcgtgatcttggctcactgcaacctctgcctcccaggttcaagcgattctcctgtctcagcctcccaggtagctgggattacag

SEQ ID NO: 59404 - DNA, 1369 bp, Homo sapiens
accactcatccttttgtgccatgattcctcattctcgtgctcttagacttatggttggtgaagattctgggtctctgagacagcaggcacatgggcaaagaggaataactatcctccccttcctctggcgctctctccatcagccagtgtttccaggattggttttcctctattaatcatcacctgccctgtagtcagcaacgtttttgcaaacctttaatcgaaacacgaggttgtcttcagtcgtggttgtcagcgttgagaattttcttctttctctgagttttcacggatgagaaactgcgctgagggctgctacagatgtcatttaaaatttttaacttttcttcatcaacatagagagatttatttatgaatataatgcataaaatctctcctgattttgtcaaaataagcagtttcttaaatgaggagaatatcttcatttaggaataaatgaagaaaaacgtttaaatttagagtcttcagacttttaggaataagccatgaagaggtggatacccacaggatgggaaggtgatcttctcacaggggtgacctgctcctgaagaatctcagggctaagcaacacagtattttctggcactgcttacaaacagttgtggccaatgcaagcatgactttgctgtgaggttggcttctctgcagtctcacgtcctgtcagacagcatgccagcgtagtgaaggagaacagaaatcagtgctaaatgccgcagttatttctggaatgtcttcctgttgtaggaaaccaagttgctagtgtttggtggtgttctgaacaaattgttcctcattctaagtgatggtatgagggcttactggcctggaagatgatcacccaaaggtatttgttcattcgtttgtttttttcacctctgcctgccccagttctctggtaggtgattaggaaacaccaatcactagaaaatcacctcttcctctgttgagtttggtgactagtcattagccgtattttcagggagctcatctggtggacattcaagaaggcttccctcatgggaagtaggcatatgcaaatgactgtgtgtctgcaggtgatacttgaaaacacagcaaagtatatgctcatgctcatcccatgcctggcattctatttctagattactggtgtacctgctgacaaaaatcggtgtcgatgtgcactagatattaggaggggtaaagaaatagccttaggggtcccctgaccccttccaccatcagagacaaatttacattcttattctgaactaaatttgtcattagcataaaatatattaatgtttggttatttgaggaaattgaaagatagaaaacttaattacattaataccaaactttacccact

SEQ ID NO: 59405 - DNA, 1807 bp, Homo sapiens
aaaatcccagataaattataattcgaattaaatacaattagggcattcggccagaggccgacatacacaattctactagtcgaatgtaagtaagataaaaggcacattctttagggagatacacctgggattgaaatctcaaccatctggtaactatgtctggactaaaacccaacacatgagggcatggcggtgatgacgtgagtattgggaaatgtaggttatttatttatttttttcctgaaggcacatgtctgactatcctagtcacacaagtcaaacacaactgctgtctggttcccccatcccctggaaagggtcaggagctgaaccagcaggctgttgtagtactacagtgcagctgccgctctgtgtacgcgcaggttttagaatgactctgacctgcccatgcctgggaagttttctactacgcagaaaggaacaccctgagaatacggtgtcttgctaaaggcggaagaacttcctctcattccaaaccatgtggagggcttgaggaacccggcctttccaggccacactgggtcacaaggaagcccacctaggggagacttcctcaaagcaatcttggggacccagacgagaggtgcaggcggcgcgtcccgggttctagggacaagcggagagccaggcgccctaggtcagggcggccaccgggcggggatggcagcagagtccctgggccggccacctgccgcgggaccaccctccgggcggccgggcagagtccccacccacggctgatgacacatccccggacctcgtggcggggcggggtgctctgcaccgcgccatgtaagggaaggtctcctcgccgccggcgggctccgtgtgcctcccagtctggcccccgtgcccgccgcccgcctacgcaccccgaccaccccgtgcgtagcggcgcgcgggtccccggacaggcgcgcggagcgggcatcgccagatcgcccacgcttactcactcggtgttgcatcatgcaccacgccgcggtttcagggagccaaaatggactccgtggaggcgacagtcgcatgggcaccagccccgctcgcccactccggggcccgcccggccctggtcctggcccttcccagaggatggcagcgttcccggcgcgggggccctcgccactcccgcgccgccctgccgcggccccacgcggcgccagggccccctccgtgatgacccgggcccaaggagctgccccctgcgttggcggggccgggcactcaccaagccggcggcggcggggctccggcaggatcgcgaacagacagactgtcggacgcgctcaaggaccaacggacgctcggccggcgagaccgggcggggcggggcggggcgggggcgcggcgcgcggggagaggagtggaggctgcggttagcgggagcccgcggccgcgtgcgcgcctgccaggtagttgacccgctgctcacacctgcctgcgcggactgaatgggcgccgagggctggcgggttccggcgccaggtttcatcagcagtgcgcccggcccccgcccctcgcgctccgcgccccgcgccccacgcccgcccccggaccaggcagccccggcccgctcggccgcgtcaccgccgggcaccaatgggagcgcggcgcggcggcggctgccagcccagaggctgcggccggggaccgacgcgcccttggtgggcggggcggctgagtcttcgcgcgcccagcgccccaacctggggttcccgcggcgggcgggcgggctgcgcctccgctcgccttctcagtagctccgtaggcgtgtggccgtttctcc

SEQ ID NO: 59406 - DNA, 466 bp, Homo sapiens
tgggaaaagggatctgtaaaccagaggtctcctccgctccaggagctctcagtcttctgaaggtgggtacacgtcacccccaggccaggaaaaattgccaacaccataatgtgtccacatggcattccagggatgcgacctcactgcccatgacttggcctctcagaaattatccagagccctgtcagcctgaaagggacaaagagtattgccctgaacactccctggtatgttgaacacttccttgtatgatcaccaggacaagcttcagacacaggaggaatacaaggagtattctagaggaggctacaccccattctctcccatcaaaaaccttctcaggttaaggcagagaagtagtagctccgtctcacgaactgtcttccaaaatgcagtgttgagagaattgaccaatgtgtgaggctagaaagggcaaccaacccattgtctccggagcaatggcagg

SEQ ID NO: 59407 - DNA, 978 bp, Homo sapiens
acctttaatcaaaggatctcaaagcaccacagaatcaaggccttaacatccagtctcaaacagataaactgttatattttataattgcagatattaataaaaccctgctcctacttcccagtcctctgatcctaacatcagcctccaaaccctctctctgacttggaaacagtatttcccaaatcatctcaatctgtgactgatgccacgcacattccagcttttcttcactggacctaaaggaagtagcggcactgttttaataacacatctatttcattccaacgtctgtgagagaatagacggtacttaaggttaacctattttgcactgtgcttgatgatataaaatggaggctttcgagagagcaaatctttgctcgaggcgatgaacccacagatcactcatcaaacaagggaaatagcatttcccagctctgtctagagaccgctcccggcaacttcaagagcagtatggaggaaagcttgtccagccgtacttaaccaggcaggaggctatttcatgtgtgcacaccagaagagaagcgaaaactaaaaggacaacgcacgagttttaggactcaggaaggagactgtaaagctgttatgtggccacccccagagacagaacactgtgtttcctttgcattcaatgggaaattaaacaagagcaaaattcctttaaaccaaggtcaaaataagccatttagaatcatttaatttttgttataaaatctgtatatgaggtttgctcctctagaaacatctggcgttttaaaatttaatcatcagcaggctgggcgcagtggctcacgcctgtaatcccagcactttgggaggccaagatgggtggatcatctgaggtcaggagtttgagaccagcctggccaacatggtgaaaccctgtctccacaaaaaaaaaaaaaaaaaaaaaaaaaaattagccaggtgtggtggtgggcacctgtaatcccagtta

SEQ ID NO: 59408 - DNA, 2618 bp, Homo sapiens
caagagcaaaactccgtctcaaaaaataaaaattaaattaaaattaaattaaaattaaaaaataaaataaaatttaatcatcagcaaagttcaatttgtttccactgaatacacaaacactcaaatgttaacatatgtgagcacaactacgttaacttcaattctttcataaacaggattattcctcttcctggtaattaaatgcattatgtttgtccttaggactgcaaaatgtaacttcacactcacacaagcccagccccagcactgtaaggttacacggttactgttagtcaaccgactcacaaccttaccctttataaacaaaacaaagaaaggcgtcaataaacaacagtactttttgtttcaagttctcaacactcagtgatcgaggctcaatactatgtttccttagctttatgtctaatatggaatctactattaataaatatctggcattaaaaagccctggaatattcattgtaagtaccaatacagggtcagcctacgtttctgaaaatcccaaaatatctttatatttctgttgccatccgtattcagacatttcaaaaacctcacagcaaattctaacatactttttcttgaagagatgtgcatccctgttcttgaaaaatatcaagttcgtccctactgcaatgacgatctcgtctgtgtcataaagcaagattcccgtttccctacctattctctcgtagggacacccgtcctcagctctgcccactgtccctgacgttttcagaaacgttaaaatactagtgttcggaggcttctagcgaagagggagatgttttgtcccctcaagctaccatgatacatttccctacttctccactatcttcaatgctttagaaaacacgaccaaatgagagaacccatattaaaagcagtacttcctaaaagggggaaaccagaagctccaacttctccaaatcgctcagcacagtggcttttcgacagtccccagcaaatcttcgccccacgcctgccgtctttccgattaaataagattggaaaccacaattaaatcagtgtcataacttatccgtcacttaccatatccgccgggacattactggacatcttgccgtttgatatacacccagatgtttacgaaaaaaacaaacaaagaaaaaagagcagaagtcttcacgttacagaaataaaccacgattttgactggttcgtgatgtgctttctcccccaaaaataaagttattttggagccaaagtgccggtcaggccgaggttctggttcgaagaggaacaatccccaggagctgtgtggccggagcaggaggaaactcccgggacagcagaggcagcccccgtcgtcgtcgtcgtcgtcaacagcagcagcagccccaggaccggccgcgccaggtggaccgagccgagtgacacacggacatggagaggggtgggagggggttaaatgcgccttcctcctttcccagccccggcaatgattcacacttgctcccgagtcaagtcctcattaagcaggagaaaaatgccccagcgtggatgtacacagataactatgtagctacacatcgacgcgtgagccttgagtggcggccgagcggtggccggacgctggccgcggaccctgcagagccgctgtcggagcgcccgcgcggacagcgcggggaaacggctcaactcgcgccgcgggggcgaagagccgggccgcggaaacccgcgctcaagggcatttaactagttggaagccaaagcgaaagaccggagcgggggaccgacagcgcgggggtgctcggggccggccgggacactccacagcccctctgggctcaggccgcgggcgcctccggacagcagctggggtcggggcgcatcgtctccggctcctcgccactcctcttctgcctccgccttccccgccgccgcctccccggtctccgccttcccttcccctcccctccccggcctcgcgagctccgggcgacgccgacttcggctggtccccggaagaggccgggtcctccttctcctcagcccgggaatggtttcctctcagagctttgtttctcctcctcctccttcacttttcagtcccacacgccgcggccgcctcctgtcatcgcctctcaaaccaacatggcggcagcggcggcggcggcggctgcctgagtgcgactaagggaaacggggagagcacgggccccccctcgcagcagccgccgcccccgtcctcgtcctccctccgcggacaccaagtgcgtcaccacggagaccattccctcgagcatcacgggaagtgtagtctacgagggtgggggggggagggagccgccgaacgcctcctcacccagctccgaagccacgccccccatagcaacagttgcgaggaaaggaaagctccctttcccttgctttggacaagctgctgcccaggagttaagtgatacctgctaccaggagtgctgtgatcatgagaattgttgggagaaaataattctgcatagagaaattcccttatgcacgatatgcacacagagctaaaatatgctgtacctccaagcagaatcattcattttaattacagcacattctccacatcctgcaatctcaatgca

SEQ ID NO: 59409 - DNA, 466 bp, Homo sapiens
aaaatcagttttgaggcccacattcaagttcagtgagtcttcatttatgccaatcaccaaatagttgtcaggggtctgcttctttttgtgtagcatgaaccaaggtggaagtgtcctctagttggtgtagctatgtaaattccagtggatctgaacagaagtcttaacttggccttccccacacaggagatgatcactcttcctcaaattgcctttaaatagagtggcgcctcaccagcactgtcagagggcaatttacttctccactgagagctggcaagccaacatttccactgcctgggagtggctaacgagagaatgcaataacattgcacaatcactgttaaatatgaggttgaaaatgtaaacataggtcacctttttgtagaaaatagatgaagtatttaattcatttcctgatactaaaaaacaggatttcttttttttttttttttttttttttttg

SEQ ID NO: 59410 - DNA, 3676 bp, Homo sapiens
taattattttcaactgtcatgagcagaaactcaggaagctgggggaatggagtctagaaaaagccctactggccaggatctgctctatggttgctctctccacaattaagctgctctgtaagggcactctgcaacctccctgctgttgctgcttgacctaccagcctcaggctacagctgagatcctgcctctggagtggcttccatccctcccacaaggacttgaagagcttgaccaggtacacggtcagacgtctacccacccaacacttgggtctttgggtagctgttctccttccagttcacctgtggtgagagttgacttcttatcttctccccataccctgagggcctctcactggagaccagtgttttccctcctgcttccaggtcctctctgcaatcatttgcccatctccaaacctgacttcaggtaacagattcgactttgctccaactatccccaaagcagacccatgaaagtgttccattcaggacagtttattatggccaggccatccgaatgaaacgcaactctcttcggtgatgcttccttcactataaacgtcacagtgttgagagactgcttgtgtgcacgtttccaagtcaggtgaactttcccttttggttcccagttccaactcctcaggcaaggacataaggctggccagtgatggtcctaaatttatccccatgggctgaggggagcaattctttcccctccatatcaaaatagtcatctagcaggggttgtggtgactttaatgtgccctgggcagtagtagatacaggttcatcaggtcttagtcagtaaacaggaagcgcatggttgcagagcagagctgggcagctgccacacaatttttttcttcttggctcatgtatgagtgtttctgtggctccaggtctctgacggaggcatatcgaaatcaagaaatatttaatgagtcactaatatatattaaccactgtaacttagcttgaccagaaaagaaaatagatgggctagcaatgaaacattcggaataaaccctaagccattaccaactgtggtcattggtcattggaagagctgaactgaggtcacagcaggagccccagagcaggttcagggcaggaggagcctggggaggccccctcccagcagaagggctcagtggtgagcagccgcagcatccttcaggggagggcacccatcaaacatgactgtgccctatagaggcgggccagggacaaggactggtgaggagaaggccctcgttcagtcgaagtgaagaagagaggcaggatctaggggaacactgacattaatactctgttaaagaggcaacatctctggagaagaccaagaagagacagatggagtagaaagatggactctcttaaccccctcattaagacgggataaagggccaggtgaggtggctcatgcctgtaatcccagcactttgggaggctgaggcaggaggatcacttgagcccaggagttcaagaccagcctggggaacatagcaagaccctgtctctacaaataatttaagaattagccgggtgtgatggcacacacctgtggtcccagctacgtggaaggctgtggcaggaggatcatttgagcccaggagttcatggctgcagtgagctgtgatcataccatggcactccaacttgggcaacagagttaaaccttatcttaaaaaaaaaagggggttgggggtgggggatagaggaggaaaatcatagaaaagctgagctgacaagtctgtattagaggacaaaagctgatgacttgagaggaagcaactgaaggtgtacctgggaggtcacaagcctttggagcaagaggtgttactgtgtgtgaggatagagctctaaagaaggtacctattttacccaaagataattagtcaaggatagtttcctgctgccaacctatattggcaaatgaccaacccccctctgttccctctaaaactcctcttccctccttagactccctgcatgtaggttttgcacaatggagagggcgattggactttgttagcaatctgtctccatggaccttgttgtaaacaaagagatctttaattggagagcatttttccacgcagcggtcaatgtgacatatatgttaacatcttgcaactgctaagctatacaataaaaagaagacataaggcttcttagtcaaatgtatgtttctttgatcacagtgaaatagacagtttagagctgtctttcaagtgactcatgtccaaatcaataacccagccctggacagaaacaatcaggatggcctctcatcagaaacaggtccataggggtgagccagcggtcaacaagtcacaggataaacctggtacagcataacaggaagggttggatatattatgggattagaggatttacatgacatttaaaaataaaacacaaaactgcaaagaaatgtatccttttagggcgctgcaataggccacacccccagaatcccaagaggttctcccatggaaaatttgatatgctttgcttatggaaatataaggaagtctcacctagctcagaagcccatattctcattttcttcacttccccccttcatgaaaaaaatcaaatatcatgtgtcatcacagacaaagaaaaagtgcaatatctaaataaatatgtgagcaacaaaaatccaaaatacatatagaacatagctgcacaccctctttcacattaaaaaacaattaacagcaacctcagctaacaaagaaaaatgatacatggggtaatccagtgatctgacagggccaggggtgtggttcctgacaataaggtaggctttgtgggagggtgtagagtagctccaagacggcatgatcaaatatgagggctgtaggcttaatatcttcccagatggcttcagccttctttccttcttctgtggtccactgggagtgcagtggtccaaccctgcttcacgcccctttagaggaggttccagaggctcccaggttggcagctcctctggaaacactgctccatcacatgccctgtgcagatacctgcagggtgccctgtttcctcctagatcccacttaaaatcccacaatttaggacaactgcccttcctagccttatattaccttctttttttaaccttaatctgaccaggccatttgccagctttcagctgctttcttggatttctaggcactatgctttttcccaggaatctcctcctcctgccaccagtgggtggccatccctgcctagcagaatctggagctcattctttaaggctcaaactccactacaaagtcctgactaattctgcctctcctgtggttccatcactttgtagctctatgacagttgtcatgttgctttggacttttggtcatttgctctgacactcaaagccagcaacttgagagtcagcctatgttttacttatcttggtattttccacactccttacacatatgcgcctttcacctgctacgtctcaatttgtttgccttggacaagtcactacatgtaagacttgctgtccttctctgtaaaatgggtctaataataataagtcctttcagaaggattatcagaattaagtgaatttatgcaagttcagcatttagtgcacaacttgacacataatgagtgttacttgctactagcatcaataatttataaa

SEQ ID NO: 59411 - DNA, 4004 bp, Homo sapiens
aaaaattagctgaatgtggtggcaggcgcctgtagtcccagctatttgggaggctgaggcaggagaatcgcttgaacctgagaggcggaggttgtagtgagccgagatcgcaccactgcactccagcctggaagacagagcgagactccgcctcaaaagaaaaaaaatagaattttatttatttcatgctataacagtctctttccagcttttgggacatttcttaatttccttccttagtggagaaaaaagtacttgctatgttttggtgttcttattcctagctgtgcattgagatcatcttgagcctttaaagatgttgatgcctgagacccgccctccagaaaccgtcgttcagtgggtgcggtatagctgtgactaatttttgtggagcatttctcatgcagatccagggttgataacccctgcaaatcactagatagcttaccacttccaccacaggtcccttgggcccttatttctcgagtaacaagctgtaattcggggcaattcaatctccagaatatcctactattgatacccagagatgtacatttcaccttttgtaacttcacccctggtcactccgtccaagctcccatgatgactcagcattcttaatacctcttggttttccttctatttctgtaacagtaaagtacttcttcaggataacttactactaagtaataaaaacatgaactagtggtgagtagtaggggaagaagaacacataaaatctttccagctctccatttctcatttctcctccctaactcatgatgagtggtaggcctgatcccatcagccatgagtggggagggctgagctgagggcatgcataggaatggcctggcccctgggcccacgtgagcaactgcacggacagttgggctattataataataagtctagggtaattgctgatagagagatgcagatccctattttttgccctgtagccgcttaaaaacctttgttcataattgtagatgtaaagcttgtacttcttactgggcattggatttcaatgggaattaggccaaaatatggaccagagaattggccccactgtggccaacctgggaatgctgagtcagtcctgttctgctgactcaattctctctttgaactgcaagactcacagtctaagcattgagaccagtggttctattgccaagacaaaggggaaaaaaggctgattaaatttgagacatggcagataatgccaaaaggcagaggcaatgtgatctctgaagagagagagacggaatatgtgttttggagatacgagtattggaaaaatggaaatctcatcataaaatgactgctgtgaagcagttgctctgaggaatccccctttacccatgtcctcttagattccctctttctttgttcccttagactcttctagttccagatggtctctggtggttgctgttgtttttctaacagcccgggtttttaagtcacttaaaaacccacatgaaaggcccatgaaatatcaaggtgattctgaggactggctccatttgctccagagcccgagttctggcttaggtagaggacaccccaaggagactcaaaccacagatccaactttgagctgcttccacaagccccaaaatgccttgagcctaatccagacaggcttaaaagtttagctggacaggatcttggacataatttttacaggttaggaaactaatagctagagagggtaagtaagtcacccagatcacatatcatgcctgcgacagaaacaggacaaacacctgccttccaacagtcatgcacttgctgggttccttctctgagctggggaacgccaggctagccctagaatggcatgcgaggctggagaaggagactgttcccaagccatataccccatggcccttcagttttgggtgaatgcttttgaaaattctgtctaggcaccaattacacaaacaaaacagaagaagtggagactgggcgagccagccagagagaacattctttatgtatgaagtcactggctttcagtgcaaactacttacagaaacaaggttcttgtgtggactgccacaagtaaggctctccaaggcctctagttgcagcagagaaaatgtgataaatctacaaaacgttctgcagctttactcagctctttaaactcaaatatttgttttggatgaggaaatggctcagggcatgagcacaatctcaccaagtgtgtgatcctggtgccacgtggccacagcatgattcaggatttctcctgccttagccactcctctaaccaacaacagcacctgagtcacactcctggcgtccttgctggggctaggacccacccctccattggcagcctttgtctccgggggcacgtgcaatacagcgccccctgctgggcaccctgtcctgctcctctccagctgggtttgcctgcctggactggctgcccaaattcaagacatggcagctaatgccatgtgcgacttaaaggctctccgcttcctattttacaagaggctctgtctgcttaaagtgctcagtgcctggtgatgccatgttttttcctgtcgctagccccctcaaaagaaggaaattcatttgggagttgtttgaggtggatgaggacatccttccttcacatctttggtgtcactggaacaggtggaattcctggctggaggcaggtgatgctccggtgagcacatcagaggcagcagccgcagtctgctcaccctgcagctgagacgggggagaagcttcgccagctgcctcatcaaatggaatgcaaacagagaggagagccccacttgctcatcatgctcctagctactccagcctcgctccagggtgctcagggcaaaagagggcagccctctgccaaggagggcttcctggtgtgtctttccatggaggaaggactcctctgggaaggactcctgctgggggacttggggcatctggattgccagctgtactcagcaaggagcggccgcagaaagttctgagtgcttcttgagggaaagcataagccatcagcagagagggagagagtcagagcaagagcgagagcgagcgagagagagagagagagagagagagaatgggcctcccaatctacaaagtccctgcaccagaagtaaggacatcaggcttgagaccttgaggctgcagctgtgcacacccattcccccagccactgctcatgcctgcagttcctgccacagagagaggccttccaccccacagctgaaaataaaacttaaatgcacatacccctttgacggaaaaacagtgacttcaaaaccatcaaaacaagaagtcactgattttaaatcctttactgagattgatagggaaaaaggattatgcaggagctggacgtgaaccgtggctgctacacaatttgggctagggcttactcttctctcattaaaaaaccctatttattccaccaaagtaggtagagttctccctctcctctttggattctctactatattccttagtaacgtcatgaggctttctcaggactaagcctgcaagttgtctattaagccagctttccagtggggactgcctaatattgaccaaatactttagagagtcatatcatctgtgagctggcagagatccagaactccagtctagcactcacattttacagacaaggaagccagtgccagggccttagcctggtttcacaactctttctctggttctcttggtgactgacaacaaaacgacgcctccctattctggtgtggcttgggcttctggctgctggcacaggaatagccaaaatccttcctttcaagctttctgtgtaatggaaaccctgcttgactaattagggcccacctctctcaaactcctgaatcactggcattcattaaatatagaaaagcattttatccccctaatgaaggagaactggaataacatagatgagtcacacacactgaaaactgtcatgatattcaagaaaggtgaccttctctcacacc

SEQ ID NO: 59412 - DNA, 402 bp, Homo sapiens
ctcttcactcctttttacaccaatttttgttttaatgggaagaaaaaaaaccctatgcactatttcctcccctaccttttctagttaggattaaacagaagaaaaatggtggcaccattcccagaggtcttcagcatttgaactttacactagaaaactctcaatccaaagctaaaattcatatgtaaccaatgtccttaagctaacagctgcttgcacattcaaaaaagctttgtatttctctcttcatgtcactgttaactctctatttctctttagctatttatcagcctctgagaaaatctcccggcaactcctccccacataaaactattctaaatccatgtgaagcccttaatttaatcaacacattaccatttcctaacaaagggtaaatgagat

SEQ ID NO: 59413 - DNA, 1134 bp, Homo sapiens
ggtcactgtcacttctcagaatgtaagctacatggtcatttgtcaaggaccttgagttccagcatcaggtagaatgttagctgtctaagttctcattcatctacaggacacggggcttctgcgatgggccgggcttgtcctgcggagactgtcgccaaggcaggaagtggaacacaagtacgtgggctccttgagcaaagtgctgttaaacagatgggacactctagatgcattagttaaagccaagcatgtttctagacacttctagagaaggaaactttccctaacgtcacagcggggtcgggggtaaaatgggcgggtcttcgtgagaagtgagctccttctatgacaggtatgaaagagaaagctcgctggttccaggtgacagctcccatcgaaaattccaggagctgctctggaggaaatggtgctgagatttgcaaagggcaaagaacaaatgatgcaagagacggaggaaatatggactcggcccaaacacagtcccgtcaggggccgtctgtgggaatgtgccgctgttcttgtgctatttcagcgcaaaatatttaggaaatagagagacacacagaatggcaattcaaactgattcatctacctgatttaaaaaaataaaatattgcttcagcttagtccaaaatgtaacacatggaggtataaccttttagttaaaaaatcattctttttcttaccatactgagagatctttgccggtagagaaaatgtcctgtttattttggtatccctagagtttaacatagagtctacatatagcaaaagtttcaataaacatttagtataccaaacagaaatgtgatttttggatggcagaggggttgagatatctgggcaagaacaaagtgtgattttcactttctctggtcttctgttgtcccagcaaaacctccctctgctccaaggacagcaggatgccctgagctcttggttgcagcacagcgtcctctagccccctccatggcaccctcagctgacttactcactcatgcattcagcaaatgtcctttgagcccctaccatgtgctaggctccatgccagggctgggttatagtgacagaaagaccagtaggatccctgcttcctgcaactcttcctctgag

SEQ ID NO: 59414 - DNA, 1748 bp, Homo sapiens
caacacagtgagatcccatctctacaaaacatttaaaaattagcatgacatggtggtgtacacccatagtcccagttactcaggaggctgaggcaggaggatcacttgagcctaggagttcaaggctccagtgagccgtgacggcaccactgcacttcagcctgggcaaccgaacaagatcttaactttttttttttaaaaaaggaagtggggaatcatcagatataaataaatggtaaggttataaacccaagcatcaccagcagctaccacttttaataaatctgagaaaaatatccccctttgctgactcagagccatgcccaggttgtctttagctgtggccacgtctcccagccacccacattgctgccatctctggggttgtgcccctccctcctcactgcgccctattaaaacaatcatctataaagccacaaagtgagggctcagactaaaccttgaatacatccttgtgaatgcatgggctggcctccaaggcagccctgtcccctgctatgactctgcccaccccatagctcctaccctccaccgtgtttcctgggtccatttttgcagctgggacagagaggggcagctccaagtgagacgggaaggtcaagggggctgtgaaaagagactccctccttcacacctgaggatctgatcttacccagattgttttttcctcacagagaaactcctctggcccagtttcccatattgatctaatcagcagtccaaacataattttgggactgtcaaaacaagacccgcaggcctgacatagacaattaacataagtcagggcaacccacctgccacttcccgtctctccccgacgtctcgtcaggatgttagcaaagccagtacccgttacgggtggcagtatcaccaggagcacgctgttgagcaggggactcctgacatgaggctggaagctataattacccggtgtataatttggttgctaaatggattgttgacaaaggtgtgcatgatgaaatcacaggcatgttagagctgagaggcaggcggggtcagggaggaggcaggcagtcgttaactccccacctccctccaggctcccctctgccaactgccgccaccgccaccacagcagactctgacctcgctgaatcacctgggcctcgtgttccatgacgttcaggaaatacctggccttcctccctcaggtttcatctcgtaataactcccagcagaagcagactcaccttggcacagcactggggatggagttctgatgtcacaggcccctggggttagcctgcaagggaaaggagcccagaggaaagcttagtggcccaagaggccagaaggggaggtcaaagtcacagtttattccagggaggtgctccatgagggtccccccaaagggatcaggcctggacatggggcacttcatacatccacccgcagctgaagtaaggaaatcgaagaccatctcattaaatttgcagggaacataaggaggaggggagaagggacattgccttctttgcacagtggctgagatgtcaaagagtcattctaaaatcagaaaaatgacttgtcaaaaacaagctgacatgcaataaggacaaagagaggtggcccactcgaaaatctacaaaaagctaaggacaaaaaatgtgaataatgggataaacacacaaaagcccaggaggtcagattatatctcagctcaaatgtgcctttgtaataaaacgctattgtaaaacaaaaga

SEQ ID NO: 59415 - DNA, 3390 bp, Homo sapiens
ttcttctctgcggaagcccctctttttccaacattatgtcatacaactcaattgacacggtcccccgcctacagacatgccggtgtattcagcagagacgtgagactttgctcagccactgcagagggagagcctgcacctgggaggcagggagccctgcaggaacgaggggaggaagagattaggaagcacgtgctctcctaaagagaacagccactgaagatgtctaacagaaaaacgagagctcctggtaataatcactttagcatcgatcaattataattcctcgattagatcacatactgctcattaccattaaaaaacaaaacaaaacaaaaccctgacttttccattagagtcagagcagtaggtttcattttgattgaaaaactccaacttcaagaatgaatgaacgcattccagccgaatcaaagcctgagctgaggctgcagacattttgtttcctccctgcctctacccggggcgtcatctagcgtccgcccttaggtactacactctcctgccaacgtaagccttttactccagagttggtttcagtagaaaatcatgagacctgacaggagaaaaaaaaaaactggcctcaatgatagatatttttcaaaagcggttgagcaataaagacttcccatttattggatttcacacatgattttgcttgagccaaaccaaagactcatgactcctaaaaaacaatgaatagacagagtacagagtgcttgggcatttttctcagggctctctgttcttcggaaagatgtttatgtgcaaaaataaaaacctgactgatttacatacggaataggaacacacatttttcaaggtgtggtatcttacaagtaacatttatttggacccctcttagggctgaattttacccctctccccacccccccccaaaaaatcctgttgccgtctagtgcctcagaatgtaactgtatttggagataagagctttacagagttaattaagttaagatgaggtcttagagtaggccctaatcccatctgactggtgtcctcatacaaagaggaaatctggacatagacaagtgcatgcacagaggaaaacccatgtgagcacacagcaaaaggcagccaaggaggccctggagaaacacgcccggactacatctttatctcggacgtccagcctccagaacagtgagaacatctatgtctgttgtctaagccacccagtctatgatattatactatgcctagcaaactgatataccccccaaactccccccaccccctaagctgggcaaatgttaggtgactttgatgctgagagtgcctgaagcaaactctttatctgctctttttgtacacaaggactcttgaaccactcttgaacccggaagtctctggcaatggcttggggatcccactttgcctactcctcgcccccgtcaataggggagttgttatctcttaaaccactccgggaacctctcctctctgggtggaggttaaggggactcagtcggggagttaagtgacaagggtgcctctggcagagcctaggtgtgtaagctttggcaaatgaccaggcctcgctgagccctgattttgtcctctgtaaaatgagagtgatcggattccttggagcacgaaatgccttcaatgtggggcttagcacgggtctggctcacagtaactgctctcacgctccactagccactccttagcaggaacgtgggcacgagaattcccaaacttcctcgagtcagtgttcagaaccccgccctccctttatcttcaaaggagaagggagagcagtgggttacaagggtcagcttttaaatacccctgctctcccttgaccacagaccctggggagtttccccagctaaaaacgaagtttagaaaattgcttgcaatgacccatgatttcaagggccccagtgaatgacagatctattgaggatagggccccctggctggaaatttagaaacattttgtttttgtaagaggaaaaaaagggcagagaggcacgagggctgcaggggatggctctggaaggacactgcagcgaggctgccagactccttggaaccgcagcgccgacgcagccatttcccagggagatcaatcctctggcaggtccatttcctccgccgcgcgggcggctgcgggaggcggcggcggcggcgggggtggcgggagccattagtgactctgtgaccccgttcaccgagcgcgtccccgcccaggtgctcgctgcccggcgccgcgccgtccacccccggccggggcaggtcgcggggcccaagctggttcaagcccccgtcgctcgtcgcctggctctgcgccaggccccgtgcccctggctgcaggccggcaccccgcgagccgcagcgcccaggcaggcgagcgccgctgcaacctgcaagcctgagtcagctcgcggcgcgtgaggcgcgcgcactgcgtccccgcgcagccgtcgcagccaggtgctggcccggagcgctgcgtccccagacagaaaccacggctccccctggcggacaccggttccccagcgctgggctttccccttcagtagtttaggggtagttttcagctaaagaaaacagtggacgcattttcccatcagagggcttggtggcaggattcccacaggcttaaggaatgaaagaaaggagatgcgatagaaaggaagaatggtaagtaaggcccggaaagtgcaggcagagaatgttatgcacctgcatgtcgtgaacccaatggcaacgaaacacttacttgtctgcggggcaaatatagccgcgttggctctttctcctggaaccacggatactttggcaaggaatgaatgagttataaatgcaacgttttcttaaatatattaaatacataacactgaccttcacaaaggcttttatctggaataaggaatgaataagtagggtaatgaataagaaagttaaattaaagcaccatagaacacagtttgagtaactttaaaaatttttatttacttaatttaatgaaaacaaatgataagtaaaatgtctttatatgaacatctgaaaaagcttataactctaaatggcaatcctaatccagctgctatagtcaggctgctatagcaaaataccctagactggtagcttataaacaatagaaactgatttctcacagttcttggggctgggaagtcccagatcaaggtgccagctgattcagtgtctggggaaagcctgctctccggttcatagatggtgcctcctagctgtgtccttacctgggagaaggaggaagagcgttccctgggatctcttctataagggcactaatcccgttcatcagggtgacctaatcacttcccaaaggccctgcctgctaatgccatcaccttg

SEQ ID NO: 59416 - DNA, 454 bp, Homo sapiens
atgcatttccatcctaatgtccagttttcagcagtgcattagcttggtcctctggagaatgtttttctgccttctgtaaattaatgctggtacctaactgctttggagagtcactttgccctgagctgtgtgtgtgtggtgtgagtgtgtgtgtgtgtgtgtgtgtgtgttgaacttctagggttctctgcttccagtcacttctcccacccctaggtattgcacaaggagagtgaagtgtttgctttgtaaatgcagcttggaaaagcactgtagatggataaaaggtgctggccgatgtgagtcattctcataggcttggcaaggatacttcagagcaaaggaggccctgggcaaaacaataaaaacatcttctgaagctcatagaagtgcatcttgcttgggagtctgtgggttgcattgtacagaatgttcccggagttcaggaattgga

SEQ ID NO: 59417 - DNA, 2215 bp, Homo sapiens
cttgtcattgctagaccgagatggtcttttcctttggtctgcatagtcagatgtgtagataaattaccggacatgtgtggggggaacggaaagggggggctccatgtgttccaaacacctgaacatctcacagttctggaggcactcggatttatgaataagagcacaggtacagtggaatgtcacgtttcctatttttattagcatccccatttgcccgcagcctgatttctctgacctggcctgatttctttcacaccctggcttttagagggtggctcgcaggtcagatgattcacttgctcaaacatgaaatcttctgccaagctcagaggacatctcgagggcagatgctccttttgatcatcgttttatactctctcagcctcatcagggttattaagccatttggtatcccaggcaacctggaagcagctcctggacattttagtccagaaaagacagttctgagaggaaagaacagctctcacgaggggctgccaggagatctctacatatgataggaaaggctcaggaggatggtaccagctatgcatttttttttcttttttagagacagggtgttgctctgtcacccaggctggagtgccatggctcaattatagctcacagcagcctcaacctcctgggctcaagcagtcctcctgccttagtctctcaagtagctaggactgcaggtgcacactaccacgcccagctaatctttaaaaattttttgtagagacagggtctcactatgttgcccaggctggtcttgaacttccagcttcaagtgatcctcctgcctcagcctcccaaagtactgagattacaagcatgagccaccaacacccagccccagatcctttttttctaaccatgaaaatagcttcctgtggtctaaaaccccagctgagtattctgctggggaatccacaagtttctccatcagtccagacacaggttaagcttaatgaaaacacacagccaaagagccgtgaggtcacagtcggtgatttcctgaaatattcagagaatgctccaaccctcaactctgtcccagagggcatcatccaaccccaccgcccttgacagggagccacaaaagtgctaccagtccagcctgcttgccaagccccgtcacagctgcctcttcctgcaggctttctttgaaaccttgctctggaattcagcttcaggattcctgcaagtccctagatcaggaatatcagatgttgtgattttatagggcctccattcaaaaaccacagggccatttccatgggtgtcttgtttggcacatgaaaagaaacagaagaagctgccaagcatgtgtctccatgagtcattaagcccttttctctgcttctgccggaggtgtgcgcacatgcagagggaaaaggaaaagcatgctctgaacctccagggcaagcagagcctcttataaacagacacgtccttcagaccagacagcggccggggaagtgtgcagtgggcgggggaaggtggctggagcagagcttggcggggcgcgtcctccacaggggggtgtccacatgtggcctggcagaccagcttgtacacagacccagcaaggcttctcaaggggcctgcattccccaagccacgtccctgagattgggtgtccctcctgccccggctccatctgatgttttgcagggcctggaatggcctccctggcttacttctcagggtctctaaggatgtgtgaggtgccctcaggagcaccccaagctgcccactgggactcctcccactcctgtgctcctgctgttgctggtgttcctgaggctgtgagctcctggcaagcagtggctgctgtcctgaggctactccaagggagtgtcaggggcactggggccctccttggatctgggaagggcaccccattttcaccggaagcttgggccccgctgatgcatcaaagtcttcagatcctgagccaatgccagaagcacctgacacccctcccctttcttctgcctggtttgcttatctagacctccaccatcacccccagccacctgaccccagactcaatcttagggtgtgtgaactgtgggaaaggcagggacagagaagaaatgtggccagggaactgatggccacagacactcttcctatggggtgcagggtggggagagaccgcgttcttcctttaagggaagcaattgcccagaaggaacttcagacc

SEQ ID NO: 59418 - DNA, 1607 bp, Homo sapiens
gaaattctgaataacactggaataatcaaagaattattgctgcctactgctaaaaaagtctgtttttaaaagttactagtaatttaaagctgaactaatcaaaatatgtgtaggcagtgttcaggctggcaaggggggggtggggtggagcactcatttcacaaccttgaacctcaagaaataaaattcaaaaatgcaaaaagttaaaaatgccagataccaccatataatcgcaatgacatctttttatctatttccacacttaacctttaaacattactgccctttgagtaattaccaattgatgggtttaatatgcaaacacctctgagctactttaaaacaaacatgactaacccagaaataaacgtatccaggaaaggagaaaaacctgttaaaacacggtttctcaggtctcacatccaatgtgtgacatacatacggttctgcaccgaaaggcagcaacctgcgagggtcagaggcgccgaagacccgaggccctgcagcttgggcggctgctcatccctgagactgtgcagggcggtggcccagccggggtggggctgagcgctgcaactggggcgggcccagctacagggcgggaagcccgaggctcacctccacttccctttcccaacgcacagagcccaggtccgcgaccactcaacagccccctcaagacaaagagagatttttttttctgtcccggtccgctcaaagtttatcggtctttcccggcggtcggggccgccgggctttgtagttcgccagtccgagctaccccaccaagaccgcgagcccgaggagtcgctgaactacaattcccatgatgcaccgcgagcctggcgctcccgcgcccctccccgtccccgcacgggagccagcgcccgaggaaccccgcagcccactgccctggcgtctccggcagtgggaggccgagaggggctgttggctagagccctccaccacctgctgtctcgccctcgcccctttctctcggattcattacccagaaggcgcaggtccgggcacattcagcgatgcggtccagatggggtgcgggtggggcgcaggccgccgccgccgccgccgccgagtccgttagctcgcgacgtgcgtgaaaaggcggcggcggcgtagtgttgccatggcagccgcggccgcgcggtgggcgcagcgcgggagggagcgcgggggctgtgagtccgctctggggcggagcttgggactcccgcccaggttgccggggggagggaggtgcagcggcgcggggtgggagagcagggagacagtgacattgaggaggacgtgtggccgactgagctctggtcgtgcttgatgagcctgcctccactgcgtccagcccccgtggcagggcaccttcgtgcctgctgctttcggaggtgatgccagtggcgtcgaaggagggggcacccggggcgtcgcagcgcctttcccgccgcctgtccaggcgtccgccgctgggtctgcccccaagggatgtgtggatcctacgccacctctgtgtttttctccagtcaaaccgaattgaagtctttcgcaccccctttctccattctctggggagggggatagaagggaatcct

SEQ ID NO: 59419 - DNA, 1409 bp, Homo sapiens
tatcattatgacacctaaaaaaaaacataatttctcagtcaggccagtgtttaaaatatatattagattgtccaggagtgaattgacttgtaaactggacactttaggaacttatatttgaagaggagtggagatagataaggtcaatgtccgtttttaaatttctttaattgcctcaaatatttttctacagtttgttcagatcaggaaccaaataaaatatatatcacaactggttgatatctctgttaaacatcttttaatctatgggcttgtcttccacatttgttagattcctggcaatgtatttgttgaggaaactgggtcattttgtcctgtagggtttcccacagtctggttcttgctaattgcatttctgtggtatcatttaacatgttcctctcctttatgtcctgtaaattggtggttatatctagaagcttgattggattcagggttgattttttgacaaattcatcaaaggtgtgtacttctatgaaggcacaagataaatggttgctttttttttttttttcaggtgagtagccactgctgatcattactttgacccattatttcccaattttttttttttttagatgtgagttctgtcaggcaggggcagggattgcgtacattgtagggtgctcacctggctggctcccaaggcactggactgtcagaggatcaggggtagggacagcatggacaaaggggacaagaagccagacttgtcctaaatgagttcatagcatggtcggagacacaggacgtaaacacggggaaataacaaagatatgtcataaagccgtgcaaataacttaggtagcgatccttctgggagcgcagaggacaagagagcaatccacttgggtagtcggggaaggactttagcccagacactgactttctccaacgaaacacaatatcgtgtctggatgcccagttaccagttggcgtccaccctgggcttcctgttgcaaaacatccaatcgatttctcctccactgtgcatgttggaccaaaggctgcacagccaagattctgactccctcctggttacatgcccccttgtggtaaaaccacaaattacaacagattttccaaccatgaagatggggacagccatcaaacattatcagcagggtggaggtgtggaaagaagagcatctgtagcgggtccattctgtgtccggcacagagctgggcacatctgtgtgtgttagcgcattcttacctcccagagcccggtaatcgaccaacatttgtggccgatgctactaggcacggacccagtatctgcattcaccttcttcctttctgacaaatcccaattttgttcacggtggcaaagtgccccctaatgcttgtctgatcagactggtagctaagatgctggccagggggtt

SEQ ID NO: 59420 - DNA, 1383 bp, Homo sapiens
ctgctggactcagcgtgaaggatgtgaagttcccgttctgcttctgccacttaccagtgtgtgacctcaaacatgacactctgccttctcagcctcagtttccttaactagaaagcagatgtaatcataccaacctcgctgggcatttgtgaatattagttgagaaaatccttgtcaagtgcttggcataatgcctggtgctgaacatggcctccagccttgtcaagtctctctaacgtccctcgccccaccccacgcaactcccaagcaggccgtgattgatagaagtccacttctcttctgtgccaagagtgactctagcaaaaacaagcaatcaatttgcactcatctcaatggtatgtgtagatcagatcttggcagaccaatttaattttctttgatggtagataggccatgtagataaagaatgagcaagagatgtaatctctttgtgctggaatctgaccttagattccatcacaaatgacttttcatcaattagatagaaggaaataagagagactctcttctgtcttaagtgcaggcacaaagagctgaataatatcacccaaaaggcagcctatcgatgactcagcctccacctagggacatcctctgtgaccttactcatgtcagagaggaccccatactgaacatctctctctttacaccaacaatgtcttaaccaagaatgtcctaattaaggtcagatgacaccaagttgtcaagcatccgtctaaggtaggaatagagccaaaatagcattaactgacagttcataaagagtgaggtgcaataggaacaagtttaacattaaaaaaaactatgtagacaaaaagaagaatatatgttggctcgttcactaaactagtaaccagtgtcacccagagttgtagccagataaggaatgctcaagaatagccgggtacctggacacccctgataaatttaactcatatcagagaaggcaacaggaaggcagaggaaaagggaaggagagacagaatgagaaagagatcagggaagagaagatagggaattgcaatgttgctgttgtttttgtttatgttgagagtggaagatgctagtccattggaattcacgttcacttatatgggcaacaaataatttattgagcatgcagtgtgtgccaagcactgtaaccagtgctagggatatagcagtgagtggaacattcaggatcctgccctcatgcggtcttcttcctctacccaacttccaagtgttgaggagcccattacgagtccttagatggcttctcgtttccatctgcacccaccgttcgtatgatctcatccactaccacagctttccataccattcatctgtgactccttgcagattcagacttccatcccatct

SEQ ID NO: 59421 - DNA, 3389 bp, Homo sapiens
aaacacagccaaaacaggggagttgtcctggactcccacatcccacgttctgttgattctaattttccagaattcgaattgcatcccacagccaaaaaacagcagtttcttcttaattattttgcattctaaagattgctgcaaacaggactagagaagacacccccgtcgtccttcgctgtacccccttcctgccctccaactgtgaccttggctgaaccagccctaccactatcaagccaacaagaagactgcagaaagagaggggttttggggggtttattgccttgggagcaaggactaagcactcacgaggaacgttactgcctccctcactctggggaaagtaaagagatgaatcccaaagtgatgagaggctcgaaagccagggtcagcaaactttttctgtgaagggccagatggcaaatactttaggatttgctgtcatacagtgcccgtcacaactactcagtactgccattgtagcgtgaaggcagccgcagacagtagcgaatgagacagaaataaatgagcaaggctgtcttccagtaagactttatttatggacacttacatttgaatttcatgtgatttttcacatatcacgaaatagtattcttctcttgatttttttttcaactacttaaaataggtaaaaactattcttagctcacgggttaaacaaaaacaggcagcaggccagtcctggccactggccatactttgccaactcttaatccaggagagccactcacagacaatgcagggccagaaagggacagtgacatctcacttcccagtagacccctgataagctgcagaactgcaggccccttctggaatggagctaagggcgatgagaacattgtgtgttctctggaggctggggacacagggagcctatggccggggcctgccacttagctggaagcttctgaaggcaggatgactcagtggagcaggccctgatgcaagaggaacaggactcatttgcactcaactatctctcaaaaatattataaagctgtgtctcctaaacttcagctctctctgcagtaaatttaaactgttgcgacattgttgcgggtgatttactggggtggtaagcttttgcatgttttttgggaggttccttttaaatttctactaccattgctatcatttttaaggagttattcagatgacagaatgttaagcgctgatagtggctaacaagggaggctgcagaaagtctatgctgggatctttaaaaccgtgatcaactgccatctgttttgggagttttaaagtgagcccagcatgcatcaggaggctaggtgggtcaccacttaagtctcctccatcttcctaattccaagatacgagaggaaacagatgtgcgttggggagagtaatgagaaagagcaactctgctttccttttctccaacaacagaaacagtgaatattaactccccaaatccctgtgtaacactcactgagtacccagccaaagaagtttcctttgaaattgaatctgtctgtctaagagggtctacaaagcctgcattttaactctgaaataattccagttacttgagctgctgttgctgctaaaagatgtttgaagaggaggaggaaaagccatctcgatatgacaaggatttgtcacttgctgcaaagaaggcacgggattttttttttttccctgtaaaaggggtagtcagagttgggagcttgtccctgtcttcttggccgagattcctagaggaaacacaaatagactttttcaggtcacaggtttctctgcatcaggtggtccggagtctcgctcagtttctataaatcaggccgtttctctccaacttatgagtctcctagcactggacattctggaaatccaaatgaaattgacaaattcggttgatgtcatagcaaattcaatgcaccttgctctcttcaggctgatttcaaatcactggattgagaagagctaaaatctagcttttgtttttaaaaattagactgtataaactgattttaaaaaaataacacaggaatagatattatgtaagattttctattccccgcaccccccgccccccaccccgccaccagatttttgtggccatcaccttttcgtgaccaattttattcccacagtgcaagcagagggtttgcagttttgtgatgccttttcgttttttagtgccacatcattatcaatcaagatgtccagataaattacttaacagagaggcagtagaggcgctgctcacataaccacccagctgagaaagccttccttcactcactctcttctgtcctggacagactcatgtggtttacagttgctctcatttccatttatcagaaacagatttgcaaatgttttcttttaagctggtgtcccttctctccattgtaatctcaataagtatgaaaagagaaatatagaaaatgagcagcattgctttttatctcatcaccactcactgagcacctactgcatactcgcctccaagcaggcgtcccctccctaacaacagcacaagcaggcattattcatccattttcacagctacgtaaactaagctgtagaagttcaataacttgcccgggctcatacttctggtatgaagtggagcctggcttccagcccagctctgtctgcctccagcgcctttctctgcactgttcagcaatgcctggctacagaacacggccagtgtggccaagcattttccatgactgtccctggagcacattaattcacctcctgaagtgaacctctttgggaagatgagccttttccaaaatcaatacttttcattgtagttaagcaattatgacctaaaagaaaattttcaccatgatactgaaagccaccagcttcacataaacaccaaacgtgctgtaactgaggaggtaaggggcgagtccttgtcacacatttcttggaggtcaggtcaatccacctgtgagcccaaaattatgctggcagaaggaagaagcgagatgatttttaattgttatgaagtgtgctggtaacttaagttgttctgtatttccatccttgttttgaaaccaagctgaagctctctctgtctctctgtctctctgctttccctacaaattggacaagagtttcttcttggcttccatatgacatcaggtctttcctaaataaaagcaatcaatgcaggaaaaaaaaaaattcaaagataggatgccactctctttcacaacgattagtagttttatatttccttccagtcttgttgatgtggatttaactagtacatatttttaaatgctaaaaattgtatgtatttctttttatacctcacattatatcataaacatatatgtttctatataacctttatatgactaattacatcataaaca

SEQ ID NO: 59422 - DNA, 1820 bp, Homo sapiens
gcaccatagccaacagaggtgagaaacatggcttctgttccaggtgatccgctgtataccctgttctgatagttactgagtacttaccaagtgtatgccacctactgactgtcttacaaaaggtgcaacttggcatcataagaacatgggctccacagtcaggcataggttcaaatcccaggtctgccacttagtagttgcgtgaccttgagcaagttaccaacctttctgtgcctcagctttccatctgtaaaatgggactgaccacaatagtacctccctcataggattgctctgaggaataaatgagttaacagaaaaacagtgcctgggatgtagttggggccacacaagtattagctgtcattattcatgtgcattagttcatcgacttctcacatcaccccattttacagatgagaatactgaggctaaagagacaaagaagcccagacctaagcatctccagcatccatgtcctcaaccagtgaggccatgcatggcccaaatcccctcagccatgcagctaggcctccattcccaacgcttaaactgggcaaatcttccacatccttatattgatatcacctatcattttagtaggaaatgagctctgagttgattcaaaggtaggaaatcctcctacttaaaaacagttcgtttcataaaaacgaaaacccttgttaattaacactccattaacaggaaaatgatatggtggcagactgagggctcagggttccaagttttgactcagtgttgtcaacaagcacctctttttgcccagggaatatcagagaattgttcatacagagacagcgaccgcagatggggcactagtgccttcagctgcaaaaggtcgtctggcaggaagcatgttggtctcctggcagtttcttgggccatgtgacataaccgccaggttatacttctgcaattacagtccccagggacctgccgcatgaaacagacattggttgtgatcctgtaaaaagccgcaagcagtggctctttcagtacaaggaaacccttgggacagaaaagtttacttttgctcaggctttatggtgacagccagcgtgatcaacaggaatgctgcagttgggtgacgcatgaggctcaggagcctttgcgcttgactttgaaagattataaatacaccaggctcgccaagcatagccagtcagttacaaattacgagtcatctttcggttgttgctgaacttcctttacacctcttgttttgaacacagtgagcaaacaacgtctaatcttttggctgtggagttccaagtacaccacaaggcatcgggacacacctttaccccagctgctttgtgtggttgcaggttaaccagacatgcagctaggagttcacctaaaaccttcctttccccggtacataccttggtgttgatttgacagctggatgctgagtattgatcccagtgttcagggatagttacttcattaagacttctgagatcccccatttgcttgaagataaaaacaggcaaaggtataaacagataaacagtcacacaaataagtagctgtgtgggccattacttttaaagcatagtagatgttatttgtgtttggagaagcttaatgatacactcaagaatccaatagtagaaactgtttgctttcaggaagaaaacgttatatcaggaaggtatgtttgaagaaaagaactatataacagcgatccacaatacacctgttcatttgtagcataatagttacacctgctccctggggcttttttgagatttcagtctttggtgtaagacacacatacacacatgtgcacacac

SEQ ID NO: 59423 - DNA, 739 bp, Homo sapiens
gacattgtccagtctggttgagggccatctgttggtccccactgaccgagacctcccacccccacaggacaatcattgctttgcaacttaaacagaaggcaggttttgggcggagtgccttccttgccacgggaccataccagcagctgctgtctttgtgagtgctttccggttagtgccaagggcaggaaatttaagccagagtcaggcaggcggggcaccaggtgtggtgggaagcagggcttatctgacaaccatctgcataaggaccgatggaggcctttgcaagccccaagttgctacttcaaacattaacttgtgtttttattcagatagtctactaaagctcaatgtggaattggtatgtgcttttaaataccagaacactcctactgtgcctgtcatgaaagcttcctgtgtggggtgagacctttggacttgtatgtggaattggggaatttggggaaggagcaagcctcctcacctgggctggagctgagcagtttgtgaactgatactgcagtaagacaaacattatccttttggcaggacttgaacttacacaagcaaccagagaattatgactttagggattcttattttattaatctttattatgttggccatttattaaatatctactatgtgccaatcactgttctaggcagttaatatacatatgtatgatatatatgtaccatctcaatcttaaagagtagatagtaatattcttcatttt

SEQ ID NO: 59424 - DNA, 1557 bp, Homo sapiens
ttttacttttccgtaagtctaaagttatttcaaaataaaaaattttccaaagacacatactatattaaaataagtcatcttatatccttattctaaggtttattcagtaaacttctaaggtttatacaggaatgacgtggacttgtaaacggccccagagctcaatcctattgggcaactgtgagttggtgcctgggccagcggcctggctgacgcttcttgttcattcttctgcctcagccagtaggtttggctagaattctaaggccttagactttgccggactagaaaaggaaagaggaaagggaagtaaatcgccgcaggggtcaaacctgctttcctgtgctcttctgagctgctctcggctcctgctctgcagagctaaaacctctaaggaagccactcttttatcatctccaaaagattacgggatcatatagtctaggctgcaactataccatctgcttatgccctcggaattttaaaaacgagacccatgtttacaaatgtgagctgacatgtcacatttgtggagaaataacgaagtagctgccaggcggcagcaagattcttcatgttcagaagctcctccacgtaaaagcaggttacgtcctgaaagatcattcttaagtgcactgtttgttagttcagttgcctaggaagggtttaagctttcagccctcagatttctttccaccaaacaggcatgttttcaattcacgcacatgctcctcctctgaactggtgaatgcactctcaggcatgttttcccctaacaaatccatttttttctacattgaaagttccgttgggacagataacatctgcaagtattgtaagaatctccttagcagcttcacaacctccactccgctttgaagtcaggcaaattcaaaggcgccttatatagaggaaatatccgtggcttgaggcaaacatttcatcactcctaggctcgaagtcttcaagcaaacagctggcattctcccggacagggctggtagactctgtggatgtcttgccttcaagccatggcgctttaaatcctttggggtttgtctactgtgttttctatccactgctgatgattgttgactacagaggtaaggcagcttttatacattacacaactaccctttgtcctttagaacctttcctaatgttgaatgactcagtccataaccaagggcagcattcgttactttgtcactgttttctattaaaacaacaacaacaacaacactctctcatttgtaattgaatacattaataaaccctttcatgggcatgatggagttaaacgtgtttgtaaaacacctcaacaccctgtactagcaaagcaaacacaccttagaccaagaggcctgcagccaagaaccctgatcccagtccttggtggtgactgacctttctcgggaaagcacagctttgttgacaatcatggacgttctcaaggagatgggctctgtacttcctataaaaagcaaggagtccaggtgtggtggctcatgcctgtaatcccagcactttgggaggccgaggcaggaggatcacttg

SEQ ID NO: 59425 - DNA, 2507 bp, Homo sapiens
tcagcctcctaaagtgctgagattacaggcgtattttagctttttgaagagggtaggatggagaaaaagatgaagagggagaaaaccaaacttcctaactaaattttgtgaaataattatatttcagtgacacagtgaaattctttgtatggttgttctttctgaaaagagcgaaatgaaataggattgagaatcctgactataccaatagattttcttttaaggctgcgtctgttctgcagtgtttgggtaaagcactttctgtgcattgtgaaataaaacacgcctagattgttaaaaaaaaaaaaaaaaggctgtcaattttccgttaaagccttttatctgtactttaccccttccctccagcagattctaaactcttcattcacacccactattgtcacttccacactaaattaaacaaactcagttcgatcactgcagtttttggaagcacaaagtaacactatacaagttagagaaagtgaaagaacttctttctaaattcaaacggctgaacaaggaaacattcaggtaggcagagtccttgcagtttctgttcttaccacagaaaaacttaaagaagccacattctggatgttgtttttcatgttaacaaaaagtccagacggaccccatagctcacagtgcttcttctcacccctcgcccctccccaaactccatcgacccagaagcattaatttcataaggaagagaaaacttggctttctactaaattcagctctgaattcagccctccatttcccaagggctaggacccagagccaagtcagcccgcccctccctctcgctcccagacctgagctgcggatgctgcagcccagcactcctccaggtttggaaaaggcggctacgctgggcaagtttggaaagttctgggagaagagcgaaaggagggagtgtgtgttggctcttttcctttccttggaaagcacttaacaagaatgacaccctacccccacatcaaatgccttctcttgcagtcctggttgttttataaaaactgagttcgtgtctttaatgccaggattttcttcctggtagtaagcattggctaatgattgccagtcggcttctgcgtctgtgtgccatgtgacctggacacgtgacttggagccggctgtggttgttacttgtatttgaataagaagatcaagcttattattgcagtaaaagcctgtgggacttgtctgtgcaacgtgattccccaggcgggttacacaacgcaccgtacagcctcgtcttccagaggctccagttgtttcgtaaggtaaaacaaacacgattttatattttccaaagtgaaagtccattttccccctggaaagtgtctgatgatcctggaaaaagatgaagcctagtttctccaaaccctgttagtccccttggtacagtaaggtagaactactgcccagcacacaattagagaaaaaaaaacaaatccagtctccttttcaaataaagatttaggattgacgttagagaaaaaaacatccagtctccttttcaaataaagatttaggattgatgttagagaaaaaaacagatccagtctccttttcaaataaagatttaggattgatgttagagaaaaaaacagatccagtctccttttcaaataaagatttaggattgatgttagagaaaaaaacagatccagtctccttttcaaataaagatttaggattgacgttaccttttactatttccccttctcccttcctaaaaagtcttcaagatatgctcttatctacctataaagaatttacactaaaaatgacgtttttaaatttaaaatttaaatggcacgttcattttgcgatttttttcccttagatttctacaacattaatagttaaatttttattgtccacataccctgtaaaagagacatcagaaggattcatctttttgtaggtgagaagagctggatgttcccttcaggttaggatgtatgcgtgcatatatatatgcaaatatatgcagatttaccccaggagggcttttccacgaccaagaaggtgacatctttaccatgcatgttttaatactttccccaccccaatgctgaagaagccctgctataatttgctttcttctgcctctaagggtgatgactcaactacagaggcaagatcagggaggaacaatagctttggttatctctaatgagcgatccaataaccatcaaaccagtgagttctctcagcccaaggctggcgcctctgtgtggaaccgcaaagggcacttttctttctttcttttttttttttttttaacttttattttaggttcaggggtacatgtgcaggtttgttacaccggcaaactcatgtcacaggggtttgttgtacagattatttcgtcatgcaggtactaagcctaggaccaattaaacattaactctccattttccattcccctacccgctggtaaccaccattctgctgttgtctctagacactcatataactagagtcacata

SEQ ID NO: 59426 - DNA, 1517 bp, Homo sapiens
agttttggggtcagagactgtgctgtcccttcctccatcatgaactgtgcccctctttccaatgcataggtcaaggttagggatggccatagggccacttttgggggcctaagttctgatatctgcattgctcaccagacatgtatgtcaaggaccttctctgagacaatgctgcttttataaaataccatccttagccagcagacatatcttgcctgcatttctgacttctgtttcagctcaccatcttccttttcctttggtgtgggctacacgtctagagggaagagaagccattgaatgtctgtcaaaatccagccaagatttcactaagaatatgctagctgtatcctttctctcagtctcccccttcctgacctcctggccagcgctgactcaggatagcagaggctctgccaatttcagggcacgcttttgctctctgttcagtcacagacccacgttaggccctgtcaaagcaggagaggccctacacctctctcatgaggcacataagcagtattggcatgctgttctttggaaggttccccacaactgtccctcggccctctggcactttggacaggctggccttttgggcattacctgccagagtctccggagtgtcctctgagactggctatggggaaacagggaaggggaaggtgctggcgctcatgctggaatagtgcaatgttttgatcaaagttcacagagtgatcactccagagtagctgtgctgtgtttttagtcatgctgacagcagcgaagtggcctctacacaaagccttctcttggtgcaggatcagaaacagggctggagggggagaactcctcggtgccgacttacaaggtccctaagaaacaagatcccacccgtatctcccaacaaaggttcaactcttgtttctgaagcatgtgctgctaaattaattagtccttagtggccaggagagaagggcccttggtcattgtagccatgcgggtaatgccccactgtccccactctcccagccccatcagagtaataccctactacccccactctcccagccccatcaggccccagggcttggcctcttggaggtgacttacccctctggagtgaggctccatgagggcagggccccctctctcttaatcactcttgcatccctgacacctgcaatcgtgccctgcagagaaaacattcaatcaatatttgtggaatgagtgaatccatcactgcaattttctgtcctgggctggagaatgggcttgccttctctttagaagacagtaactgatggcctcgatggaaaagagacagattctctctatgttgcccaggctggtcttgaactcctgggctcaagtgatcctcccacattggtctcccaaagtgttgggattacaggcatgagccaccacgcctggcctcacctattaagaaacagattttgcagtaggttatgggaaattctagatggagtattagcacaggagctgggcttgatgggatatgaaggaaaaaggtc

SEQ ID NO: 59427 - DNA, 1400 bp, Homo sapiens
cattgtctcttaaaatgacgcgttggctcccttatgtacctaaggttggaatcccagatggggaggtgatatatctcaggtcgtgttcaagggaggaacttgcttctcaagtctcaactccaagataaacatgctgttactgccatgcacttagcttccaaaaacacagccatgaggaaaatgcttcatgcaatgtgacgccggaggtataattaaacttcaaaagggtatcaattgcatcatgttcaggaaaaatgtagaaaaataaaagcggtactgaaagaaaccctaaaacaccccaccacctacatttatctttgggagaaggaaaataaactgaggtgatctcctggggcaccagatttgctcaagtagggcttccgttaacgttgcactggaaaagggagtttcttgtgtgtcttttccaaatctaatctttacgaaaagacacattccaagattttagttaccatcatgcctctggagcaaaagaggtaacagttgtgaaaatagtttgaaccatttaaaaatcaaactatgtaataatcacatgctaatatgattaatgttttattttagatcatgtttgttgggaaaaggtcaagagcaagggctctagagacagatggcttgtttcagattcccgcagtcttttctgcttcctgaccttagatcaataaaatacctaaactcttggagcctcagtttcactggctgtaaaatagaggagttgtggcaaggctgaaatgagtcattccacagaaaatttgggactcattggcacacactcaatagccaataaatattaactctgttgcgatgattcccctggagagccagggtttcagactctgtctggaacacaccagtttgctttgcaaagacaaactctgtcccttggctaaactttctgcccctcactttggctaacaccttcgaaaggcatgtttttaagggtcctcgtgagagggtacagacgaatcaactagtaaaaaatcaagaaagtcagtggcaccttgtccatatatgaaaggtagcacttgtactatgaaattatatggattttaaaggaagagtcatgccagaggagtctcaattttaaagctatttaaataaagctgtgtcaagcagagaaacgacagatattaccattcaaaattccagaaagcacactttgccaaaactccaggttactaaagatgaaattgatattatctttctaaagacagaaatcccagggaaaatgaacaaacacaccaaaaataaaaaaatttttttaagcctgcttcttttatgcctgttgcctgtctgtagctgtccaggcttgtttaacatttaaatgctgttttaaaaaaaaaaaaaaaaaagccaaatcaggtttcataaactgatctgtgtgg

SEQ ID NO: 59428 - DNA, 1281 bp, Homo sapiens
ttttagtgaccgctgactgcggagcaacgctcttgtgttctgcgggcccagcagctccgggaacggtcagcgtcgggggccagcctggcgggacatttggggtcccccatacgtggacctatgcctgttgtaagatgtttggaagagcgtcgaaagatgagatcatgttgtgtccttggaagctgaatgaagaaccggcttgcaaaggagaagcgcgtgcagtcccggcgcggcccgctctgctcagttctccagggcgggccttggcctggactgcgtgtcgggaggactcgcgggccccgcattgccgcatgccaccggcaggtgtctctttcctggcttgggaacctattgtgagttcaccaaatggaggcgcgaggaggagggggcgggcaggggaggggcgccgagagccggagcgggcaccgccccctgcctgcccgctccccgagcgcaccgcggcccagccacgaggctgccggtcctcacctttgaaacgccggcagctgcgcgcgctgcggcaggcgcggagaggagccacctcgtcacgtggggaggaaatgccttgccggcctccaaacctactggctcttgtttctggggttttatggccaggagagtgggctcagctctcaaacccaagatcaaaggacagtgcaggacccatcaccctgggaagttttctccctttcccgtctttctccttctcaccttctcagaaagcgtagcgaaaggggcctgccaccctactggcttttccttttagggaaattccatttcctaacgtgtcctgttttgaaagaggccaatttattgggtaatgacggcagcctgctaggcagaagtcaggccaggagcagtcgcttttattattttattcaacgaatgcctactgatcatctcccgggtgccaggcgctgtcgtgggggttcagtagtgaccaaggactcagaccctgccttggctacccacatcaccgaagaaatgagttatcaggcgacaaggtgactcctggggctcagtacttgaaaatccaagacacaagagcgggaaatcctctctcataccaagagtgcacactttgcctctggttagaacaggggtaatgccaggtttgcatttctttggaccttttcacttcatttaatagtaacacttgaaaactctttactgagcgcttactctgggactgggactctgctagatgcagggaataccgtggaggacaaaattccttcctgtccttaaggagcttgcagcccagcaagggtagtgagcctg

SEQ ID NO: 59429 - DNA, 2028 bp, Homo sapiens
aaatgggagtaaggagggctcaattgttctaaggattaaatgcaaccaagttggcaaagttttagcacagtgcccacgtgttagctgtttatggtgtgcctgttgtatgccaggcctgcgctggagacgcaggcattatgctccctgcacatggcccatacccacatctcctctacacgcgccctcgctgaggcgcgggtcctactgaagatccggatagtgatcatcctttctggcagcataagtcccgccccctttccttccctgggcttctgttgtccaggctaccttggcgttatcaaagctacttgatctttacagccacttccctctgcacaggcatccaaataggaaattccgctctcaaggaaccttctacccatccacctgccaccagcacgaacctgctgtcttgttctctggcctctctccctcagtccccttttgcgccctcattttcctgtctaaaatgaaacggaccgctgccctttttatctgtactaagtttcaggagcagaatcttcgttaaactgagcagagcaagagcgcgctgcccacagggctggggcgggcgcacgggcccttatgtaaggccgggccttcccggggaagagcgaaggctccgggaagggaagcacgggcggcggggcccggcctcgaggaccgcccccagggcggggagtggtgtgagccgcggcgccgccagcaaactttcctcctccgaattcttgaccgagagccttggaaccacattctgcccaaatctgtacacgccggagccagggagccgcccgccgcccggggagcggagtggggaaagagggggtggagaagggaccggggaggaggtgggggagggcggaggaggtggtaaggagaggagcgggggggaggaggaggaaggggaggagggagaggtggggcggggaggagggagaggtggggcggggaggagggagaggtgggtcgggaaggagggggaagtgggagaccggggatgtgggaggggagagaaggaggaggtgggagaggggaaagcggggaaaggggaaggtggggcgggcggaggtgggggtagaaagtggggaagagcggggatggcaagttccgcgggtggcgagcggccccagggagcggcgggggggcgaagcaagttccttagtttctcccaagccagcccgggagctgttggacgagtgggagcgcctggctacctgcaagtcttcgggtttcgcgagcgccgcagagcttttctgcagccgctaaataaataaataactacggacgcccgccccgccccgccccgccccgcccctcccagcccagcccagcccagcccagcccagcccagccccgcccagcgcagctccctggccgcggcggcggtggtggcagcggtggtggcggctgcggcgcaggcagggctgggcgcttggggagctccgcgcgcggggcacttccccgtgaccggcggccgcgcagctcagggaactccgctccgtgaggcttccgggagagggaaagctgttctcctttgatgctctttggttttacagtggaaaactacaattaaaaaaacatagccgtgaaaataaatgagattagaacctgctggcttcacttcctggaggctttttgttgtgtcttgaaactaggatctttgcgggtcatccctgtaagtgcctttttaatccattcacaaggatgcttgtgagtctctgctgcgtttaacatcggtcagcgggtgacattgcattaatttgctctggtgatgatttctgctttgctaggttagcattgcctcgcttggtgacacgtaataaatgcacacacgttgcaaaaattaggacacagagggagaggcacctttttaactctgtcaaaaaatagataagaaaatctcttctaaagcggtgccaatatcgggaaaatggtttattatttagactgtggagatattaaaaaccacaacaaaacctaattaattattccatagccattctacataaagtaacatgataaaatcat

SEQ ID NO: 59430 - DNA, 2925 bp, Homo sapiens
aaatgaaacgcatgcaaatttcacagacaaaagagtagctttgccacctctcattttggctgggctgctctgaggtgctgcatcttttatagtgtctaggctctcatccttaatgacattttcatattctccatcccccatcccccaccgcctctccagtaaggactttttgacaagctgcacttccctgctttagtaattggtgataagatttgtcctgtagaacatatacatagaggattgttcactctcctccttttatgaaataatttttagaaattgagctgttaaaggttgtgtttgcacatgttttttggaacaagaactttaattaaaggatcaaaaagcccaagctcttgcttttgaataactgaagccagtgtctataatttcttgtatctaaaatctgtagaaactagttgtgtgatttcaggggtgcatggggccccttgggtgtctgaacagaagggggtgggaggcagagccgcacctctgcactcttgctctgctggtgtagtgggcagctgcccacccccaccccaccctgcactgcaggctctggagtcagcagattaagcattttataaattatattctaagtatatattttaaacttgtcaaaaagataaatctagcttattttacctttaacttgtaaagaaagtttgccttcttgagttctctttgtcatgggcagtaggagtagctcgcctgagtatcatcagtgaagggaaacccacacatcttggtgagcaacgagaaatcaccatgttaagattccagggattttcttctctggtcattgttgtagccagtgtcttcatggaagacctattttcgtttcattaccatatttgatgcctaagcatttaataatcagtttatgactactaaacttttgaggatcttagaatttaactggctctagaaagtggcagagaaacctacacatgattccatgtcctaacccataagacgtgagtgatacatgctgaggagggaaggtgagtcactccccctgttagtctgagggaatgtgtatgagtcattttgtgcttctttttttctttattttatttttagcataataaagtaccaaaccaagagttgtctggtttttgttttggagagtgagggctgctggtgagggtagatttctgaactaccccagagaacgtagtcaggaacctcccagcaggatgagagaggagccatcagctggaaggagaggggaaaggatcaggagaggtaagggaactaggattgcttaacatgcaaagggtaaagtagaaccaaagagaatttttgtgccccaacaggagcaggaaaatctgagaggatgccaaccaacttctaagattattttattgattcagagaaaatgcaaatttcaaccacagctaaacaataaaaagggaaacttttcatttagaaccaatagttatcatgagttgattaaaaacatgagctggcctaaaggtggtatcctaaacttctggagtgtggaaagtgattgttaaattgccttaattctctacctaacatttttctacaatgcaagcatctaagaaaagactgaaaaagtggtgaaccagatatttgaaaagtcagctttcacccaaatatgagaaaatttttaaatgtcaggtgggcaatgatgttggtcttgctcctccagggtgtttgtcttgcagggacactgttggggtgcaggtggtcatgaggacaccgacctgctctatgaaatcaatttccaaagcttgagctcacttccaaaaacacttctcaagcatgatgataaccaactattgatttatcctgagggaataatctttctacaagcttttatgttcactgtgttggcttgtggtagctagtgaaaactgggtgatttcctcccttaatctagaggttgaccatttagaaacacaacagaagagacttccaaaatgaataaatatctcctgctgtttgaaaagtgaaccttctaacagatgaagaaactgcccaggcaggtattctgagtcactgtgtgattctggacatgccactcaacctttctccaggcttaagtgaagttaatgtttttcctcccactgactcacgatggtgccttggggacagaagaaatgaatgttagaaagtccagtgcaaatttctaaaatgccacaggaaaaatcaggtaaaaaacacttttttgtgaaatgtagctgctgtgtaaaagacacgtggcacacagccttcctggctcagggacaaaaatattcatctttctataattcaaaaccaaaagtggaacaacaccatggaaggttttaagaagggaagcagagtgtcctttttagaccaatgaggtgagtcatgttcttttctgatgtctctgggaaagatgtgatcaacataaagatgttttattgccaatgcctaggtaaagcaatctcagtattcatgtctcagaaacatgtcttcagatgcagtttcacctctctgaaaatgagctctcctatgggaaggtttggttactagtataattacaggcttctgagggtgccctggctgtgtcttttgtccattcccaactgttgctccttctttaaaatatacatatgtcatgcctctgcctgaactcttgacagtactgactagaatgccttttcctactagtggaccacatgcataaaatagtttcacaacacatggttgttggaagggccatctctgatgcagcatatataccagcacttaatgttagcatctctcaccacttagtgaacaaatttagtcataagtcaggctgggattctaattttttttattatttatttatttattttacaggcagggtctctgttgcccaggctggagtgcagtgcagtggcatgatcatagctcactgtaaccttgagctcctgggttcaaatgatc

SEQ ID NO: 59431 - DNA, 532 bp, Homo sapiens
gtggttgcttctgttttgtccaactatggatacatcgcagaaaggtttgctctgctcaactagttaaagtggcacctgatgccccaggtccgtggccagatgcagaactctgggcaacaagggccagggcctttttctaatctagcatttcatgcctctaacggaaaatgttggcaggaagttgatagagcctgagagtgctacctcacttgtgattcatctgatggatcagtgtgacctgaagcactaagttaaccaacaggctcattaatttttaaaagaggtggttagtaataaaccaatagtgctgtacaaatccaatagcagcctacacaccttcaaaagtccccagaatgagatcaaaggacaaggcagcatcagtttcattccaacaatagcattttgatttaacatccactttgttggcaaatgtgcaggaataaaataatgcgtattcctatagtaatttatattctaaattacactgaaaagcctaggtggtccccaacaaattcaatttcctttagactgt

SEQ ID NO: 59432 - DNA, 3057 bp, Homo sapiens
tccgcttttgccatatcttcaaattttcctttctctttagcagacatggtctacaaaataattatttgtaagtttaagttgtaacatttaagtaaattatcctcaaaaccaatgtcttttgctatgtaatagcgtcccactacgagaatgccaactaggcttttttttgcatcctcaattggaaactgtcttttaattaccttgttagcatgttttaagccctcttaccttccacctctctgagcacttcttagaaaactctgagaagttgactgaagcatctgggtgcttcttcttatgctcctcccgacaagtttgcacaaaaaatgcatatgatgacattttgcctctcggcttcttaggatctcctttgcccatgtttagttatttttctaaaaaataaaataaatatttgatgttagcaataaaattatgacatataagaccttaaagtacttagtaagggaatgaaaaccaaagtactggttatttaacacagtagcgacatcaacctccgtaaaatcagacaagaatatggccgagagattaaattccttgaaggggctatgccaagcaaacaaaacaaaacaaaaacagtccttcagggcgatctcaaaaagtctagacacaaagatatacccatacagtattccctatctatccgcccgagtctgctctgaatgagtatctaactggtcacttaaacgattttaaaatctagaacaccattttaaaccaaccaaaccaaaggtcagaaaacatgctgccaattcgtggctttgcactagatagggaataaacaagggcctaagcgagtcgactcttcctaattatgggaccttaaaaaaaaaaaatcaccgtgcaccgaaagtttcaaaaaacaccctctttgcataaaactttgctccaaagagggagcagcagccagctccggtgctcggaacccggttggggggtggcggtgccaccgcgaggcagcctcgtttcctatcggtttggccctgagatgtatttctgttctgactaaacacgtccggtctgaagtttctccgagtaaacaaggatgagggacaaaagccactcctgctcgtggctcggtggccccctcccccaactcgggaagtattttttggagccgtgaaagttggggtgactcctgcgcggggcgagccccccgcccctagaacttcgccggtggccgcgcggccgaggagagaggacgcggcccggctcccaggcccgaggccgccacgtgcgcccggcaggccctgcaggcccgcgccgccgccgcccccattttgtcaggctcggcgcagggagaagccccgctcgaaatgggggctggctccgcccgcggccgccggggccggcgcgcacggaatggccgctgcgcgtcttctccgcctgcgccgccgccgccgcgagggcgagcgcgagcgagaatatggctccttccctttgtgtgtgtgtgtgtgtgtgtgtgtgtatgagagagtgtgtgagtgcgagggtgcgggcgcggcggcggcggcgggcggggtgcgagccgcgctctggcgcacacactcggccattacggccgggggaggggcggggggcgcgcggccgggccctcccctccgcgccgctcccctccccccgccgcggtgggggccgcccgagggcccacccgcccgccactccccgtctccctccgcgcgggccgcgcgccccgccgcccccgcacggagaacgcggggctgtgaaaagagagaggaaaaaaaaagttgcctcggaactgctgcgcccagctcccccgcccgcccgccttgttttctctccagccagcagcgccgggcccgagtcagccatgttccagcgagcgcagcggcgccgctccccccgccgcccggccgccgccgccgccgcgaccgggccgaggccggccgggcccgcactgccgcccccaggcccccgcgccgccctcgcccgccgcggcgccccgcccgccccgccgcccgcccggctggccgcgctccccgccagcgcccggctcgctgcggcggcggccaatgcagcccggggaagcgccgccgctgccctcccgccgccgccgccgagccgcgccggccccgccgccccggccgcgctccgcgcacgccgcccgcccgaacgcccggcccgagggcccaaaacacgttcaaaatttttttaattaaaaaaaaaatttttttttttgcgccagtcagcgcggacgccgccgggggtggaaactcgcggggcgcggggctcccggcgcctcaggctgcctgagggccggggcaccggcgcggggcagcgttcccggcgcccgggcagaggctcgctccgtgcgcagttccccccacggtcccccctcatttgcctttgtgtggatcctgacccgccggctcccggccgcggggatccggccgccgcgcgggctggggagctgccggaggcgctctccccgccgcggcgctgccccagactcaccctcagcgaggcacagagtcgcccagtgcccgtccggctctcacttgccccggtgctgtctctatggagctcaatgtactgcaatggctgtgagagcgggagccagacgcagcctcctcactctctccgctctgtaacattactctccagccagcgcggctcctattggctaccgccaactcacggggctcgctcattggcccgatacctcccattgtcctgaccagagcccgtttgctattggctgtctccggggacacgtcatcaaggattgaaacagcgcgcaaatctgaatgtgtgtgtatgccgggcaaagaggctgaggcgggagaggcagaggcagaggcagcagctgctacgggaaagcagagctctatggtgtatgtgtgcatgtgtctaacccaagccagccccacaccggagcggccgccggagcgaaaagggcctgacttttccacaagtgtctccaactcctcaggcaaaagagacacccacaggtctcccccccccttcttgccccacattcacgcccaaagccgttgagataagaggccccaggctttt

SEQ ID NO: 59433 - DNA, 1087 bp, Homo sapiens
gtgttcaacttagctctcagagaccgttcagttacattttgtaatgacattggaattgattgcattttgaaggcaattctaaatgcaaagtcttcattttgttgatagaagctgggttatttattatgaaatttcaaaaattaagtaaaatatctaattaggattataccagcaaaggcaaatttagaattcaagacttcatgatccatggtaagattattttaatgcaactctgctaattaactgaaatttcctttaactctcacatctgccttttacttcttaagacatttttctagtatttcaccagagcaagatatcagaagggtaaatctcttaccaatgaactttgctaattcttagtgactccgttgaccctggtgtaaggatcaggaacaaagtgaatgaaatacattttaatacatttctgctttctctaattccaaagaccactctaaagaataagttatttgtgggtattatctgaaacttgggattaaaagagaccgtgattacccttcagggattttggcaaaacttaagccatttcatctgaagagcaaagcaagcctcccacactcttggcttattctcacaattatctagatatctagcaacaaaactcttgagtagtttgttaactacagatgccaagggctgacagtttcactttcagttttcagaatatcttttgtttcagtggtgtaagcacaccatcagaatctctactatttaaaataattaagttataattgtaacttccattagatgtagtacttaaaggaatctagaagacacaactcattaattataggaatttgactgcaaattcttctggggggtctgaattgcaaaggaggcatctttgtaagtcagactcaactcattactctgtgatgcaggctcctccaaatggcagcagaaacgtattactctctagaaacactacagtagtgctacaatttcagggttctgtagagataaggacaaattgacagaaacacattcttagaaggacagtatcatttaaaataaaaatactgtcataattgtacaccaggatagcttctccataataaattcttta

SEQ ID NO: 59434 - DNA, 1523 bp, Homo sapiens
ttgtttgtagaataaagaattataaaatcatctcttttggtcctactgggcaataaaaagctatgattctaagcctgttcccttttctcacctaagaatacaaatttgatacaaagaggccgcagaatgtgtcaaacactccctgttgcctggaattctctcttcctttgggttcagggataaaggtatgttatttcttaagtctccctttgctttcttctgcttgcctcgtaaatatttttccatcttggcagtcctacatgtcttctcactctacatgttttccctaggtgatgtgacccagcctgtggcttccactgccatccacacacgtcgctgcctctctccacatcagcatcgcaactatctcctggaagctttccaagtgctgaactacagtaacctcaaccgaactgctgttcattcaccccacaggcttgcccctcctctgcatctttgtgagaacctgagagtcatcctaaactcctccttccacctcactccccacatcaaatcgattaccaacttgtgctgattttatcttcaaatactctccagaattgtcgctgtcatggactgaatatttgtgttcccccaaattcatatgtcctaatccctgatgtgactgtatttagagacgtgacctctaaggagtaattaaggttcagtgaggtcaaaggtggagccctgatctgataggatcagtgtccttataagaagagactagagctgggcacaggggctcacacctgtaatcccagtattttgggaggctgaggtgggaagatcactcaaggagaggagtctgagaccagcctgggcaacagagtgagactccatctctacaagaaaataaaatagtcagacacagtggtacacacctgtggtcccagctcctcaggaggctgaggcaggaggatggcttgagcccaggaatttgaggctgcagcaagctatgatcacacctctgcactccagcctgggtgacagcatgagacccagtctctttaaaaaaaaaaaaaaaaaaggccatatatagcccagaagagcgtcctcaccaaaacccaatcctgatagcacctggaggacttccagcctccagagctgtgagaaaatttctgttgcttgcaccgcccagtctgtggtattttgctgtggcagcccaagctgactcatcagtgaccttctctctgttaccgcagagtagctcatcatcctctcttccctagagtccagccactctctcacatctacctacctagcagtatcactgtgggttagagtcagatcactgcggattaagtcctcattctgccactgcctgtgtaaatctgagcaagttacttaatctctctgtgtgtcagtaacctccctgtgaaatgaggctaataatagcagggttgtttcaacaaggcgatacatgcataatgcttacaacacagcttggcacattataagcattcaacgaaaagtgagctactattatctcatccgttatcagaataaaccacctaagccacaag

SEQ ID NO: 59435 - DNA, 4817 bp, Homo sapiens
taaggaatctaacttagtagaaggtgcacgagctgacatcgtgagtggctaaaatgagagaaaaaaagagaaaatcctaatcatacagaagcactgaactactgcagctgttcgttagttattaatttaataaaagcttcctccctttaaatcatgtgagtttataactggaaataggtcaataaaatttctgtcccacactgctgacaagcgatggacgcaattagctttaatcccactggaaggtactgcactctctctgggaccaggatatgtagaaaaaagcatttcaaatatataggaataaccagaaatgtatacagtattctcaacttgggaccgttactctataatataaacgaaaggggttttctagtcaatctctgctgatctcctgtaccaaagttcttccctttataagtcttgtactaccttttacaagaggaaaaagctctagagcgaaaacacagaacacactaaaatcccttcctttctctttacaactcaagccccgcctccattttgtttctgttactaatttttcttctgaaaaaataccaaatttacactgaaagactaaaattcaactttgcagacaacgttttaaaaaatacaattcagtttggtgatgttgttttgcagtcttacaattttagctacattttaactgaaccaattgttttgttcaatttatgagttaatactcagcaagtttgttttttacaaatagtgtattccattctaaaaatggaagtagcagtggtgaacaagaaaacaaccctctgagttttgtctatttcaggaggaagtactactttctccaattttaatcacaattcataaaaaagaaaaacctaactagctagatcttaaatatacaaatacattaacaatctagtaaagcaacagaaaaaggtaaacaaactaaccagcctatttttgtctggagaaaccccaacaaactgctggattccttggccatttgcattcagaagtaccaaaaactaaaatcctttttactaaataatttcttctacacgagacttgtttcctccacaccaccctatccaaattgtcagcattattccagaatataatcatttagtttgagaccactaaaaaaccccgcagtccaaaataccaattgtggtttttctgtaaagaaatggtcagaaactacaaattgttatcctaggacacagaaccaatcgaccaaaaggacttctggaatatgctgcccccaagatttagaatgcacaggcagaaatagcatacgcggtcacgatgtcccttaagccacatgaccttcctacgaaagcaaaggcttaaacttatcaaatgagaactccccctttctctgaagttaaaacaaggcagggcagctggaattagagcagcagggacagatcggctgttgactagtcagaacgggtcgtggaatgcaaagtccctgcgctttcgctgctccccttaccgtgagaagatctgggagggaggaaaggaggagaaacaccccagaatcctggtagaaaagcccctggcctcgaagatgggctctagggagacagggaggggcagctccgtgtgtgatgaccctttgtgaacatgcactctgtggcagcttcagctccaccgaggctttgggagagcggactacggatgcccggcgcggcccagctgtgaaggccgcgccggcggagagggtccatggcacccccgccggcttcggaagcccttccctctcccacctccgcgggtcaccccaggaaccagcggctcccgaccacgctcgcgcggaccacggaacagcgacgcgcaagcaggtctctttcgtcagcgtaatccctccgcagaaagccgcgcactagttttaatcacgccccaccccctggccgctggcgccacctccgccactcgggcgctttccagcagcttccagaaacgtcgcctccccaaacccagccactcacacatggcgggctcagcagccaccggccccgcccctcctcgtcgccgcagtcgcaactgcgtctgcggccacagggcggacagccacgcctctgcggagggcgaccggaagtgctcacgtcttcaccttccccgccacgccaccgtcctttcaggcccagcgtgcagcaggaaggaggactcttttgccgcggactcaagccggaagccgccttcctagtggagacgcgagtgggggaggagcagtccgaggggaacgtgggttgaacgttgcaactagggtggagatcaagctggaacaggagttccgatcgacccggtaccaagaaggggagtgcccgcggcaggtaagggagaagagggaggggtttctttccgctctcgaaattgggaaaagagacagagctgggatgacctatggggtagtcggcgcgctgaaaggatgggctgggctgggacggggttcaagtgggaaaggttgatgattaaggtatagagttggacttacagatccgtttgggcgcagagaggtgaacgctgaagagaaaccagagtttgttttcgttttccaaggagcgtggagatgggcagggttaacggaccctgcgcctccttcggcttcttagtttgggtgttgaaactcacctcctttggtcctgttcgtctctgattcaagacagttgggtttggtacctgacagggctgggtgcagaaagctgaccctgttcctcggcttccaggtcggttgtggcctcgcttttgacagttcacgtgccgagcctactcgctctcggagggcgagctcaaatgggtgggtttaaggccccctcttcgaacagctgtttccctgggtttctccattttgcacacaggagtgtgaattaagtttaattgaatactttttgcgattcccagggccaccttgacacgttcattgtgctatctaactgggttcatgctgggctaataattcacattaaggcttctggagtataagtggttcacagaagtatgaaaaggggatgttagaagaaagatgctgggggtgaagtagagttgaggaagacagaactggaaagctaggttggtttcacagtacaatgagctttaggtcataatactacctttaggttatattgggctgtttggacggagtttgctgtaatcaggctagagtaaatagagaattttaaactaagcattgacaggctcagacttgtagaggcatcattttgacagtgatatggaagggaaagaggtagagatttgagacctttccaaagaactgtccacagaatttggtgacttactgtgcgaagagggaaataaagaatagggaacaactcaagactttctagtctgtgtgtttggaaggatggagacgcccacatttaagtgagatatgggaaggaggagcagattgtttttgaagggaggaagagcagttacttagggtcaaattaagttgtaaaatcccccccgggattttgtatgtaagtcaaagtgaattgtatttggaagaagaactggggagcccacctctggtattttttttatgtccctcatatggacaaataaacctctggtattaaatgaattttcttttgggggattctatatattcgggatttcaaccaccaacctatctggtttttcccgctgaaatgttgggtgatggaatcaggagagcagatttggagactctttatattttataattgagagagacaaagagaaaaccgtttgatttgaaaaagttttctaggttccctcaggtagatggaaattttcatcaaaaacagtttattcaaggtacatagcctactagtttcccatttgagagtaccgcagaatgatacgacgtgtactgcttctctacgcagaatgaagtataaaattagcaccaaatagtaactttaatttgtcaggtgctaaactttttacatgctttatctcatttaattcttagaagaaactaattttacaagtaagtgtctggaccaacatctgcaggtacaaagcctgaaaagcgtaagtttgactcctacatagttctcttttgtaagtagattataaatagaaccagccaaaggtaataagttgtctgtgcctaaaaagaaagaaaaaagttagcatcagtagttctcaccagaaggggtgattttgcttaccaggggacatttggcaagtcaggaaacttttggctgttggatctagagggtaaaggtcagtgacgctgctaaacatcgtcagtgcatagaacagccttcacaaacaattatttggtcaaagatatttgtagtgctgcagttgagaaatttctgtcttatggttatttcttcaggaataggaaattaagattcgccgatactttctttaaaaagcagttttatttttgaaattattccttggcttgaaaggtttgtgaagtttatatagccgaaccagaatagcgtaattagattttaaagtgaattgtgagccatcgattcccaggagatgggtgtcatagaatcatggattcttggatttgggaaagacttatgcctagaattattttacaacatttctgctaagtggtaattctcctctgccctaaaggtctcctgtatttgattttcctatcattgtgaacccacaattaaaatgctcttaattattttttgcttacactgagctccggtctcttgtaatttttactctgttaaatgtggttctgcaccataggactgcactcaaaacaagcttgccacatatgtaatttgtactaggacagtgtttatatttttgttcagataacaaaataagttaaatgtggtgtaaattagatcatttacaaataataattt

SEQ ID NO: 59436 - DNA, 1539 bp, Homo sapiens
gttaattctgtcagcaatctaaggtaaacattaacatttttccctagattcaagtccgttgtccaaaagctgtaacagaacttaactgaataaatagtttcttaagatggtaagcttccatatgcttataatgactcctctacacgttttcatctggaaggctgctcatgcttttggaagcaaagaagacaatcttaaataactacatttgctttttggtggtgccagatttttctgagaaacaccaatggaatttataaattcaccagtcaatgggcaattgagttgctgttttgctattaccactgccgtttgtgagcattgttgggaaggtgtcttgaagcacacgtgcaagtttcccttggataagtagtaggaatagaattgccaaaccatggcttccagtgcagacacagtctctcccttgggcccagccactaggcaccacacattaagaggatattgtctgtccatgtcctagaaacgttgtagcatcatgctcctattcgattaaaaatctcattattaaaatgaaccatcgggtaaatgttgtctcgggaaaagaagcactgaccgtccctgggtgggctcgaaccaccaacctttcggttaacagccgaacgcgctaaccgattgcgccacagagacccagttactcaggccgcgctgcggtgtgtacagatttccgcggcgccggcagccgctctagccaccctgggcgtcgccaccccaggcgttgccaccccaggcacgggctgagaagtcgcggggcgcgccgaggaggcagcggaagcggccgaggtgcccagcggccgccgcggggggagaggctgtgccccggcgcgcgggagggggcgggcgaggccgcgtgactccgggcttctctggggacgaagcgcgcccctcgtggcggcagcggccagtggtccgcagtcggcccggactcggggtaggaaagatcctctcagcaatggctgcgcgccatgcgtgctctgcggcggggaccgtgccggccgggcgcgccaccagtaaccagggacccaggggagaacctgccaaggggaataggtcgcacggagagaatacgacacgcttggagggaagaaccacgtgctgtacaggtttaaaggatggagagtcacgtgcgcttaggtcccaaacttaagggacctaaccctttttctgggttgccgctattgccccttctccttagacagtttttcatctcatcacctctcaccccgtaaaatgcaacgaacatagataggctgtgtatcaatgtagactgtatgtatatctgtgcttcgtacataaaaagaatatgatttttgccaccttctaagaaccaatttgcaccccattttgaggcatatggcctctgttgagattgcatagtttaggggacatcaaaaaagccttatagagggactggcaattaagatagcctttcagtttgaaatggccattgaaggcttctccctttccctgacttctgaattttttttttttttttttttttttttttttgagatggagtct

SEQ ID NO: 59437 - DNA, 696 bp, Homo sapiens
gtgaaccgcctttaacatttttataggttatagcctgcctaggcagcagcaaccagctatttgataaccaagggggtgaccagatttctactggccagataaccagaaaactaaggcttctgcattacaccgcttcataagagaaaataagcattttagctacagggaagccctgttgtttttgaaagctggaggaggtcctcctgctggccatgggcttggctggccgtgggctaggctgactcacagtcagagagcagcctttgtggctgagctcagcggaactcagcggacacccgcacggtggcccagggccagcaataaacaagtcagggctgctcctggcgctcaggaatctggggtcaattagggatcaatggtgccagaggatttaaaacaattgcaaccagccaggcaggctcaggctgtatcaacagtgaaatgcagaatgtgcagatacaattgtactatccctaaattaaattaacgttctacccctcggcaaggcatttttcttaataagtgggattgctcctggccaagctttaaccactagggatggcaatgaccgatgacctaactcgtcacttaaccttggccaaggacaccaaaaccctagtcattaggggacccatctgtgaacctctgttgaacaatgaagtcaaacctaatctgatttcacccacaccttacatt

SEQ ID NO: 59438 - DNA, 1108 bp, Homo sapiens
caactgtacacgccaccgagaccagaatgggtggtttgatatttgtcagtggcaacaattcaatattctatcctttagatgttttctcactctggtcacatttaatgtgtttaattgatgctgtgtggaagtttcttcacgttagaggataaataagccattccctttgataggagcctggggctttccctgcgaggagggcactttgggagcagccttctcattagagggcaattagccgggctcccgcacccggtgccctgagcggggctcctgagtaggcagggcagacgcgccatctagtggcagctctcaggacgtccacacgcctgctcctgcgggctcccgcgccctggggtggcaggcaccggcatgctagaggttaacgaggaggttccctccttccagcgtggatgagcctttccgtgagggtgaccggaaaggcgcctgggctggtgacggtgtcaagtgtaggcaagaaatacggctgatcaagaagcgacttcacctccctcgcacaacactgagtccctttgcggcaggggccctccccgccgcgaaccctacttggaaccttgcgccatgcgatgtctctctcattctaggccacggaagccctgggtcaccctttcagcctggttctctccggtggtgctggcttgtttctcctgtctgttggggtcagctgcgtccagcctcggctcctgcaggattgcccgggcaacccagaggagatgggcgggcgtggaggtcctccctggatgacccttcccaccatttcaacatcattaggaatttaacaggcttttgcaagaaggcccaggtacgcatccccccatttatagtaggatttccaggacaaaatgtattccactctctaaacaacaagcaacatgtatacaacccattcataaggtaaagattcccttgcctacacctagcttctcctgcccaagcatggccttgtcgttctcttccccaggtcaagttcaggacctagcagctgggaatgcacattttccaagttaagagtggaagagtcccagcttggcttagatggagtcacatataggattcaggtttgccttggcaggtctgatggaccttg

SEQ ID NO: 59439 - DNA, 2966 bp, Homo sapiens
tcatttgttttcatcaatgcacatgcagatatgtttgtatatattctcgtccgaaaatatcccttcacgaaacttgctttttaaaatgttgccctttgcccaccctatgctcctatagaatatttagttcagtgacgacatccatcctcttttggcgtcctagcacaaaagtatgcaatttttattctcttttaaataaactgtgcaaaattaattttaaaaatacggtttacaattcctcatgaatggcaaagagcaaaaaaaaagacgtttacatctttcgacaatgatcccgggcattaaggccaacaatgttagcaacgaagagactgggtaaaaagaggtgggctaatctttcataggactgcttccgtggtcgctaacaacaatccgcctgctcactggacaagcagcgacacaagctctggaagcttccagttcatttcgagattcacaatgcggaagaaaaaggccggcagccccgctccgcggtgcgcaaagatatgcgcgaagggaggaggacaagctggaggcggctcagccagctcagagaggccgggtggggatacgggggcggccgcggaaggcgcaggctgcagcctgccaagaaaagggagcgaagttgcgggctttgccgcagcccgacccccagtaggttttgaaaacccccaataggaagcccgcacaaggtgacgacccttagagtctcgactctgggactcctctcacccccgtgaatccctgagacaatcccttctccaatttgtgatggcaagccccccatccctcctctggccgggtcgctggtccctagttccacggaggggtgcgccgctgcccaaacgcctccgtttgccgcggtgatccgtacagccagcccgcgatcttgggtccccacactaagggcccagaacctcctcccatccaccctcgcagactcccacttacggggtgcaccggtcgctgaactcattggcgatggtctcgatgcccccggcccgggctaccgcgatgtagcagctctgcgagcccacgtccaaccccaccaccgacatggccggctcgcggtccgcctccgcctcgggtctcggtctgcgtcctccggccccctgcctgcttctcctgccgccgctttctgccctggccgcgttctgctccggcccgcggggtctggccgttcctctgacactcagaaggacacacagacagccgcggcctgtcaggagcctcctactcccccggggacagcggcggctggctgataagaaaccctgggagaaagcggggctcagcctccgcaggtcgctccgcacctcgggttgcctgcctcactctgccgcggctcgcacaccggcgccggcgctgaactaccgacccaaaaggggaggtcccacttcctcagccttatgtatcgcactgatcagaactttccagaatctgcggcatttactcaccggcgcctccaccggcccctccacgtgccacttccgcttccttcttctcgagccttctggaaagattctacccaatgggcagccggtccccggagaacggccgccgttgccatggcagcgacagggccgctcccgtgccattggctcaaacctgcctccgcccactcccgccctagccacaggcgttttgctgccctaataaaacaggcaacgaagaatgactccaaaactcggaatagtcacaatttactaccgggaggtggtgtccgatccttaacgctaaagggaggctgggcgggcggagacagaccccatttttgcagagaccccagacaccgggatggtggggaggccggccagctgtccggagagcatgttgggaatcgtagtcccgctgggagaagtgtgcgccttgcatgctgggatgtgtagtcctggccgcagtgcttgctgggacccggctttgtcttctgggactcgcgagagaggctgggtagggttttgtctggcgcttttgcgcgggttccctggcaataagcgtcattttgttcgtttgttttgtattcacttctattattgtctggattaccccgacaactggtgcgttacgacttaggagaaggaacaccagttcaaaccgcttataataaaagcaaaggggttgtgttaagtgttcttgtattcatcaggcagcaggatgatctcttgtggagtaaaatgtcaggtgtttttttttttaagaaatcgatttttagttgtgacgtcatttggcaggctgtccacggtatcactttctgcttatttttaaaaggtctgatttaagccgacgctgttctaccctgccactcctagccataaattggtactgtgtgtaagttttgctttttgtttgatctgaagcagcttttgtttctttccctcagaagcgatgtccccgttaacttttgttcagtaaagagacagtgtaagaaaaggtggaactgtgttgctgataacttatcaggtcttttatacccttttgtgtctttttaagtttgcttctgatccctgagtttaccttatgtcaggcatgtggaagtataagcacagttcaaatatgttattggataagcgtgtaattgaataaggagttgtaacctaaagttagaaaaatctaactcataaagagtatgggaattcctccttgtctatcaaaacaagttggttaagtcagaggcaagacgaaaggcccaggtttacattacatgtaaattgtatgtgcttttgctagttttcctgccacttaggtggcttacttaacatgcttcagttaactcacctttaaaatgggagcaataatagttatcacggggttgttgtgttcttacatttggacatatagttagctgtaactataagttatttttgttatgcatcccaaaaacttggtttctgtccccaccccccgcccaccaactttttcttacatatcaaaaccttataataaaatccatggagacatagcaattttga

SEQ ID NO: 59440 - DNA, 993 bp, Homo sapiens
ttcactcccttcataaccctctcccaggattatgaaagagaacagcaaaactgtttccttatcttcatctttcatattgtgctgttcatattgcgtgactgcctagataattgatagtccacaaatttcaaaaaaactacatatatctgtgtgaatatctttgcagataattctaaatcagagaatcagattttagaggggaggtcaaaatacctccattccattgtgaaaaattcataagaatattctgaataccacagatttaaaatctatcactgtcctagaaaggttaactttcttttctttacctttatttctatgacattgttcttttggccctgtctccagtgttattttataacacgttatatttctgcttagtggattgctatagtgatgttggtacatgttctaaagggatatatagtatcatgccctaaatggactagtccacgcacctttgttcagcactggaaatttcccaagtctattcattcatccattcatgcaacaaatatttctggaattcctcccatggaaagccatcatgtgaaagtgttacagttgattcaagggtcattgtcaacaatgaaaaatgtttgcctgcctgctggggcaagagacctaaagatgtataatgcagaagatgacaaggagctgtaggggaagccaagggcttaggggccagagtgggctgtgttcagatctcacctctctcactttaactgtgtgactctgggaaaaagtttaagctgtctgaacttcatcattttcatcttcaaaatgtagatcttccatcattcattcaacaaccatgttgactttgtgctaggtatatctccctgtcattgatttatgctctcttgttaaattctcactacagttctctaaggcatctagacagtagttcctcaacaggtgctattttatcgaccccgtacttttaatgaacatatcaattcaatgaactttgcacgcctgctatgggccata

SEQ ID NO: 59441 - DNA, 2217 bp, Homo sapiens
caccttcatcaaagtagagcattggtgccaacaatattaagagttgaactattgattacatttttttttccacagcagataatacattagcagggaggaaaagtgattactgctcgcttccacttcacaggtagaactactgatgggggtgacgcggtaaggtgggagggcatgaaggcaggggacgcggcctaggtcaggagggacgcagaggagaaaggaagaggaggggtggaggctggtggctggagggggcagaggtcagacgcctcgaaggagggcgccgtgagggcagagccgcggccacctctaccgcagcagcccgtcgggccggacaccagccgcagccgccagcccggcagacgctggaagcgcgcacaggggtgctcccgctcccggccgccagagggcgcggccggcgatggcgcggcggagacggagggaggaggggagccggcagagaagggtcagccgcggcggcagggcggcggcggcagcggcgcagctccgctccccgcgcgtctcccttccccgcgcccaggtagggcgctcagcctccgccgccaggatgcggccgcccgcctgctggtggctgctcgcgccgccggcgctgctcgcgctcctcacctgctccctgggtaagtagcgggcggccaggcgcgcaagggcgaggcgtggggttcgcgggcacagtcgcccgtgccccggtcggcgcggggagggaggcgcagggcggcccagccctgccccgccggcgcgcgcgtcccgccgtccggtccccgccgcgccgcgccgtcagcagcgccctctcgcggcgcccaggtgggacccgggcccgggacccgaggcgtgcccgctcggcccctttcggtcttgggtccccgctgccgccccggccccagactcgcgtctcccagcctctgccgccccgaaccggcgggcgacggggcggcgagggcgcagcagccgcccccacaggaagcgcgcaggaactgtgccaccgaagaaactttgcaacagcgcgagtggcggcggcggcggtcccgcccccctgccttccgcccgcgctccgccgtcctgcgcgccccgcgccgggcgggaggctggacgggagccggcgaggcggccctcgaggccccgcggctcctgttcgacccccgggggcgaggactgcggtcccggtgtccgcgcgcccctccgcagggccttcgggacgtgccctggcccctgaggataagcggccagctcggcgccagcccttcccggattccgacccggaggaggacaggggcgcccgctgggcctccgcgggagctggcgcggcggggaggcttgctcctgtctcgggtctccgctggggacatcaggggacacgtctgcgagcagagcagtgcttgcccggtctcctgctgctgtaatgcccattcttttttatttcttttctcctcgcaagggcatttcccccctttatcttaaaacgatgtgataaaagttaaaaaaaaaaaaaaagcagccttgtaattgactttcatgatcagatttgttcaactttgaaagcttgagcgaaaaattatttttttttcagactgctacagagtttttgtcctctaacccagacttgctggtgtgaaaaggcaatgatttcagattttttagtaatggcagaatggtgcagtttaggaaaagacgtagcgttattgcgcactgctcttgttagcccaccggaaccttgacagcctgtttttatttgtatttaagctctctgaataaggattaatttgctgcatttgtgtacttctggcatttctataggcgctcagtaagtgtgggaaaagagcaagattagttggtaattgtttacatgcatgattaattaggcagcagtgtaattaaaaatattagggcacctccggcagagaaggctgtagttggtcttggggagcgactgaatttggctggaatcggcttcagtggaagaagggcattgctgggtggcagccctgggagaaagggaggttggaggtttgggaaagcgactgggtgactcctggctgcatcagttggcttgttgcctggatgttttgcaactaaccaaatgggtgggtggtagctgaaattggtattctatttatagcactgcactttataatgctgtactgggggtataatatttgtatataatatatacaacatatgggctgaaatgcacatttgtat

SEQ ID NO: 59442 - DNA, 537 bp, Homo sapiens
attataaacttggccccctctctcctgccttcctcctttcactgaccttgcaaagctaaaactttacttaagccctgctagccacctgatttccacctgcacccacacagctcaacaacaccaaggcaaatatacaactaatctgaccagcttctctttaagttcatagagagactctcaaatgagcacacaaccctgtctggcactcctagcgtatttctaatgtttgcctggacattgcttcatgttactaaaataaatagagacaatcagatgggcacagaattggttcactttacctggactcacctacattaagaatatcactattgggtgcaatatgtggatcaagatatagaatacattttaacagtataactacattttttgtttccctgaatttgttaattgaaaatattatacctgcaataagggcaggctacttggcagtatcttttaaatcttcattagatttttcaaaaaaaatattgctacattatactatagttaggcattttcctatgtgtttggacaaaa

SEQ ID NO: 59443 - DNA, 1266 bp, Homo sapiens
gagttttaatctttactttttttttttttagacggagtctgctctgtctcccaggttggagtgcagtggcacaatctccgctcactgcaacctctgcttcctgggttcaagcaattctcctgcgtcagcctcccgagtagctgggactacaggcgcctgccaccacgcccagctaatttttttgtatttttagtagagacggggtttcaccatgttggtcaggctggtctcaaactcctgacctcaaatgatctgcctgcctcggccttccaaagtgctgggttacaggcgtgaggcaccgcgctcggccagaagtttttatcttttgttgttattttaaagatccaactcttggattcatcagttctacagtttttttaatttaccaatctctggttttatatctcttttaaatagtttcttccccattttctttggacttaacgttatttccgtgtcatcttaaatcatatatttaattcgcttattttaatttgttctaatttaataacagaaatcttagcttcaaaattttgcgttgtgtcccatagaatcacaaaggtttgaggactggagggaattgtcaaaatcatataacgcaaacctcttgttttccacattcaaaatgcaaacaggttaaaaggcttgtttcacagctaactagttgcagaaccaaagtaaagaccagacaattttcctggccctcctttttcactacaccgctcctgctggcttcttaaccaaaaaaaacacaagaatgaagtaaaaggagaccatttctagtgggaatgccgttatagtctgggaaactcctggagtggctaggacataaagtaaccagctaagtgcttttagagcagattattatttttttatatttctctggaacagaggttactttgtgttgacacaaggtgaataaataagccttctattgattcaggtagggttcagggcatctgtcttaaaggggcagcaccttacttcagctgcccagctctaagccagagttcccagggagaggacctcatttttcccactcgtgcttccagtgagaaccacgcccctccaacccacatgccattgttccatcatgacctgattgcattttcaccccagagccacttaggggaaggattgccacctccttgaattagagttctcggagcaaggccaataagctgagcagtgggagcagggagaggagaagaataaatggagtgagtgcagcacagcctgcctgcaagagcgtgacctgcgtttctc

SEQ ID NO: 59444 - DNA, 627 bp, Homo sapiens
cttattggtgatctgctacatcaagaaggtatgaaaagatggatgtgaatgtgtacacatgtacatacaaatgtatgcatacgtgcatgtgcacacacacacacatagacacacagtgcaagagcccgaaacccaagggaaccttgtggtgaaacatctttctgtacaatgaggaatgtttgataatgggaataattttaccccttttttaagtgtctgttttgtctgggctgtctacattttgtatagaataatgctcaagatatgtttttacttctatttttatgcattgcatgaaaataagtgtttactcttatcacctggagttaccagtaaaattccatgcagctcacaaaaattcagagtgaaccaatgattattaagggccagctctgtgtgaagccctgtgcccagggactttcacaagaattattttgtttactcctccctaaccgcttcctgtatagttgatgttatcactcttttttttttttttttttttttttttttttttttttttgagttggagtctcgctctttcgcccaggacagagtgcagtggcgcgatctcggctcactgcaagctctgcctcccggcttcatgccattctcccgcctcagcctcct

SEQ ID NO: 59445 - DNA, 1039 bp, Homo sapiens
cagtaggaacttctggagaagctatctgccagctggagcacaggatggaaggggtgggtggcaagcaacagcgggttcccagcactgctgcctgacacacgcccacaaccagttccttcctggtcatcaccagtcatctctcatctccctcttccagccaacttccagttggcggccagccaaataagacactgactaaagaaggatgttcgttctgtgttatgtgtatagcttgaaacttaaaggtatgagggaatgtaaaaatgcttccccaaaactgtttaaaatccgtaagagtttgggaaattatacaaaaaattagacttgtaatttacgtaggcatctattcttgaatagtgaactgtgtttgctttatggtgttgcacccatgaagctgaaatttcatgcagcaaccattacaccacttttgttaccatccactctgagtcacatctgttcaaattccccagtcttctgccaactgatggttttttttttttatctctcctcccctgtgctattaactgtagaaaggaggggctacttagtaattctacacctgttaaagtccacgcctatcaacttgttaagcttcccaaacaagtgcagggtaaagcatgagaacatcagagtctggggcggcggcggtggctgcaacggtggctgtgacggtggctgccgctgggtttggctttctggatttttgttcagagtcgctaatgtatcccccacaatggcagttgatgacagcaatttatattccagaacgaagaacaaactaaattcatctcaaaatgattataaatcatcaagaaggagtagcctgccacctgaactactcataggaaatgacattagaggaagacttcaaagaaacattaagaacttggatcccattcacctgaggcacccgaagaagagaccatccatatttccaggtaggaattgtttacatttataccatccaattgaaacaaaaccaaacacacacacacacacacagattatatttcccttgttacaatcagatgttcattta

SEQ ID NO: 59446 - DNA, 727 bp, Homo sapiens
ctcatgtgtcacccttccaggaagtgttaattaataccagcaaccgcccacccgcatcccttccctatatagtttgagatgggaatcccttcctgctcccatgacagctacctctgtcactgtctttaccacattatttatgtgtctttcatccccagactagcattgtccattaggaacataatgtgaaccacacatataattttaaattttctaatagccacaataaaatgggaaatattaattttaatatatttaacccaatatgtccagtatgctattattttaacgtgttgtcaatataaaaatgattaatgagatggtttacattctttgtttatacttagtctttgaaatctgatgtgtgttttacacagtacatctcacatgctcgatagccacgtaggacgtagtggctaccatactggatagtacaggtctagactatgactcattgaggacacaaaccacatcttgtgtccctggcacaaagcccagtgcctggcatttagcagatactccattaatgtggaagtagaagagtagaatggagcaatctgcatcctgtataaaaagtaagaacagtctttattaaggtacttttctcttttgcatttccttatgatcaatctctccctattctgcaaggggcgcttttgtttctagacagttaggtatattgcaacagaaatacaaagtataaaaaggaattcgtatttagttttct

SEQ ID NO: 59447 - DNA, 1058 bp, Homo sapiens
aacgaggctgacggatggggtttttcaaaacgtcgctgcaaccagatgcaaggctgcagctttgcttaccgcagcgtgctgcagttgtgtttatttcagggacagacacaaggggaagcagcagccagagcacacccgggccgctcacgggaagccttgctgaagagagaggatccgcagaagctgggaaattcctcccgcagcctaggcggagactgagccgcggctcaggttgagacagtgggcaggggcagggggcggcgctcccggcccatcccttagccccgcggcggccgtgtgggccggaggctgcctgcaccgcgtcagggaggccggcctagaaaccctccctcccagaagaaagccgatcccagttcaggtggggtcttcctcggttgcgtacctggctggagccgagctggtgggcggccggcagccggcgtttctggtgatgacagccccgaaatgaaagcagcgcggccgccgcctccgagggctgcagggagatcagcgtccagcaaataagaagcaagtcctggacccggaggaggaggagcggccgagcatctctctctgctccgccgtgtcctttagatgagcactcccggccggagccggaggtggatccgcagagctgcctctgggcgcctgaccccgcgctgacatcacaacctgtgacaggcgcatcacgcccggtacctgctcccggccgctgcccgtcctcccagcctctttgtatgccgcagacatggccagccagcaggattcgggcttctttgagatcagtatcaaatatttactgaaatcctggagtaatagtgagtaatagaaaataacctttttgtttgtttgtttgctggatgttgcataaggctggagacagaaaatctcaactggacacatatgtttgtgagccgcggaagtttttctttttttcttttcttttcttttctctttctttctttctttctttctttttctttctttctttctttctttttttgctcccatctgctgtgaaaatcaaaatgtcagagactgaactagctttccttaag

SEQ ID NO: 59448 - DNA, 621 bp, Homo sapiens
gattgtttttgattttgaatactttctggttttgtttttaatatataacctgctgtatggtagtcactgaggacacaaaaatgaacaaatcagaatgcctggaactcactgtctggtaggaaacattcaagtaaaggatgtctgtttcctagaaaacagagagcaggggtgcttggtagcctctccagaggattgggacaggagtagaggggcaggggaatgtagtaagaggagatgtaacctaattgaagttatccaagtagacaaggataggaaggcattccaggcatgcagggaattgcaaaagggatgttgcagtgcaaggttcacctaccacaaggcagaggcaggaagtggtacaagggagccaggtcacaaaaggcccctcatgtgctatattatgaaatttggacattgtccagtaggtgattagaagcctcttaaggactttaaatgcaggaaagtaaaaaaacatgtttgtattttcaagaatatcatttgtgcaagaatggaagagaggccagaaaatccatttaggaggcagttgcaatgatctgatatcatcttgaaatgctaaaaaccaattaacagtacataatccacagacaaaacaaactaaaa

SEQ ID NO: 59449 - DNA, 3192 bp, Homo sapiens
ttttatttcttatcaattgcttgtttatctctaaaagagttaaatcctttgttcccacattcattctacaataatatatcttggtatcagtccttaaaatattatttatgtgtatttgatatatgtgtgtaaacatgtataatttctaactctaatcagttcagaaacagtggaacattttcctggctgctccagtttacacacacacacacatacacacacacacacaggtagtatacagtcttcatccattaaaaagcagcgacgtgattcttgaacattttcctggtgcatgaacttgcgtctttgccacgagtttaatctgaaggcacctgtccaacataaataataaaagaacattctaaaaatacccactgaaggaattaggtgtgtactggaaatacggtgctatgaagagccaattacaatttttcgtagcacaaacaaccaaagggagaacggtttctcaggagaggactcttgattcgcaggtgattttttcatcgtgtggggatctggatctgcttgagcaccagacaagcttggtatcttctgaggacggtgcccgagagcaggagaacatggatgacacaaacagcgagcagcagtttagagtcttcagagacttcgacttcctagatgtggagctggaggatggagaggtacggtgtattctctgtaaaaataatccccgcacccttttccttgactaatgaaactattctttttacctgctaaataatgagtttttgtaacaagatctttaattggaaagttgtaaactttattttgaatcaacttattcaaagtacagcagctaaactttggcaaaagttaccacacccttcctgtctgagcccacggcaaaagctgccaagttatttctaaacggcaaagacctgagttttaatgaccacacaaagactgtatgtgtgtgtgtagtcccaagctggacttaaaaaaaaaatcacaaaaaacatttcagttcttagcctgttcactggtacctgggtaaaatatgctaagcatttaatcatttctaatgtgaagtttctctaattcaattccttcaaagcttgcctgctacaacatgagaccagagcctgagggatcaaacatttttgtgcttgatgaaatcgttagaactggaaacaaaatgcaatgcacacaagagagctctttgctctgcttagctcggtggctggtgttctagacactggagcagccaaattcaagtctcagtgggcaaatgcagattcatttattttggatgataatcatggtaataagatactttcagctatgaatcatgtttgcaaaaacaggtattgagaggaggagcatcacctgtcagtcaccttcatttcagtagcttagaggcatgttccacctgagaggccgtcttttgcctcatgggatcaaaactcagttcacttaagtgagactggatgatgcaaaggtgcctcgttcggaaccgggctcatggtgttgtcaagctcatgtttaactgcaccagatttcccaaacgactctctgctagtcctacaattgaagaggcaggcctagatcccaagtttaggatttcctgcagtaggtaggcacctccttacttaactacaggcttgtgggaaatgatgcttcaagtagctgcttaccttccctaaaaggattttattattgaccaacccgcctatgtctaattgaagccaaagagccctttgcttttgtccttcctggcccactgatgaccctggatgtctgccccagcaggagagaatcatgtcctcggaataaagaaggtgttcttcaccaattctttccctggaaaacaagttgagcagatccggtccgtaagcagtataaaggcactgctatcatgtatccttaaaataactgccagcttaattttcaccttgaattgcttaagaaccaataaaaagtattgcaggtttctgtgatccataataaatgatagagaaagcattcactgaatgcagtgaagattgttttaagtctaaagcaaaatacaactgttttgaatactttcaaaaatgtctctgagacagagctcagagttcagctagtgtcaaaagaccagctccctgatctgacaactgacctaatgtttgctcttcagttaaaattcaagcttggacacctgtttccctctggaagttatacaagggagggaaaaaacggatgaagcaagagaggcatcatttcctgtctcggccagagaaaaatgttatgtgaaacgacctagcaggaatgatgtaaagcgaagtaatccgacacaatttcagaacagctcacaaatttagtttctatcaaaataaaggaaggaaaaatctgggatgcccgttacttaaaaataaatattatactaatgtttttcagggacaagaaataaggaatactacacctttttttctggtcttctctttattgtcctagccagcaataactaaaaaatcacagtgattattttatctttcattgttaagattttataagaaactggctgggcacagtggctcacacctgtaatcccagcactcttggaggctgaggcatcctagaggatcacttgtgtccaggggtttaagaccagcctgggcaacagagcaagaccctgtctctacaaaatttaaaattagccaggtgtgatagcacatgcctgtggtcccagctactcgggaggctgaggtgggaatatcgcttaagcccaggaggtcaaggctgcagtgagccgtgattgcaccactgcactcagactggatgacagagtgagaccctgtgtccaaaaaaaaaaaaaaatttagaagaagaaactcacggggctgagagtgtacattttatccaaataaaataaggcatttgagaatgttttgctacttcccaataaaatcacaataagggattctagcattcttggagtagaagagtgaagatgcctgaacttcagagtccaacagctccaggtttgaatttcatctctgccactgaccttagctatatgaccttaagcatggatgcaattcctcttgctttccacttctttgtctattaagtgggtataagaatacaggttgagcattcctcatctgaaaattcaaaatctgaaatgctccaaaatcctaaactttttgaacactaacatgacatcacaactgaaagattccacatctgacc

SEQ ID NO: 59450 - DNA, 1126 bp, Homo sapiens
gcgccactgcaccactccagcctgggcaacagcaagactctgtctcaaaagaaaaaaacaaaaaaacagtaataggctggatgtggtggctcacgcctgtaatcccagcactttgggaggccgaggcaggtggatcatgaggtcaggtgatcaaggccagtctggccaacatagtgaaattaacaattttctacaccgggacaattatttaaagatgagcctaaagcaaaagttaaggtgttgctgctctggcctctgcatagtgcatgatccatcagactttgcccagctgctctgatagtctttaactctgcattgtatctgtgaaaattgctgtggcagaaataggctggaatgtttacctaatgctcttccactaaatacccaaaggattctggaatgtgctacaagcagcatagctcctacttttttctccttctgaaaacagtactaaacaggggccgacctcagggtggtgggagtgggtgacacctcttttgaagttttcatactaatggtctctttgttacagatttttgaaaacacagatcattggtagtgtttaccaaaatcaactttttaaaaaatgtaattattacccaccatgccaaagaaaagtatgtaatcatttctgcctatgacttcacatgagtttacatgaaaatagtgtgcttttactacttttcacattgggtaaacaaaagttttgataccaaagtcgatgagggcctaagagttaataatgacaatatttgttcccaagctatgactaattgaatgtgtgaacatgtgagtgcaagaggattttggcataaaaaaccggctgatggtgtgatttcagggtgagagtatggacaatttcaactggggagtgcgcagacgttctctggacagcctggataagtgtgatatgcagattctggaggagcgccaactgtcaggaagcactcctagcctgaataaaatgcaccatgaggactccgatgaatcatccgaggaggaggacctcacagccagccagatcctggagcactcagacctagtaagtagcggctctcccactctaagaattgggaggcttattttttgtaactaatgcaggaggacagtttccagttgcagctaa

SEQ ID NO: 59451 - DNA, 958 bp, Homo sapiens
gtttttaaagttttcaatgcatttgtttgagatcaattaatatttggatacctatcatgacccaggatatttctttgttcagcaaatatttattgcatgcccactctgggctaggcactgttttagaggacaccgcagctatcaaggcagatgtggtccctgttcccatgaggctcctacatttgagtggaggaagatgtacttgtctacgttgggtgatgattagtgccatgaagaacaaaacggatacagtgagtaatgtggacagggctatcttagctatcactctaataaggtgatatctgaggagagatctgaatgaagtgaggatacaatggatatccaaggaaaagagcattccagcaaaggaaaaaacacatgcagagaccctgaaggagaagcagggtcactttgtcaaagggacagcaaggaagccaatgaccgggtgaaatgagtgaagagagcgttcagagaggacagccaaaagctctgtgggccacggcaggactttgtcccttgctgagcaagatgggaagccactgaatgtttgcgggcagggtagtgacatgctgtgacttatgtttaaaaggattactccttcatagcgatgaagaaaagctctataacaaaagttccgttgtggtggttatacagcattgtgaatgtacttaatgccaatgaattgtgtactttaaaatggtaaattttatgttatatatgttttaccacaataaaaataatttttttaaaggatcattctggctgctatgtgcagaatagactgcagatgggcagaggtagaagcaggaagactagagagatggctgtggcaacagtgcagtcaccaggcgatgctggcttgggctagggtactagcaagggatatgattagttgtgggcatattctggaaatagttcagagctagagctgacagggcttaccaatgacacgtggaat

SEQ ID NO: 59452 - DNA, 1876 bp, Homo sapiens
gaggctgaggcaggagaaccacttgatccctggaggcggaagttgcggtgagcggagattgcgccattgcacaccagcccgggccacaagagcgaaactccgtctcaaaaaaaaaagcaaaagatactaccaagccctgcggagcaaggtacctcacacttcatgagcgagttaagatgggtttcacaatttttcaagcaaggaaacgggctcggaggtcttgaacacctgctacccaatagcagaacagctactggaactaaaatcctctgatttcaaataacagccccgcccactaccactaagtgaagtcatccacaaccacacaccgaccactctaagcttttgtaagatcggctcgctttggggaacaggtcttgagagaacatcccttttaaggtcagaacaaaggtatttcataggtcccaggtcgtgtcccgagggcgcccacccaaacatgagctggagcaaaaagaaagggatgggggacttggagtaggcataggggcggcccctccaagcagggtggcctgggactcttaagggtcagcgagaagagaacacacactccagctcccgctttattcggtcagatactgacggttgggatgcctgacaaggaatttcctttcgccacactgagaaatacccgcagcggcccacccaggcctgacttccgggtggtgcgtgtgctgcgtgtcgcgtcacggcgtcacgtggccagcgcgggcttgtggcgcgagcttctgaaactaggcggcagaggcggagccgctgtggcactgctgcgcctctgctgcgcctcgggtgtcttttgcggcggtgggtcgccgccgggagaagcgtgaggggacagatttgtgaccggcgcggtttttgtcagcttactccggccaaaaaagaactgcacctctggagcgggttagtggtggtggtagtgggttgggacgagcgcgtcttccgcagtcccagtccagcgtggcgggggagcgcctcacgccccgggtcgctgccgcggcttcttgcccttttgtctctgccaacccccacccatgcctgagagaaaggtccttgcccgaaggcagattttcgccaagcaaattcgagccccgccccttccctgggtctccatttcccgcctccggcccggcctttgggctccgccttcagctcaagacttaacttccctcccagctgtcccagatgacgccatctgaaatttcttggaaacacgatcactttaacggaatattgctgttttggggaagtgttttacagctgctgggcacgctgtatttgccttacttaagcccctggtaattgctgtattccgaagacatgctgatgggaattaccaggcggcgttggtctctaactggagccctctgtccccactagccacgcgtcactggttagcgtgattgaaactaaatcgtatgaaaatcctcttctctagtcgcactagccacgtttcgagtgcttaatgtggctagtggcaccggtttggacagcacagctgtaaaatgttcccatcctcacagtaagctgttaccgttccaggagatgggactgaattagaattcaaacaaattttccagcgcttctgagttttacctcagtcacataataaggaatgcatccctgtgtaagtgcattttggtcttctgttttgcagacttatttaccaagcattggaggaatatcgtaggtaaaaatgcctattggatccaaagagaggccaacattttttgaaatttttaagacacgctgcaacaaagcaggtattgacaaattttatataactttataaattacaccgagaaagtgttttctaaaaaatgcttgctaaaaacccagtacgtcacagtgttgctta

SEQ ID NO: 59453 - DNA, 1626 bp, Homo sapiens
aacagagcttctaatcagactgaaatgaggccagtatgaaaaaacattttgtacccagtaaggcactttacaaaagtaaaatggtgttataataacaatgaggccaaattgaccaacccagactgtttctacgccacagtaataaacacatcggagcgcgcatgtcaagtagtccttgagatactgcggtgaattaagagggagatgaaagacaaaactaaagtaaaatgcttccattttcaaaaacgagtgaatatacattccagaaatggtaactaaatatctgtcaaaattcttcagaagcttgatagcatttaaaaagaaggcagcatagatcactgaaattccaaaccaaatgcattttcttttttaatgaactaaacagtggcaaaccaggaaattcagtggacatactatgtttgtttaaacaggaatctgacagtctcccttggtagctttgcggggaaatgcgggccagtagataatacactttaataccgaaagaatattagttaattatccaacccattaaacatttattgagcacttaacatgtgccaaatgccaggtgaagcgttaaggtacagaaagaaagtagctgctttcaaggaattcatggcccagccaaaggagtcagacctggcacagccagcgcagcgcacagaggaaaaagctggcccagcaaagcgctgagagaaagggtcaggagccggggaaagtgatgcaaaggagtgatgcaagtttgacttggtccctgagggatgagaaaactgctgcctcttgggggaggggctgagcacacgggcaggaaagagaggaggaagcgagtgctggagggcttgtaggggagaaggggctgcagggaaaagcagaaagactctaagggttaaaagacgcaaatcatctttgaaacactgttttcaaatctgactgccacacaatttaaagagaaatttggccagcttgaacgtgtccagagaagagtgatcaaatacatacaaggtccagaaaccatgtcagaggagcaaagatcatcggagacatgcggagtgtttcaggcagaatagaaaataaaagggataaggtggatagttctcagacgctgggaagtctattgtgtgggcgcgggaatgaacttcttttgtgttggcaatttgggctgggctcaggtgggccgatctgcgggccttgcccggggtccctgcggcagctgcgtcacctgactacgtggggctgggcggagtgccctaagcagggtccttcacacgtctggtggtgctggctctcactccgcagggcctgtcatccttctgaaagagcctcacccaggtctcttcacagaccgcggtatttaaagagaacaagacaagaagctgctcaccagcgctccagcacattcttttggtcaaagcgagtcactttgctggcccacattgaagggcgaggaaagtagacttcttgatggaaggaagagcaaagaaaatgtggccactttaaatctagtacagataaagccagtgacacgaaggaagggataagtataaagaagacttgatgaaccagtgctcatagtttccgtatgaatgtctgttattcgacttctttaaagatacgcacatcgaaagt

SEQ ID NO: 59454 - DNA, 3614 bp, Homo sapiens
cactcaggcaacgccctggcttcacagatgaggaatgtgaatccaagcccctgatgttccattctgtgtatcttgcacccatcatgttacttcgcttcccaacagagtcagaaattaaatctggccaaagacgtttacttccttctttgacactcagtgtctctttgacactcagtatgaggcaggccacagatcagcaaagcgaaagtgaaattaaacaggatttgacattcagaagatacttggttggtaacagatttacccaccatgactgtatcacaaaataaccaactgctgagttccaaggaggctccccgactctgcctctgtcctccacctcccctccccagcgagccagagagggtctattgaaatgtgtccctggtttaggaaagggtgcccacggtcctccagaagtcacatgtccctgcaatttgtgaaaatgtagcaatattctggccaaaagcttctactccgcgagtcaaccaggagcacctccccaggctgtccctcctcctaaggtcactatctcggcaccatcgaaatccgcacgtgactgtccatcaccttgattcttcggcagttccttggtaccatggctagccttatctctccagtgagacgggaagccctttgagggaaagggaccacttcctctactgaacagctactacgtgccagacaatgtgcttggcagggtaagacatggctcctaccttcaagaaacttacagaaggataagaaaaaccatgtgcaaaaaagtaagcacagtcacgtaggtataaacaggaagccaaggagcccagaagaggggcatatactggcggggtgggatagctgcccggtcttaaaaggcaaaagaaggcgggagggcaagccaggcaggaaggccagcgtcaaggagagaagcggcttggtttacaggagataaaaacagttcgaagttgctggaacatcaagcgcaaggcagggagcggtgggagttcaggctggagcggtggggcctagcaaggtggccacaggcacaagcccgcgtaattcccagaggttgggtaccggagggccgcttacgcaattcgcaagtgaacgaatttgggcgcccatggcgaggctctgtcagtgacggtcggtggtggcgccgccagccagccccccgcccccgtgcacctgtgcgccttcgcagctgccaaagcaaacgcaggctccccgacttcgccagattttcaaagcgggctgccagccccgggccactgccacggccgccccgggcccccacccccggacccctcgtttatgcgctcggattacagcgcctgttgacgcactgtagcggccgcctgcgcgccagcggggcccggcggttttctctgcagtcgccaccgggttttcccgaagaagagtccctcccgacctggggctggggaggctgggggcggtgaaggctgcttcggcccggctggccccaggcggggcacggcggcggggaaggggccggggccgctggggcttgcgcgaggcgcagtacgggaatccgtcccccccgggacagcgcggcgggaaacaaacaggacgagctccctcctctccgtgcccgcgccctcaggcgccaggggtggcaacggcctcaggggtcgagggaggcggctcgggctccccgcgctgccaggctcaggcttgggctggggctggggccggggccgcggcaggcacccgcggcgggggcgcaagcggcgcccgggagcggcttggggcaggggtgcgctcggccggggcgtttggtggccccgggcccgtgcaccggcgcccagaccgctgtcattacctggccagtgtagttttcccggagcccgggaggcctcgcaggaggtagaggtgtttcctaaagctgtggcggcgaggaggtgtcccccgcgggggcggccggggcggccgctgccgctgctgctgctgctggggctggaggctcagcctcccaaaagattgaaggaaactgtcctccatgggcaggagggctggctgcgagagccccgggttccctttactgaagtcacggtcttggccaaagctgttgtttttgtgactctccggccatgtgatggatagaggggcgggcgctgggagcccagcccctcctttccacccgccggaaccgtgctgcgtgggagggggcgtccctacctggaaagctggggacgctgggagactcacagcccggaaaacaagggtgacgcacccactcccacctcgacccccgctccgcctcctggtgccctttgccctgagcagtggaggggaggggccccgtctagtaggtctctgggacacttccccggcctggaagccaggcctcctgccacagccctccccaaccccagccccgacctgcctagaccctgaaagtgaaatcattttagctgatgattaatgagctgcccggcattgtaaatggcaacagtaaaggccattgtctcccccgatttgtgagcaccaacatctggctggcgtcccaagggctaccaccactctcccagggcttgtatcttttcttatttcatctttctttagcagcctgccaaaaatattattagaaagctttgttgccgctacataactttaaatctctccttcctcagaaaaagcacccataaaactcagattgatttatgaacagtagcataagggctaccgcccaggtacctgccctgttgccgcctgagaagtgggggcttcttggagaactctttcagatccccggggaaagtggcagagtctaccgaaaccatttatagagaagtatccagactgaagttctcagttccaggaactagggagtacccattggttgatcaccacagtgactctccaacagttcaccctcaagagcgtgacagagtgatcctgttttctgaaccaaaattcaccatgcctgcctgaaagaaacaacattcaaaactgacaccatcctgggaaatgcagaatatatggtggctttggctataataattattgtaaagtaataaattctatttctggcagctaaggtactaaaattgtgaaaagcaactatgaaaaaagtgatttccttctaaaacaaaatccagagatttcacagttagcttttaggaagggactatccaagtggggaggggctctgtgctgagaacttccccttccccttgggatttccctctagggatgggatagggcggagtgggagatgagctgctctcccttgaaaatccattcccagcgtggaggaagaatactttcctcattcttctcagcactgctaagaaacaatggaatttcaaagacctctaaatattaggagggaacccataaggaacagaaaatatacataaatcgtaaaaatagtgacacaatctctgtatcctatcataatttgcccagcttcacatgctacctttttcattttaacctgcactggctaatatgggggccactggtcacatgtggctagtgagcacttggaatgtggctactgcaaacacgctgtgcccgggcccggtgcagtggctcacgcctgtagtcccagcactttgggaggccaaggcaggaggatcacttgaggctaggagtttgagaccagcctg

SEQ ID NO: 59455 - DNA, 1209 bp, Homo sapiens
aagaaattagccgagcatggtggtgggcgcctgtagtcccagctacttgggaggctgaggcagaagtgcttgagccaaagaggcggaggttgcagtaagcccagatctcgccactgcactccagcctgggtgacagagggagactttgtcttcaaaaaaagaaaagtcaactaatgagtgatgtcagcaaaaatggttgagtaacaaactccaaaagctcatcccttcacaacagaagtgactaaacaggaaagaactgtcagaatcaactttatcagaactgtgaagacagatcaagggtttacagcaaccgggcaaaatgtttaatcaagagaaaaaaaaaaagctgagtctcagtaagaaatctttgttagttttttaagtttttttgagacagggtatggctatgtttcctaggctggagtgcagtggctattcacagaattgagcatagcacgctatggcctcaaactcctggcctcaagttatcttcctgcctcagcctctgaagtagctgggactatagacatatgtcactgtgcctagctctttgtagtgttttttacttactctggccccatctactgctctccagattaatactggccctgaagacaacaacctactttctcagtacagatttttagtaccaagggtggcagaaaggaccttcttctcaaagaactgtggttgttttgaccttgctggtgactctgagctcaaagggcttgtgcctattttaactaactcaaaactttcctaggacaaacacaactacccagtgtagggggcatttgtggaatatatttaaaggcaaatgaattagccactgtcagttggggtaaggcataactaccacttggggtaaacaacagataatccaaaaagcttaagaagaaaagatgagaagtgaggcattttagggaataagggctttgaaaagctcccacatattcctgggaatctagaaggccatgtacttaaccaagtcaggctgtatgctcagaaaagacctaaaaaagctgttgcttctggctgacacccagactctatacaagcaggaaatgaagacaagggcagaattataaacagccttagtgtagaaggtatcccaacacatacacaaagatggagcatttttgttgatgatgatgatgttgttgttccagatgtttaaggaaacgtctgttgaatcactagctgactact

SEQ ID NO: 59456 - DNA, 608 bp, Homo sapiens
tgtctcaaaaaaaaaaaaaaaaatcactaaagctggtgcagtggctcatgcctgtaatctcagcactttgggaggatcacttgaggccaggagtacaagaccagtttgggaaacaaggcaagaccccatctctacaaaaaaatttttttaatgcaaaataagccaggtgtggcagtgcatgcttgaagtcccagctacttgggatgctgagaaaggaggacctcttgagcctaggagttcaaggtttcagcaagctatgatcacgccaccacactccatccagcccacgtagcaggacaagaccttgtttgtttaattctgagtaagaatgttagctttccagcctcagtaagatttatttatttatttggactctgtgatgcaacagtagttggctaacattataatgtaaaaaattaattggtaatgacgaatgatctctaactgattattatttagtagtcagaactaggagatgaagacaagtctataataaaatctggaaattaaaataaacttaatatgaacatatttcctcataatctgtttctcccaaaggtaatactctactttccaaaaataaatgtaaaagttattttaaaaaaact

SEQ ID NO: 59457 - DNA, 2215 bp, Homo sapiens
ccagtctttggagacccttaactgtgagtagttagcataaaagaggttcctaaatgggtatagtgtgttcatttaaaaggggggaagagataacttaagttgtaatgatgataacggaaatttgtataataaagaaatctggcaactcccaaagttcaaagcgttcatcttttccgaataatctatcacgaagataaaatttgcttccctttaggcctggcagagtggttcaagcctgtaatcccagcacttgggaggctgaggcgggcggattgctgcttaggagttcgagaccagcctggcaacatggcctaactccgtctcttaacaaaaatacaataaattagccgggcatgggggcgcgcacttgtggtcccagctactcgggaggctgcggtgggaggatcgcttgaacccggggggggcggaggttgtggtgagccgagatggcgccactgcactccgcctgggcgacagagggagaccccgtcttggggggggggggcggttacttcccctgaaatgccttagggacctcaaagtacagcccagaggcctattccacccaattcttcgttgtgccactctctggtgttcctaacacgagagaaagagaaatggacaaaaaggcgaactacagaatgatgcaagcaggccacagagctggaggaagacaactgcggagaacgccaaaaggcctcctctcggtttctcctttcctcattcgaaatgtgtcagaaaagtcccgaagaaaagcaaccgggttgcgttaataaaccgcgtgatctatacactatccgagccccatgcctccagacttccagagtgagcgacccgggcaaaagtgcgtcacccagcttttttgtcccagtgcagacacgctcaggtcctgtccaggaattctggaggtctctgaggcgcaaaagttcacacagagcttacgtctacgtttacagctaatctaaacagtccagtcaagaagtgaaagcgaaaaacaccaccaccgccccaccctcacctaaaacggggtgtctactcaccttactctacccctacgcattgacctttacctcccaataaaaccttcttttaggaagacacgaacctctgtgaaggtgaaagaaaagcggagacagcactaaagccgaggtctggagggactaaaagcccacctctcagaatcgcggtaacaaacctcacctccgtacgcaagatggcggtcacctctcggttacccaggccaaaactaggcgtttgcgccaggcattgtgggaattgaagtccgacgttcacaccggctccgtaaacctcacggcacggagactaggtctcccagaatccatggcgtgacaaacgcagtaatttggcaacaaaagtagaccggaattagttcctagatctggagcagggaagttatctaaaaacaccaactttcgttaaaagaaagcagcgacctcctctggcgttcacccccgaaggaaaaaggaatttgagaaactggcgccccccaatagatgtataatcggctctcagtgcatgcttcttagagctttctagaagacaaccagctgacttttccaacggaactccacagttggtaccacaaatttgcattccggtcgtttctacgaaagaccacctgacgtaattttaggctcatgcttttctgtggaaggacagaattactggggcgcaggtccccaataacagataaaaatacttatgaacaaaatcgtttagtgtcaggtcgctgttttgttttgtttttggaaatacagaccaatcactgagctttcccattaaaagagtcaatacgtgcaaagcaagtagaacagcgagctcctggtaagaataagcgctatgtaagtgtttgttgcattaaaaataaatacaaaccaaacaactggcagtcctcaactgagggctccttttctcttcccaccacctctccaacccctcctccctccattggttccccatcccccataatttcaggtccttgcaaggaaaacttaccatctcttcatatttaaataattctttctatggatatgtacccttttccatccccaacgtgataacaatttcatttgttgttaaagttacagtctggaatatatacatttgattatttaactaacagccttgtgatcaagagtgttcaccaaagcaacccatcttctcagaaagaaatctatctcaaatacagatttct

SEQ ID NO: 59458 - DNA, 2337 bp, Homo sapiens
caaattctccctggaacaaaattctagtaaccaaatacatcatatcaggggaaacttccttacagcagggatggtattaaagtaaaaagaggaggaagtcccttcttcagctctggcagggacccggctggggaggaaaccttcccgcaaggtaggtgatctgctgtggtgaccaggctaaacccactctacagctgcaggagggactggcatcccttagaggtgaagaggggaggagacccacctcctggaatgtgtccctgtggtctccagatgatttcttcctctaataaggacaattctgccaaaggaatggaatgcttcgtcacaggctcaattactctgtctccgccagcctaccacctataaacaattcctcaaattaggaaagcggggagatttaataaagacataacacgtaaagtgtaggaaaactatttgtatggcattccgagacgactaggtcagagttaacaagtaaggagcaaagtagttaataataccaattctgtttacccatcacaacacctgtgctgaatgtcagggtttaaaaaaatctcccaacctttatctaaaaagatagggctacgtaacaatcggtgtggtttttgtcggtagaggtctaggaagccgcaagagtagtggacgccttgacagctgcccttctcgcgggccccgcggcggcgtgcccgtgtggttgcgtgcgcgcggacggggcggggctgaggagggacgtgcgcgcgcgcggacggggcggggtggagctcggagggcggacgcgctcggggccgtctggtcggcagggggcgctgcgcacccatgccgcgctctgcctgcccccgggtgctgtccgcggcggttcgattggagcagccgccgaagagcgcttggcgccattttgaagcggagaggaggaggaacggcagggctggctgcggaaggggagggggggggagaaggcgattggatgcggcggcggcggcggatcccggagagccccggagtgagcggagtagcgagtcggcaacccggaggtaggaaacaattcagttaacggaaagaaaatgtctctcttctctggctgcggcgctccatttttcagcggccgccactgccgctgtgtgcgtgtgtgtggcagggctgaagcgccgcccgcctgggtgccaggcgcgactcgcctcccggcatcgggggctgcagcgggtggctgcctggcggtggcccggggcgggggtcgcggggcgcgggccggctgcgcggtgggggtggggagggccccgcggccggcgcgcgcctccacgccgcgggttctgccgcagcctctggaaaattaaacttgccgctctgatcccggccggggcggcggcggcggcgggcggtgaccttgcgcgcgggcgggggtctcggggccgcccggccgcccgcgccctcccgccgccgccgtcgccgccgccgcgcccctccccccgcgccccggccggccggcggctgtttcccgggcggcaggcgggcggcgcggtgctcctgttgaatcctcccgcgggcgggcttctcccccttccgggcgaggggcgggcggggaccgcgggtcggggccgcgggcgctctcgcccccgccgccgggtccccgcgcgccgcctggcctccgcttcgggccaggggacgggctgagcgtgacatttttgcactgtccctcgccgctcgccggagggaaatcgcgctcaccgcgccaccccgagtggtccccgagcagccagttgaggaagagcccagcactggcgtggagggactcctcccaggccacaactgggttctagctttcctttcagaaggaacggcggggaaaatggtgtgcaattgtgactcgttattgtttttacactgttattttaatgttactttaaaagttttcggtccggagaaaaaccttgtttgttgttgttgctgctactgctgttggtttttggtagagacgtgaaagctaactcttaagtagctcgacagttattttggacgaatgactgaaaccagaaacgccgcccctcgccttcggagctgcaggctgctgcgttccttgccgcggacggggcgagctccgggaagggttggtagagcagctacccacccactccacgcgcgtcttcaacagcctctctcccccagcgagggttaacccttttttatgtcgaagaaagtgcttctcgtacttttaataagaggtgatggatgggcagtggtgcccagactgatcctaccctgttgatgaaatagtttcgaaaactttgggtatagccttaatttagagggttggtctgcggtgtggagagagttgggtaa

SEQ ID NO: 59459 - DNA, 684 bp, Homo sapiens
aatattgctgtgttctccagaaggtccttctccggaatttgctatccttcttgtggctgtagttgaacaaacttacatttgacttaaagggaggtgtttatctaagctgtcttccttttaggaaaaataatggacacagtgacgtgtaaatccactgagcaccttggacatcacaaccagagggtcatgtgcccctgagattgagtggactataccttgggggatgggaaaggtgggggcggggtgaaagcccgcagttacattcagacagcacagccctggaaatggatcttaattcatttcacaagcaattccaatgtgctacagcagctgagccctgtctgcatttgcttgtttgtttagcaaagggaaatgtccttagcctagcagcctgcacgaactgtttgcctagagacagtcacaataattgagccaacctggaaggcaggaaatagggccttagaggccctacttctacttttagaagtaggttttggtttctttttttaaagaggtatttaaaaaatggctatgcaattttccatcccccccaaatgaaccatatttttaagactgtctctgttttgtagctcttattttctgagtgtcacatagaaggcactcaaataaatattgcttcaatacatttggtttgtttccagtttttgcctttttttttttttg

SEQ ID NO: 59460 - DNA, 967 bp, Homo sapiens
tctcccataaaatggagcaggaatacctgcttcatggttttggatggaaaatatctggccccaaatctggcttattgcagggaatctggcttactgtgcttagaagctttggctatcttccttctagatatggtctctttaactatttcatccaaccatgtgcagccagtgtcacagaagagaccaaactctgtgttagaagctgatggaattcaggtagcgaatcaaagaccaccaaacattaaagagtaaaaagtgtctgcgaaacacatcagatgtattttgcagaatatacctctgtaatagaatgggttcccccttccccttgcaaatcagccatgtatggaaataaaaaaattccactctgatgagcacatttccctgctttcaaatgccagaaaccatgtgaacagtgagcaaggaaggcccgcaccatcaccatcagcagacaacggtttcataacgaattctacaaatttgactccttgcctgcctctaattctttaatggaatactaggagaaaattaacagagtctgatgacctcagaggacttttgaggggaaagctaagtccatgctggactgagtcagctacatagaaaatgaaacttcagtttgcccacagcctgccgctttcaaggttcttgtttgctacgcgtgtgctcgatccacccatccctcttagctgatgtttgctgctgctgttgctgcagaatgggaactttgaagccctgcttcctataataagctagatgagctcatttgttaatgtttttccttcctgttatacttttcagtatgttaggctgctatttaacattgaattgtcacaatctgtggcattatataatgatataatttctttgctgtataattggtaaagaactttgtgatgattctgatgggagggagataaaaactatcaagaaacataaggctgtgagtatataaatgcaaaaatagcca

SEQ ID NO: 59461 - DNA, 978 bp, Homo sapiens
gtagcattggttcttttcatgaaacccgtaaattaaaaagtacataatccaaagtcaattaaatagtaagctattataacaaattcttttatttcattagcttttcaaaatgtggataactacacactcaacccaaggaatctacatttttccactgactgctaaagaccaatggaaataactctagtccccgtagcacctcactgtggggtgacctacctttgaaataatgtattggttctagctgatttttatattgttagtcattaagttaggcttgatgagaaacagatataatctgatttggggattcaagtattatattgcatttctcctcacaactagagataaatttgccatggtttttctcttcataggctcatgccaaagtctggcatctctacaatacttctttccgtcccactcagggaggtcaggtgtccattgccctaagctctcactggatcaatcctcgaagaatgaccgaccacagcatcaaagaatgtcaaaaatctctggactttgtactaggttggtttgccaaacccgtatttattgatggtgactatcccgagagcatgaagaataacctttcatctattctgcctgattttactgaatctgagaaaaagttcatcaaaggaactgctgacttttttgctctttgctttggacccaccttgagttttcaacttttggaccctcacatgaagttccgccaattggaatctcccaacctgaggcaactgctttcctggattgaccttgaatttaaccatcctcaaatatttattgtggaaaatggctggtttgtctcagggaccaccaagagagatgatgccaaatatatgtattacctcaaaaagttcatcatggaaaccttaaaaggtatgattgtgggtaaagttctcatttcctgccaaaatcttctggaaaaaaatctctaagattatctaacataaatgatgtgaatttata

SEQ ID NO: 59462 - DNA, 2951 bp, Homo sapiens
agagaaccctagaaaagtagcctgtcacccttatttctggggaataagaggcaagctattaaggccatttctcaaaactaaacagccatcctcacaacaatgacagcagccatcccaccctctgcgatgacatacaaatatggaaaaatgttatgtgcagattctctaaattaaaaatgaggagggacaaaggggaacacacattcagttcagtcaaagacaacttcaaatgaagaagttactgctatttttctgcactgaaaattgatttctggttcaccaagagaccagcctgattctaagtgtggtctcagtattggggtctctacaagcatcactagccagctcattcctgcccactgagcccaaggaccagggtaaatcaataaaaagtacaaataatcttaggttggtacagattctctgcatggcatcaaaaagtatgatgaacagggactattacagaatagctgcctggaaatatacccactattcagggctgcaatttatcaattaagaacacaacttttattttggacagaatgtctaagaagctaatgggtgttaatttggaggagcaaagcctttgttttgtaaagtacaggacggacagcactctggatttaatcacagtccaccattatggtgggccccaaaagtctcggaggcagcaaatctctgaatattttgtttagcttcagcattgaatcaactctataaaatgaggggatatttgacttagctgatacttttgttcatattttacttgcacatttttaaaagatgtaaataaatctgtgtttggtttaagttttcctggtcatgatgctgcttcaaaggaaaaaaaaagaattaataaaaggaggcatgaaaaacctaattctttttcaaaaataatagggataaaagaacagtgtgaaatcaatggtggcactgaaataatagttacaaaggaaatgcagtacagtacatagcttaactctagtttttagggattgcaaattagacatcccaggaacaaactgttaacgtcaactttccccagtcactccaggtcatcatttaagttgccaatgaggaaacatcctcaaataggacatgtcttgttcaaattaaatattgctacataaaggtcacaatgccttttatttttggtgaggcatgtcttgcctgatattgggcagatctgactcagtctgacatcccctcaatccaatcccatggttgggggtggtggggcagcagcgggggggttacagccctacctgatcgaggcagttgctgcgtagatatctcagtgcttgctgaatactttgaggcaggggctgtcccgttctttggacgtggactatgagaggaacgccaaagacagccttgtctttgtagtcgggaactttcatcctcttcatgaactttggaactgacctagaatttacagaaaccaggtcatgcaagcctcctgggtcacactgtggggtgaggctctggaagcaagcatgagggaagccaggcttttgttggaatacccaacagatgcggggtgaattcaacattctctctgcattaatcacaggacactgctgtgctctgtgtggcccttgcctgcttgctatctctagctactaaacagcatgagtcacgttcccagaatgtatttgtagctctgttttcaggtcaagtggacaactttccaatttaactgtgatagacttatttctcaagtgctgaacacttaaaagtccccaacaaaacaaaacaaattaaaaattacaagaggaagaagaaatctggctggggttggaggaaaaggaagggagaaaagaagaacaatatttcttggctctatcttacttttctagagccagttgtagttttcaaaggacattttaatacagaagcatatattgatttgaccatgaatttataaccttctaaaatatttcataaaagcaccattgattttttaaatatgtataatataaaacatagaacaattactgacacattttgtattttttcaaacccaccaaatcatctacaataggtccacattcaagttctaacatgcttctgtcaattccttattacaaggtttactgcatattcttgtttctatttgccaatgaaataaaagcagaaatgtatttgaagaattaaatgctctttgaatgaatcaatgctctaagtggtaagctttgcatcaggccagaaggtacaagtgacagctgtttctgtgcaaactgccaggattattttatggcaagtttatttttatttcctctgttcacaattaatcaccctttacttgtctctttttcctttcttggagcctgactgccttccctggaaaccaactgagaactacaaatagagcaatgtttcctgtagggtccactgcatcgaggctacggcagagctcatgccttatgtccaggagatcatcagtgaaggcaatgaatgggtttttcagatatcacaaagtaaacatggaagcttctgcaatcacacacttagctctagagccaaggatcccctcctaggtgaatgtgctacgcaccatgtccagccgtgcttgttggacatggagtgcttctccatgatggccgtgaggcggagcagtgagaagcgctggagcaggctcagctggctggccgtctggctgctgatgtggggcgatgctggggccggccggggctggtgcgacagctggaaactgttccatcggagtcgcctttaccagagagaccatcagagaagccagtcacaaagtggacttggtagcgggaaacacgggacatcaccaaggtacacgcagctaatcaagatagcagccgagcaaagaaaatcgcaaagcaaatggaacagaagacacaagtgtgcagaataaacataggacatgatttttccaagtcagataaatctggaaaaagtcttattatccattttattag

SEQ ID NO: 59463 - DNA, 737 bp, Homo sapiens
cacatggattcaatcaccatgatacctgtacagaagtcatacttctgttcaaataattcctaatcacatacatcacttagaacagagtcaggcatttagtaagtactctgtgtatgtttgttaaagaaataaacagaacacaattactatgaaatggatgaaaaatcatttcacaagtgcatgccacctacctgtttggcctggtcagagaggcccctacaccagaatccctcctgtctctgaccccaggaggctcagattcattaagagatgttacatctctttccacatcactgggtgtcgtccgaccttctgagacagagttaccttcaaaatctaaggtgatctgattaggagatggaaaggtggataagccaggttccccaaccaatgtatcatgagtttgcagttcaggcaagacatctttggaccagtcatcgactacctcttggagcccattgacatgctgcagaatgtcatccaagtgagggaaaaggtcatctttctccaagtccaaaagatctcctgtgctggcatacagatgggagccagggacattgtcatagatactgactcggctggctctgtggcaggacgccatgagccggggctccctggcaccagggacctgctctctgcccagggagatgctaccggtcctccaattaaccccattgctactatctgtgggagagaggctttcaatagaaagtgccttggggaatgttcctggtttg

SEQ ID NO: 59464 - DNA, 2155 bp, Homo sapiens
gggacttttttaatgttatgaaatgttagtctagtttcttataactttttttgatgaaagcaaaaatactgtgattttagcattctgcctccaacaaatctacctctctttggcctgaggcaagtcacctaatcttatatatcagtttcctgtgtgtaaagcatggaaaataattgttacctggctcactgggattgccaggtttaattagttatgactttagaaggttgtaaaaaattgctttgtaaactattcataacaatgatggcatacaactccttctgatatctttattccttctctgatttcttccatatccagttcttctgctatagaaataaaaagtcattagtggtgaatttgtatgtttttatctgcatttcttcctgttcaatattttaaggatcttatgtattatcacagaaaatgtaaaaatgttcagaaaactccttcctctggtctcttgaagccattagtacagtggttttcaaagtggcgtcttcaaactagcatcaggaatgcttgagtccccagttccccaaatgtgcaccagggcactctggggcactgtagcaaactcacacaggaggcttgggatattttttaaattcttgagaggctcacaagcaacactggacatctgtcagacactgagcaaactactagtccaaagtagttcctgctttcaacatgaggtcctgtcaacaacattcctttccatgaggccatatctagctggatttttggcagatgctgtgataaaaagcaggtgctatgtgaaaatcaatgtggaacagaaaataaggctggcaataacccatctgattcccaggtttgagaaactgtgcagtgtccagccagtgcagacatctcattattaagtaattgtggttattattaatgaaataaaatattatttttctttcaatttaagggtgtttttaaaaatagctgctaagttgttaggacataaatacttctccaggtgtttcggtctatgtacttaataaatgcaactgttaggtatttcttttggcctagaaacagagttaccagaaaagtctggtagccctgtcgaagggcactgtgcaaaaactactgaggccttgaggacaccaggagccaaggaagtctggaaacctctgacatgagaaattgctccaaatgcaaattcttgggtcccctccagacttcctaaatcggaaactctgtgggtggggcacagtgatctgtgctttggccaggcctccaggtgattctaatgcatgtgcacatttaagaaacattgcattagcagcttatgtcctaagagcagcaggtgtgcttgggcaggtggatgttccgttggtaaatgaacatcaggctaatctcacagtttgaatgagaaggtacagaaatgacccaactgggggcaaaaaatccaccccccaaatcagtttacataaatacataatgcatatatcttgctctcttaaagctcattctagcctcttaaaattatgaaaacgtactgtttttattacaaatcgtgagtaatttgtgctttctcttgggcattttggggaacccgaagtgccttttgatttttgaagattgaatcactctattattgaatgcttcagattgctgagaatgaatcatatcattcctttcagaagacagaatttatggctggccagtaaggcatgatccaaaatctttggcaggaatctgatttgcattctcttctgacttggtagcaagcaggaccctcctcaaacgccttgttagtgtttctgtggagaggaataaggaaggaccaggtgcgaggagttccctgggttcggtggaaacgcatggctgcgtgagtgttagagattttgaggaaaatctcctgtgctgaatagcagacctcagtttttcatcctggttaatcctcttaagcctttgtacatatgcaaagatttccaaactttggagtgctaaatcagaagctttcagcaacagtcttccttggcatccccctgtttccttagcaatatggtggtctaatgctgagcataaggaagccagttaggaaagtgcatctatgtggatacaggggaagagcaatccttattatcttgagtcctctgatgctgggatggcttcaatgcttgatcttgaggtaacagca

SEQ ID NO: 59465 - DNA, 1580 bp, Homo sapiens
ccttctaccaagggaaatatataattctggagaattttattctcgcaaaaacagtattcactgtcttgtaaccaatgtctcccttaaaacaagaaagccctgcagagagttgcagatgtggcatggaattacaagcaacttcattctggaacccatgctggtacagacacagcctaagactgcatccttttaaaggcattatttcatattgctgaggcttcaaacatcacttggaaccctatgaagtcatgtggtcccagttctgtatttatataatatgaaatggcagatttacatttattcctgtgtaatttcaaccagtgattttggcccattgacccatgctgttgaaatctttaaatattctcagtctgtctgtcaaccagtacacttgctctcttcctatgaagcatcccttccagatgtcttgcccctcctcccatgttccttagtctctatttgaacacacatctgttcttgtttgctagatcataaactgtatgaggacaagacttaagtctgtcttgttcattactggatcctggcatttatcatagggcatggcatggtgtagaagctcactatgctttgaataagtgaaagcatagaaggaggggagaaatgggaataggataaggaagggaagggaagggagacgttataggtagaggaagaagagagaacaagataagatcaaggaacagcaacacatatagtgtagaatctaagatgcctgagttgtaagttatttaactctctgaggctcatgtttttatttataaaatatcatcacatcaacctcacaggatttttgtgagcatggggggagatgatgctgcacaaacatctggtctacaggaggtaggacccactgaggttgacaggccgcctgggattctttcactttcaagcctgccaggatgatcaaatgacaagattctgtggctctgagccatttttgggctgctgaaggaagtatctgggccttatgctcgctgcattgcccctctttccaagtgaatcacttcattaaaatgaaaggtttactaaaacagtctgccaggttaggatgattcattccccagctgtggccatcatcagaaaaccatgtgcattcagtacagttatcaagcctgaatagccactaatttgcagagcttttggtctcagtgtcatttatttttgtattttaaaagaggaagtgcacaagacatcattatgtcagtcccacataagaggctggtagactcttagtaagtggatgcacatgtttgcatttccaaaagcttctcttttcatcaaaagaaaatacatatgtctaattggctgtttgtgtaaagtatgggcatatctatatgttgggttagttcctcccttgatggtaagctataatgaaatacatttttaatgttagatggggattttagaagtctactctgcaaacctcagatttaccaccctatttagcttgtcaagtaaggctgctacttacattaaatgagtaacacctaatcctgaacacaatttcaaagtaaattcccttcctttccaaaacagacaaactagcaaaaccttacttc

SEQ ID NO: 59466 - DNA, 717 bp, Homo sapiens
cgctctctagctggaaggcacgcagatggattacaaaacatttcaggctatttctaaatgcagagtagtggaatatttccgagaaccattcttgcaattattttcaattaaatctttatgtgtagtttttcttacacaaggacttaatagagccacaaacccttttatggtcaggctgatttggagaaggataacagggatcagtgcaatggaattctgcaatgcatgctcaactctggagccacagtgacctatctaggcctttgcttccatacagaaaacaaggtttctccttaatttgctcttcctagaacagaccatgctctctcactgtgcttgactacagcacatgagatctttctcctataagtgtctttctgttcttcaagtgttgtgccatactgttggaaaacaacatctttctgttctatctttgctgggctgtctctttcaaaagtcaacaggaacattgcctaatcttggaagccttccctaagcatttagtatggattctggagctccccttggatcctgcactaatgcctacccttgtacttctgtcctgtactatcattacctctctacctccctcccttcctcccctgcccccactagaatggaagctcctggagggtggggcccacatcttgtcttgcccagcatctaacagttgctgaataaatgttgaatgaataaatgcaggaatggatgagaaaa

SEQ ID NO: 59467 - DNA, 4847 bp, Homo sapiens
ttatcgtagcatctttcgcacttatttgcaatgaaagagaaaggggtggatttccagctggtggtctgggagctgtgctcgctgcagctcacagtgggcagccattgccaacgctgcttcaacagtggaggcaggtctatttctgtttcatcttactgccctctacattttacgggggaggtcatcaaatctgaagccccaggaagtgtaaacatccacttttgtctgttactgtgaacaaaggttcaaaattgtgacttcaaagcatggcagacactttcctaagacagagcctggacactgtccaagctcagggctcactcagccctttgaacagctgttacccaatccgttcattcagagcctttcatgtacatgttttgtacatcaactaatatctagatattgcgacttcttttatctacatttgaaaccaaaatttaccttaccaaaacatttacataaaagaattcataagtttgactttgaaactctctgtagtgtaatatcttaataaacaggatttttttcccttgaaaacgtaagtgtttctgaataaatggagaatcagaattttcaggaaatctgataagttcaagaagagttaacacttattcctctgaactcctaagccacgtccttcccgtcttcattagagggcattcctggtgtaattatttagattcatgcctgtcttctctccaagtccctatagggcaataactatgatctagtcatctctcaatttacaatcttcaaagaagactctggtacacagaagacatttaagagacatttgttaaaagattgaacaaaggaatgaattcatttgtatctatctagggatccttatttttatttagctcaatggttctcatctgcagggatttttgctcccctgagaacacagggcaatgtctggagacatgtttggttttcacaacttgtgggttagatctcttctggtatccagaggtaaaaactatggatgcctcttagcatcccacaatgcataggacagtccccacaaaaaacaattacctggcccccaaatgtcgatagtggggagattgagaaccccaatttagatagagagtaactacaaaaattccatacacagacaagagatctcagaaataagccagcgctccttttagagaaaatgcagtggcacccactcatatcatttatagaaactatttcacggaaacataaaccaaattggagatcccaggtggtcattttcatctcacagctcatttttgttctcccggcataagcctcaactagataacatctttggactttcagaggtcagcatttatatgctgaccccatagcccagaataacccaaagaacgagactttcattcaataacagtggcattattttttattgtgggtcatggctcataatacgcaattcagctaaaagggaaagatacaaaacatttgagatgactggcaggagaaaactctaaaaattctccagcacaaaaggggattaaaatgtcacaggaaatttttttcttgaaaatggaagggcttatgaatgcttcattctttccagaacagttaaaacactgtatgcacgggttgcttgggttcggaaggcagggcagcccattccttttgttctgttgctcaaccctagaaggctttccctggtgaactcgggcccacgagcagtgagaagttaggaggaggaagatgcttcatctaaatgaacaatctggattgtgttcatcctccctcttagaagtgaagagagactgccttaagctgagaagcaaaacagactaagcgggcaaagccaagtctttcactggagataacatttgcctgatattttaactgtcatctattacctgaagactcatttatccaaggccgaatgaagccagctcttgcactgacatggaattcaaagtgatgaataggtctatcagcaaggatgactcacagtgagacattctgcatcaggtggcatgaatcaggtgtcaatgggaagctgggccccgtctgcctgcctcggtcctgcctctgctagaggctccgtcctgttactctccagccaccagccagtggggggacctcgcacagaggtggcagccctgtgctgcagctgcacttttcagcctgcctgttagatatgatgggggctctaaggggataatgagtgtttctttcctgacaatctgcagatgattcgaactttctggggtttaaattaatttcctgtttggcatgtttgcaggaggagaaaacaattatctccaaaattacaagtaattagctgtttgcttattgttgtgggataagatcttacttccctcccacaccacacccagaacccccccccccacacacacacacaacacacacacacacacacacacacacaccctgtactctagtttttcagttgttatttacaagtctcgatctgggaggttagagtccagttcccacccaggccttaccgaaatcttcactctgctcatgtaagccctgcccctggatcctaatgagtaaagaaaactgcaggagcacaatgtccatcccagtgacttctgcttattagatgggtgtggtggatgcccagaattccaggaaagcaagaatacccactccccactccaagtcctctctctacaggcaggtggcaaggccagctcaagtaccataggaaataaagacatgagaccgaagatctcaagatgagagtctacattctggctcatcacttactagtcgtagaatcttaagcaagtcactcagcttctctgaaccccagtttcctcattttattagaaggattataaaaccccctgtaaagtagcgtttctcaacagtggcactattttgggccacataattctttggtgtgggggagcatcctgtacattacaggaagttcagcagcatcactggcctctgcccactagatgccagcagcacccaccccctagttgtgatcatcaacagtatctccagatattaccaaatgttccctggagggcaaaattgtacctgcttgcaagcctctgctgtaaaggagccccctctcctttaaatgtttaataaaacatcacccagaaactttaattctacctcccaaggattcaggagcagcaaagtaaacagctacaaatgaaatgagagaacttttggtggaaaaccaggtttgggataaaattgagtaccaattggccttgcttagagattctggattttgttttaatcttgggaagggagtgggagtatgttcttctttcctgtttcacggggtttgtaggggcttaaatgagcctaatgtatttgaaactgcacagaatgatgcctgcaactattcacacagtcacaaccaaagaattggtgcaatgcagctggcatacatggaatgtcacccgagcactctcttcatgttggggacaaaagaacatcgcgtgatgattctagttggagcattcagtcaaatgaatcagttaggtgccagccacatgccagaaaaaatgacaggaacccagcattactgaatgtgtcaaacatatatttttttaatctacaaattatttgacactcctccgattgaataatgggtctgctcttcttgaacctgagcagacctttatggctatgttgactaatagaatacagaaaaagtgaagaggcaacttccaagactagatcataaaaagtcacacaccttgccttgctcactcttgggatgcagtctccatgtggggaagaaggaagcctgggcaaccacatggacacatgtagatgcaccagctgccagtctcactgaggtcctgaccgagaggcagcatccactgccagtcatgcaagtgcccaaggcttcggatgttcctggagcccagtcactgagccaggcatagcccgcaggtcttgccagcctatgtcacagtcatcaaagaacagagacaagccatttccaccgtgtcttttccaaactcctgacccacagaatccatgagcataataacatggttgtttaataccactaagtttgggacagtttgttacatagcaacagtcatggatcacacttccatggagctcaaccactaattgcccaaacaatgtgctccctgaggaacttgggtcctgttggtttagctcagctggtggtaatgtcagaaacagccagggaatgagtctgccattggcatggagaggcaattagggtcacgtatttcatcagcagagtctagaggtctttcttgacacatagaagggttgcagaggttatgacctcttccatgccacccatgaacagaatggcttgatcagcaggaaagagagaattgcattgacatataaatacgggacaagaacactaagtgggagccttcaaagaagaaggctcctttgagaagcctggaaacttccggagctggttactgggtcaggagcagcctattctagagaacaacctggcattgactcagaggctgggcagtggcctctagttcttgcatgctgggagaagttacgggaatgggtgtgaccatgacctgccaagcagagagtctttgctgactcaacataacctctgcccatcttgacccctagagacaacccgtcttgatgaagagaaataaaagtggcctggatttgagggaaatagtgaaacattgctttccaaacaggagtcaagagactagagtgtgctgagagaatagcagaatgtgtgcaggggtgctaatgagcacagagatcattcaggatcatttgcgcattttcagagtaagccagttctccgaggtggcttcttcctccttgaagcacacaaactctgtttcctgaagcttccttactca

SEQ ID NO: 59468 - DNA, 4446 bp, Homo sapiens
aaatttcacaaacaccagaagttggcagaacattgatacttttttctgactggctactgttcactagctacaagtgcagaatacaactgtaactattctggtctacgggcctcagctatgactgaggacagaactgtaaaatctggaagaaaaaaatctccacccaagacttctctctgaaaatgtggaccctcctttaatacacacttttctctcactagaggatggctgagttccagatccactgtctagagaacaacacaggtcttacccaattcccacctcactccttgtactccctagtgtcagaaaaggtccactgtgaagtcacaagaggccctgagctctgtgggccccaggtgccccgggaaaacttgggggagaatgggcatcccaccccagcactttctaggaagaagggcagcattttgaagggctggaagtagaggaaggaggttgcgggtagaagactccatactttctgtgacgcctattccttaggtaggaacttaggaacctcaggtaggttcagcaacatgctggatcctgcccttgggaatcctgatgccttggacatttacttgggaagcagagttcttgataaagagcagccagccctcaagaggggagtgggagggtagttagtataggatgggcacacggctttgctgctggtggcacaatgaggtcctccagcaacatgaggggttggtgaggaagggagaaccaaccaggtctataatgatgggaaaaaaaaagcataaaacatacaaataaaaaaaaaacttcttggttccaagtaaacatgcctacgtataattatgaagatgacagggttgcacagtcaagaataacgtgggctcccagatcgtccagacttgagttcaaagccctgttccaactcccactcgctgtgtgactttgggaaagtttatttaactcctggagaatttgtttactcatctgttaggtcttactatgtttattttccagatgagtaaacttaactcttaggtctttatgaaaattaaataaaatagtaatataggtagtgctgaaaatagttcttggtacatcacagtgggtcctcaacaaaagtagctacaggtttagtaacccttatctgaaatgcttggcaccagaagtgtttcagatttgagatgtctaaaaattttggaatatttgcattatatcagttaagcatccttaatccccaaatccgaaatccaaaatactccaatgggcatttcctttcagtgtcacgtcagtgctcaagaagtttcagattctgaagcgtttcagactttgaattttctgattagggttactcaacctgcataagtatattgttactactttttaaaatgtaaacatttcaaaggctcaatattgtggtgagaaatataaaagtcaaatgaccaatccagacccaaatatttcatctaagtacatcttaaaggttaataaactctgctgacaacctgcctatccatgacaaaccctgagtcttttcatgggtgattcagtggaaatattctcccgtagtcagaggcatggcttgcctgggcctctgggtgcagctgcacagattcaagcagcctgaaggaaaggtgactgacagctaatgatctgaaaagaacttgtctcaactcaacgtcattcctggcattatcgaacaaagcaataaacctcacagaatggaagctacagtgtccagggccagctctgctaaggtaaccaaagacagagaaggaggcaaaagtgacagaagaaactcatgggaaaccaacagaaatataatggctttggcagaaatgcaattatcaattgggaggtgaggaagtaattttactctaaatgggggttggggaggagggaaaattggactctgaaacaatctctcttttaccggttaatgttttacaattgcagctgcatgccgccaagtttccttattatatcaagtcagtctccacttattgatagcgccctcttggacaaatgtgtttttccatacaacaaaactcgattccaaaggaatgattcaggaaaatgaaatcagaaacatgtcaaagtaggaaaacttgtctatgcatttttcagttctctgaaagatttcagaggacagagattcctaatacaagactataatttcattggacacctgtcttcaaaatgacaatgcatgtggaattgctccacaaagtgtcatgcactacactggtgaaggaattaatatgacaaccgtttttcagggtttccaagataccatatgcagacagccaatattttatcctacaaaacaaggtttttgcaaggctcaagattaacatgtaacttatgatgtataagactgtactaaaggatgtttctattctttctggaggaatttctaaatagagggggacttaagagtatacatattccataaaatcaataacgcaaaagaatccacaatgtttaattgttaagattttagtccattaaactctaagaataaatttcaacaaattgatagtgatcagatttgtaggcagtctttcatagctgagggattcaacaaatatgaagaatattcctcaatcaaaaggaatgaaatccttagaggaaatgggcaattaaagtttcttaaataattcatttgaattagtacgagagcttagtttttaagttgtcaagtgggcattagaaaatttacatgcattgtacagcactttttttctgtttctctccacaaagatatgtaaaactggaaaggtttacaaaattaacaaaaatctcaaagttaacctcagtttagaaaaatcacaagaatttgagagagttgaaatttttttaaatatatactcttattctttcattcattttctttcagcttgtgatgaatgttttctcagtatcctatgctgaaaacaggtagatactaatatcgatcttcaagggagggctgttgagtattgaataagacaaaaacatggaagcaatcagcaccatgctggtaagcagaggcatatcataaaaatcagtctgtcttttttttttttgatgtaacaaataaaattgggaaataaatatttgattcatgtagtgggggctgaattgcatctcctcaaattcatgtgttgaagtccttgctcccaataccttagagtgtgagtatatttgaagatagggcccttaaagaggtcattaagataaaagtagatcatatggatgggccccaatccaatacgactggtgtctttacaagaggagattaagacacagacacacacagaaggaagaccaggtgaagatagcaagaaggcagctgtcagcaagcccaggagagaggcctccaaaggaacaaaccctgccggcaccttgttctcaacttccaacctccagaactgtgaaacatatttttgggattaagtcacccagtctctggcactttattactgcagccccagcaaactaagacagtcattcaaagcattaccatgttttataatttttaagttgttttccatgacgaatgtagcactagcctttgggcaaattggctttccagaacctcagttacagattgatccgttcaccccttacatgatagaagagaaaatgtagaaccggaagacttaggtgacttatctaagatcaccccaacctgggtttggtggcctcctgctgccatcactggaggatcaaaaatagatattggattgctttgaaaagatggctgttaaacggatatttgggttctaaggaatacagttttaaacccaaatgtcccatctattaccagttaatgatgtttgcctcagacttcattcccacccgcttacccccaccaagaacctcccggcccttcggtttaatgtgaggcacagccctttcctccagcactcctgccctctcagctcagtatttaccaccaagtgattccgagagctaggaacacttcctgccaaggactgtctctttcactgctacaaggtaaagttcaacgggctttactatttatctataagacctgaagcctggcctaaacccaccatttcaggccagttcagggcaacttgagagagagcaactggtgtccacaggaaaccacaattggaaaaggcaatggttttcattacagtttaagaaaaaaaacctcttttgtttcaaattttctggaagacatgaggacacacacaaaaaatgtggcattatatatgtctgccataataaacatgatacaaagtgtataacttactcaaacataatttactcttcagttgatgatgcagcagtttgaagggtcatatgtacatggatgtttaataatcattttgtcttaaattgagcacttagtatgtgccagacactgtgatctgtgtttaattatagtctctcatttaatccttgcaataactctgagactgttgctcttttaatgccattttacccacagaggaa

SEQ ID NO: 59469 - DNA, 9075 bp, Homo sapiens
agctttctgttctgcctacccaagatagaatctttgtgtggttgttaattttcataaaaagatggtcatctggcctttactcagttgacttttaaagtatttgtggctggcctttttggaaaacatagaatacttgcaatgttcctctccaaaacacaacttcaaagtatctactgccaaatctatgcaagaagtatattcagagagaattatctaagggaagcgtaggccacatactctcctagatcagcatttccaaaatgtgttccccagggaaagctggttttgcaatatgtgacttcccagtatcctgtgaaaagtggtttcaagatgaaatataccagtttaaacacagttaaactactttgtgcaagattttcctgagcctttcataagtctgaatttccaagggaaagggaatgtagcatttccaaaaatgacttaaccacagaaatgttttctcccttgaatatctgtctaatgggcctagtgttctgtgaagcagacttatagaaattgcctgtggataatctccatgctatttctaggttaagacagagaatctgaagactgcatacctgacctctcgtttttacctacccacccacccacacccaaatatttctactggactataatttattgtgacgcccccatttccactgcaggatgttataagaaatgagactcactactgaattcacagcaggcatggttgaaggcaccattcactatagcttgcagtgttccctttatgagatttgtatgagaaattcctctcataggtcaagttcttgggagaaaattctcccaaagagcaagtcccaggaaaatcttggctggtaagttcttaccttaagaacagggaaaatcttcccttggttgtgttttcctctttgcttagatcagggaagctcaagccaaatttgcagcccatttttgattattattcaaggccttacattttatatttccatgtgatatatcttcctagttttacctcattaattggccaacatttctcttttcatcagatttatcttttttgcaatctttagttatatattcttctataaatgacctcaaatcctctaggtaatgaggtggaatgtaaattaatatatagtatctttccccataccaaaatcatatttcaattgctccaagggagacggcaaatattttttatgtggtctttagatcattcaaatatctggtgtgcaatgcatgttcaggttctcctatcttcttaagtcttcttgattgcctcactaccctgttgtcatagctaatgaaacacagagaaagtgtgtactcttgttaatgacatgtctccactaaatctccatctatttatgtccctttatataagagttttgccaaaacccacttatcatttgttctctttttaaatctgttttaggtcatcaattgatactattaagaccactagcagtgactgttttttctaacttgtgtttctgtgttcatgattaatttgctaatgaaatgaggaattttgcattgtaagagttgaccattgtccaaaatttgctaagaattaaagcactgatgattggggaaggtgggagagggaaagacattttaaaaaatgaatttttatttacttaagctaaagttacagaacccaaatttggcaactgtctgcatctgaacaacagaagtttcaacattctgccaacagagtaactcctggacgattggcacagaagaaggcacaaggcaaatacccatctctgtacaccctgtgctactgtgtcatgtgctgctccaggcaactccaatggattggccaccctggccaatgtgtgagttataaagcaatgatgtgtagctattgaacctacaatttggttaaagttaaactctcaagttttatatgtttacaagcatattgtccttttgttaatttcctcccagtactcatttcttgacttcttttagttttactatgtagtaatttttaaaatgttagtcaaagttagttaatttaattcacttagcagattttcctgtaattttggttaaacagtatcctttctgtacaggccctccaaacaccagcactgagtagaaagaggctctgattcatgaaatgtgaatttatgacagttgccactcttaaaaaaaaaaacaaacagacagaacttgagcaatacatgactgatgcattctcagcctgcttcctgtgttccatctgtctttctgccagtgcattcaccctccaggtttgaaagtagtcgggcaagaaagtactaaacatagagaaagggcaattccaaaagaacaaatgattgcttaatttaggctgacattacccagttgctgggggtatgggccatggggatgggccatgttcaccacttaggttgggcaaattcccaagatgccttttgacatagtaatgagggggaatacatcactcatgcccactggcattctctggggaaatttttaaaaggcagtatatcccactccagttgagttcaaatcaggtgccatatctacttaaaaatagcctcagatagaatggcaactcaaatgacagtttaactttcactactttctcggtagtgaaactttctacattccacattttctatcaagaaaagaaagaggttgtattgtgaggtaagaggcacacacacggacttccttcagtagctgcaatccttgctataggtcaggcatcaagacaattccactttacaggcctggattttggagaaagaaaggtgtttacaagtttctgtataattatagttatactgacatttaaatagttcaacagactggacttcctaacattcctattacatcgatattaatgaaagcatgacacaggtttcaaggaagcatgtccaggtatatgctgaatgacataataagaaaaatgtaaatatgcattgcttttgtcttaaggtaatacttgtgattgcagaatcctagaatgtagagatgatggggacttcagagattctttaatccaaaccctttatttaatggaagaagggaaaaaggtctagagaagctgtgacttctctcagatcacacaataaattagttgctgaggtagaacaaaaacctaacttccactttaccatttccttgagaaactgtagaacaattgtaagccactgatatattccacataataaagccgctctgttgcctttttaggttctagtatgttacgtttatgttcccctgctttctacaatcctgttcaaagagttgctgacttaaccacagagaggattccagaacctgagacacagaataaacttgagcaatcatagtccatccacttcattgtctcatcaaaaaccaaaggtccagtgaagctctggaactcaacgctgtaaaggagcgaaggagcttctatacagagcctggatgcctgtctccttatcctacttcagtggacttgactgcaatccggattatgctgttttctaagcatttaaaataaaataaaaagtataatagtgtgataagttctttcacaaagcaagcaatcacatttatgtttctacttacatttgggttttccaaatatgtgtgtgtgtgtgtgtgtgtgtgtgtgtgtgtgtatgtagactttaaacatggtgcatccatcatgttgcactaaatcaaaaccaccaaataatgatgtagaactaataaatcaaaaccatcaaataatgacatagaaatccaattctcccaccttacacccattaagatggctactaataaaaaaacagaaagtgaaatgtagtatagatatacaatggaatattatccagccttaaaaaggaaggcaatcctgccatgtgctataacatggatgaacctcaaagacattgtacaaagtgaaataagccagtcacacaaagtgaatcactgtatgatttcacttatatgaggtacttaaagtagtcaaattcatagagacagaaagttgaatggtggttgccaaaggccgagaggaggaggaatgaggaattcttgtttaatgggtatggagtttcagttttgcaagatgaaaagagttctggagatggatggcggtgatggttggatattatgaattatgaatgtattaagtaccactgaaccatacatttaaaaatggttaagatggcaaaattaatgtattgtgtattttaccacaataaaaaaaattagaaaaaaatccaattctccctttccttggcctaacatggtcttccaccacccccagcatcctctctcctatccactcccaagcgccagtcagtgaggcaaataaggaccattcttatttccattctctctctctacaacaatttccctattgattcaagcaagaatgtggggtagggattatgggcagtatgacttatgataaactttcactctgcaaaacaacaccctcttttaaacatctcctctcttttgaaatggaattgcaaccccagaactaaaaaacaggctagagaaatgatgcatgtatgttttgatgtgtaccctaagatgagcaagtttagattcatcctgggtttggataatgaattctgattctatgcatcatcaaagattcctttatttctcctccttgtttttcctccccatgagtgtatctgctattgaatcatgtgcacgccattcaatgattatctcactataatgaggtcagtggggagcaacttacttgtttccactgttcccaacaaccatgagaaattataagtaatgatgtcttaaatcaaattaacataattctaaatcttaaagctctaaagtagaataatgcaaacaattttagtgatgtggctgtcactttaagatactaacctgtaaactacagaaaataatgctgtcattaattttatttgcacatgattaatggaatgattaaaagctgttagtgacagggcacaatggctcacatttgtaatccccgcactttgtgaggctgaggtaggaagatcacttgagcccaggagtttgagaccagcctgcgcaatatagtgagaccctgtctctataaaaaagttttaaaaattagccaggcatggtggcacactcctgtaagtctcagctactgaggaggctgaggtggaaggatcgcttgagcccaggaggtcaatgctacagtgaactatgatcacaccactgcactccagcctcggcgacagagtaagactctgtctcaaaaacaaaaagaaaacaaagcttttagtaaaataacttgacatcctgtgttattgggtagtaactggttaaagagaataaaacatgtagcactttgtttccactagagaaatataacctgacaggaaatttcataatgagtgaccaattctggtcctataatatagtgtattgctgtatcctgagtagaaaagtctaaaaagtctctagtatattatataatctgaaactcaatcataggttcagtactttagcactcattataaaaactaaaaaatagtctagtgtattgcagagcatggactgtcaagctgtattcaagtatcagttcctactgggtgaccttggataagatgcttgaaatctgtgtgcctctgttttctcatctgtaaaatgggcataataaaaaaaattaactacaatgattttggtatgctgtaactgtttaatccacattctctgaaattacagtaaaccaatcttctaatacaataaactcaataaaattgtttcacattgctttctcattgtcttactaaagagttgtatgatgttaacacataatgatttctgaatcacaagactgttggaaatctttattgcttccctgtgatcttaactgtcagttttaagtgttaggcattcattgacttcaaacactccattgcccagtataaaaaagagggaattctcaaattacctaattagacaaaaatgaaacataaactgagggtgcccatatgtctgtgtgacagggcacgttcagtgatagtgcatgtgttcacaacttcaaatcttgaatggaaaaataaccctcattccaaaaagaacataaataatatttaaataaaataaattattgtaaatacatctaaggaggtctgcaaagcaatttcagctagttctctgcaatatttctcatatgatatgcatgctgaggaacatttatatcttgtagatgatagcgcatcattaagcctcggtgttcataaagatgatggcatttggaaaggcaccattgtcagaaatttctaaaaccaaagtggagctggtttttattctaagcctaaagtatttttaaatctagccacagggaaataattacttttgtttctattcaatcaagacctggacacagagtttatgcaatgacataatatccttcctgaaatcagaccagcatgtaggaaggaccagcatccttcacacataactagttcctgaacctttacaaacaaatcctaatttccaaggaaacaatctcatcaaatgctgcccgctagaatacatattgttctttctggaaacattacaataagattttcatgattacaaaccccaacttcctctttaatattcaatataatcttaaactcatttatttaagtggaaactgtatttttataatggctctaaaaattcctggttaacttatttagcaccaatataataatttctttttttgttgtgtaggaggagggtgatcattaactgactgtcaacgtgtgttaggggcttcttaggaacggctctaaaaattcctggttaacttatttagcaccaatataataatttcttttttgtagtctaggaggagggtgatcattaactgactgtaaacgtgtgtgttaggggcttcttaggaatgttcgtctttctgctttctactgatataccctataaggagcatgttttaaattttttttttttttgagactggtaaattttagtaatgtccagacttccaggctggtattttgaggggctgggaataaaaagaatatcaagcagcttataatcaatattctcttctctttgcattaggaagctggagttttgtgtgcaggttacgggatttgttttgagatgaacgaacaccttaattctctaccaggaaaacaatattaacacatctgtggcaactgctgacataaacatacaaacaggaagagaatgcgattctagtgcttagcctggtggcctttagaacagaattcttgctttcctcctcttcactaaggatattcgaaatactctgggcagggtggacattagtccctcgcctcctccctaatgaaataaacaagtgtccacattttaaatgtgacggagtgtgaggaaactgcagaaaagctcctaagatacacactgagtaacagttctcatctgttctgtagacacacgtcagtttgggaatttatgattcactgtcccaccgtgaagttttttgtgcactttatgttgagctatgtggcagctaaggactgtcctgtttgctgaaaactgcagcctaaagttatttttcaaagttacgggtagtgtggcatagaaatccatatgttataaagtggaaacaaacaaacaaaaaaaactgggttagcatgaaatagagccaacagaaatcagaatgagcaacagccttccactgccggccactcaccttgttgaattttagtcactagctgatggcgtgctagaatccggctcatcctgtaaggagagcgtcttgtagtctgatcaaatcgcaagtacatctcctggccctcaggtgtcatggaatttaggtagtagcagcctgaggctggggtcctgggcacctgactgaacatctcggcagatttcctattgccacctcagtctgcctgtggctgttgccgtctgtctccagtctcagtcaaagagcaaggcacccagcccaggacagctcaacagacccagcgatttttaaaaagaaagaggagtgccaaagccacaactcagaattccaacccccggggccctcacgtgacctcgggaaccaatgagaggaagagaggaaaatgggaacgtttgcagtcagccctaagccccgaccagaggcagttccagccgccagggtccctcacacaacgctgaaagcaaaatacacgtatttgacgtgcctcagagctgacgaagcacccaaaagcagccctcactaaaggagtcgaaagaaaaagagagagggaagggcaaaacaagtagaagacaaacaagtccagggctcaggaaacttttcagcctgtcaaagttagagaaagctccttcgctttctacagggcagcagcagccaggtaaaagatggacctgataaatctcttaaatttaaaaaacacaacacaacaaaaaaaaactacttcaaacaagcatcaacagctgagcgtaagccaccaccttcattatcaagaaacaactcaaataaaaacttttccagtgaaaaataaacttcaagggctttaacaccaggagtgaatacaccacagatcctgaccctcacgtgatgggaattggagggctcttacagataagactcagagaggcaaagtacacacgcgttacgtattaagcatcctttcctctttgatttctctacttccccaatttttaatcacctagaggtaaaatacttagaaggtgcctatcacatttaagacactgaatcatttaagacaagaatcactgcagaagttgcaaaggtacttcaaagatactgtcatcaacctgctaaggacccattgagaagttatacaaaagcttctaacatgaggccatatatatgtctcaaaaaggacgcaaacacaatgctaggtgagcaatattatttttgactggggtgatgattgcaagccagatagagaaagagacatttggataggctttttaaaatggggggaattctgataggcagaggctggggagggctttgcaagagactgtaggtacccatgtgtgcagatccagaaccagagtatatggtttaagcaaactgctagtaattcagtttggccatatctgagtgtgtgtgtatatatatacgtgtatatatatatgtgtgtatatatatgtgtatatatg

SEQ ID NO: 59470 - DNA, 1827 bp, Homo sapiens
attagtaataagtaataaataatacagaatattaacacctaaagaaagatgttaataagagagaaaactgtgggggtgcgcagtatttgggaatgctgtactttctgcttaatttttctgtaaacataaaattgctctaaaaattaaagtttattagttttttaaaaagtagctattttctggatcaactgtataaaacaatgcatatccaaaagaagacaaatattgaagttaagaaaattcaaatctaggatttactcagcctctaactaactcttcagccccacacttaaacttgtacattcacagaaagtggccagttgttggctgcacccaaggtcaaaggtaggtctgagtggaacacagctatgaaaaaaatccacaggttggtgccaggttaatgacatttctgatgagaccgtaaacgacttggtgcgggtttctcatcagacagagtagtaaacccaaaaaggcaaaaccactttgggaaccctgtgttcatcaagatacctgattacccagagttagctgctcacttccaagtttcctttgaaactgggacagaaagcgctccaattctttctgaactccaggtctagtgtagaagcagagcagatgcttccttcccatttgacttgaatgccaccttctcagtgcaacattcaccaaacaaccactttagaactgcaaaccttcactccggccacccagtatcccctttctgatgttatttcaactccacccccacccggggcacttattgccattaataagcacactacacattttacttactttgtttattgtttcctcacctgactagtctaaattccaggagagccgtgattttattattgtgtcctcagcccctaaatgcagtaccttgcatttagcatgcttcccataaatatttgttgattcgaatgaataaaccaccacttgcaagacgaaatgggcgtgaaaaggaattataatcagaacaatcagagtttaaggctctcctgctctacctcccccacctttctgcatgggctttcccggcttatttttgacacactgcatttggtcgttgtctactaccagtgagaagattgctgaagatagaacagtggtcaacaggattgactgttaagattatagtccagatgcaactggatggaggcttcaggaaaatagctttttgaccaaaaaagcagtactttttttttttatttcactatagctagcacaatgagaatgaccagttggccacttaggacaattgccagagagattatatgatacactctatagaggtcacaatgtcacggttttctttgctgctgcaccaaaaaaagaaataactagtccagaccacttacacacagtagaaaacataaaaacaaatgcgcccccaaaagactctacttagggttcccacgacaagtcttccaaaatcaacagtgcagtctgtctgaatgttatcaatgctcactaaccatgcattcccatgacatgactcagtgactccatttcctgcctacacttccgctagctctgggcctcactttgagcttgtctgtcaagtatagtaatgccagatacttctagctcctacatgtacaccataaaaatacttcagaaaatacacaacacatgagaataatatcagaaaccaatttacttcccaatttcatccattcttgtgattgtacctgtcaattaaaaaactattcagaactctatcacattaggttttcttagacatcacttaagccaattatcatcttaaccattttaagtggacagctcagtggaaatgtggaattttgaacttgtcttttacat

SEQ ID NO: 59471 - DNA, 823 bp, Homo sapiens
atattaacaactatatatgttctcattacaaattttctcatgttgtaatgaaacactagttaatgctaatgttaagtttgaaaaaacaaacaagaaaaatagataatttgtgaacacagtgctgtttttaccttggtgaattacaccgtatgaacagggcaggacactcacaccaggggcatatgtaagaaaactaaaacttactttagtttttggttgagttccagttgacatttggcttggcacaccatcaagattctggatgtttgcagttttagttctacaaattcctttcttctgatgatttttcttaggattactctccaggtttatagaatcctgtaaaaaaattttttaaagaggtttttttcatatataaaggactatccttaggcaatagttcaagttaattaaagactgttacatcaataaaaatttttttaaactacaatcattttgaaaattgacataaaatgtaagaatattcttaaatattaataatttttccaaagacatttttggttagtgagatcagccccagtaaagcctaaggacttgataatgtaagtttataaactaaaagtgattgtaaactctcaagataaattatagaactatattggcattttttaaaactttaaaaacaaaaccagaggtattttatgtatttattataatcttttattttttaattgacaaattaaaattgtatatatttatggtgtacgatatgatgttttaaaacatgtatacattttaaaatggttaaatcaagctaattaacatatgcatgacctcaaatacttatttttgtgtgtgcggt

SEQ ID NO: 59472 - DNA, 2935 bp, Homo sapiens
acttaaaagcctgtattcctttccctctggcttttacaaggattgtttttatataggccctggactgcaaagagctttgaaatccagataaaagtgtttaccaaggctgaagaaattttccaggagaactgagcactttgcacagatgacatttttggaattagtttaaaattaaacggagcggatgcagattcatacagattttatttctgcaacacacttggttgtttccttgcagcatctaaaaacaaagccaatgcactttcagaaactactatggtcctccaaaattcaaaagtgaaaaaatgacaaaatttttctttgtaacacatctgcacaagaggctttcctttaaaatttgataaaagaccaaggccacaccagaaaacacagaatataaaactgtgtatcgacaaaaattaaaaactaaactccttaagagaatcgcttgctaaaaagtttaaaaaacacgaagacatgctttcttaaataatttgaaaatgtttttggttccacacgagtagtctatttgtttgcgtgccttttttattccttgtgacacccctaccttctcagaataaacactgaaagatgaacagaccgggggatcaagccggttcactaagatttagaggggaaggctgggtccatcttagcactgagaccgcacccagactgcatttggatcgctaaggactaagaaaacagtacagatccagttttacctcttataccattaattttccataaagccttccagaaacctgactcacagccagaaacccaaaccccgtgggcgggatttaaaacaaaacccattacgccaccatttccgccttgcctgcctagcaaacgtgcaaacattgaaaaagacgcacacgcagaccgcgcctacgtccccaaagtgcgcaagcgcacggcgagaccccgcccctcgccctcccaccaagacgaggcgcgcgcaccagcaaccagggcccgctggcgccgccccgggtttccgctccggggctcgtcggtcgccgttcggttccggttctggccccgccctcacgcgggaaccctccagaagtcttaatatccgggaccagaggctggttgcagcgcacatttccggcaacgagcgcaaaggaagggatccggtgacgcctcttcccgtctccccagcggcccaggctctggctctcggtgcggcagcgccatctggtgccgagtctcccgccacccgcggaggtggcacgcgcccttctctcggaaccttccagagaaaccgtggcccctgctttcctttctcccgccctggacggggagggacccgagtctccgccccgccgagttcccgcgcgggagggactttgtggcgactctgaagcggaagctgcctgtaggaggagctttacaaacccaaaatggagcggaaactgttctttctctagttttaagtccagaagaaacggcgtccttttattttttgcttccttatgcgttgttgctgggtcattctcagtcttccccgtatcagttctttaatctttgaggactgggaccctgtattaattgcctggtaggaagatgacacgagctttgtggcttacattggcctctgctgtaaaagcttttgtttcctttggcctattaaagcgctgttgtaaaagcctgctgtgtatgttaggaacccatcgagaagcagaatgtagtaatttgctttaaaataggccatggaagtttcagaaaggtagcctcagaaatgctcaatgtagattcgtttgcatgtcacgtttcttttagataatcagagaaaggaaaagtaatttccccaaagttagtaaaatcaacacattttcctttaataatgttctttttttcctgtaatcttggagtactaacagagttgttctaaatgttttattggaatggtgctgtggatatcaaaatatataatgaaacaaatttcctttagagtttagatagcacatgttaacttgactctttgattgtatttctcctatagtaatgcttctcaaactggagcatgcatccagattctctagaaggcttgttaaaacagattgctgggcctcaacaccagaggttataactgggagggaaggtctgaggatacagctggattagtgtagctctagtaaaatctcaggtgattctgatgctgttggtactaggaccacacctggaataatttagagttcaggattgctttgtcaataatgctttttgctgttgcaggacagacggtactaaaatatactggtgatactaagcctgcacaagttagtagtccttttgactccgtggatgggaagtagtaaactaaaccctagaaccagtagagagctacataaatgttcacagattaaagcaaccagttcatagaaatgtattctgtatatgatcatgtgatagagggtgctgtaataccaagtatactaaatatttcagttattatacagtaattgttctttagctgttaaattagaaatgactaaaattaaggacaaaatagtttaaacaatcatactaattttaccctttggaagatgccaggtttttttcagtcttttgcatttcctcaagttcccttgttttacggaattctctacccccagcccactcccatccctaccgtgccatttataaatgtacacagtgcttacattataaaaaatgatcatctcagaacttgtctcatcttttcagcaggacttttctcaattctgtcaaattctgactgtgccactgcctttattgacacagtaattaaatcacgcagtgattaaagtgtgctgcacactgtaacttttgtgcttgctacaaatagaaatacagatattgttagataagtttatgtttatgataatcagttcctaaaatgtagaaagcagtcggttttctggtctcagttttatttaaatcactg

SEQ ID NO: 59473 - DNA, 651 bp, Homo sapiens
acataatcagtcttacatcccgtgggtcacaataaaggagctgtttcagcatcgtaaacattgttgcaaaatgaatttgaatgggttttggcagcaacagagcagagaaaataaccacctttcagaatacataacttaaaaattcacttgtaagcccacaagctatccaccatttttacattcttaaaacatctcattgcccatctttaatttaaaaatatttcaaaatcagtaatattttcaggtaagtttcaggtatttgttgttatgctttggttaaactgaaaggatttgcaggcatacaaaatcagagcccttcaaataatgcctcacataattaaatgcaatcttgtgtttggtttgagttatttccatctctctttattctgcaatctgttgacaatagccagccaacttacattctttggactgatgatggcatattttttaaatcccttcagtgttggcattactaagctttataaaggtgttatatctctcagaggccactgttgccagcattgcagtaaaaatgtgtaagaatcttgtctatgttacttctttaaccttttcatttcttttagttttgtataaaaattcataagcttgtaaaagtattaatccagataacttggaatgatttttcttttt

SEQ ID NO: 59474 - DNA, 2054 bp, Homo sapiens
aaaatgtaaattgtaaaaagatatttaaaggatatcatttacataaatttaaaaaccatgcaagatcatatttaaataaaactatgcatggaaaaaataagaaaaatcacgtgggaacaatatagacaaatttaaggaggttcactctggggaggggagggatgaaggtggggccttactgtatcttcaaagtcttacttatttaaggagaaaaaaaagcaagttgtttccagtaatactaacatctaaacatcttggtgatgatatatttgttacttttattgttaaaaacaaaatttctcattttattttgcattttgaaaaaggagacaggaggagagaagaatcatggactccctgggcacagcaccgcaggtggctttgccagttctcccagccccgcgctgctcctgcgcctgcgctgagcctccacgtgtcctcaggagacttagcctagcctgggtatcaccagcagtgggccaggccgctttgccttcaactcccaacagtaaccttgcagaggtcagcctggggccaccaggaggagttagtaagagcttatcctgtgggggcactcactggggctggtggccgggaaatcccaggtgttttgttggtttgagttttgttgtgtttttatttttcttccgctgagatcaggactgaagcagggacgcagtgctcagcacgcccagcccaccgcgggccactgcgcggagaacctctgccagggtcgcctgctcacgtcccctaatccgctcctggcgcgcgttcctgtcctcctcctgctgtgactagtgtgcatggaagggcacagtggtggcagaaagacttgtggcgagatatcaagatccacaggaagtcataagagaaaaagcattttgtttgaactccacccactgaccttttgtgggtgagctttcggtgaaacagcaacatcctcagaaatcttagagacacggctttgtaacccgggggagagacaccgcttccaaatataattgacgtggctttcctgccttaattcggggtatcctttttccaccacataatcttccctttgtccgcgctgattcctgtttagtttggcagggccagctgctggcaggctcccccagtgctgaatgctccgcgctccactgtgctgggcctgctgaaaaagcagacagcgctccctctcccccagaatcaggagccaaatgccacaccgattgtgcaacttgtctctggttaccaggaaaacgtaaagaaatgccaatgaagcagaaaggtcgacaaaattctttccaacgcttgaacaaaaaaggtatttttagggccctagatttatggaagtcaattcttccactcctcgccaggctttcaaacctcctattctttgcactacattatttgaataaaccgtaaatacccttagttgctctaatagcaactgctggtccatattgtgcaaggcggccatggtctgaagaccttgttgaatttgaaagacagaagttccgtttctggcacataaacttgaatcagggctatagttaagagtgccagtgaggtccacattttgacagctagataagcaggtcatttattcaaaaggactttgaatccatgcccagagtcaaatgcagtcctttgtaaagcccagcaggcttgaaataaaaacttcttaactgagttgatcagtgtcctgcattttaggggtcaggaaagtatttatgataagttggaaatggacagggcaggaaattctgggcctggaaggatggcttcctcaccagggaccgcaccaccatattttctaatttgtgtcttgagggaaagtttatattttttgctgaaaatattatctccttgtgacaaaaccacaagtctgggaagagaacacaaaaggaataaagaacaaatgagatctgtgatgcctcctggataaaactttaaaaacccataggcattgatcaatccaatttactgaataaatatgtaccaggtgttgtgttaggttctaaggggctaaaataactaagatactgaactaaagtagaactattgggctc

SEQ ID NO: 59475 - DNA, 713 bp, Homo sapiens
gctaagaagaaggtacacctgatacactctttctttcactctaacaggcacctgaacctccgtggcacagcagatgggaatgactgacgtggctgagcattcatctgccccagggaggcaccgcattgtaggggatgaacagagacttttcaatcagatagacctgcattcaaatcccagatcagtctcctactgccttttgatcttaggaaagttgcatcactcttcaccagagttccaaccctgagtttcattctctgtcaactggaaatggaaatagctatgatggtagcgagggttacatgagatgctatttgctcagtgccaatgatcaatagcagatggcagttatgtgattacgattactgtgggatcttttcaaaagagggtcgccagcagcttcttagctatgttgagcttgattgtctgtgaaggcagaggcctgggtggtagctgcataaagagacagctctacttcttgtatgtcttgggttgtaggccaggtccccagttcaactcctcctctacatgaggctaccccaactccacgggccaaacgccataggaaagcagatattacatttagaagtcctgatttcacttttaactatacttcattggtaagacaacaataatgtcagctcattagcaaatcaacaaataacactttaactggaaattactggacactattacttagactgtcctggaag

SEQ ID NO: 59476 - DNA, 6300 bp, Homo sapiens
ttctttagtcacttgatttgcttcagtcatagtaccaatactgtcttttattctgttgatgaaaagagtcaaactctgtaaaatatttgaagggatttattctgagccaaatatgagtgactaatggcccatgacagagccctggctctcctagaaaggagagaattggaggctcagcagcttctctccatgactcagaagatcctgaggacatgtacccagggtagttgggctacagctcggttttacacattttagacataagacatcaatcaatacatgtaagatacatgtcatcaatacattttagtgagacataagacataagtgagacataagacataagtgagacataagacataagacatcaatcaatacatgtaagatatacactggttccttccagaaaagcaggacacctggaaggaggggagccttccaggtcataagcagattcaaagatttccttattggcaattggttgaaagagttattatctaaagacctgaaatcaatagaaaagagtgtctgggttaagataagggattgtagagaccaagttccttatcatgcagatgaagcctccaggtagcaggcttcagagagaatagattgtaaatgtttcttttcagacttaaaaagtcttttctatcagtcttaaggtctctgttttaatgttagtgctggtcatctgtgcctgaattctaaaaggaggaaggcataatgaggcatgtctgacccgcacttcgcagtacgtcctgaactagttttttggattaactttggaatgcccttggctgagggtagggcccatcagtcacttgggggtcttagaattttatttttggtttataatttttttgttcaaagctgttagttttaaacttctaaccaaacttgtggttatgttttatttattcattcattcacttacatactttttttagctaacctttttttttggcatctaatgacctcaatttacaaattcattctttccgcagatatttgtgaaccagacatttttctaggggctggagataaagtagtgaataaaagtgaaaattttctgctctcaagtagtttgcagcataaggggaaaagaaaggaagaaatgagaaacaaatggacaaataagataatgccagatgatgaccaatgctgcaaagccataacaagggtgagatgatgaagagttggagagttaacaggaggaggttgcttaagttcgagtggtctgagaggcctctcaagaagaattagggtggaattcagtcatgggaatacttgtaccaaggccatgtgggactgagggagaagcaggtcccaggccttgagcatctgctatctgccagggctgtctgggagacggatgattcaaagttgcacaagaacagccgtggtctttgcccttgtgaagtttattgtctgcaggaaaataaagtcctgcctccaaggaagtcctgattggttgagaaaatagatatgtaagtcactgtaatatagaaaaattctcctagtaggtaccaacatgaaagcagaaagaagggaatgatccagtttccctggtgttaaattatgtttagcccaaagctgcctccttacatatttgaagtttagattaatggtttctctgtatgtagtgaactgtaacctaactggatgtgtaaacagactgtcacttactcctgtgccaatcaccaacttttggccaaaggcagacaactgttcaaacttcattcaaataaggcaaaagccaaactgtaatcaacccagctgttctgtacctcacttccgttttctgtacatcactttcctttttctgttcataaatcctttccaatcacatggccacatggagtctctctgaatctattctagttggtgggtggcggggactacccgattcatgaatcattctttgcccaatgaaactttgttaaattgtacttgtcaatgggtttttctctcgacattgggtagagcaatgggtgagaggagaccttctaggggaatttgcctggggatagtgagtcacattgctggcttcctaaagcaggtgtacaatctaccatgagttgctgttttcagtcatagagaaagatattctccttgtgcttctgcctagttttcccttaacaggcccacaagggtgtcagtgatttctgtgtcttaggcaccatttctcattgtgatctctacacagcaggttgtggtgtgcccagagcttctgcaagctgcccgtatctgcaagctgcccatatctttgtctttaaaccagaatcctttcttgaaaacaaatgagctttccctaaaccctgtaattcgactacaaatgcaatattcaaatagcctgtaattggaatataaataacttctaataggccatgtaaatgagggtgttaatgtattatgaatcagctgaggaaaatagcaaggactgtattctcttccctcttcactctccctccagcctggagttccattcagtgagtgtttcactgaaaacataccacctccttccttccctcactaagcacaagagacccagagtccctgccatttaatcatggatttggcagatggttttgttatttgtcaaataaatctcattctatcaattacttgtgagaatcttcagacaggagatccttcagttccatgcaggcttgtaaatgtccctgctcagaaatacaatttgaggaaagctcttaaggcaccaagaggaagtgagtacatgagaatctcctggttgggactgatcccaatctcagatcaaggagtgaagggagggaaaaacactgatagtaggtggagaataggaattgtttttcttttttcctccttttctaatataagggaagctgggaggaatctcttggcctccctgaagttcaaaggtcactgatatgaggcacatgaataggagaaaaggcatacacatttatttaatgtgtatacacaggagccttcagaatgaagacccaaagacacagggggaattgttcatctttaggcttaggttcaacaaagtatgcacagccatgtagaaataggactagacacaaagggtatgatctaatgctgatagactgagtggggaaacccagcaaagcctgtgtgtctagatcctgcttggcctctatgagcatgcattccttcattctgagtatggggcaggactctctctagaatagggttcttatggcctacagtcaaacaactaagtcagatcatttcctttcttttcttttttctttttcttaaacagagacagggtctcaccatgttgtcaacgctgctttcaaactcctgagctcaaatgatcctcccacctttgcctcccaaagactgctgggtttataagtgtgaggccaccacacacagctcaggtaatttatttatggccagtttttacacagaaaggtggaaggaaacttagagtcatattttaggttttatggctagctctgggaatgagagttctggtttctatgacccaccttggggaagagtgattctagtttctatggctagctttgggaaagaatgggattgagagacaggagggcaggagaagatcagagaaaaagttttgcttatgaaactacttctgaggtcttcattttggggtattgttttctgagccccaacaagcccatactttattgagtgtctactgtactcctggaaccgtgctgtatggctgttttctctcatttaatttccagaagaagcctgtgatatactgattattattctcatttgttcgagatcaggaaaccgaattccagaaaatcgagcagctggatcgtgtaacttttggtagcaaaagtttttgtctactctgtcccatacaaactactggaatagaaatgaacaggattgtgatatttttgtcatgctaatgtaaaaaggaaaaagaaatactgactctgttaattttaagctataactattgcataacaatgatagatacaactattatctaccaatggtggtgctcattctagactctaggctctttgaaaatagtaatttgtctttttcatctttgtgtcttcccttcttttctttcccgtcaccctactgaaaaacattgtattgatacagagtactggcaagagggtagttggatgaatgactaaattaatgaattgatgagggtgattgatcttttctgacgtttacctaggagaaaaggataacagtctagagggtaaagcttgggaggtagggaatgtgaataaattagagctcaaaaaataaacacctggatttaacaaatgcttaagtgagggaggtgtgatcagcaatgcagacagaaggctgcattcagcagccaatttaagaaagatgcttgagaagtttcaagacaaagagaatttgagcaaaagttggtgggcctggagcaaagctccagccagggagaagagtctgtggcaagaacacaggacggctgtgggtctggtcactcaagagtcaggcacttcctgtgcttcaggccccctgcagaaacttgtctcttcttgaaggcttccaaacattccaaggggtgactcccaggagccccgtttacaagttaatcagcagaagcttacaagatccagctgcttaattttctggacttcagtttcctgatctcaaacatccaagaggccttaaataacctgccctgagtcacacagtcagtaaatggcgcaggtgggatttagtaacatctggctgactccagcctctcctgctctgtctatcgccctgtgtttcctcaaaggccggatgacagtgggggctgtgagatccccagatactgcagaggaatgctgggaacaaacaaacaaacattaaaaaaaaaaaaaaaaaacctccctacttgcttcagaacaaataaagctgagatcaaggaagccaggtttggactgaggcaagaggtcagggtgaactcatacacaaggacagagtttccacacaataaatatttattaagcaatcgccctgcaatgaaggcctgcaagagatggatcactgcttccagctgctcgggaaaggagagccatacagctttctcacaaatatgcatgcatgtataatacgaaatgcattgctgtaccttgagattctcttaaataccagtgaagtgagttgggtactttacatagaacatgcacacacacacacacacacacacacacacacacacacacacacagatagaggaggacttttaggaagagcttgactgtcttctctggttcctcctgcagaaatcttcagcagtccctgatgcctaaaagaacgctgcgtatttgcctgttttgcctccataagggaagtgtcctgcccaccacgccttcaaaaggaatggccttcaggccttgtccttggttccatttgaccctgtcctggccacagccagctggactaggggtgggcactcagcaccagcagccaagccaacagccggctggagactcatagtgtggcccagaataaagtcagggctgagtcaaccagactctatcttgggaatgtgaattgagaaatatagacttgagatcagtttgttcacgagacacaataaaggaaattagctttggagaaagttctttgtcaggaactctcctgtcgcacacccggttcagtttggttttgcaggtcagcatactttcagctggtgaacgggtgccagtctgccatggggcaggcatcctcacttccccccagcgcctctctcacctggtctaagccgctggtgagcagctcacactgcacgcttcttaaacttccccaacaactctcctaactcagactactctcttgcatcagtgaactctccatgccctccttgcttcccccaggagattctagacatctgctgagagaggctggatggggagatgggctaagattcaaaactccagtttggacacctcttagcaagggctgcaggtaggagatatctggctgctcctccaggttctcctttaaaaattgaggactcttcctacttgttagcttcagttttgaggatttaactaaaattatgaaacaacagggaaattcccaattggcaaccttttacaaaaggatgggagctgaacctgcacagttgagaagctttaaggacaagaatggaccacccatgtgcaaaacaaggcagtgcgggagaatcggagagggttgaaagcatgggctccaggggccccacagtactggactcaggcctggtctggccatttcttgggtgtgtgacttgggacaacactaacatctttctagcctaatttcttcacctgtaaa

SEQ ID NO: 59477 - DNA, 1301 bp, Homo sapiens
gaagactcaacatcttattttccccagtgagagagaaatattatacagtgatgccctcttaggaacagatcaatgagctagctaaaagcatcgagtattctacctctggaggcagatcagacttgaacaaaaatattaaaagttcctgtacatttctacaggaagatcggattttgttaacaacattagacaaataattgccttctatattgttgaacttgttctacctccttttatgtctgataaatccttggctcctagtctgtactataattactttcaactttccaatttaatttgccgcaatcacaggaaactggactgtacacactaacacctgatcccaacagatttttcacatcttacagagcagtgccaatgaagttgtagcggcggagtttaatcccctcccatgcctaagcaagcaggaagcgacattcaggataaagtcctgcggatcgggactgccatttggttacagttgcactggtgttttctctctatgggattggacctgcacccagaccccctttcaactggcaaggataatttgatcccatttttaagcatactgatttacagagagcagagagaaaacccagtctattctggacacttccacacatgtgtaaaagtacaacaaatctacatgaccgtttcattatggaagacattttattttttaaacagtggtgagttttttccttttaagtcagagctgtgcgtgcacgtttgacagtgagctgttattcctaaaggcaggaggttaggcagcatgttagagtttcatattaaacaacaaagagttttaaggagcgtcctcaaattacactcacagtttcaaagttcaagaattgtggctgagcactccttaccttacaatttcgggtccaaagaggtctttaagtttaaagcagtacatcaaatgtgcaggatttattttcttgcatgaaagtctcatctgtcatagcactccactccccgagaagagcccagcctcctcttcctgaacaccaatgaggaaaccagaagagcacatgggggacgtggcttccctgaaagcctgtcagagtctgcacatgctctttgtgacagaggtgccaaattaaccttggcatgaggctcacaatgcacctcattgtgaggtcctgggcacctcttaggggaagaaaaaggttataaaatgttcgagccaattgaaagttttcacacttttgctgagatgtgcctcttattcattaaaaataaaagagacaatttttttttcctgttaattagcttcctgaggtacaagtaagacg

SEQ ID NO: 59478 - DNA, 2124 bp, Homo sapiens
gggggctgcattatgtcccattgtctgctgttttagaagaagctagactttcagatttttatgtgaaatctcctagatttcatacgtgggtaacttactcaaaatatttgaaaacattgtgaatgccaaatgaaatctatctgcctgtcaaatttgtcctgctgcccatcattttttgacttttggactacattattttgagtttcatcctggtggaaaataatcctaggagattagtctctaaaagaaactgtctcaagcttgtagtcccagcactttgggaggttgaggtaggcagatcacttgaggccaggagtttgagagcagcctggccaacatggtgaaaccccatctctactaaaaataaaaaaaaattaggtgggtatggtggtgtacgcctgtaatcccagctactcaggagactgaggcatgagaatcgcttgagccggagaggcagaggttgcagtgagctgagactgtgccactgcactccagcctgggtggcagagcaagactctcaaaaaaagaaactgtcttttgggatattaaaaggccaaggtaggacttcatgaagaagctgtacccaatacttttgtagtgaaattgagcactcttgtttctcttcttcatggtgatgacctcatgactgatgacctcatgtggaaggggtgaccttccttggaaggggtggtgtggaacccatggtatcattaacattctaaaatctgataaatgaaaaaaaggcatgagaaaggcccactggggagaaaaggaaatatttgtttgagtaataggaaaactactgcaatgctgctaccttatctcaagactcagccatcgaaagtaaaagcaaaaggtacaacagggctatgataaggagctgcatttgggaaccgaggggaagaaaggtttattgacttgctgaatacaggagagatatcccggcaggggtggagatctatgcaaaacaaggtgactacatgagtctcttctacgtcaaagtgcaaaagtaaaattagaaaaactgtggtttgaaaagtctgactagtgcaattcttcctgagccattgcatgagcttccgctgggcgggaaatcccatgttgtgagtgggggattcacccttgttgagtgaacagagtgctgactcactgagaacccgggccagagacctgcaaacaatgctcaattaatatttgccctggccggtgaacccagcagaggctgtgcacggaagcccagagcacggtaggcctggcctcagatctctcacaacgtggcttcaatctgaatcttttcatgccaggaaatttcccttggcctctcacagtgcctttctctcatagagtaccctttatttcttattttgctccatcttactacaatatttcaactgcattttgatttcttatcacttgtctgtctacctcactaaactgtaaattgcttcaggtattctgaaattctctctctcatttatttctagcacagtccatgcttggcacatgtaaagaacttatgaaatgttggttggataaattagtaaacagccagaaagctaataactgagagaggtacaatgtccgttatatatggagtgaaattaatgtgttaaggctagcttttgggaaaaaaaattagatttagatatagtgctttttcctatgaggattatgttttctcaaaggtatagttaatttttttttaattgtatactattgtggatttttagtttgtacagtgctcactgtaactttccccattgcagtatttactaaccttgctccccactgcaatatttactgaccatgccatgatctgagctatctaggcattcttacttatgtttcctatggccatctgtggggatgttttggccaataattagcatacagctgagagttaacataaattggccaccttcacatctcatgttgctctcccaagtgcaacagagggagtgaagggaatccgtttagctacgaacagttacgtggcaacccgtgaccgcggcagcacacactgctgggaaggctttgggggcccaaaaacaagagtggatagaaatcactggagacagccaccaccacaaattttaaaataaaatttaaaaataaaaataagcg

SEQ ID NO: 59479 - DNA, 1561 bp, Homo sapiens
cagttttataaaaatgaaagtgaaagagtccaaatactattttcataactgtcaactaattcatagttacagtaaccagaaaatagaatagcgtgtaggcattggactgaacacaaggactttattggattttctttactataataatattcctggacttcccaatttcatgtgcttgaaaaatttagaaaacatcttgctgtaaatccatactgcagattactcaaaggcttgggaatatgattcaagaggaaattctttagatctgggataattcacttctatttttcaagggcttttgttttaaggatacctggaaaatcataaaatcagatgggatttaagagttatttaatctagtggtacctatgcaccagtcattagatctgtgctgggctgcctgcctacacatttttagctaatttccatgtcttcagacaagaaaaatgttttccaaggaaaacagttcttttggatttttttttaagtgcaatttctgggccctgccctagattttctgactgagcaaatttataggcaaggccctggaatctgtatttttttaaaaagcttccccggtgattttgagatccagccatttgtggaaacccactgatgttagtccaatctctttgttttccagatgcaaaatctgaggcccaccttgtcccagctaagcaagtgagggagaggaatccagagccctgacttgtaattcattttttttttgtgtgcttctcattcactaggcacatctgctgatcaaatccttcccataccctctggattcagaacaagaggaagtgcacatatgtccacaacaatttcccaacactagggagtattgatttgctgggggagcaagtggcatctccctccctggaaaattttaaaaccaaaagaaaaagtttaactggctgataatttataaatgaaatcctctctgaagataggaagatgggctagataatgttttatctcttctagccctaactttccatgctcctataatttagtaacaaaaggaacccatgcactttctttttttttaagacagtttctccagaagcttccatgtgtggagaaacttactctcttcctccttcttctatttatcttttcttatctgaaaggaggactacactgtaaacatctacatatgcaaaacccatgcctttggtacacacctaccactttcagatcaaaccgacagcctaagtggccaggctggcagctggtttaggataaatacaacagcaccaccttgtgttgcgtttctgggagaatttaccacttcagcaggacaaagacttgggccgggatgggtggctcaggatacagcaactattcctttactttccctgctgggagcaaatgctagccatttcgaaaaacctttttgtttgttatcagcctacaattttcttctataaattctgtaatttttaaaatataaaaggtagctgagaaatggaaatgcagaaataaacatatattaataaaagcctgggtaagcacagtgctatagtaaatattgtagagaaaaagttaatgtcagctt

SEQ ID NO: 59480 - DNA, 920 bp, Homo sapiens
acaaaaattcccgtagtctaaactccacattttcaaaagtccttagagccatggcaagtttccatggagcacagattgaactctctcatgtagaagaataacctacttgttttcaggagaaaggcgggaaaagtgcctgaaaccacacccactaatgacatcaacaatttccagaaggaaggctcgcccataaaaagggtgccagcttggctggacagagaaagcatgatggtggccccacccatgatgtcagccctgggccctgaccgtacagaaccttcacactgggtttcttaaggaccagttgccatcttgtctcctccctccccacagcccaaactcaaatgctaactttgaccttccttcctgcccctgctgtgtcagttggcatgtctcaggactgtagcaaaagaaagctggattttttccaggaatagcttcagtcttgctcagatgaaaggcaggatgccagggcgaggtgattttgttattaatcaaccttgatttgcagaagatgacacagatgccaggtctgtgctttaagtatcctttcagcagtgctgaaagtcaaatattattcagctaggttctaagcaggcagtttaaatcatgctaaaggctgtgccatttcagtgctagaaacaggaactgaaaacgaataatgtgctattgggaaactgcggtgaactctgtcattttgaaccctgagcacctgtttgtacttgtaaagctgagagttcatgtcgagggaacatggagctattggaatatggcaggactgaatctgtccaacttgacttcaagggcatttaagtgaaaatttgctttaaacagtcaatgctgaggagagaagagactctggaaatctataatctaatccttggggagcatttctagtttaataagtggtagaacacatt

SEQ ID NO: 59481 - DNA, 1373 bp, Homo sapiens
attatgtacaatgagtaaagtgcattttgagaggcactatttgaagagaacttcaaaagttgcatatcaacttcatatgcagaatatttttctgaggggttcagatgcttctacacattttaattggagggctttcaaatattctagacttagaatgcatattaacctcgtgtcttctcccctacagaccacatttgggtagtttttccatgctcttgattcttttgtttctaatccaataagaatattgaggaatagaggtaacaaaggatagtgaagatcagacattttcaagcgattcatccaatgaagctttactgggtacctgccaagtgagtgaaaccctgagatgtatatattctagtgccgaggacagagttccacacctagcagatatttagtaaatttttgttgaatgaattaagtgaatgaaagaatgaataaatgaaaggaacggtcttctctgaggtatctggatgtgacgccaaaagggtcagaaccacattttcaattccgcttgataatttctagaatataatagacggtgcgaacaaagagaaaataaataaagcagtgaacttcagaactagagggcatcgacgcggcagctgattttgtctgcacacggcccccgtagcctttccgtccaaaatcatttacgcggccgcgaccggtagtgacgtcacgagatttggagctcgcgggaaaacttgtctctgcgttgtggggaggacgcgcgctcgcgcgggattttcaagcgtaggcccccgggaactcgagctgccatgagcctctgggtggacaagtatcggccctgctccttgggacggctggactatcacaaggagcaggcggcccagctgcggaacctggtgagtctgcgggggccgggagcgtgggagaggggaggccccccggctcggggtttcgcgcccccctgaggagcagtgcttctcccgcccgcattggaaggtgataagtgctatggagaaaaataacacagggaagggggaagaggtgtgggaggctggcttgtatttttaaacaagaaaagctccactgagaagtggcatctgagccgagacttgaaggaaattgaaaagtcataaatacagaaatccgagcaaagagtggaacaggtaagaggggacagcaagtgcaaaattcccgggcagggatgtgcacggcatgttctaagaacctcaggaggccggcgtagccgatagtggtgaaccagcgggaagggtaatcggagatgggtgtatgtgttgggatggagttggagtgcagacccagtcagtctcagaataagacgagaagccgttggagcattttgagcggagatgacaccatgtgatttactttctagctgg

SEQ ID NO: 59482 - DNA, 538 bp, Homo sapiens
cttcataaaaaatcatttgcatggaactggtgaagggcaaagcattgcctggttgtcttcagctcacttccagtgccaggtgcctgggtgggcttgtttattcagaagaaatgaaacataaattggcaggatccctttaatccatttaattttctctggtgtgtacagaatggggacaggtgtgaaaagtgatctattttgttggaaaattcaaggcacatgacatctcaatgatggcaaaataagaaatagctgacatcatgtttctaaatatacaacattttgcaacagccacctggagcaaaaacagaaaggttgagaaggcagaataatgactttttgtctctggaaggcatccatgttcaacagtctgtcaggaagagagacaggtggggctggctcaccacctggggtgaaggctgctgcaggacttttattaaaattattgcacaggagtggagaagataaacactcagtgggtgcaatggaacagccggcccatatgtctggctagaactaaggtctttctctaaaataa

SEQ ID NO: 59483 - DNA, 1060 bp, Homo sapiens
ttctcactgggctaaagtcaaggtgtcagcagggctggttgctcccagaagctccagggaagaatccgtgtctgtgccttttccagcttccagaggccttttgcaatcgttggttaatgatcccttcctcgtatccctccaacttcttgcttttatcatcccacctcctgactctgctgccctcctgctgccctcttccaactacccttgtgatgacattggccacagccagctaatccgggataatctcccacttccagatgcttcatttaatcacatctgcacagttcctctcatcatgtagggtgacatattcacaggttccagggagcaagacgtggacatctctgtaggccattattctgctcaccatatccctttaccttgcattatcgcctctcccattctctgaaaacaaacaatatagaaggcagaagagatttctggagcctaaaccatgtagtaacatttatgtaacattggggccattctcttcacttggcatggcagctgtgccactcagtctccctgacctctggatgagcagaagggccggtatccccactattttacagattagtaaaagcaaaacatttaagattttggttcagttagagactggttcagttagagttcttaaagcatacctgcttgtaccaagtagtatttagtagtagtcagtatttacaatagtatttcaaagtcctttggttcttaatcattttattaacgttcagacaggaggtttcatttgtttcttcaattttttttcttttatctttgtggcaagagataagagaactcttgcctaatatctacttgtttgttcgacttcatgtccctggctgtgacaaagggcagagtgtgtggtaatgaaagcttattcataatcttaaatacgatgtaagtggctgaattggaaagggagatgcccattaccaaaggcactggaggggagaaggccttattagtgctggaaggtcgtcagcgtggagagttcagacacgtctgtgctattcacatacagtgtaaactcatcactcttggaatttaattcttg

SEQ ID NO: 59484 - DNA, 764 bp, Homo sapiens
accagtcctgagccaggctgctaggattcaaaccctttcatggcccctggctggctgtggcattcagggttgtcacttctctggagtgaggtctcttgagcagaaacatgagcacatgtaacataataccttcctcacagcattgttgtaaggagtaaatgagagaatgcttgcaaaatgctgttgggtaattaatacaaagtagctgttattattaccaaaatgacatagaaatgttgctgcctccctgcccataggaaaaaactgggggagcaaatcaacttgtgacttgcaagaaacctcaaataatagcaccaaataaagaaggctgatgtacacaatttgccaacagtggagggcattgcgacaaaaaccgcccgacaggaaggccgaggctgtcacatcccattactctggagctgtgacttcatgctgactcagccaaaggcaggcagtaatcacagccaagtttatatgctcagaattgatgtggccatatttccacattctcaaaagcaaagccaagagaaaacggcgatcagaaagtttttatgggcctcatcatgaaatggtgacagctccagcttattgatttgcctttagttaacctctgtaattcgaagtgatcaccctgccaaaaatgaaggtttatcaagggaatcctttttaccttttggtctttttggaacaaagaccttgtccgttcttctttattctatagagtaattgatttgggttgatggtaagtgttcagatgagatttc

SEQ ID NO: 59485 - DNA, 1260 bp, Homo sapiens
aacaatcaaaagtttttctgtgtgctttccatgcatgaagtacttaataatcagtagaataattagtatccaacattgttgaaaaatgttctcaactccaagaaatgattgtgcagaccaaacagcaaaattcggagaggacactttgtaaattataaagtgcttgactaagcactttgccagtatattcagtgcaaccctttcagaaagaagattgtcgtcaatatccttgaaattgcctcttacgttgtcttggaagttctggttattaaagagaagagacacagaacaaggctctgaagttttatcttgacaaattgaccgcatggcagcttgttcacaggagctgagatttcatctgaatactaatgccggcattgtgttgactttaccaggtcaaactcaaacactccagctcacagttcacccaccgtacaaattttcttcattactgccatgtcctcacattttaaaagtctgcctagcaagaagttacacacgtttcaacactgtcaacaaatgagatctgacaagtaaacattttgcagcaatgggttttgaaatctgtactttgattgccttcaactcctgatgatattgtatcacaggttcttcacatgctggatgaaaagtgtcctttctttttgaaaagccacagggaatcaataaggagtaagaatttttaacaagcctcagcacctcaaagctaaagcaattagttcacaaaacttgacacgccaccctttgaaggtgaaccttggcaacttagagacaggagactggaagaaagtctgtttcaccagcgattttcctacagaaactgggagcctttgcaccttgttcgttgctcccaaagagtagactaaataagcattttcaccagctggcactcaggaaaaccccagagtcctctgaacacagagacaaagcccctttaggacacatgtgtgactatttccaaggcagttacaataaaatcaaagtggcaccattttttacagattcaaggtctcttaatacagcctacatttacacagtggaaatggagggctgagagtgatgttcttaagtagaagagcacaatagaaagattcgacctgaaagtcaggagacttgcatcttagtccaaattctatttgttctggtttttgttgttggtggtggtgggagataacttcttcagcccccagtttcctctcctgtaaaatagaaaattatatgccctgtccaacctacttcacaaagatataactatagaaa

SEQ ID NO: 59486 - DNA, 769 bp, Homo sapiens
acttcagaggaagattacctacacacctcatcctcttttcagcttccctccccgttaagggccactttcactggcaataaaatcccctgcattcaccagcttcaatttgatcatgtgacctcgtttttccctgatgctggacaaaagcttgggagccacgagtgcagagggctgtcacactggccctttgccttcactggcagaggtcagccgcctcatgtgaaaaggcaaagagcccaatgagctgttaacacttaagctgcctgcgggcagcagagctaaaagagcactgtaacatgccctctgggactttgtgaattgcaggcaccctgcctggacactgctgcagtgcatgcatgaagtttgctcctgtcagtgtccaaaagaggttgctccagcttctgcgcctgcttacctaagtgttctctcctgtgaggggtggaatgtagtgggtctgagtcagtggagtttgatcccgccggcgctgaaatggccagcgttcatgcactccagttcccaccttgtttgcttacatactccctcccacatggattgagggcagcagctgagtaaatgaagcacccctgtcgtgagtcccgggaaggggtcaggaaaatatccttcttcaatatgagaaaggtggatgcatcatcaaatatacacacagaatatttactgttcttgctaaatagcccgacttttgatccagtgcatggagtcccgaagagatagatctggtggttttcacagagcaccttgtaagtttgtc

SEQ ID NO: 59487 - DNA, 1209 bp, Homo sapiens
agggctgtttcctagaatgtttttgcttcttagttcttatacttcctttctcaatatttacagacagtcctttcttttctccctccctccctttcttccttcccaatgagaaaccaaattaagtcctttagtatgaagattgcagatccttaagtgaatcgggtgtgtctcaatgatagttcccttgccttcttattaatcttgagtaaaagcaagtcataaacatttttaccagaatggaaaatgcatgagaatagagtaagttgattgtctttgactttgagtaatttttaacagccaaggaaagtggcttgtattccaattaacacccttcagaaactgccaccaatgaatgaaaatgcccgggatacactatgcaaaataatatttttgtcagaggaaattgaaagctaccagaaaacacagagcagagagaacagccgggagactatgacatcaagatatttcaaatgtggaatttatgactggagagtcgtttcaaaggcatctcaaccctttgatcttaactgtggcaggatcaaagtcccattcggccagtgagtaagagcactgacatgggtctgttgatgcggctctttggagcaggaagaagagcaccgaaaaatattccttctgtgtccactgtgctcaaaaagaaagattgtgtatcatttcaactaaaatcacagaaatttactagtggtttgctactggattttaaatgccctttcatatacatatttacaatagaaactataataatatgcaatcatttagcacccaatattcctaaaagtggccacttgaaggaataattgcatagccatggtacaattctactaaagccaaaatacataattatcccttgatccccttcccaaaatatgttatgtgcctcatagactgaactgagaaaaagcattgtgcccagtgcgaactcaggcagccttgcctggaaggtgctactctctctccccaacgcagagcaggaagtgagaaggaactcagctggacaggataaaaatgctaggcagctttccagctccttcagagcaagtcttgacagtggacttcattagttttattagagcatcatcaattccctaaatgtcacatggagctctattcaaataccagcaaagaaatataatccaaagacaaacataccttgtttggtgattattcagtgtttataaatattcacatcct

SEQ ID NO: 59488 - DNA, 1372 bp, Homo sapiens
agaacatacaaatatcatttaactttaccctttgaaatgtgctgggatatggtttatacaacctagcatactgttggtttttttaatattccataagcaaacaaatgatcagatagtctttacctgaatatctgacacctgtttggtgtaggccctctatatgtaaataaatatatataaaatatttatatataaaagagacaaaatgtaaattgttttgttcaaatttctatattcttcttaatgtctttgtctttgtgttctatcagttactaagagaggtaggttaaaaacgccagctctgtgcttttgctgtagggtggttgcattgggcaatagtaggtaaacattccttctgcaaacactataaaatactggacacattgcaaagatcatataaaaggttttgaaatcaacaagaattagactatctaaaattccagagatggaaaattcattcctaagtaagttagtaatttctgtcttcttccatgaagtcaagtgataattttgagtttaggctgactcagacttggcacaagcagagggcttctgctagagatgagaacaatcagaagagcatttggatatcaagcagagctggcagaacaaactagacagtagagaagccccaatcacaaggctaattttacccacagttctttattgagttcttaggcattgcaagagggagagagctatgctagagaggccgtgtaaaatctaccccaattttgtggtgtggaggagacaaaacttcctctgaaggaagaaggtcagcaagaaacatataattggtatgctcttaacatattttgaacatatttgaagccagggcctaacgaatagagctcagaatcttggaaaaaagaatgttcaatgtggagacaaattccaccaggctttcaatggccttggagggccatattcatggaggatttcagatcagaaaggcctagtgaaatttcctgcagttcatggtgcttaggaaaagtaccatgtccccttcataatatttgccagattttaaatctgtaaaaagtaggagtccagagatttcagttcaaatctccaaaggatggaacttccagggtagaaataagggagatccatcaagttctcaaaacaaacaaacaaatacataaaaaacactagatagggattagggaagcaggaattcccaaggaacaagaaaaactaaagagaaactgaatttttttcagcgatatctccaatctgttctttatctgataggtgagatcagtagctcacactttctgcctaacagaggaagtaagaaatactcattggtgaaaaatattatctggggcttctacattattttatgcacaacttgtgacatatgattgaa

SEQ ID NO: 59489 - DNA, 1752 bp, Homo sapiens
gctggtctcacactcctggccccaaatgatttgcccaccttggcctcccaaagtgctggcattacaggcatgagccatcatgcctggccacattttccagcttctaaaactgcaatccctggcatgtggtgccttactccaccttaaaagccagcagcatggcatcctgctccaggggccacattacctccttcttcaatgtcaaatctccttctgcctcccttttatagttgtgattgcatttaggacccaattagataatccaggataatccctcattttaagagttttgatttaatcatacctgcaaagtctcttttgtcttgtaagttaaattcacagattccagggatgaggatctgggtatctttggcggccattattcattcttggtaggagatgtaagtgaaaatgcccttgaggtgaccctagccccagtcaccacttggctgcaacctcctcatgagagacagaagccagaactgccgagctgagtcaccaaattcctgtcccacataccacgagagataataaatatttgctatgttttatacctccaaagttttggtaaaaactccctggcgagtttttctaggcaatatgaagaaaattgagatagaacaaatgagcttgacacaaacttaaaattatttcttctaaaacactgttttgttctaaagagtatattctttctattcttttggtgcaaacatactctattaggaaattatatttaaagcacactatggctcatgctttcttaatagtctgacttgcaaaaaggcaaaattaataatctctgtccatttcacattttaaaaagtattgctttgaaatttgcaagtcagggaactactgtttataggataaagtctagcttcatcagcctgcacgcaaagccccctataatcctgctgtacctccttctgtggctgcttctcctgctacaactctctgcacttatgtctcaatatttctacgccactgatttcctcacacataacattctgttttgctagaggatgcctctgtgtattccatttgtttgcctttgttttttcctcagactactttcccccgtctgaaaacctcaagtttaaggaaacttattcccttctccactttgtgaatatctgtatcttagcatttaatgtttttatcgaagtgttctgtttatacgtatgtctcagctactaaacagtaaggtcaataaggacacaatttttaaatccttattttttttgaaatttgcagaagatgtggaataaaataggtgctccagaaatgtttgccaatttatagataagttctgaaatgcaaatagaaatgtaggtctgctgagtgtccccatctggtttaaatttcagtccaacagtgtaatccccacttcttgtgtggtgatgctttaactgtttctatttttaggtagacttgtctctctgacaagtctttctttgatgagtccaatcttcttcccttaacttctaccacaaggccccattctgccctctggagtcatgagataaagtctgtctctcttatgtaatagtgtttcagatagttaatgctggtgagtgggtttccatttagtcccctcctccgcagactaaatgaactcttcttgtcaatttttcattgacagcctttttaagccttccatacccagtcaccatctgtgttggtcagtgttgttttaggctgccagtatcagaaagcataacaacgatgacttaaacaagatggctgcttatt

SEQ ID NO: 59490 - DNA, 846 bp, Homo sapiens
atatttatgtgccctgctgtttggcttagttggacttgaaagtaataaatgactcaccaatttattctcctgatacaacaggctaacaagtatggtgtagctagaaatcagagcccacaattctagttttgatgaggtttttatctcagtaaagcagctctgtgagtcatacaagttgatagactaggtctagtgatctctgacctagctggctgaaaagcatgagacaggaaaatagccactatcgctttcaaacacatgacctttgcttcatttggtcagaagaggcacaagacaagcagccacttgtcttgtgaaattgcaacaaccgtattctgagaaagataccagatattttaaacttcgataaaagtatagtgatctttaagtgtttatcaaagtgaagtttcgtattagtaaagatttggaatctcaactgaattccctgcaggatcagttttgagtctcttgtatttccactaagaaaatcaagataatttgtgaggatataagcagatcaatatttgtcatgtgaaaacatttaaaatagattttcaagtggctagatattagttatgagctttaacatgtttaaccaaggtgacattaagccaagggcagtgtttctcaaccttttttattgttgttattgattccctaaggagtccttttagacattttgcctaattggcctctcatcccaaagaaattttataataccacccataggctgtgtatctgtttttgtacttacatacatttgtgttttatgtactgaaataacaatatttttatcccccacccgacacacaccaatttttcactcttaggaatgagattactctc

SEQ ID NO: 59491 - DNA, 2083 bp, Homo sapiens
gacagtttcttagaactgaaaaataatatcaccaagtagtaatatttgtccattatattacagccttgcaacatggttttcacctacatcatctcttttgatcctcatgacaatcttttgtgattggtactacttttgtctctcttttactgtggaccttaactcagagaggttaagtaatttgtccagggtcacacaggtgagaagggcaggagttggtgggacccatgacccccatctccagagctggtgctcttccaagggcacattttaggctgatgctgatgtactgactgaatggtgcaacttcacataatggaatgagccctagactggaagtcagcagcttttggaagtcagatgcttcaggcctcagctgtgacactaacctgctagttgactttgggccctcacgtaatccctctgggctttggcttcctcatattgtgaaatgaaagaactgaactagaaattccttaaggttctttcaactccaacaattaggaattttatggagcaaaagtaatccagtttccaaattatctgtctgaaggaaataatacattgtgtgaaatataaagtctactctacaagcaaatgaaagagattttgcattatacatatttttagatgaatcatgccataagtccatccttctcaatggctaagagctaattaactaaaagctggctgtgtacacagttgtcaaaacatttctatgacctttatgcagaaatcagactcttgagaagggagtgatcagcctccctgtcctgagctgggagctagtcattttgcctttctctgtttgcaaagatccaaagtctctgataagttcattgtttttgttacaccgtttgatttctccttattataagtgttcagcattattctcattacagaattagcgtggatatcctcccccagatcttgacagcttccatgctgtataataaaacatgtgtctggttttcttcccaggttcctggcagggagcttctaaacccttggaaattcccaagtgataacactatgttgggtcctttggatgacaccaagtttatgctaatgagatgactcaggatgggggccaatcacaccagaaaggtcaaccatgtgattagagggttagggctttgactcatgtgatatcagcctgacctctggagactcagttccaatcacagggcctatgacgtaatcacccatgcctacataaccaaaccctggtaaagactctggacgctagcagctgagtgagcctcctgcttgatgaacacatcagtgtgctgagagggtgacgtgtcctgatcccacaaggagaggacctgcaagctccacttatgggcctctcccagaccttacccctgtctgtcgcttcaactggctagccctagtctgtaggctttgtaatgaaactgtaatcataaagatagtgctttcctgggttctgtaagttgttctagcaaactattgaattcgagggagctgtgggaatccctgaatttgtagccagttggtcagaagtgtgggtggcctggggactcctaaatctatggctggtcctgaagcgtgggcagccttggtggggatggtgcccttaacctatgaagtctgggccgactcctggtagttggtgttggaactgccctcagcactgcggcctgcctgccactactgagctgtgcatgaggacaggtcaggcaccctctcacctcaggccctctgcactaactgctccctctgcccggggatgattcttgcttctgggtcctgcatggctggctccattacccctcaagtctttgctcaaatgtcactgcttcctgaagtcttgccccctgcagcctccccacaccacccactctccatttactccctttctcccttccctatttcattcttcttcatggcacttaccttccgatacactaagtaatttgcatatgagattttgtatgttaaatgcattcctctgataagatgtaagctctatgtgggcaagaatttttctctctttagttcactgtgatatgcctagtgctaagagcagtgcctgcccattgtagatattcactcacta

SEQ ID NO: 59492 - DNA, 2154 bp, Homo sapiens
aactacatgtatgtctgtgtatgtcttaaaaaatacccgagaaaaggtaaaattctgcattaaaatacctagcaatttagttcgattccataaacactgaaagaagtaacactctcacttaacagtcaacattacaagcagtctttaataataccgcatttaactccttagagctagcacaagttgatctaatgcctatttggccctttaccaaaaaagcggagggggctttgtctaacacctgtatacacctccctccgtagcatcccgctcattctagcttcttagggaaaccatagacaacgacgtttcagagagtgccagaggtgaagccgacccgaaaccacattacagaaaggcttcctgtttcaaacaggtccaataaagccaccaaattaagtctacgattataaagaactgcgaatcagaaaataattccatataggtgcagtcttctattacttttttccccactttcggaaatttcaaagaaaaattgctacattcttaaatatgaggccattatttcaaaggctgtaacaacctggaacgcaaattcgttaaattatgatacaataaggccaacctcgaggatcctcggtggactactagcgcacttccttacaattagaaagtgaaaaactgggtcagccctagagtcacgcaataatgctgcgtcacgaaactgcgcattccaagagaaacttttctcaggcccagaattaagtcggagggatccgccgcgcagctcaatccctaggaagcatgaaagaatgtattgtaaagagtaaaatcacgcgcaatccatcccaatataaccgcagttgttcgtgggccttcttgcagagaaaggctgcccaaccttgacggggccatgggcgctgcgggagggcaaaagaccacagagatctgcgaagccaaagtaaacaacggggttggggcggcgagaatgatcaatagcgatgctccgaaaggactccgcgataggaatcgagcgggaaggattccctccatcctaacagtccatgggttaagaggccgaagcttccctaaataccacactcccgcgagagaagggactgagaacaacttctcaaactattctctctcgaaatcgctcccttcctcgaaaattccatctctgagactcggatgaggtccccaccccctccacccttgtcccgtgaccgtcgcccgctcagcctcccagccgagtccgcggggcctggggcgcccaccccgcccacccaagggaccgcgcaggggtgaactcccccgcgccccacctgcgccttccagacctcgggcgccccggcgttgcctcgagagctccctgcgcggccgccgcggcacggaccagctcccactcccttacactgggcgccgctgcgctcgccgggggccggtcccgaggttcccaaggcctcgcgcgcgcgcttgccgtggcaaccaagacgttccacgacgcgcgctctcgaacgcttcgcgtcacgcggccgcgcggccccgcccgtcggcctcgctcccgccacagagcccgcagcacgccgccgccgcagcctaggtcacgtgagtacccacgcgcgcgtcttgccagcggattcatcaccggcctgctcagactaggttctgcccactctgaccttctaaatggtacgtgggaggacgtccgtccccttcggacccaagagtcaccgtaacactctagaaggggagaaaaggagcgagggcggcaggcgacagagaacctcgcgagtcagcggccccgcgcagacccccccaggcacggtcccctgcggccacgtcggctgctcggcgcctgcgcaatctctttctctccagcgaaaccgaggcctccggagagcctagtagagagtgtgggcagtgagcgcttgtagccgctagagggagcgctgggcacagtgcacgagagacaataaaggctgattatcccctcaatgtctctgcagcctgagctttgtgacttctgtatccagagcacagttaatttccaaaagcccgcctgcaccacgtgttttaagtcttggtgtgtgtgtaaagtctatatcactatcataaaactgttagttcctgattccgggatacaaagagtaaaatcaagatgaacatactttacccttcttgacaagtgtt

SEQ ID NO: 59493 - DNA, 984 bp, Homo sapiens
gccagccactgcaggttttcacctgacacagcccccagaccctgtctacgaatcccccagctggccgaaggggccgcggccgcacatgcgcagtcagtcccgttggttgtgcgctcagccccgcccccagaggcgccgcgctccctgacagcccgcgggcgtacacacgctgacgcgcaggctgcggtcgcgcaggcgcagtcggggcgccttcccggtataggcgccttttaccccagcgtgtcctgagtctttggttcgcgaagtgccgttaggccaagcaggtgctaaaagcccggggtcgtggaccccggccaggtcttagcagcatggaggcgcagggtgtagcggagggcgcggggccgggcgccgccagcggcgtgccccaccccgcggccctagccccggctgcggctcccaccttggcgccagcctcggtggcggccgcggcctctcaattcaccctgctagtgatgcaaccctgtgctgggcaggacgaggctgcggcccccgggggcagcgttggggcgggcaagcccgttaggtacctgtgcgaaggggccggggatggcgaagaggaggctggggaggacgaggcggacctgttagacacttcggaccctccggggggaggcgagagcgcggctagtttggaggatctagaggacgaggagactcactcggggggcgagggcagcagcgggggcgcccggaggcggggcagcggtgggggcagcatgagcaagacctgcacctacgaaggctgcagcgagaccacgagccaggtggccaagcagcgcaaaccgtggatgtgcaagaaacaccgcaacaagatgtacaaggacaagtataaaaagaagaagagcgaccaggccctgaactgcggtgggactgcctcgactggcagcgcgggaaacgtcaaactcgaggtatcagacttagctgaggcctggggatgggaggtggaagaagaaacccgatctt

SEQ ID NO: 59494 - DNA, 3715 bp, Homo sapiens
gatggcagagtggccttcctggcagtgctgtctaggtggctaatctgaatgtcaaggaagctgaaatcctctccacttactaactagagggcaggctcattccaaggtgtgcgggagagagttcgccaattttctaccacttaacaatcagcaagtgtttacaatgtttttgtgtttcgagagcaagggcaaagacaatcgagtttgcattctatcgtcctgccttgtttaggggcagtatatttagggtgcttaattctgggacacaatgcgaccccggacaaggcgcctgaggcctgtctctctcgctcaccctgcgtccctagtgggtctcatcgatccacgcatttattcccatttgtaacagatggctgccgtcaaggctccgtcacccctatttgcttaaccacatcagccaagggagcaggctagggagcacaccccttctgggggctcgagacctccctgggtggagcagaactgcagcggctgcaggtcccggagagtctgggagaggtcgaggttgacagaggaggtgggtagggggcgcgggcgccaggggcgatggaagcggcgatgatgccaggccgggtgggtgcgctccagtgtgaaaaaacttacaagtctctgagcacacaaagagataagattccaagggaaaattaaagaaccgaagaaaaggagagtgaaactccaggaaactccgaggtcaggaatttgggggaatctaggggaaaagggacttctccgagaactggtagcgcggaggaggggacgcctgaggagccgcagtctccaggagagcggtaagccccggcctgcgcgggttcccatccctgttctcaccagtacgagggctgcggccgccagcgccgcgccgagcaccgccagctgcaacagaagcggagccattctccatgccgtggcagcccgcccaatcccgcacctccacacaggcggaagcgcgcccgcgcgacccggccccgccgccagagaggtcgcgcccgctggccgcagcgcccccgcgtggcgaggcggagaaaacgccgctctcgtgccctcggcgcccagtcggtggagaggagcgctaggttccacagcggggcgccaggtttatcaagtatgcaagacgtctacttaatttgaatttcagattaaaaaactaatcatgtttttaacagccttattaagatagccacataccatacgactcatccagttacaggtttctggtttattacattagtttttataaactgtggtaaaataaaaagttgccattttaatcattttaagtttacaatagtgagtggcattaattacatacatactgtgcaaccatcaccactatctatctgtaaagccttcccagctccctccaggttctggcaacaactaattgcatgctctatttggggcatactcatgctttaaaaaaaaaaaaacccacaaaaaaacaaaaacaaaaaacaaaaaaaccacgctgtgtttatcagacattcaaatttaacgtggtatcctgtattttatctggtaaccccacctaggagggagatggcagccttgagcacgacacagtctacaacacaaggtgatgcttaggagccctcagctccgggacctgcagagcagaacgtggtgcggacaatgagcgcacagaaagttcaggtttctcggccgagcgccgtggctcacgcctgtaatcccagcactttgggaggacgaggcgggcggatcacaaggtcaggagatcgagaccatcctggctaacacggtgaaaccccgtctgtactaaaaatacaaaaaattagcggggcgcggtggcgggcgtctgtagttccagctactcgggaggctgaggcaggagaatggcgtgaacccgggaggcggagcttgcagtgagccgagatcgcgccactgcactccagcctggacgacagagcgagactctgtctcaaaaaaaaaaaaaaaaaaagttcaggtttctcatgtgttggagcacggagcccttgaccagtgaagaggcaaggccagggctgagcctaagtcacaggcagaaaaaagacgcagaaacattggaataacgctccacacgcactgcttgattctgcgctagaaaccctgttatctccgaactgttggtgttattctgagtcacagcaccagctcttttataaagagggagacccgctccttctttaacagcagattcgtcaaaatacgtccaaggcaaggaaacctagaaaggcgtctgggcaggggaaagtcgatgcgagggcgggccagggacctttcgtcgcgtccccaccttggcatttcccgtggcgtgagcggccccggcatccgtgtcgaaagtgcggcggcggaacaggcgcgcaggagaggagcggcgcaggcgcagacgcgcgggcgggaagatggcggctgggttcaagtgagtgttggcgggtggcgggtagagttctgtaccctggcggacggcagcttcctttaactcttagctgggattctctcacctggaggccgaccccgttggggtgccatttccttcctcgtcgaggcagacgatgggcgggaggacctggaggttgtcacagtgaaaagaaagggcttcttcctcagtgagacgggagatgaaaggactctgtagagttccatacccgctgcgagcgctcgtgagcgtggtgtgtagtgaacgtgcagtcccaggagacatagttgtaatcttttaaagattgtggccgggcgcggcggttcacgcctgtaatcccagcactttggaggacgaggcgggcggatcacctgacgtcaggagttcgagaccagcctggtgtacatggtgaaacactgtctctaataaaaatataaaaattagccgggcgtggtggcgggcgcctgtagtcccagctactcaggaggctgaggcaggagaatcgcttgaacccgggaggcagaggttgtagtgagccgagatcgcgccactgcactccagcctgggcgacagagtgagactctgtcagaatcaatcaatcaagattgttgcatcagaaccacataccgcctgcttctccctctcccgtaatttatttctaaaaggatcatgcctcgtttggaaggtttttgtgtgtgtgaagccagtggactttcttaaagtttttaaaaaatggataaaataaataggattccaaaggaaatccattatgttgaaatagttatctatgagtataaactccgaagacacgatatagtagtatatatacttggtttaaaattaaccttcgtaaacaagatctagtggcgagactagtagtaactcctgggatttcaaagtaacggtgagcctgaacataccttacacagctaaagggtgcaaacgaaaacatctgtggtctccgtggttgttaaagttgcaggtactgctaatgttactatggcttattgcttacagtcataattgaagaatatgctaaatttcacttacagtgaaaataaagatgtacctttttgtttcctgagttatctagtaagaggttaactattcatgatcactagattattaaaataatcttttttcatgatcactagatcactctgaatccttgtttcagagcaagaacgacatgattcttttgacacagattgagcttttaaagagctcactcaaagggcttttagacgccaatcttctaatcgtttatggcagagttaaggacag

SEQ ID NO: 59495 - DNA, 1355 bp, Homo sapiens
tctgtgtccaatcttaggtcccttccaatattacaacctgcaaactaatcaaaccggcatctgtttttacatttctttaaaaaaagcaaagcaattaaaaaaaggacccaattctgctcagagacgaatatgtatttcttaatttggatctaactttataacatggtgatcaacccaagtacactgtactcgactccgaaaatcctgctcgtcactttatattttgagtcctactagagactttgatgaattgcactcaagaagacgcggcccccactacgcagtggctacgggagatggcttccagggcaactgttctccaagttcatttctgagcgccgggtaaccatggccagtaattaatccaattctaagcgttgctatcaattctacgcgttgctatcaattctactgatttccctgatcgaccagagtcttcccattgcaggagcttttgtcacaacttaggctttacctgtacaaccgtcatctccacagaggagcgacaagcctttatgcaatatggacaccaagaaaaccgccttcgaagacacgcaaggcaaaattcttgccagtgtccggaaatacccgtctctggaacccaaaagtcaaactaaaattaaaagttcggcttagcaacaccgcgaaaggcgatgtaggcgtccacctggagtttagctgcctcaacctccgccccggcctgccgggtctctggggaccccgtcttcctccagcgggctctgggatgcggcccgctcacctctgaccctggccggatctcgcgcgtctaagccaccgcgttgccagtcgctggccacccacctaccgccaccgcccacctgtgcgggtcgcctcgccgctaggccccaagacggcgccgcctgctcggcagcaaagcccacccgccccgtcggcggctcagtgctgcacccccaccaacagccagttccggcggccgcacttccgattggcaggctgggccgaggggcggggaaggcgggcggaaggggaggagccgggagggcggggccgctgccaggagcctggagcgctgcgttccgcgcaggacgccggtgaggcccgcagagacttgcgtccgggcgggaggcggggcccaggatctctgctcaatcctggagtccgagtccgcaaagtgggagggagggtgtagatgtgaatttggggaaaaacgaccctgttgaatttctagagtggaagaaacatagaactagcttttctctttgcttagcacatacaaatggaaaaacagcgacaccgttacctacatttactagtccaatgcgtacaaccttctgtagtatatcaactgccaatgagtttatgtttttaaaaaa

SEQ ID NO: 59496 - DNA, 2688 bp, Homo sapiens
cactttttatacatacaataaaagctctctgattaatatccatttttctctttaggattttgccacgttttgattcatgagcagaaaccaaactataaatagcaggatgcaaattttgtttcaaaatatattatatgtagtcttatagactgtaaatatgtacactcatctctttcattattatttggctagctgacaataggtagacacaatcacagttttatccttattactattctcacaagttttagtcacacccactaattgaatagtttcagctattaaggctgtaactgttgatccctgtatctgtcaatcaatatttggcttcatctacatatatggtaagaccattattttaaaaagtgaggatggctgtcatgagaatgttggagtcttacttgcctactcagaaccagaactctctccactgggaaatgtcaccatagaagatcagttggctgcaaaattattgtaaagatgaatttgatctccattatccctactacagttccttcctggttcctctcttaagtatctctccttaagaatctgatgcatattctaaagatcaactagattgccccattattttaatgcctacctgcttcctcctttgtctattcatgctaatgttttaaaagggcatttcagtcattgtgagacagacgcatattttccaaacacagaggtttagatctgtaataaagtttagaggacaattttcttccgtcatcactacacaggatgttagatcctagagagttgacgcctacctgccttactcatcttggattccccagagtttagcttagcgccgggcaaatagaaagggttcaaagttggttgttaaattgaataaatgtggtcagtgattagcaactcagcgcactggtttaattagaccatataacaaattactgaaatctcctgttcatagatgtgtcttcccaactagacgccacgttccccaaacgtagaaacctcattttttctcacccaccccagcgggagtcttggcatagataattcgtacttgatagctctcttacttaaccgaaattcaatagttataaatcagtatcggaaagtaaagcgtgaaggagaaactatgagaaatgtaaaggatataacaggattggtttgctggaaagacggaagaaaactaatgataaagcagtgttacaattcctgcttctggagcaccaattaagcttttccgcgctcaggttgccttagaaactttagagcgcgtccgccccagccccgcccccggcctcgccccgagcttcgccccaagtccatctcgctcttcatccgactaccccatacccttacttccgccccaacctgccaactggaacctagggtcctacgctctatgcccacgcttattctgcctgactaaaaatatggtagcaaattaccaaagttagaaagatatcttataaatataatccatacttttttcttagatatataaacgcaaaagcacaagatatttgtaatttaaaagcgccatctagcatgagctcttagggccaattttcaggcagtgcgttggatagcaacaacttcggaggtccccagattgcagagggagacgtggacgtgagtggagcggggcggtccccagcacactagaggaagtcgtgctacccccgcggagttgtcgtgtgttctggattcattccggcaccaccatgtaagtgtttgcttaccgactgccataattcctggtccagctgcccgaccctgactctctcccgctcttttcctcaggtcgaaggtttcctttaagatcacgctgacgtcggacccacggctgccgtacaaagtgtgagtagctcggccgagatgggccttttggggccggacaagacggggctgggttggggatgatccgagcttttccaacaactaccccacgcagtcttcatctcttcacttcatctactttcctggctcgcgcccttccaggagcctttcccaccggagcctgcgaggagaggtccgtacttgctcgctaagtgtcagcttggcagcttggccccgtcacgagggtgtgggtgtgtttctgattagtgacctcccctcggaattcatttggtgggcaggtggcgcgggaggacaggtggaccaggttctggtaatttgttgggattcttaaacagtccccatctgctggatattagaaaagcgtttcaccgctttggccagctggttgaggaagttaaggaagacattccatcttgatagtcaagactttgaaattacttgaacatttgttattccgcggcttctgagtttcgttgtgtatgagtaactcagcagtcgggcatcacaaagtaatgagactcagatcacacccttcctatgctgggatttaatagagtatttggtaggaatgggaaatgcagataggggatagtttatccatgtggggcctttacttatccttcgcagttgagtgatagattttaagtaaacactcttgaggttattgcagttggaagtagcatgaaatgtagcaaagaacaggattacaatagaattttttgcataattaattagtaccttggcctacctagctgactgataaatttcaatgatttaccaatccatgatccgtacaacctctcagccttttcctcccttgatcttttcatctccaaaatatccctgtta

SEQ ID NO: 59497 - DNA, 1330 bp, Homo sapiens
atttttcctttcatttacccaacatagtcgctttcacattagagagatcacacacaaggtttattttctgctgataggcagcccactccattttggtgggaagatggaaggggaaaaccttatcttcagagtggaatggaaatcaatgaaaagaactgtctgtttgctctaaggaatggagtggaatatagtggggaagggaggcggagaagggatatttgtttttccttaagtggttataattaaaaccttccacccaattgctctgtgaaccggaaaaagtatttgtgaagttgtgtgtgtgttttttagaacatcacaaaggagccttgcagccctctgattagaaaacttgctctccagtggcaccttgtgggaagtgagttatcctgcaagttggatatttagttttaggattaaactaaatagcctctggtagttgtgcacttcctacccattacctacttcccctcctaaaacagcaaggaatttgtgaagaattatgtcagcgattgaatgtatgtgtaacagtctctagactgtaagctgtatctccatgtacatattccagagttgtgtatcaaactaagtagctgtattgattgttaatgttgtttcattaaagtaatctgtggaattttgaagatcactcattcaagaaagcactaatttatggctttaaatttttattttcaaggtggaaacaagttaacgtaccagaattttcgtctgaattgggcatggatctcctttgaaaaggaatattacctggtcaatgaggactccaaatttctagatgttgttcttaaacgtagaggttacttgggagaaacttcttttataagtaagtttaattttttatttctgttttaaaattttatttttctagcaaaggtttataattctacagtgattaaagtatcagtttagttcacttagagcttaaagttaaaatttaaaagttctctaactgctaaagaaacaagcaacaggtttgtgtcaaggtacttatctcttcaagccttctgtgtacatatgatctttttctggtataaaaattggcaggaacactaataagttacgaaacaaaaataaatgtcactagatcttagaatgagcttaggcaaatctgtaatttacccgtaagataaaagttttctgaaacatgagtatcgtgacctttctttgtaacaacagtaaattgttaaatactaatgattttcttctgctttacttcgtttaaataaaactaagagtcagaagcaaacgaatgaaaccttttttcaactccaattcaagttcatatttgttttgttttgtttgagacgga

SEQ ID NO: 59498 - DNA, 1247 bp, Homo sapiens
actaaagttagaggaactatagcacagaaagctaaaataatgaatccaaagtctaaccatgaaacatggataaagttcagcagctggtctttgatctatcaccacagtagttatccagatactaatcttttgccttttattaaatgtacttttctgtagagttatgctggtctctattttttaaaagaagaattataaacacaattacataatttatgtcttataattttttgaaatttaattagtccccaactgaatatttttttgttactgtcatagctggaacagactatgtgggcatcagccgtaatttagattttgcacctggagtcaacatgcagcctgttcgtgttgtcattctggatgaccttggacaaccagcgctggagggaattgagaaatttgaactggtgcttcgcatgcctatgaacgcagcccttggcgagcccagcaaagccacagtgtccataaatgactctgtctccgattgtgagtgtttattaattttataatttacaatgataattgaaatcataagctaaggtttatgtatatatgataagcaagatgattatatatatttgtttgtttgctagggcttccataacaaagtagcactgtcggggtggcttaaataacagaaatttattatctcatagctgttggctggaagtccaaatttaaggtgttggcaggctcgcttccttctgagggctgtcagggaaggaggttccaggcctctctccttggcttgaagatggccatgttgtccctaagtctctttgcatggtgttccctgtatgtgtctctgtctaattttccccttttaatgaggacaccagtcacattggattagagcctaccctaaagacctcattgtaatttaattacttctgtcaagacccagcctaccaataaggtcacatcctcaggtattgggggttgggatttcaacatatgaatttgagaggaacacagtccagctcatacaaataccctagctgaccacacctttctcctcctgatgattttgatagaattagacagtctcagaataaaacttttattctttctctcaaaccttaaagaaaaaaaatgtgatgtcatcagtatcttgattgtgcctcaagaattcccgtcaccacagttgggtggaaccatgtggaactgcacagactcctgagtgtcaataatctttctccacttcacagcacaagacactttctgtcgtctccttcccctagaca

SEQ ID NO: 59499 - DNA, 1408 bp, Homo sapiens
gaaacatgctgtcctggcaaaagccgtggcattatctacagcaatcaccactttccttactgcttaaaggacaaagctcagccagagacacaagcgaccagttttggaaatgtcctatttaatgccaaactagcagtggatgaccctgaagccattctcttagtgaatcagcctggatctgatggatttaaagtcgactcaacaccactctttcaggtaggccaaaaacaagctcatttgtagtagttgtgtacccacatgcaagttatggaacatttatatgcctcagatgtctcatatgtaaatagcagtaatagtaatattgcatacagttaatgggaacattgaataagatatggcaaataaactacataaccctatgctgggcatatggtgagcactccataaacccagcgtttattatttttgttagcaatatatctggctttcatagctcttatcacttttattaatgtattaatattattttaagactatgtgtaatgaagagtcttatttagcccagaatataaatctgtgtctgacagttgagtaatctgcttttcttattcaaaacttccttcctgctgacttttcaccaatatcttaattagagtgatcttgtgtgaactgctgaactcaggaaagcaattgtgcacagctccactctcaaagatttcagaaaccaagatacaaattcctgactcagggatcaaaggtggagggaaacacaggcagctgccacaacactgagcaaatgccacaaatttcaagaggtgcttacactgcaaatctctgccgaagcaagtgcggcttttaggatatttactgaaaattaacccgacaggatggcctggagaaatgtgttattttcattcaacctaaggaaggatcttaagaaagcatgtttgttattctcaatcttttcaaacaagaagttgaagtatgatatgttttatttttatttttgccattaaatctcaaagcatctgaccttcctaaatcttgcatgcttcaaagactcatcagaaaattcatccttttccaaagccccagaaaagcttgaaaattgattttttccccctatggtcttatatgcaataagcagcaagacacagtgaaaagagtcctggggttcagaagatttgagctgtagtcctgcctctgccactaactggttgagtaacattgggcaactcacttaactgctgcatattctaatttactcatttttttagtgaataagctagactgtataatctattaatagttctttagaactctctcattctatgacaacaagtatcacatattcactcccttaagagttgcacaggatatatcacagagtgctttgcacagagccttgcacctagtactcattcaaaaatattaagtaagttaattc

SEQ ID NO: 59500 - DNA, 2550 bp, Homo sapiens
tttgtactggaaacgtatcaagatataaactcctccattacacgtgaaaattcaaaccaatttggcaatcctaggacccttattctgcacaatctccatacagtacctcaaagagagtctaaaacacgagaattcatctcataaaataattcatggaatcggtctaattacctttctaatttcatccagcaccatttcaaaggactttttatccatcttgactactatcccgacgtggttttaacagttatacttgcaattaaaagacgttcatccctggtctgctccgccgatagtaaaaaatatttatagctgaggaggaaaaagactccacgagcaagagaggatgcgaagaggtagagagtattgcaaacttcgcaaaaaaaatttctaaaaattgagattcagaaaaactctttttattaaaaagaaaaaacactccagtcaggcttccccagcttattcacacaatggttcagggcacctcgggcaagagccaggtcctctgagttttgcagaaaaacccgggctcggcggcaggtttgagtgcggtttccctgcagctgagggccaggtgccgccagaggtagctcttgaaggcgctttcccaggtggagcggccggcagagtagaaacacctgcgctcagagtccacgggcggcggggagggaggcgccggtctctcgacccgcacctgcgcctcggccgccggccgcgaccctcaccgccgcgaacccggacgcatggtccggctcgcgctcatccccagccgctccgcccgactcctggatacctcggccccggcagcaggcggcccggcaggctctttgttaccagctgctgcagcttccgggagcgggccggcggctggggagcaccaggagccgggcgaagaggggcacggcctcgcatagggggactccggaaaaacgcagccccaacagcgccagacgccctgcctggttacccctacagcccccaccagctcatggggacctacaataaagccagtcgcgcccaagtaaactcaacactgcgccgccagcttgggcccctctttcctgaaagccagaggtggggtcctggtgtgggaatataggcatccatagcggatgcctggatggtaggaataggatgtggcaaaaatccttcccgaagcctagcggtcattattttgaatgtcatccccaccatacctcgtgtctgagtgtgcgatgttttgattttgccctctggattaaaaagaataaatggcgagcgattaaggcatatctacgggcgcccatactttggtggccactgaaagtcagcggcgcggactgccctgagggcgggaaagggtggtcactgggtcagcccgaagcacctgacatgagggcggggaccccgaaatgcacacgaagtccggaactggtcttctgtgattttcattcgccctggtctctgttccctttcgtactcaaagctcgtgcatccagggaggggaaaccggagatagggtcttcgggccccgggcagaccctctgtgccgctgcaaaccgttgcagcctgaggctgtcaggtcctcccccagacacctgcggaccctccctctcctggcttcccgtctggtcatggcgagattctgggtctgcgtagccggtgctggcttctttcttgcatttttggttttgcattcgcgtttttgtggctctccagtgagttgggtagtgaggaaatgactgtcgggtgtgcgggtagccctgttgggaggcgtcgccacggtcgtggcatggaggtggcaggccctggttccctcagtagcttgtctcaaagcctgcacctgggtccaaactgccttgaccctttgagtttaaaaatttgtgtatgttacatcgccattttcctctttcccaactcttactacatcctcaaataatttgcagacttgtattgtggtcgtgttggtctttaggcatctaagctcatttctttggaattatttcagtccagcaaacttctagttgtcaaggcatgcttaaaaataagccctgttacccggcccccccgccctttttttgttcttacctagacggtaaactaaatctgaattgtctgattttgtttaaggttttgaggaactttacttttgcagtttcctggagaactgagaaaattctttaccggctggatgtgggttggcctaagcacccagaatattttaccggaacaacattttgtgttgcagttgactccctcaatggattggtttacataggtcaagtaagtaaatagagatttaaaaaaattatgaacacaaaggaagtaacagccttcctgtcttgctgtagtaactgaccatatgcgtttatatcatgctaattgtgcaatttatttttgagttggtctcaagtattttggtttcgaatgtgaaagatatgttagattttgaaagtggtttttgtagtaaaattctcagttattttttttcttcgccaagatacagattacctttcctttaagctgatcctaagaagttattttttgtataccttcagagaggggataaca

SEQ ID NO: 59501 - DNA, 1322 bp, Homo sapiens
gacgccaagagcggacgcggctggcaggcagagccgacggatccgccgagctcaggaagtccggagcccgggagcagcccaactccggctccggggcagagagggagcccgggagaaagcagcggagcccacgcccacggggcagccgagtgatttacttacatggctggcgggcggcggccaccttccctcccgcgtcccgggcgcacacacaacttgctgtctttctcgggcgggaacatccacgggaaaccggaccgtcctgcccttctttgcctctgtccctaacagccgcagaaccccggggcccgacctggaagagcaggggttggcaggaggcggagggtctccagaagcgggctggcaccagcggagacccccactcccggcgagtccgcggcggcagctctggcggagcgctgtgggcgcgcgcgggcgccggggatcgcacgcagaggagcggatctccctttggcaggcgaggcacgcaccgcctcctcccctccgctgcccggccctcctctttctccagtcccctcccctcgcgccccggggaactccgcgcagacagacccaggacgcaccggggacgttcctggagcgccgggaagggagtgggggggtgccccgctgtccgcgcgggtccaggcccacccccgggggcagctttcgcggctcctcccctagccccgagccccctcgcgccccctctccctgcgtctcattcaaagctgagtggggaaggcagacagaccgagaagtatgggagaaagttgcttgtcttcctgggtgaccccgaggagccacggaagatgacacactttgcctgttggggcttttctgggtttactgttcgggtttatgctcctgttttcctgccgccgttaaaagaagccgtagacgggaaagagggccttaaagagtgggtaaagtggcccctttgagatttgaggaggcttttgagaagtggtcactttggaaggcggtgaatgaggcggttgtggacgtgggaattaaagcacagcagacagcccaaggctcatgtatggcatgggggcagctgcctttccagacgagccagggagaaggcaggggcggacctctagcgagcctctcccaagagatacactctttcaaaggtctctctctctctctcttgctgtttctctgtctctctctccctccctccctccctttcccttcacttcctccctcccttctcctccatcctgcctcctgatcaattttgcaatttattccatcgtttgatttcttttctgagaaacaactgatttttagttcccctctggacttgaggactt

SEQ ID NO: 59502 - DNA, 1341 bp, Homo sapiens
aaacctccctgagtgaagtgggcctttccctccattttctttcactgtactacttcatcccctgagcactcatcacaacctaataacatctattaacagctttgtctgtttcagacacacaatgtagattctccaatgcctaccagagtacctggcacatactatgccttcaataaataattttcaaaaaaatgaattcagataaggcaaatgtaatttaaactttcagttaacttatattgaatgtatatgccaggcacaagtcatggtgtattttacatactacatttggttgtcatctaattagctctgaaggtcgcagatccataattccaaagtcctctctaatcctataaattttctccttctacctgagggtcttgtcccgccccccacatcttctccgcccctcacgcttctgagagcccaagcagggttacccggcgaagacttccggggccgatgcgcatgcgcggccgatttgcacatgcgcaatactcgcgctgcctccgtggtccctgcctggctgaggtggcagcagggggcgggacgcgcagcgctatggcagagggcagcggggaagtggtcgcagtgtctgcgaccggggctgccaacggcctcaacaatggggcaggcgggacctcggcgacgacctgcaacccgctgtcgcgcaagctgcataagatcctggagacgcggctggacaacgacaaggtaaccggggctggcggggccggagtcacaggttcctgcggggctgagccgggccaggggcggcgtctgtcagggacccaccgcggtctccctcgtcccggcagcagagggaccgcgagtgaccccagacctgcgggctccgctgctctgcgggcgccgggggcggtgagaagggggagccccagcaacctccggaaaagcgaaggggtttcctgggtgttctctccacctgaaaaggtgccttcaaggctctctggatgggattggtgaacggtggtgcctcgagaagtgtcctccaaacacccctggaggcgtttggctgtgtgagctgggagagtggaggagagcacaagactggatatgaaacagatgcaaaagagcagattccaagataaggtagcgcaaatgggggtcgggagaccaagagagcagtggtagggataagggtgcatttccacggacaagtgacaacaattgcaataatttgcagcgcgaaagaactacctttgcccgtggctgaaatgaactcatatctactagtttttgttgagccaagcgctatgatttgtgggctcaggctgtatttctttagaagataaactgacagcatgctctcacaagtacctc

SEQ ID NO: 59503 - DNA, 984 bp, Homo sapiens
atgtttcagcaggaatggatggaagcacagggtgattgggtgacacctggaagtaggagcttaaacagtactgtgtggagtgggaggagcagggatcagggactggagtgaaagctggcaagtcagaattcagagttttgtgctggtgacatctcatactgttcgtggtttaaaagtcacatgtctttggcaaacaagcagcccagtagtctttatcaagagtaaattatgtgggtattctgcttatctgaaagtaaataagaaacacagatgcctgcctttaaatgtctaactagctctattttcccttctttccacagataaaattaaatatagacatcaagatctaaatgtatcagtgggtgcacaaaaggaccccaggagggggaaatggagaaaatttcaggtgcttatgccttcacgcacccttttctctgccatcctgccctcgtcttcactgtctgcccactgagacctggggtcactgctcactttcagacaggaaattgaaagacctttgcaaacacttggtcccatccctctcaacttccatttcctaatccccaaaggccaacgtggaaataaaaagatgctttcatgttgaaggcacctgggaatcaggctttgcttgtaaaacactggcaaggttggcttccaccctgagagaagcacgacctctgtcacttcatcctggaggtcccccttcctggctggctgttcatgagtcatcgagttactagacagagaagaatactttattttgtctggtcactcagggcattccaagaagcaaaaagtgttgggatgttgaggacaataagtgacagccagacacaagagcgtagcagggtaaaaattactgtcctcctaaggagctcagacgatatggcttctggccgtgtctgttctcatattattgctccaggaggaggtggtgggaggatttccccttcatttatattcagaaggtttattctgtgtgtg

SEQ ID NO: 59504 - DNA, 641 bp, Homo sapiens
gtcacactggggcttaagacttcaacataccaattttgggagatatgattcagtctatcacgtcgatcacattcagtctaacatcacaataaaaggccctgtgatgctttggcataccctggtgactcagggatggccaactagaaatataacaggtacccaaatgccattctcactgagaagtctggaaacatatttctgagaaaagcagaagagagagagtttagccaaggtgggaagctactacatgtggtgaggccatgtgtggcaagcatgcgtctaactagccatggacacatgaagtccttcagtgcttaacaatgctgagtcatatattagattatgttccagaatcctacacccacagcatgtgaggcagataagctgtacttacccaagaaatgtaaacaccacaatagtccttggttgtcaatctggtagggtcacgaagacctgcctggtatcagtgttttttaaagcaacagctgaaaaagtgacacctaactagtcaaagaacagagttacaagagacatgctgattcaacgaatgggtaattatatatatttgttttatttgctaaatctatccctaaaatttgtgtgcagaaaaaaaaaaggagaagtaaattatgatgaatatt

SEQ ID NO: 59505 - DNA, 554 bp, Homo sapiens
gaagaaagaggccattaggcagagaggagatttgcagggtggaagtactaactggttctatcccactgcccacctctgaaaatagcctccttgatggccacaagcccagacatctcatgagagcaccaagtagattacattcttatttatttaaaaggaaacagcccacctgggcctggattctccacagaaaaacaaaagagaagcagagagaatcaaactagctctctggaacaaaggtgtacagtttaaatgattgcacaacaactgctgcaaaccagaacattctgtacggtcggaagaggcttaattagcctgaaccaaaagtctaaggtcatgtgattcagaacatttcacagcctgggttgtgacattagaggtgctacgggccatcctaccagaccactgtggggccccaaactggacagccttttgttttctccaaccgaggcttaatttaaattaaaaacatcgaggggtagtggggagcctctgcctgtcctttggaagccacagttgtttcatttgtatgcgtatctgtgtgtattctgaga

SEQ ID NO: 59506 - DNA, 886 bp, Homo sapiens
gtaaggacttgcaaggaaattctctttgaccaggaggattcaagaatgcagagcaaatgtccaggagtcgcagccaaattggtagcttttcttgctcctttccactgcattagcatgcccctagccaaaacaagatggcaccatgccccggccaacttgatctcaatgttctccacagctgtgtgtccccactggggtgagtattggagcaatgtctcatgtctagtctagccaggaagattgtcactttggaccctaaccctttctgaggtttgagcctccaattcactcatgtctggccagcacgagtcatgccatccatgtatcctcactcccaaaagaaatgacacccttggcaaattcttgaactacgttttggaagccgccgctgaggttgcgcaaacacatttggcacaggcttcagggaccaagcagttctctgggttgaatcgcagaaacaaaatgtacttgtcctgcttccgagatggtgtctgaggacttggctccctcggccgaggaactgcctcctcgctgatgtcatcctgccacggaaaggcaaacatctctgggttcagcagttcagaaccagaagtgagaaaagttggggatccaaagggcatccacccaggcttaactccatcgggacaacgtagagagacatgcactcaattcttaacaactaaatcatcttaaaataaaatgtattgaagcagtttgtgaggaggaatcatgctgctgaaatgccctcgggcaaggattactggtcgtgatgctacctccatccagtggggttttgtggggctccacgtgctgccacatgcaccccataggagcacaagttcccagaggcccaggagaatattcaacatccaaccctaaggaagaa

SEQ ID NO: 59507 - DNA, 1546 bp, Homo sapiens
aataaaatatatatataaacttactctaattgggtaacacttgaccttaaaagtaaggcacgtgatacaaaagatttaaggcctaagatcagctgaacaagcaagagagtaccttaacagatgatcatcctgagggctgagtgtcggaacatcttgtcagaatcacttgtcttttgctaggaggcctgaccagcccagccatgtcagtgcacacatgtaggctacctttcaccatcctgctccagctgagccatcctaggctaagctataggcagaagcacatcagcggttggacagaaagtaacaaagtctccagcgatgtcccagtactgtcagagtacgggacagaacacccagaagaataaccattcacagaagtccaagactcctgaaagcagattctgcaaacagcccccaggcttcttggactttggacccagagctgtgttgtcagggaggccaaacacagccctaagccagcactgcccaatccagtccatgcccagagactacctgacttcctttgtgatcatttcagattcactaaaggaaccatttgccttgggcagtgcatttctaggttaatagcttcaactcctcagcctgtagcagagggtaccacaaaatacttggcttcccctcctcccagaaaaatacaagtgcagttgcaaaatagaaatgcttcgaggtgtgtttaatcaaaaggctccatcatgtcagtaaatgtcacataaccccaaaatagcacttgctattgtcataggcttggagttctcatgtgaactttggcctcgttccccaaatgccagctaaccaaacatcctggaggtcatctgccactacattttccacaaagccgaaagaattagagccatttagagctggatgggcccttagagattgactatcacttcacagctaagaaacaatggcaacagctaacattgattgaccacatactatgtgccaagaaccatgtcaacatttaatacttcctgtaatccccttcagagttggtacttttattattcccatttgacacatgaggcttaaagagtggctaagtaataggtccaatgtcacacagccaggaaataaaagtgccctacccccaccttggtcctttgagctctgaactgctgcagtatattggcagcttctccagcaaacaaggctatgggaacttccagactacagaagcctggtgagactgtctttcggctggagcttgccatttccatagctagcaagtcacttacaatcacagaaaacactgcacctacctgcaccacaagcccaacaccgcagttactgcttcgtgtttgtgttgaatcacaaaatgctcaaacttcagggggctttagaagccacacagcccacatcttcattgtagaaatgagaatgcaaggcctggagagatgaaatggctttcctaggatcccatcactaggtagagacacagcaaggaacaatgttttggagttaaaaacagaatactgttccagttactccatctctattttttttttcctgaaaatacagttgg

SEQ ID NO: 59508 - DNA, 1639 bp, Homo sapiens
aattatgaaaatgttttgcttgttctctccaaggtctgaatgttccaaggttccaaccagaatacagtgttgttttgctatcaccttgaccatgggagtttgtgattaatgtaacactttcctttcaaagatgggaaatttttaaaagctggcagataaaaaactagaattcctttgtttgcccaagacagttcattcaagattttacaaacctggctatatgccagaattattacctgggcagctttcaaagtacaatttctccaccaaatcaatctttggacttggcaagacttgagaatctgtctgttcgttgcttgttttggattcatttttgtttgtttgttctcccagtgattctgatgcacatcaggtcaggagactgcagatctaatgaacgtcagctccttaatcaacccacacatggatggtggtgtgtatttgaagatatttgagcaggatggcactactgataaccagttctcctgaaatcacaagtaaagccaccaatcaaaatacatgtcaaaaatagtaacctataataatgatgttgaatataaatcccactggctggaccatttgttctggtctgggtgcctggtcagtggggagaagccccaagcactgccctttctgacgcataagcagctggtgaagctctgctgctgtggctgaaacctcagacagaggcagcaatagaaggggaaatcacgaggcaagtgtaatttaaagccttcatatttatgtagacaactcttgtctacatatagtcccagcactttatctctcttttggctctcattccctctcaccaccttctttccaagtagttccatgagttctgggaatgtccagaactgcacatgcccaggactggaaacaatttaccgagtcatctgtcaagccatagttcatgcttttcgattggtttaggttactaagcaacctccttgtcactcaggataatgacctgactctgacttccaggaaagacaacacaacgtgggatcctgggtgcaggaacaccatcaggtgggactcttgccaacctgggtatgaactctgtgcggttgtactgggtcaaccatttggcctctctatgcaaaataggggtgagaggaatagctctccagctgttatgacttgagataatgcatatgaagtacctagcacagagccaatgctccctaaacggttgcttttatttacaacagcatgagagcagaagagcgacggccacagggagtgcagtggggggcatgttacatctaggacagcccagtcatcgtcacagttaacagagaggagacaattccagagccctccagactactgctctcccagatgcctctggaaaactacataaatagctggcctatgtttgtgttgtcccagttggcaccgggaagtttgagttcaatgcatcatttctgcaaagcctccagtatccagaaaacttaaggctggccatggtaactggccccagcatgggcccgtgtcagtcccaggctcagcatcagtggctctttgaggccatggccttcacagttgctttcagcgcttgttagtttataagctctgtccatgacctggggccaaggcagctgatgctctcccagctccaggatgccatttaaca

SEQ ID NO: 59509 - DNA, 1480 bp, Homo sapiens
ttcagccaattgtgtgaaattgctcttaaatatctctgccaggaaaagccaacaagtcaaaaagagaggtcctgagtgcttagcactctgtgcttttgaatttaaagtgagaagggactggatgatttcgaagatttaagaataaaccagaaaccagggcagggactcctccaggacttactggcaccctttgtgaacaagggcccatgccttcaccgcaattaatgtctcagagtcctcttctagaaagaggtgggatggaggattctctttgtaaacctagtaagatttagagcaggctacctagctcagagaaatagcactgactgccaaaaggcagggagcaccctcctgtgaggactggtgcagacaatcgcctgtagccccgctgggagtaggtaggcagaattcaaggaaatacagtcctcagcagaggcaagcagggaggagagcatgcccaagcccaggaggaagaactaggtgaggccctccacgcgctgcctgatggctcttgatcaaaaagctctttctataaggggtgcctggtctctcttcctaaaaatctgtgctcagcactacaaggagtcagattcaggacgtggatgcccataggcatttttatgcttaatccataaagtagttgggggaggggtttgggaagaaggaaagcagtggccggaagagatctgaactggtcagggcacacgagctgttcagacctttaaccccggcggctgggccttgggtttggcttcctttggcactgtgtggatggtgtttgaacaaaggagaaagagcacaggcttgaaaccaggaagcctgcctggggttttggctctagctccacggagcgatttgcagcccgactgtcaaaaagcctcagacctctctctgcctctgtaaactcttgatttattttgcacagatattacaagaagacttataccctcccaatgatctagtctaaggtgtgatctgcaccacttacatcagaaccactaaaaacagattccttagccctaccccaggccagctgaaacaaaaaataccagggaaagactaagaaatctgtgttttaacaaactcccaggtgattcttatgtactgtcaagatttgaaagtcactgagcaagaggatagagtccaaactccttaatacaattccatgggctttacaatgtgcctttgggtcccattttcagcttctcagtctacaccacgaactgacatgtaagtccccaaaccacagggcaggcactgggataatattacatgcctctcaggcatctcagagcatctccacaagcaagtactattatcatgcccattgtacagatgaggacactgaggctcaaagaagtccagtaacttggccaagatcacacaggaagtatgttgcagggtcagatttgaattcctgtctatgggattgattgaagagttttggctcttaaccaactctgttacaccacattctgag

SEQ ID NO: 59510 - DNA, 1224 bp, Homo sapiens
gatttcgaaaatatgggtgcaggaggcaattacccctcaatttcagttaggtaggaaagggggcaggcagacagagcttcctgcattgcagagagagatgaccacaggatgccccatagacagagaccaactctactcagccagagagagaaactgcagttctccgatagtaaatgcagttgtcccctcttatggagactcagctgccaaaaacttaggtgaaggttcaaggtcactgtgaacccagggccaccctgaaatgctgtccatttgtctgcctctagtcctttttcggcttctaaagtccaatcattctttgcccttataaccactctggtgtgtcttggagagaaaacacagttcttcacggtttgccagtagtcgagggaggaatctgaaagctgactgtttctcccacagcttcaggagcattaaaacttcaaaagaggaactatttatgctgtcattaccacagcggtcacttctgcaggatttctttctctgatgcagcactggttggacacacttggcccagggccgagaggggagaggagggcgttacagagacactgagtcatcctgcctcctccacgccctccgcagctgcccctcactgcacttcctcctcctcctcaagttaaaggtcagcctctcatgctcgtgccaagttttgcgaaacacacatacgccaaaaaaaaaaaaaaaaaaaaaggcttcagaaagggtaaattttttaacatgaaaagaaataaggaaagcctccttcaaaaatacatgcaaaaataagtaatccttcccccatactacttaataactccagaatgataaaaattttccaattgtgaatatgtaaggaataaaataaaaggaatgaatgccccactgtgttaatgcagccctttttaaaatgatcctaatttcttccagaaggctctggagggtagattgcaaggtttgtcttaatatagaattattcccttctctccgcttgtctttagaaccagtgtgaacatggtgatattttacagttggcaacctgtacttcgctgctcaaaaatgctgcattccaagggctacaatcatgcattgtgcatttgaaatgcctgttgctaagaacaaatatcaaccccaggacgaccccactcagcagatcggccaactcccgcacagagctgtttcccgacctctggtcagagacaggaagcccattggaccctaggccca

SEQ ID NO: 59511 - DNA, 966 bp, Homo sapiens
ctatcagatttctctgtgcccagtgggaatgaaagtctaaaacgcattcctgtctctgtctctcaaataaacattttccaaacatccaagaaacagagcatgttaagatcttaaactagagaatcccatgaatgctgtctgcccaagaccgaggaacaagatctatgtaaaaagggggaaagggattactccccaaacaggagattttagacactattagaggtcttgaggcatacctaaacatatgagccaaacggcgtcataggaaaaaaggcttctgctagaaagtacttgcaggccataacaaattaggtgattcccgtgaaagagattaacctttggtatcaagttgattgaagtctcagatggcactagccgctggccattcatcccatctcgtactcagagggtgccagcactgacaggctctggaggtcagaccagggcaggacacaggtggaagcctgccaaggcttaccaaagggctggcaagcaactcgatatgggaactggagctttccttttgagtttcctgagccctgggcctgtaagtatcctttgcagataaagggtcctaaccattaaatgcataccaacatgttttcaccatcacagataatggcttcaccatctaaatgcttttaaaaattagcatgatgttgtggctccttgtccttactaaggagtttataccaggaaaaaagtgtggtaataactgtgtacatacagatgtcctttgacataatgggccaattccatcagtttaatattatacagtagttcccaaatcgcactgaataaaggtgagagaggctggctatgaagaatcacatcaatacgatctttgaggcagatttggccctgttatctatgtgcaaacatgaacacagagtcttctaaattttgcttttgtttgattgccttcctataaagaaaaaaattatccaacatgattaacctttgttt

SEQ ID NO: 59512 - DNA, 1007 bp, Homo sapiens
tattatgaatgtatttgttgattgttgttgtttttatttattttctgccttagtccattagaatataagctccttgaaagcagagattttgaatatccagaatccagaatagagaccaccacatagtaagatttcaatgagtaattattgaattatgaatgaatgaatgaatgaatgaatgaagcatagtacagatgagttgactgagggccacagagtttaagtaattctcccaagatcatacagctggtaagtggaagagctggtattctaacccaggtctgtttgattctgcctctcagaaaccataacccataggtgaaccctgataaatcaagtgctgatccattgaatgcaaatgcttggagacatcaaacagcacactcgaggccctgagtagccaccataacttcctgagaggcttctctaccagagacactccacctaacggactgggaagcacaaatgtccctaatcctgcccttctctaactcttccacaccaaaacacgtgtctgcacatggaacttctctgaaatgcctggaattaaacaaagcaggcacagcccctgccctttggaagctcagcaatctagaacaaacactgaggcacacagggttggtcttatgagctggcaaccatatggtctgattttagaggctaggaaagcttagtccaaaaatatctacccctcccaaatgccacagtgcctggaattccactgttagagggatatttctgggagttgaagcactatctccgattctgagtcacttggcttcagttacttttttaaagacagtacaatgttgtatttagatttttttacccatttttgtgagtttatttattttaataaatgagttgatctcattacatttattattataatacatttgtcacaattctatcatcttaaataatttcttttatttattgtttcctctgttttctgtgtaatctgaattttagtcctaatagtggttacctcctcgattttaaataag

SEQ ID NO: 59513 - DNA, 1756 bp, Homo sapiens
caatatctctgcatgaattaaatactcaagttacttttttttttgagacagagtctcactctgtcgcccaggctggagtgcagtggtgccatctcagctcactgcagcctctgcctccctgccgggttcaagggatccccccagctcagcttcctgagtagctgggactacaggcgcgtgccaccatgccctgctaattttttgtattttttggtagagacgggttttcacatgttgcccaggctgtcagattactttcattcattgcagtagaggctcctacaggatgcaggacagtaaataggctgggggtggagaaaacataaaaaaggaaatcggatgacagatggggaaatacattgaaggcgaatacctacttctctgttttgccttttgttgatcatagaaacaaggggaaaacataatggaaactaaataaacattcgcagagggcactaagatttctgacgctctcatggtacggaagaggagcagtaagacacacgtgtgtggataatcaaaggtgaggatggtgggtgggttggcgcaagaggtgggacgagggagagaagtgctgaccattccagggagtcctctgcatcactgcttctcaacatcacactttgagaggactcttccagctccaaagccctgtccacatcacgtcctgtccccacggtcactctggccaggcaggcctctcattgtgaaatggggccctgcacacaaaaacaacagcctcgtgcttgtggcaggctgaattctttccaaaactgccctgggtttctttatctcagccccttgtgagaacacaggaaactctgcttccccaatcctgaaatatctgcctcaggaaggaagggatattgtcttttcaggggcctctgtttggcttgtgagccagttcgatagcttgctttgtaaatgcactgcaaaagcaagcccactcagaccttccttggaaatggcatatttgaaagataatgtccaaatctatttaaacagtgggggaaaaagttaggtcataaaaccagtaccaactttgtacaaactggtctaaacgcaatactggagaggtgtttggttgtttggcttgctttcgtttgttgattttttttgtttgtattggctaagaattgttcaaaagaaaaatcattcagtttttttcttcaacattcttgtcctactgagggaataattcgttaattcacctttcactggatccaaatggaattcattttttagactttatagaaaacatacaaaccctccactagttcaatattttatgattaatttttataaacaagtaggcgatatcaggacatcttcagagatgaatataattgaatccgagtgctctcatgctgactattaaaggtttcaatttaaaatgtttgcaagagaccagggataggacgaatctccagcattgcctcacagtgccagtgtcctgggcttctagaagcagcaatggtatctgtggttggctgagttttctgggccatcagcgtgatttctaagccggactctggtgctcatcatgctcccacaagcctcagatggcttttatttcacagcagacaacaaacccatctttctgtcaaaggccgtaggttgaggtccggaaatgaatttttaaactatgtcttcaggccactaaattccaaggccatttctctttctctctattcctaaggacccatcaccacagaccccaggtgttatttgtacaccaaacacagccgtgcaacta

SEQ ID NO: 59514 - DNA, 3641 bp, Homo sapiens
tggaaacgctaactattctgatttgagtattgcacaccatatgttgaaatatcacctgtaccacagaaatatgtacaattattatgtgtcaactaaaaataaaatgaaaagaaaaaatatattctcccaggacctggcagcaaatatcccattgaaagaaaaccggattcccaattttgcttttataaaaatctctgatattcatcttctcgagcaataatagcatctttgtctagggaaaaaacatctggtttatttatatggtttgacttatatctggtaaggagaggagtagcaggtagtcagtgctcatgagtatcatggaatcagtacagtggagcaattaagagcttagactttagagtctgaaacactagggtccctttcccagttcagccactcatgcaccatgtggacacagactagttacttatcctcttattgccaacacctgactcagagtgttggcaatgaaatgacttcatgaaagccaagtgcaggataaagaacctcgtgcatagtgagcatataaaacattatcatcatcatcatcatcagccatcaacaaccgcaaacttccaatcgcctgctacattcaaagacctgcccaaggcactgagagatgttcacagttctttttaggaagaatgtttgagagatttgagaggtatttgtcaagtataacaatggatttaaagatatccaggaaaaactatcagtataatcacttttctaaactacaagcaaattgcataacataagcattatcttttaactatacaaataatgcaaactaactagtttagaaagcaaggaggcacaaggaagcatccatttgcctggacatttgttcgctggttgctcctatgcttaagttagttgtttcttaggggctggccacagtcccattggatgagaagcttacaaccatcatagtcttacttctgctcctttaatttccaagttcctaggggcaacactatagctaaatatcaggactagagatgaatgctcaactacacacacacacacacacacacacacacacacacaccctcccctctatgacatcccacgtcaccatcaccctcaatggcaactttctatggaattttatccacttctctggttctttgttctgggatatcctccctttttcaccaaacatggagtcatgtcagctactcttgtttattatcatacagaatggctcatacctcgtaatgtaggaatgttctgtgctattgctgcaaaccattaaactttaaagcatagaatagctttcatgtttcttcttctttggaagaagacaaagcactgacttcactgccatttgtttcataacttactcacattacagccctgaaaacattctactgttttggcccaaatggcttccttgagtgaagagcataggtttctacagcagaaccagcaggttagctctcagggtcaaccaatgcacacaatggactctggctcccaacagctagtgcttcagtccccagattaagggccattactgtagatgagccatccttaccacccatacagcaatggaccaatttggaaggagccactggtcagctttatacttagaagacagttacaagaggagcaacagagagtagtgaccttactgaatgctctttgtacttatactcatccagggacctacgaggctgtgagtagccgaaactgatgtgctgaaaagtagagcgaaatggaaatagatctgttatgagacagaaggtcttatagcccaaaattaacttactgcaaacatccatctttgctcccagtccaaaagtcatccaacataactcagccaatgccgacgtccagagaattaacgagtagctgctagtttctgctagatcattctttatcagaacataattctgtaagccccctgttaaattttcagaatcctaaagggagggagcctatctcctctatctttacattccagttcttagcacaaatggctggtatagagcaagctcaccatagatatttgcaacatgagttgaggaaaagcaaacatcatcctcctgagcttagtgttctcaggaatccccaagcttttgaagaatggaggaatgaccttctaactccagtcacatcatgactagagatgaatgttcagcacacacaggaacacacagatacacacacacacacacacacactccctccatgacaccccattgtttccctaaaccagagtcaagtactaggatgcaggctttctggaatgcacctccctggaattcccagcctatgttgattctatgagtaaccatcagacactggctaccactatctgtcatcagataatatccttttcctcccactagccaactggattttgaacctgaaatacccttagaaggatattttcattttagttcgtagtctggctgcagcctcagccaggcaggcgggcaggatacaagggtcaccacacattcctgctggctctggaaggcagagccatggcctgtcaccctcagggccttgccagccaagatccacccatctcaacagcattcttctttccaagggcctctctctccagccaacttcctcttcaacctattattctgaggcacttggctctcccttgttcctgtggggtagcctaagtgggtggctactttttacatgtcacaaaattgcacttggttttctaccatctggccttctccaatacactggctatatgttctggtttgctactctctctccagtgtgatttacaaatttctttcccgaatgtgctttccagatacgaggctccagtgtggagaaacaggtgtagacttcttgtcaaaactgccaaaggctaacaccactgacaggcaagtgtctcctcactccccagggactccgcacccttggaatggaacaaggaggaaagctataactgggtcccctagagcacagactcaggactggggcccatttcgctggggttctggggtgactagattcatacctcttcattaatttgattgccaagaattcaagagtgtatccattacttcttttcaaagattttatcttctttatctgttactgcttttatgattgaattttttgttacagattacttgttaatatctgaatatttctatggatttcctatggaaagatatgaaaataattctttctgcggtgcatttacagtttcgtaggctgcattatcaagtatatactggacaagagacagcttatattttgacaaggcattgatgacagttgaatcttcagcttaaaattttacatatctgatgatgggaagaatttgtcacagaatagcttctggccccttccatgtcaaaccttgatcatcttctattacccacacacttctggtgccaggtccttaaatgcctgttcacctcagctcagtcatggaactggttgagtcagcacaatcggcattagaagcatttctgtaaactactcacacgagtggctacaaatagttaactatacacagaagcaactgtgaacctcataaatatatacctctaatccaaactaaatgtctgcttgactccgcttcccttattctgatcccaaaaatgcctgcagtcaccaattcaagaagggagtatattggagaggaaatc

SEQ ID NO: 59515 - DNA, 827 bp, Homo sapiens
tggtctcaatctcttgaacttgtgatccacctgcctcggcctcccaaagtgctgagattccaggcgtgagccactgcgcccagcccattccctctttaattagctttttctccttatgcctttttgattttttcatctcaacacaaagcgaacacaaatctagaaagagagagagagaacttcatctggaaacaaaagatagaaccctttccatttcattggctggcaataaagactgaaacttcatcaccatgttgcctggcaacccaggaaatattgttgtgattaaacaaaaactatctggagtaaattcacaatgaaacagctgaaaagcattatatcatcctgcattccactatgaagacatgagcagcagataccctgggactgttcaccccccaaaacacaaaaaaacaaatataccgacatcgccaagaggcagcctagaggccaggaaattccctggactaggatcagaagtcctgggcaagtctcataacctttggggcggtcagagtttttttcatctgcagaaagaacaagtagaattaataagctctgacatttcatgtttcaaaagaaatagtaaaaactgggagcatcgtgccagtcatctttttgaacggcagcattcatttaagagccatgaacagtgatccacaggcctaaagggtgaaagtcgcccatcttgccttaaataaaatccacagtgggattggttgggttcccataagctgttgatgccccagttattacaagtaactctcctggcttagaaaagcagaagctcagcattatgagaacagctcatctcattaagacaaaaa

SEQ ID NO: 59516 - DNA, 2284 bp, Homo sapiens
tgtggggaccaacaaacacccactaacctctttttgcactgggcttgttcagctgcctgctgagtgggctgagaacaaagtcagctgcagtcatgaatacatgagccaatgcagtggttattaacattttggtgtcattgatcctcaaagaacatggtgtgacctagggactttctccccaggagacacatgcagatactcactgaaatttgcatacagtttcaggggtttcacaaccccctgaagcctctccatagaggtaagaacctttgatcttctaatcgaacaatgatctgtccaaatttaaacttacagaagaggtacagttccaacattggtgagtagttttgtttctgtgtatgagcattgagtacagagtagaagctcaccaagtcaaatcccagcactttcctttcaatgagaaatgtacttaaacttctcagcctcggttgtcttgtctgaaaaatgagaaatagtgatactacttcccagagctactgtcaggattaaatcaaataatgtcagctatagactcctgaagcaccctggacttccccttctaaaccctgcatccccttctaatcattcaacttaagcagttgttcagtagccataacccagtaaattgtaagcttcaggaaagctttattcacaactgtattccctggggctcagactgtctcgttcagcatggtgcccggcgcatggcttctgctcagtaaatggtagctcttatgaatatccagctcaaactggtaatgacaaggaagcattgctagacaacgaaagggtatctgctaaaatgtctgccttcggaaacctattgtggactccatggaagaagaacaagtgctgtcttctttctttgttgctatcctcaaacaaagaagtgaaggattgttgcaagactcaaagtctgtcactcccacagagcaccaggaaatgagcctcttccctcagattcccccaccccagttctgatccacatagaggcttctgagactcaaccccatctgtgagtctaaatggacaagacagcagctgctgagtgggaggcagcaccatctccggagagaggccccagccctttcccaagaaggtgttacttttgatttccttcaagtgtgatcaaggtgggtgaagggtggctgctggaagtctaggcgaggtgtgggctggctgagtcagggctggccacgttccccttgggaaattcccatagggagggagcaggtggcagttgtcaactgggaaattaacctggcgtgactttaagatcaatgggtagattgtaatctgcccacagaaaaacctgggtctaattaagggacagcactctgggtggaagtgagatcctatgtttggaatgaagtccttcaccttggccttctctgtttccacctctctagttcacaggcatgttgttagaataaatcaaatgaaatgataaatacatacatttgaaaactgaaaaagtgctcatggagtagattaataaaatagtatataaaagaataaggcagattttcatactgttactaaaaaagtttaattaaaatgctattgaaaagtattaatgcaatttattattattaatttgcctccacttagcaccagggagcaatttccccattttaggggatggaggcctggccaaggaatcaggatctgtaggtgactcttatttgattagccatgtttgcttcagggcaccaaatcacaaaggaataaaaaataccagagctgcccaacaatgaaaagatttcttagagacattttaggcttcctctcaaatcctcgtgttttacatatattacaaattcttagcccaagtccaaaagatggactataaataaacttgcagacaagcattaaaaggtagaaggttcagggtgacatgggaccccatgaatgaaatctagagatagggacttgttcctcccggaccaagataaactcccagggaaaacttctacaacctggagacaaagcaggactatttcccaggagaggagaacaaacagctttttatcaataatgactaccattgtgttggatatcaactatgcactagataccttctctgcatcacttctaaccctcaaacaagtcccagtttataaatgagattgagagagctcacatgaagtgtaagatcacagaggctaaagaaaggtgggctccaggtttgaaccaaggcctacctgttctgtcagctcacccttctcagccgtgctgcggttattcaccatgagacccagaggaggtgacactgcctgccgtg

SEQ ID NO: 59517 - DNA, 1498 bp, Homo sapiens
ctcagctcccaagtagctaagactacaggcacgtgcccccacacctggctctttttttttttctttctttctttcttttttttttttttttttttttttttttttttttttgtagagagggggtttcgctatgtttcccaggctggtctctaattcctgacctcaagtgatccgcccaccttggcctcccaaagcgctggggttacaggcgtgaggttacaggccaagcccttaaattattcaaagctaaagttctactcccaagaccccaaggttaaccgaagtccagaagtcctccggtacctgaaatacctcacagctgctaggctttatggctgttgtcagactgttcaaacacaaacagagccaaatatcctgccagccagcacggacctgctcccaagaatcatgtgttatggtttccatcacacccagccatcaagtcctgtttgagcttgtcatccctgcaagccatgtgactgctggcacctacctgggtcacatttgcctcttcccttgggacacagctttttgcaaaaaggccatagccacttgctaggatgagtcagaagttcctcaaatctcctgacacaactcaggggcaaagagaaagggacagcaaacaggcccagcaggggctgtctagccatgacataagaagccagcacatatctttagaggagcgttcagctccgaatcccaacctgcttcacaaacacctggggcaaactccagagatggcatttccactggcaatgacaggaatcgggccaaacaccacacatccccctggacactcttgacgttcaatacattcacagaagcttccttgaccactcctgggccctgtgaccctatcaggccaaggagctggttcacagaaagtgaaagattctgacaagcagagtattttccctctgagcaggtgtggttcctcactgaaacaggaatcctctttattccacaagcgagacacagaacaaacagtgccccaggccggagaactgaggccagacctgcttcccaggtgaccccggtgtccacaaaataaatgcccctgtaggatggggatcatccgcctgcctctttgcacacactagtctcctggccattctcctgcgaaggcctcaacctcccaaagccctttaaaagataacattttttccatccccttttaattatcttgagccaatggggacaggttcagactctgtccctgattactttgatgggtaaatcccctgctgctcggctgaggagggctctcagtaacctcagtccagccatccagctccccacagccccgccgccaggaagagcctggctccacaaccccgtgccaggcccttgacttccagccaagcgtacccactcactcttttcctgtgctttcctgatttttaaaagagctggcacgggggctcatgcttgtaatcctggcactttgggaggccaagaccagaggatctcttgagcccaggagttcgagaccagcctg

SEQ ID NO: 59518 - DNA, 1000 bp, Homo sapiens
ccaatcaagagagaatgcaaacctgcctatgaaccagctgaaaagtatctgttcctgcgaaagggactagtatgtcgcataaactcattagtctttcaaaccctaaacactttcttctctcatatcaaggccaattttgagtattctgtttaataatttccttcacacatctagtcacttagatcatttccttttagaagacactaagccacgaagaaggtaaaatggggaatctcaccagggagggcgtgttccctctgatggtgttctcctatatttatttggaaaaggtttcagaccccagcatctgcccaagctgtctccagttggtctatagtgggaaacacctctttggcacaaagtcatgacccagtattattttttcccattctactgaggaggaaacggagcctttgtgaggggcaaaggatctgtttaaattcctgacttgacacagtaagcggccagagtagggatgactcatgctgtagctatgggcctcctctttcaactttaatgggaatagtcaacatcctattatttgaatgtttatcctgggttcatattatttcacacagcgaaaggcatttaatggtagaaatattttcaaacctaaaaagttaaaggagaggaaaatcttccacatatccatactggagacaatggcgtggaagaaacccgtacggaagatcagagattgtttgataaatctgtcaccttatgtggaaagccatagtgtctatgaataataatttccagctcagaggatctgatgagtgcttcagttagaccctgcccccagagtgctcagaacataatgattatttttcttgttgttgtaaatattaataagcaacaactgtagcctaacactgtgcggaaaacttaaaaactagtgatacaaagcagataaataactctagaaattattccgggcattcctggagctattcaagatagaggatagggcatccaaatagtcatttcaaggaattataac

SEQ ID NO: 59519 - DNA, 399 bp, Homo sapiens
agagagaaaatggaggggtctcactttctaaagggagatgcaaaagtcagggtaaggcccagcagtcagggctgagaaatccacatttcaaaacgccctctgactctctgtactgcattccgcctaaagatttcaacacagcagctacgtgacaagccctcctgccagagcatacagtgaagtgtgagagcggggaagacaccaccggagccccagattcccggctggaacggagcaggtgtgtggtgatggcagtgactgtctcctgttcccaagaatccccaccttcctccacacccaagatctaccctcacctcgagacacgctgtgaggagggccaggggcttagagtaggtacaagaatccctaaaagaggccagggagtacatttccctccca

SEQ ID NO: 59520 - DNA, 1026 bp, Homo sapiens
ctcctgtccctgtcacatttagttaatgataaagggggaagaaagatcttcccagatagaagcttcctggttgttgcattgacttggggagagggggtgaagctctctaacattcatgataagcctgtcagatcactggcaagcccagctgggggtcatttttaaaaagactgcaggagacataataaggaaatctttaaaacattcaagaagcgttcactaactcaggtgggacatatactaatttagactttaaaaaaaaaaaagccacagcagtctcctacttatcaaaacatcatattacatatttttctaagaggacatttcaggtcgctctttgagtaacagagctgtttcctaactttgccaacaattaaaattttttccgaacaggaaaaggtttgctgtgcaggacttgttacataaattcctgtttttcacacagccagcgggacattaaagaagctacggtttctagggggtggggtttgaaaaggtaaattttgtaaaaatgtgttgctattaacgacgttgtgtctgcactcccctactggccacaggagaggctggatggaagagcagttcaccagaaggacttcgcagcagagccgcgtgagactgctgggctctgaaatattatgcccttgaactctcaacaaatattacctgaggacagaggcaggatgtcaggacagaggttcatgccctgtcaatcacttgcccaaatccagcgtttctacatgacggcactagagaaacacaagccagccaatctcctctccactagcttgtttctctgcagccccactcacaagcctctgcacacaccccatctgccatctgcatgcctggccaccccaagcagtgcagcatgtgcttcctgggaagcctgacccaatgagctccacagatgggggagtcggggaaccccgacatggtgtagtcggggaaccccgacatggtgtacttgcttgttcaacctgctctgctggctgttctatgttcagattctgagttccttaaaga

SEQ ID NO: 59521 - DNA, 544 bp, Homo sapiens
tgctccaggcacaccggtaacagaagagactgggagtatgggaatctttcaaattcaacgtatgtaaatgtcataatgggccactgaagagaaaattaaatcctaaaaggttgaaggggagagaccaattcagtcatacagattgaagaactctcagggtaggatgatccacaggaagctttcccattcaccacatgtaaatttcatgatggcctacatacctacccatccagagagaaaagtttccaatgcaaccagcttggtgccaagtacacaaacaaccccaatcgatatttacaagttttgcaagttcccctctcctccctccccactccccgtttaggaggtagccctgcagagagagagttctgctgcaaacagatgaggtaactgtaattcaagagagcccactttctcctgtattcaaatcacagtatagtatgaatgatggcaggctgaaacctactggtgtaacaaactggtgattcttttttttttttttttttgagttggagtctctgtcgcccaggctggagtgtagcgg

SEQ ID NO: 59522 - DNA, 1190 bp, Homo sapiens
atctcttctatttttagcagtgacagggtgttgccatgttggccaagctggtttctaactcctgacctcaaatgatctgcccaccttggcctcccaaagtgctgggattacaggcatgacccactgtgccaggcccaatctcccattttcaaagcctggttcaacggccaatacagaacttcatttttctctaagacacttaactcttcccactgtatatcatagttacttacacattgcatctagtcttcctactggatctatgttttgagtcattgctaccactcaaaaacacctagcacatcttgtacacagtaattattcaacaaataaatggaaaaaaaaggactctgacaatctgttgaaaacaaaataatcactgttctttagttatactacttcttaaattattctcacatgatacagactgtgatattctcaacacacaggaagctgaaatataaaagacccatgtatcaagaaagaatttttttcctaacaacatatttacaatgtaactgagaagccaagacatacagacattaaagttaaattatatataatacacagcagcatgaattaaaagattaccagatattcactcagaggacaaaaattcctctgggtaggagccaagattggaagttggtgaactgacttgaaccttgcacactgagcaagatctgctgaatttcagggctcaagatgatctaagctctggggacaggagcgtctaggcctgaaatactaaaagctaaacgaggggaatggttagcgggtaggaacggaaagtctcaacagaccctgagaaagaagagttaacagacttgggaacactaaacaccaggagagtgctcaagaagacaccaaggtttgaaaactagggaaagaactaactagaccattaacccaactggggaccttgaaatgagccatctgagggcagggggaaatacagtatgttcagttttagacatgctggatttgagataaaagtgggacctccagagcctttaggtaactggatacacaaggcaacagagagtaagttacctaagaaaataccagagaaaaagtccacaactagtcctgaggtatacttatgaatgaggataggagaaggaaaaataagcgaaccaactggagaagccagatggcaggaggaccattgtaatggaatccaagataag

SEQ ID NO: 59523 - DNA, 683 bp, Homo sapiens
cagcaactggcaaagaggaagatgtcttccacactctaagtatttgtacacagcatatcccttaggcatcaaaatacatactttttcaagtacatgtggtcttctgtttcacagctgaggaacaccaccagaagcatcagaattctttatgtaccaagaaaaggtgcttggttatatgaccccagggagatcctgggggggctgggcaagtctctgcaagttgttgctacaaaggcaaaggcaaatcttgaactgcagggaagcagaccaactcccacacaattgaaaattctgccttccccaatcactatgtggtatttacactgcctttccaagaggatccccaaaaagccccaaagctacagcacatataggccaaaaaaatggctgggtaaattcccatgatgccagggaactgggtagtttccaagggcagagtgttccagaaaaatgcaaatcattcaggcttccccagagaaattccagccaaatacagctgctatcttagaaagcctaacacaaaactgcagtttagatgcttggatgaaggggctagaagcacaaggacaggcaacatgtttacagtctgcaaggcattctaacttgccactgaatattcttccccctcatcccatttcgtatcgcctcggagaagattccttgtgtgtgcggagcatgaaatc

SEQ ID NO: 59524 - DNA, 5166 bp, Homo sapiens
cttcaaatataaccagcacttaactatctaaagaatgacattaaaagtttttgaattcattaacagttttccaactagtttgtcctatgcaaatgactcaaactttcaggcaggccccaggaagcagcacacaagaaactatttaattaaagattcagcctaattcccagtagtaaatcacaggaaatattttgtgccaaagcaacctctcctcggtcctaaaacagttaagttttggttgctttgcatttaaaaactggatttaagttaaaattcatagtaaaatttctcttttatgactcttagaacaggagtctttcagatctgagagtgaaacttggttttaacaagtaactcatttttatgaaactaaccaaaagactagttatgagttagaacagctcaggttgtttcttttcttcttaaaatacccttttactcaaactgaaaatgtacttgctgcaatcagacttaaaccaactgacattacacctgaaacacttactcatttgagaaaggcagcctactccaaagcaaagccccattaggctcccactgggagctgcccaagggcctccaattccagacagataacttaacaggtctcctagctctggcaaataaatttaaaaaaaaactaaattattcttgcatttttaaaaaaatcagaacaagaacctgataaaaatggttgtaaagatgatttaacatcagaatctattttttaaaaacctaaatcttaaaaagtgtaagcatattcctagtttaagactaacactctgacaatgccatttgagacgcaaaactaaaaatatcccaaaacacttcctttatctttaaagaaaggcactccagcaagttgaagtaggttgtatccatttccaaggactaaagaatggtgtaagtacacactgtactttgaatgcaaaaaaaggggggaggattttttttttaaatggctaatactctgtaacagctgaagtggaattgatagatgagcaagtaagtcaagtacttaaattcaaatgttaagtaaaacaagatttggcagacaatttcgattttgtgacttaatagaatatatgctgaacttaacggtaagaaggcactttacttttttgaaacacttggtaaaattgcatgtaatgcctggtaatgaagcgataagtgatacctttactctaaaacacactttggaaaaaataaaatgaatcttgaattccttctaaaggaacttcaataaggtgtgagtaacttaacccttttgacacgcattaaccacagggatgacactgtgtgtaaaataaccttggtgttaacaactgcgcagcaaagaccaatctttattatgccgtggagtccaatatgagaggcgaagaaaggtatgttttaaaaaggtgtttagctcggccgggaacggtggctcacgcctgtaatcccagcactttgggaggccgaggcgggccgatcacgaggtcaggagatccagaacatcctggccaacatggtgaaacccggtctctactaaaaacacaaaaattagctcgacgtggtggctcgtgcctgtaatcccagctactcgggaggctgagacaggagaatcgcttgaaccagagagtcggaggttgcagtgagccgagatcgcgccacggtactccagcctggcgacagagcgagactccgtctcggaggaggggagggaggtgtttagctcaactagacagcctttacagcaattccgccaccggtgacagtgagaaactgtcagcttggggaggccgcgccacgactggaccccgcccccgggaagcctccccggagccgagggcccccgggccttctcctcggagtcgggaagtgcctgcccccacgctaagtctctcctggccacgctctgaaaggcaaaaatggcaaaaatcctccttcaaggcaccgctccctcgacgcgcaccgccactccgactccctcaaaacattggtcgcaaagcccccccgcctggtcctccatgctcaagaatagggtggcaaggcaggaaaagactcacacatcccagcccccggcccctcagggcagcctctgtgtttctaactaaaagcctcctaccaggggcaagaccaagttcgggcgcttccccgcatggagaaacgctggccccacggcgcccggccccgacgcgctggccctttaaaggcgcgggcttcctgcgcccggggcccctcccacgccaccgccaccgccaccgccaccgcccgcgcccgcccccgccgagggtcacacttgaactttagctcgccccgcgcggccaggcgccggcgctccgcaggcggtggccgccccttcgcacgtgtcggaggcaccacctcgggctcgggacgccgggcccccggcactcgaggccactccggagaaaaccaaaacaaagcaaaatgcgcaccgcctccagaaactgcccggcaggccctgcaccgtccccggccggtcgcgccctgcctgtcccctccacctgcagcccggtcccggggcagcgaggctccggggcccctcgccgcgccctcccccgccgcgcccggcggaaacagctccgcggcgcggccggagagaacccgccctccccccgcggaggtccgggagggaaggggcagccgaagcagtcggcgcgggccgggggttgccgctcccagcgaacccctttctcctttcactggcaaacttttcggcctcgctctgacgtccacttcttggcgcactttctttacttagttccccaacgagccccttaccgcgtcccacgcgaactcctgactggcgcgcacgcacacctactgccgtccccgaccggacccgggcgaggccaccgcgaccaccgcttctcgcccgccctcctgggaacgcgctgccctcctgctccgcaccttcaggccgagcaaacctgcacagctgcgccctcgcctgacccaccgcgcccccaaggtccggccgcgcgccgagtccactcaccttccagcccgccgagctgttgctgtcacccttatccttgaagtagggcacgctcttgaccatccactcgtagatctgcgacagcgtgagccgcttctccgccgagctctcgatggccttggtgatgaggtcggcgtaggacaggttgccccacgcgttgcggcgggacgagctgctcttgcgcggctgccccgcgagcggcccagcggcggcggggggcaccggcgggtgctgcgacagcggcccgggcggcgggggctgcggtggcgctgggtgcaggcagcccgcctccgggccctggaagtccccgcacagccccccggtggcggccgcggcggccgccgccgccaccgccgccgccacggagccgggcgcctgcgggaagtcctcgctctcctccagcaagctcaggttgctcatgaagtcggcgctgacagcggcagccgaggccgagggcaggcccgccgcggcgtcggggttggcagccgcgctgcccgacggcgccgggctggaggtggccgagttggactggctaaactccggcctgggcagcggccaggtgcacgagcgcggccggggcagcggctcgaagtccgggtcgatctccaccacctgaggcgcctcggccatggtgacccccgcccctcccccagccgcaggagagccaagagggggagaacgcagcactgggggcggacggggagggggcgcgaagggacggtccgagatttgggggaacgaagccggtgcggcgagcggacggaaactgggaggaaggcgcggcggagtggaagcgcgagcccagaacttaacttcgcggggccatccacatcgaggctcctcggggtccgccgcacggactggacggccggccagagccgccgggccggggcagagcctgcgccgcgctccagctgacagggccgcggacggaaggacggacggacgccgcgggccgcttgctctccccagcggcgcgcccgctgcgctgctgcctgttgaatgtggcggctgcggcagcggctgctgcgactaccaggccgcccgacttacgggatctgccgccgccccccgcccgcggcggcgcgcgcgccggcccgcccctgaccgacagcccgcgcggccaatgggcatgcggcaccgccgcccgggcagccagtgggcgccgggctgggtggggcccggttttccacggggaggcggcggtgggctggtggggggtagtggggtgtttttctctttcacacactcacctcctttttttttttttggatctctattattttctggtaattctcgagtgtttctgtgattctctcgccttctcagtgttttgattgctaggaagcaaaccagcgtggaggcgccggcgacactttgtttactacggagcagcagagccgagtactcgggaagcccgggtgggaggaggcgctcgctgctccctgacctccgctgcgggccgagcccggcgggctggcagggcagggggccgagggccgggggcgcggggtgggcgggcggaggcggccgcgaggaattctactcaatcgctccctcctggctccacccacgatgtctttgctgaacgacgtggggaatcggtgggttttgttttggtttaatgttttctttcgctgcgatctgtcaagtcctccggccccctcgcgagcggcacacgccccccacccccggcgccgcggctcctgcagtcgagtccgcgccgagggacccttctccgtgcccaccggtccgcacccccgggctcagcctgtgccattcggtctagccagaggcgcgtcacccagccggcagcccccagccggattcactgtattcttgaccttttttaaaatgctagaaatgaggaacaggggctccggcgcggggaggagattatctggcctccctgaacacacgaatccaaaggcacccgcgaccgcatgccctccgtgggaacctcttcccctgggcgggaatctcccgctccgtccactaagtccagggccggcagcgaagggctcaggagcgcagttagagagaaccaggtcattttattacttatccctaattaaatttagctgtttgttacttcttttttatttgcaacggaagtgatcgggtgttaagtaaaaacgcaaggggggcgggagataggaccaaagcct

SEQ ID NO: 59525 - DNA, 1665 bp, Homo sapiens
tggctaacttcaaccagtggtcctccttcagatttcgtcagacttttccagaaacgatatcctgagtctcccctataatggttaggtgtccctatttgctatcccagcaagtactcattcatgttggctgaatagtgtactctgtttacctacactatctcagctattacttcactacatagcacttgaattgtctactttctggaactacacgctccgtgatggcaggactgtctcacttggggtttacaaccagtactggcacgctgtttttcgagtttttcagtaatgaactaaagaataaatgaaggaaaacaaatgagactatcaaataaatcttgggaggcaaaagataaaaacctgggtaaactgacaggagatgatgacaagaggaatgaggcgcggcgtgtagtagagcacagcgaccaggtttgtaatcgtagctctgttttcacgcacactatgaccttgggcaagtcatcttttctttctgggatttctctttcctcagatttaaagcaatagcttctaagacccagcaggtggtaacatcgaccccaggaagtcggaggatgtacaggacggggcacggggttgcctgaggacctaccgggccaacagcgctgaactgcggtacctgactgttccgtgccgaacagtgagtagcataatcgcagccgctgatgtctccgggcttccagaggacaaagggtggcgggaaagggggcgaagaggtaggaacgtcgagactctaggaaacatcgccgagacacgaaatgaaccaagaacacaactgaaatggtgcgtcccgctgccaaacacgtccccgccctctcttccgcttccggcctggcgccttcctccccctttgcgctccggtgggctacaggggcgggtaactgtgttccggactcgcccgcggccgggcggagccagttgcctccaagcgacccgacccaccccgcgattgtagtcctagaggcggagtcctcgccagagttcagcaaaggttcgctggccgaggcgggtcccagaccggcgaacccgacagtggagggcgtgaccagttgtgcaaaaactacagatggtgccagtgagatcagtctcttctttaacagacaatattttgcgatgtttggaggggaagggtctacagcgttcaccacgttctcaaaatgcgccatggccaccaaagaggtttaaaaaaaattactaaaagacctgctgccctatgaattagcgtttcctttcagtctttatttttgatgtagagtcaaaatgagacataggtttcatttttcaaaaatagctttatggccgggcacggtggctcacgcctgtaatcccagcactttgggaggccgaggcgggtgggtcacttgaggtcacgggtgcgagaccagcctggccaacatggtgaaaccccatctctactaaaaaaaaaaaaaaaaaaaaaaaatacaaacacacacacacacacacacacacaattagccggccgtggtggcgggcgcctgtaatcccagctactggggaggctgaggcaggagaagcgcttgaactcgggaggtgggggctgcagtgagccgagatcgcgccattgcactccagcttgggctacagggcgagattctttgtctcaaaaaaacaaaaaagaaaagaaaa

SEQ ID NO: 59526 - DNA, 1259 bp, Homo sapiens
gcgccattgctctccagcctaggcgacagagcaagactccgtctcaaagaaagaaagaaaaaaagcctctgggagggagcactgcacagtgtaccagctgagcgcctgacctttggagttggacagaactttgctgagtccctgcttttctcttagcgcctgtgtaatgtggcctcccaacaccttggtttcttctccaacctcattctcaccagccattgggctaggcaaggggacacagcaactaagttggacagaagacaaataaatgagagtttgtgcaaaaaacccaaaaaaggtaactttgtagactatggattaaaaatctgagcaaaattccgatagtttcttatagaacaaattgggaggcatggagaggagaaatgtggaaggcttgggagtgatgagagtttggaacagcccttgtcaggataggagaggaaggggctcaaggaagacaagagaaagcactaggctagggcccaatggctcgaggagagtaccaagcgccctgcatggtggactgttccagcaggctgatggaacacagggggttcaaaggaaccagtgatgcagtcatgctgtggctggggtttacaaaaggctaagtgactcactaaaggtcacacagggacatttacacaaacatcctggccccaagtccagtgctctttctaatctataacagggtctttcctttttttttttttttgacagggtcttgctcagtcgcccaggctggactgcagtggcatgaacacagctcaagagctcttgccacagcttccccagtagctgggactacaggcatgcgccaccacaccaggtttaaaaaaatttttttttgttttgatttttagtaaagacaggggctcactgatactgtcattgcaaaaattataaccaagaaaattatgatggtcaaagagatctgacctaactgactctatcttgcttctaacctccaaactgtccttgttctgggtgtaggcccaactaactctgggaggagcttagattatagtttagcgttgaaacaaagacgacaacagccctttcccaaaacaaacccccttcctgcctggggactaggccgccttgtaggactaacaaattagccacaagtttacaaattatggtttaggagtcatgcagctggagactgcaagattctaaacctccccaaatagctcctcaggatgacatcactattgtaaaacctaagatcacagataagattgagatatttttgcagagcc

SEQ ID NO: 59527 - DNA, 2960 bp, Homo sapiens
acagcacatctaaacaaggcttaaagttgtaaaataaaattacactgtgtggagggtgtgtgtgtgtgtgtgtgtgtgtgtgtgtgggtgagagagagagagagagagagatgaggtctctgtcatccaggctggagtgcaacagtgccatcatagctcactgcggcctccaattcctggcctcaagcgatcctcccgccttggcctcccaaatagctaagaatagaggcatgtgtcaccacacctttttttttttgtcgttgtttgtttgtttttatgaaacggagtctcgctgtgtagcccaggctggagtgtagtgatgcaatcttggctcactgcaaccttcacctcccagattcaagcgattctcctgcctcagcctccctagtagctggggttacagacacgcaccaccacgctggataaatttttgtaattttagtacacggggtttcaccatgttggccaggctggtcttggactcctgacctcaggtgatccgcctacctcggcctcccacagtgctgggattacaggcgtgagccaccatgcccggctaattcctgtattttcatacttagttgtatttcctattagggccttggatcccgagtataattttgtactcaaatataatttataaataaggccttagcctcccaacaaggtcaaagtagctaaaaagtaagtcctcccaaccactgacattaccagcccccagcccccagtcccagcccagcgggctaacaagggtccggcctcagagagggtctcggggatcccagaggtgggaaagtctccggaggcgcaggccccgctctccaccttcaccagggtcggcggcagcaccacgccgggtcgcgggctggctgtgcgcgccgcggccccacgcccacttccgcttcccgtgctgggggcggtggcagggccggtgggcggtggcggctcccggtctcggctcgggcacggccctgggcaggccgcccgccagccgcaggggcgctcctgagcttcgcggggccgcagtccgggatgcctgcgcgaagggaggggcgaagggccggccgttgccgacgtgggtgttaagtggccgccccagccggcgacccggagccgagagcgggcggcggagcctgagctggacgcggccacgccggcgcggcggtgagcgcagcccggtctggcgcctgcagctgcggggagcgcgccaggcagagggagcggggagcggggcgcggggcgggcctcggtgtgcgggcggcgtgaccttcccgagcggcgggggaagcggccagcgtcgcagcgcacgtgccgcgggactcggagaatctcggggttgtcggcctccttcctgcagtgcccacctggtgggaacttttgtccttgtttgcccccaagtcctgtcatttggctgcggggctccgcgcctcaggggcgccagtgctgggcagcatggagccgcttgtgaatggagacttgctggctgcccaggagtgggcggctgggcaggggcggtgaacgtttagggtccggccaagaaagttggaagtcgtctccctgacctgttccttgcgaggcccgggaggagacgcgcctggccggtccttggcggcgaaactgatttgcatctccacgctttacctaaagcccgggctctggggactggatggcgagctggcctgcggctcctttagccagaagctgggatcttcccgcagcagttcgtgttccctggtggaaaatgcagcctcatctactgactctcccttccaaaaaaaagttattttccccaagggtcgagaaaagtgggtggtcggcactgttgttcctcagttgcaccctggtgtaatttgagagaggggtcaaaggcgctgaaaagattcttttttctattccaagtgctacagcaagctcataaatcaattttaattcatgctgaacagtcttgcctcctccaagccctgtgtcttctccaagccagagctacacataatgtgaattagctgcccactccttctgagtgaatctgttagtacccatcatcgttttctatcctaataattctaatggctatttgtagaatttatttgtttgtttatttttttgagacggagtttcgctcttgttgcccaggctggagtgcaatggggcgatctcggctcaccgcaacctccgcctcctgggttcaagctattctcctccctcagcctcccgagtagctgggattacaagcatggcccaccacgccaggctaattttgtatttttaatagagacgggggtttctcatgttggtcaggctggtctcgaactcccgacctcaggtgatccgcccgccttggcctcccaaagtgctgggattacaggcgtgagccactgtgcctggcctatttgtagaatttaatgtgtttaagtttggctcacctaacagggtttaattcttagggacagatagaatgtaatgtgatgtgactttccttcaaaattaagaaggaagtgtctgtgccaaaagaaataagcgcattgaggtttatctaggaggccacattgtacttgcctctgtctgtctgctcagttgcccccgtttttttctttcccaaaaatatagggttgggtgttttgtgttgcctttggccaggttgaaatactcagattaacggttggtttgtaggcacaggcctgaaaagacaggactttgaactgaatcctctgtcactgacagttgtgtggccttggagaagaccttgtcttgctccaggctttagtttgccttctgggaaaggattaggaccctgataaactttttatttatttatttatttatttatttatttattttattttttattttctattattattattatttttttttttgagacagagtctcactttgttgcccaggctggagtccagtggcacaatctcggctcactgcaacctccacctcccgggttcaag

SEQ ID NO: 59528 - DNA, 1533 bp, Homo sapiens
ccaggcgtggtggtgcatgcctgtaatcttagctacttgggaggctgaggcaggagaatcgcttgaaccccggaggcggaggttgtggtgagccaagatcgcgccattgcactccagcctgggcaacaacagtgaaactctgtctcaaaaaaaaaaaaaaaagacatgtctctgaaaatgagactgataatggactgtgtcttagagccgtgaaagttgtaggatttgctgggaatgtcagctaacctgagcctaggggcctgagcccaagagcctgaggctcccccagcacagggaggtgctacctgtgataaggggtagtgctggcaccatgcaggctactccttagaaagatcagcttgaacatgcaggaagagcaggaccctcaggctgggaaacagggcggaatgggaagtgcatggtggtaatttggttctccagagtccagaagtaggaggagtggctggaatactgattgcccaaaggaaaaccctggactaccctgggctcccgcaggattctcatagtagttgcagctccctggagtggggaggccagcgggggtgttgcccagtgctgtccttatccagcacaccccccacccccaccaccagcagatgagtatggtcatgaatatggtcacctcatcagtcatttgctcaattgtgaaaaagaaattgttcagagaagagcaaagtgtttttccatgagccaaaggtcagccagggtatgctaatgaggaagactggagagagcgcgtcaccgtcaccgagcctaatgaggagcactgggcaagggcacttctcccagggcagaacccacaaggagcgtcccagccccagatgcccagggaacggaaggccagtgggggtctgcccagtagtctcttgcccactgcgtgcctttaggctacagcctcccaagcccctttccccctcccctcccccatgccacactggggaggacgctgaccctgagaatggtgcaaacatctgcctgccccaggccgcctctcaccagcgagtgaatgctcttgggctcagttctgtttctgcagaaggagggtgtttagccacatatagtctcagcttttgacattttatgtctttcagtcaatctgtcaaagatctagaacctatggtgatagaatttaaaagtttaccttttcctatttatgtgcatacaggtatttgggtaccacatttataatttacaagttagtttgaaagatagaaattgcaacagtatggttgggagcctggtatgtaaggcatttgctggtgggcatgttttgaacatgtattgatcccttatgtatactgacacactgtccccatcactgttggacaggtatttccccctgtgctggcgacacagggacgcccctcaccgaggtagagatgctgtgggtagtcttaacttctgaggacaacgaagcccattcctggggggacaggatagggagggggagcgagacatggtctataggttgggggctgggcagaggaggtgcctagcagtgacacagaaacc

SEQ ID NO: 59529 - DNA, 1242 bp, Homo sapiens
cagcctgggtgacagagcaagacaccatctcaaaaaaaaaaaaaaaattattttgtgcaatgtagactctgctgtatttaatcttatagaagtatataaataaaggatttaagcataaataaatttcagttcattctctatttacatacacgttattaatcggtagagctcaaattaaagaggtttttctatagaatgaaatatttagctctttggggattaattagccagactccttgtttcctttccgtggtgccgggtctgatcagtcccactgggcattaggcaaagtgagcgatgaagtcttcccaggtctcccctccctttctgtggtttccgtttcttgtgcacacagtagctgctgtttactgattacgtagccggtgctgtgccaagcctgtctcctccatttttatttaatcctcacgctaaccctgtgaggtggcatggatgaggagctgaggctcagaagttacatggcttgtccaggatctcacagcaaagccatagtccctctgaccctattgcccaggctcctacatattcactgcactgtttgccgctgttgaacacatgtctgtctctctcccctgcctggcatgagctccttcagggtgggacttagatgccaggcacatcaaggacctgctctaaattgtttactggacatggctggaaggttttggaggaaaagaggttgaaatgaaccgaagcaggggtaagttctggggtaggctgcctgtgccttccttccatggataatggaactgtagcctcgtactagagcagtcatctgtcctgattgcaggaggtacagcatgtgtactgaccgggcagccctttgacacaatgaaagtgaagatgcagacgttccctgacctgtaccggggcctcaccgactgctgcctgaagacttactcccaggtgggcttccgtggcttctacaagggtaccagtccagcactaatcgccaacatcgctgagaactcagtcctcttcatgtgctacggcttctgccagcaggtggtgcggaaagtggctggattggacaagcaggcaaagctgaggtgagtcaaggacacacactttttttatttgtttaaaaaaaccccacaaaactggcaagacatggtggctcatgcctgtaatcccagcactttgggaggcaaaggcaggaaaatggcttgaggctgagagttcaaaaccagcctgggcaacacagcaagatcctcatctctacaa

SEQ ID NO: 59530 - DNA, 1474 bp, Homo sapiens
aaaaaaaaaaaaaaagaaaagaaaagaaaccatcctgattaaccttgtctaatccagcactcatcttttttgagcttgggcccgttttttttttccatcctgaggaacagtgtttgcctcttacctgttggggaaatgctctcttagagtctacaaagctctgacatgtatatcatgtctctatagccctcaccgtgatcctgtgagaagagcaaggcagatgttacctctcttagggatggaaaactgaggtgccgatgttgacctgctcaaggtcaccccgctaaggacttgaaattgtgtcctctgagctcctgcccagtctcctttccatcagaccacagttgggggtctggaatattttataagggtcagttctagagagaagattaatcaggagcagtgaaaggaaagaactgcttgtgagagcctgtggtgaatttctgcaatcacattgtaaatatttgtctgttcccggtttcaacatgacccagaatgttctagtttgacgtttggctggacagggtcttacatagcaggagtgctcaggtacatgtttgttgaacatatgacaaatggatgattcttacaaaatcccatcctatacctattactgtttcaattccagttctacacattcatactacatgcagaaccaggggcccatgcacctccttctgtgcactggtcaatgaaagtatttattggaaagccaaagtccactgcatatctgatttgactgtgtccttgcactataataatgtgcttggtgttcattcagatgtctgagccattattatatcttaaactcaatagacttctacatttattgactgccacctttgtcctggcaaacttggcagatcctggttaatgctcctaattgactattgcctgtcaacaggttaacagagagtccctgagggaggccaactgtggatctgcaggctggctgcaagacaacagaaaccattttaagcttcagttctaacaagctgctaaggagtgaagtgggggaaaggagtggactgaacagcattggatggtttccacaccccataaaagcgtgtgcaagtacatttgtgtacctggttctcctttgctaatggttttaggcttaattctctaacatcaaaaggaagtccttactgcaaacagtgtcttcctactgaaagaaagctccactctaagccaagtcttctgaaagagttgcctctggccatggtacagaagctagaccaccagggactagcaaaccagggccaagactggtgccaccttgattttatactaatctttaacactggaaaaacttgagtacccctgaatatggtaagtccatctgtgctttttttttttttttgagacggagtctcactctgtcgcccaggctggagtgcagtggcgcaatcttaactcattgcaacctcgcctccccagttcaagcaattctcctgcctcagcctcccgagta

SEQ ID NO: 59531 - DNA, 1200 bp, Homo sapiens
atataacatttatttaatcaacccctaatttttagacatttgtattatttctaatgctgcattattcacagcgattcacaaaatgtaatcctcagacccacaaaggatccagagaccctttcagggggctcctgagatcacaactcttttcataataatggcaaggtattatttggcttttccactgtgttgacacttgccctgatgatgcaaaagcaaagcaggatgaaactgcgagtgcctctgccctgaccaaggctgcaccctcaagccatgagtctactccttaccactgggcactcacattttaaaaaggcgacttcacttaagaatgtctttgaagaagagtaaaaactattttcttgaatctcaaccattaaatacatatgtttttaatattctgagtgataaaattggaggtacaaataaagtactacttctggcataaacagaaatagcattgttgtcttgagaaaaagcatttatgctattattcttcgacctgtgagccaaactagctgctgctttcatgaaatgtaatttttacttaaaagaactaattattattcagaattggatatctggcagaaatttttccaaaaattaataaagcatgcccatcacttcaaggaaaacaactaacagcaattgtcaccaattataaaatgcaagctttcaactgaaaatcagaattttggaaaacttgtatgtatctaccgctttgactctgttggcttctcaatacacttaaaaggcttttctgatgagactggtgtgattttgatactatgtcaacatttgcaatacccaaatgactcacgcatgatgttacaaaatcttgcttaggttaaaaaaaaaaaaatcaatccattcaaagtacaagacagacctatggattttaatgttacaggggacaaaaagttcattcataggttttcagaatctcattgttctaacttttaaaaaactagcatttgttgatgagctttggtgtagtatcaaagaatatccacaattatctgaagtggccattaaaatacatctactttttgtgactagacatctgtgtgaggctgaattttcttcatattcttcaacaaaagcaacatattccaacagatttcatgcaaaagcaaatatgagaatatagctgtcttctgtgaagtcaaagctaaaagatttacactcttctcagtacag

SEQ ID NO: 59532 - DNA, 2806 bp, Homo sapiens
taaaatgaatgcatcatctttctgatgaaaaagaaaactacattttcaaaatcattggttgatccatttggttgcaacttatcaccaagattatcaccaaacatcttaattaaggttttatttactcttaaggaaatatagagcatttcaaacaaagcatcacttgtgactggcacaagcagttccagactgcgaagccctgccattaggtactgcatgacctcaagcaaatcacaggacctctgtgggccactgtttcttcatctataaaagtgaggcagttggacaatcttcagtcactttcagcactaaagttctataaatcactaattctaaatttaattctgatgggtcagttcaaacttacattcaatcttatggaaggaaaaacgtggagagggaaatacttaataaattgttctggtcttttcttggttctcttctttttacccccccttctcccttctccttgaaactccacttcagtctctatcacgtaagaaaatacataaacaatatctatactactttaactgtaccagcttcttaaatttaagaaaccaaattcctctacttctctttaataaataagatcttaattatgccgcttatttgtgtgcctcttgatttttctcttatggatcaccaccttaaaaaagttaaaaaaaaaaatagaaaagtcttcattagatttttcacacagaccagactagaagtaaatacagcttttgcttactcaaaggctgactaaaccagcaatatgcaaacaaagatgatagcaaatggctcagctgaattggtaaaatgtccgctgtgtctttcttgtaagaccgcaaaattgagatctgttaatatcaacaatccttacaaaagagtaagaaataataactgattgcctttgtctcttccctttaatctgacaggccttcaagcacttagtaagtgcatagcaaattctcaaagaactagctaaatatcattttggtcaacaagaaatgatttggcaagttttatatccaaaaactttattttttggaatcactgcatattccaattttatcttcataaatatgtttcagaaataaaatactactgcactcatctttacagagcacctagaactttaaggcacagtaggatgtatacttgccagccaaaatctcataactacaatgacaagtacttcaggaaaagactgagcaatcttttcatttacagaaggtttttaattcaaggcaggcaaattttaagaacagtaatacaaaaggaaggccaatactcatcactttttctttttacacaaaattgaaataactacgtttccttagaagacagctttacttctaaggttgttactcagaacaagttttcagtgtgaattataaaacttcatttttttctaatagtaaatgaatcattctagtctttcttcctctatttaatattcacttttacttgttatctaaataatctaatattcatttttacttattatctaaataacaattcatttaaatttccattgggtttccaaaatgaaacatttaatataatttcattaactttaaaaaacagagagggagaaaaaaataaataaataacagtcaatgagcaacacctatggctgagttgtcccaaaacttcacccttagctaaaatgccaaaacaaagccactgcccctggatatttaacatctatatcacacaggaataatacggtttacttaactgtaacttcaactaccccaaaaaatacaattaggttttttaaattaaaatttgaccttagtttgctttgtggtacttaaaaacaaataaacaaacaaaaaacctcttttattcttaaattacatagaaaaaaaatcacaaagacatacaaaatgctttagcaagaagatctaaaactttccagaatttcagtgctttgtttccccctagcaattaagttcaatcaggcatgtgactgaccacacacattttatcagagggttaaagaacacattcagccatgttcttcaacaggtaagaaccaccctctgtttatcagctcaagaaaaagccagaagcaaacatacaaaattgtaacaagttaccttcaagtattctttctctatcgtcttttgagcttgaaaataaaaagcaatccgacaagttttagctgttaaaatggctcctgtagattggggaagtggtgtctgtgcttcagcttatgagtcatacatgaaaccaagtgtttctaagggaggcacgcccatgttgctgtggacccaattattctgctaggtcaaacatgcaaatctgcaggtaaaaacggtataggaaagtggggatgaagaggcaaggagcaagatctaccttgattagaccattactaagctcatattaattgccataatttaaaactaacaataaaatagagtaagaacctacaagggagcaaaattaaaaactatatattgttttaaaatataaaaatctcaatttttaaaagttgctttactatatcaaataaaactgtgaaaggaaaaaagtatgaaaggggatggaagggagatagcaaactctgtggctcttaatgtaacaatggactggtgagtgtaatctggctactcattaaccctcatatgaaagagatatattgctatgtagtctggaaaggctagcaaactacaaagccagatgcagatctgtaagttcactaaacagataaaatccactagaaaattcaaagttcagtggaaaaataagtgtgaattaaactggtttacagaatttttaaaaacccacactccaatgttaggaattt

SEQ ID NO: 59533 - DNA, 1561 bp, Homo sapiens
ggtaaaaaagtactcatcatatcacaggaaaagtaacatcacagtctcctcctaactgacagaatctttctctaccaccaactgcctactttaaattcacccatcactctgctattagagaagtcttcctaaagaacaactctgagagtgaaatgattatcacttatggcccaaaaaacaaaaagaaataaaataactgatttcttagaggcaaaattaaaagccagactattatggcgttcaaggctttcacaatctgactttaatttccctaacttttccagccctatcttcctgactctccctcactccctagcccctgacagctgtacggaaatttcctgaattgctccattcctatttgtctcacttccttatcactgttccctgggcctgaaaagcacttaccttatttcctatcctatgcccgacctctgcctatgaacatccatccatcaagtctcaatttcaatgcctcctctacagaaggatctcctcaacagccccacttacaattactgtgagaactggttatcgcagaactgaaagagaccttagagacactttatccagtccagtggtttctaaactttttacttaagcagctgaatttttataaaggcttcaaggaaccttgacactccatacatttaagtcttcactgtaggacagcttaaaacacgaatccaatccagtctcattttaaaaatagagataagaggtctgtacaaagtgacttcccaatgtcaagttagtgactgatttgagggactctttgtcattcatttaacaaatatttactcagcacttactatgtgccaggtactgttctagccccttgctagacagcaaacaaaagagacatactgctgataaataaaccctattcggcctgtgcagaagacagatgaatctaggagaatcacggtggattatcataagcttaaccaagtggtgactccgattgcagctgctgtaccagatgtgagctcattctttaccctcaacagatctcctggtatctgttacatacagctatcaatctggcaaatgcctttttcccccatacctgtccatgaggcccaccagaagcagtttcctttcaaatggcaaggccaaaaataccttcactgtcctaactcagggatatatcaaccccctagacctatgttcacagggatcttgatcacctttcccctcaaggtaacatattagtccattatatcaatgacattatgcttattggacctaatgagcaacgagtagcaactactctaggcttaatgataacacatagcatgtcagaggttgggaaataaatctgactaaaattcaagggccttctacttcagtgtaatgtctaggggtctactggtgtgaggcatgtcatggtatctcttctagggtaaaggataaattgttgcatctggctcctcctactaccaagaaaaaggcacaacacttaactcctttatttagattttggaggcaacacattcctcatttgagtgttactccggcccaattaccaagtgaccagaaaagctgctagttttgaggg

SEQ ID NO: 59534 - DNA, 2614 bp, Homo sapiens
tggccaggctggtcttgaactcctgacctcaagtgatctgcccacctcagcctccccaagtgctgggattataggcgtgagacactgcgcctggccagaattacttttcaaagaacaaaatgttttagtatttaaatttgtgaaatgaactcaggagtgaacacttccattaatcctgaaatagtaaccattatagcataaaaatgtagaaagatattgtgtgataaagtctcttaagtgctggtgaaatgttaaactaaaaatttatgtaagttcattgtcatttacaattttaaaaaggatatcatagcaaaaccattaaagaagactagaaaacaaatatatctttaagtttattgactcttcattcaatacctaggtgaagagtaaatagatcaccaagtattttgaaagttaccttccttggccaggcacagtcgctcacgcctgtaatcccagcactttagaaagccaaggcgggaagatcacctgaacccagcatttagaggttgcagtgagccatgatcatgacacagcactccagcctgggagacagagagactccctgtctcaataaataaataaatgagtaaatacttaaaaataaatttaagaaagtaagctacttttcttaaactgtatctaaataatactaacctaatctaaatgatctacattatatggcaatttaccttgtaaacctacataaacgtgcactttcatcatagtctacttcacttacaattacacagcactgtttgtagaatgtgagacatatgtgttagcaaaaaataattttgaaaagttacccacaactccatatatttactttgaaaaagttaaataaaaccgaacacttaaagtttattgcatttgtcacactacatttttcagaactgactcagagaaatatttaaataattaaaatcaccaggcactgtggctcacgcctgtaatctcagcactttgggaggctgaggcaggaggatcacttgaggtcaagagttccagaccagcctggccaatacagtgaaattccatctctactaaaaatacaaaaattagccgggtatggtggtgcacgcctggaatcccagctactcatgaggctgaggcatgagaattgcttgaacccgggaggcagagcttgtagtgagccgagatcatgctactgcactccagcctgggtgacagactgagactccgtctcaaaaaaaaaaaaaattaagatcattaacattatatttgaccattagtacattaccaaaacgtaaggtccttatggtaaagtaccaggtctctatggtgaagtatcagtggcaagggggtcaatcaatgattcatccattctcctcagtgtggatatcaccttcttaaataaggcacaattgctgaccccagatggctgcttcaacccacttctgctttactggtgacacaaatttcaagccctaaatggctaccccaccccttctgacacctctgggaattcaagtgtgtaagatatttataacattattggctgtaaacagctcatctcttaggaaagttttatttggtcgtgagtccaaaactgaaacatttcctgagttgcagtgagcaaataagtatttcacaatcaccattttattttgattcaagctagtttatgaaactaccaaactagtataatttgtgagcagagtgtccttctaaataagtagcgtaatataaaccaaactcatttgtataaatacaattaaggcaatccatccaaaacgtagagaacttttaacaactacaaccaaatccacaaaaaaacgaggcaagaaggccactttcacttagccaaaaaagggtgtggggggatgtttgatatatttctcaaaaaatataactctcaaggataataccatatgtcttataaaatgggatgaaaaaaatcagtacaacaaaagggataaatgaccatttcacaacaggcctacatgccacaatattttaaaaaaccaacccttccatatgaaatttctagagcaaagaagtaccatctaaaaaccactcttgaatcattgcagctttttaaaactactggttccattttagattccctttatttaaaagcctcagaaaaaattcagagaaaaaattaatttcaagctttctatttaatgagcatcactgcatgcaccaacgtggaagaaccaaagccagttctaaaacagtaaatcgcaaatgaatgaaactttaattcttgatggttttagtcctgatattttgtccacagggtggcagtctcacagtattaacttgttcatggagtcaatgcacaatttcagagttcgaaagccacagacacacgcaggtatgcaataaatttactagctggccaaccctaagagtaaaaactgccagtccgctgcaataaaatctgtgcttcataacttctctatttcttttagaaatatttactttctgaagtcgtagattttttccttcagtgttatctgttgtatctgatcctttctattctgctgccaccaccctatttagggagagagtagaagcaaggagagatgttaggagattattattggactgcgggaagtccttgacctttgtcaaggcctaatgg

SEQ ID NO: 59535 - DNA, 4127 bp, Homo sapiens
cagagcgagactccgtctcaacaaaaaaaagaagaaaaagtcaaaagttaagccctctctggggacaattaaggcagagttatccgagttatctttccttctttccaaattttcaactactgtaattctttagtaactgcttcttaataatgacacactattacttatttaaatgaaaattccactttcattatctattcaggaatcgctcaacaattcttgtaactctatttaaaatttgtgagtgatacgtgttatcaaaaatgtatggctctaaagccagagaacagagaaggtgaaaagtctcatcacacagctaatcacaaagaccaaaatattattccattcagtattctatccactagctaacataaagaatacaaacatcagtaacttcaaaagcatgtggtggtgcttggtgtgtagcaaacacacaaatatttgaattaatgaagacgatttaaaatacttaggctttttctttctttttaacaaggtaagcctaattaatccttaatcacgcagatcacattaacaaatttactgtgcagttaaagctacaaaatagtctgggaacacacatactaacaaccaaaacatctgctttcagtaatggcactgaccagaaacccatctacaagagtcactttttccttcttcgtttgttcccagaggcccaataaacattatagccgaccctattttctaatttcagcttgcatttaagataacgcttttgtttcatttacagctcacatgctgctgacacagctgtcccttctttgtaataaacacagggcttctatatttaaaaatacagtgaaactttgttttaacgtcccctccccagtctccagccaattttctctttcccaagccccacctccaccccaggatgttttgccgttgttttaatcaatttttttctttaaatcaaccgcgctcaaaatgttagaccctttggaaagtcgatatacttatttaaagccatctcatcagagtggtatttttctcctccatagctcgtggtgtgtatttttaaagggaaagaaaaaagattctcgttcccaaaggccttttttcgagggtactttccgtgactgcgaccagcgccccttaagtcaagttgggaagacctcgcaggccggcctcgcgcttgctcaggcgccgcgggtggagacgcgagcgcacacgcggcggaaaggggcgccgggcggctgcgcggccgggaaagcgcgtccccccgggagggcgcggaaggcacactgtgttccgtggggcctcgtaaataccctgcggccagagaaccactagagctactggtccgggcgcgggctctggggcgcccagggcaggggggtcagcccgtcctgcataggaagagtcgcaagagcggctgaagagggtgtgggccggacgggggcgctgggaggagataacgcaaggccggagttaatcatcacctcccgggcgtctggaaaactacgggccggaggggcgggggagcagcccaggggaaagtgaaactccctcagggcccaccagccccgtgagccggaggcgggagggagaaggatcggaagcgcattcgcttctccagcaggcacggcgtggcactcgaggctccaaaagccgcagcccagctcctggcgccactaactacagtaatgcttattttctacaaactcacccagacggggacaagaaaggagccagaacacaagatttaaaaagtcagccctccaaaccgatagttgcaaaaaaaaagaaaaataaggaagcgttcccataccgggagtcgaacccgggccacctgggtgaaaaccaggaatcctaaccgctagaccatatgggaagtgctatgagaaactgccgtgacccacctgacaagcataagtgcctctgcctccttcgccgcacctctcgccaccgccgcctctgcgctactgaagctgctgctgccgccgccgccgccgccgccgccgccgccgctgctgctgcccacacgctcccgagctagggaacaagccccatccgagcgcgtgggcgtcgtaggggagaggaggggcggggccgctccgctgcaacagcaaagtttgaggcgaagcctagcgactcgcagcgccggtcccgcagtttcacctcttttttttttaactccgccagaggaccccgacccacaggtcccggttgctccgctggtcaaagtgcgtgcggagtagttggcaaagttgagagcggagacgtctctgggaacagctgtttgcgttccgggcggaggcggcgcgctgagctccttggccttgagccagcgagcctagaaggaggatggaggttttgggccccaggggaggacacagagacggcgggatggcgcagggacttgaggcttgagatcccgtccttcagctcaggtcccgtcgcgcttttaccccttcccggtgacctcaacccctttataccgaccccacctctttggagccgggagtaccgcccctgtagggggaggggagaggaggcgatttcgaacgcggattggatcgtctgggcacccgtagttgggaacagcggaacgctggtcccggggactgagtaaggtgtctggatcggagggaggttcgggtgggcatcgggcggctggaagagctcgactcgtcccgctgggaaagcgcgagtctgagtggaaccctggacgacttgcagagcggctggcgcagtcatgtgagttgggtctcaggccctgaacaacgaggtgttgtttctctgggccgccctttctcgcccgggtcttcccctcctctcctcccgcccttcggccgggggcgtgacagacgcgttcttaactcgctcgggaccggccccagacctgcagggccggttctcagggcggggtagaaatgttaccccgctgaacgccctggggtatggggcacgggctctagggggaggccggcggccggttcagggggctggttggacggccgcgggtgaagcgacgcagtgctctctctacgacgctgtcgggggtcgcatgcaccccttgggtttccgaagcccctgaaccctagggtattgtgaaactagggctgggctgcggcctcccccgcccactggaagcggccagccctggatagcgtaatggttttttttttttttttttttttttttttgtcggccgtctacgaagtcccatggcttttccagttctctcttgccttgaggctcaagaacagtttgttttaactgagagtctgggaggaactacagttttccccagagtagtcttgtacgttgttctcttggtgggaataacttgatttaaggcaaactttatgagtttcttcaggtttccattacagcaacctcccccaaagccagaaaggataaatgttcttctaagatgttccttagtttttcataacgatgacgataacaagtgaggaatttttgaaagccattttattgaagggagttttgtaatgaatcagatacagactttttctactccgctggcaacagaatttcaattgactgtgctccaaccagataaataataaaacgactatacataacaagacaagattcagtagcaggggcatatatttcaaactttaaaaactgtaaagcatgcagaatttaaccttttttaagttttacatgagcttagccttgttgtctctctttttcagggcggactactggaagtcacagccaaagaaattctgtgattactgcaagtgctggatagcagacaataggcctgtatgataattccgctgttagagattctaataataattgtgttgaatgaagtgctcctttttgatgtaaactcagtttacaaagcacttttatgtacattgctcttgcattttcaaaacatcagaagatttctgtcttctcagtcccctatgaaagctgtgagccttcttccttttcatcaacctgactttgattatatattaaattatttctctgtggccttttgggaaatgggcaatgagttggtcatatcattcatgttatgaagcacctatattataatggtggtgttcataatactgtcatacccaaagaattgtggaaagcccttaaaaaataaaagcaacatgtttagtttttcttgt

SEQ ID NO: 59536 - DNA, 1065 bp, Homo sapiens
taaatttaaggaataaagcaataaaatcattgttctctatgtccctccttgtgacaaatagagcaataaaattctaaaggcttttgatgttgaaagttgtttaagatttttttccccagtcttttggcttcatgtcacgtttgagtcctcattacaatcatagtcactagattagtcatcaagggtaccttgtatttttctccattaataaggtcatcatggtttattttaagaaccaaaggaaacctagtcagaggacataataataaacaatgtagttccctagcatcatttgattaaaagggccaatttgcattaaattaatgttttcatcttttctgccattcattttaattttaattttctcatgtttatgagaaaattatgtttactatgaattttatgatgtttatgtagttttcttttgttattttctcttttcattttcaagagtgttgaatttcatgaaagaggaaagaatcataaggaaaatgtggcaaaaaggatcagtgaggtaatttagattgtttatttgctaatttttctatgcaaatgtcagtcctttatctcactttcactgttatgtatgtcttacatagattaaacagaaaagcctggataaggcaaaggaagaagaaaaggcatcaaaggagtttgctgcaatggaggcagctgccctgaaagcataccaagaggatttgaaaagacttggcttagagtcaggtaaaaaaaaaaaaaaaaaaaaagcagccagcatgttttaaaagtaacatcagaggtcaagctaagtaagctttgattgcttccataaagaggttataaactcagtgtactctcagtgcttttattatgcatcatagccctgtttagactatggaagtttgcttatgcccttttgttgtacttttaatgttttatcttttaacaccttcattcatagcagccatactacttttgtggtcacctaatcctagttctatcctaggtaaatggttcatttcagagacactttgagttttttaggtattctagttatttggctaagagacactattcatttaaaaa

SEQ ID NO: 59537 - DNA, 877 bp, Homo sapiens
gaaggacttgagctgtgccagcagggctgcagaatgggccgtgtcctttaattcctctggacccgtgaaaaaggccgaaactgtgggtttgtgaatcttcttgggccgcttcccaccacggggactggctaggcggcgagagcgcggggcgtcttcccgggactgcatggtggagatggcgacgggcgctgatggcgagaaacgctgcaggacccggctctggctcctcctcaaccttccctcgctgacgctaagatagcagcgtctccgaagagacagcagcacgagcccatttactgaattcaaccctaccccgcagaaccgcctcccgttatcgtttagacagtggctgactcaccctctctcactcccgcgtcctttctccgcgtctgctcgccttcacaggacccgctggcttggagccgcagaagccgctactgcagcgtgggcgacaatgctaggcgcccaggagaactaccgctcccaggttgcctttcgcgccccgagggctgctgggactctcggactcccgggccgagaccgagggaaagaatccgctttgcatgtcgggagtagtagtttgtgtaatatcgcgatccttctctggtgttccttgttttagctgacgacactcgagagcgccaattttcctagattcgattttgtggtttggaactgtggttttggaatccagagtagtcgcctcgttctagtatgtattgtttgacttgtctctttgaactgtttcttcttttgtaagacgtgaacagtagtatttcataggattgtgtgaagattacatgagttggttataggacgctgttaataaatatttgttggtttgtagaataattactcagttcttagaattataaag

SEQ ID NO: 59538 - DNA, 1041 bp, Homo sapiens
acattggcctcactgagagacacacgacccgtgtagcagtagtcgaccaacacctcgaaggactcggcgtccacatcgtgcatggtcacgctggcctgctggctctcgtacatgccacctgtgaacatgctcttgaagtagggacacgcagctgctagcacgttgcgattgcaggaaaagaggcgacccgtgccaggcccgctgccaggcgtcaccacctcgatggtcacatcacacagcagccgcgcgtcgtagaaggacttgagctgtgccagcagggctgcagaatgggccgtgtcctttaactcctctggacccgtgaaaaaggccgaaaccgagggcttggaaatcctcttgggccgcctcccaccacggggactggcgaggcggcgagagcgcgggacgtcttcccgggactgcatggtggagatggcgacgggcgctgacggcgagaaaggctgcaggaccaggctctggctcctcctcaaccttccctcgctgacgctaagacaagccgcgtcctggaacagactgcggcacgggccgcacttctgaattcagccctatcccgcggtgaggcctccctttattgcatagacagtggctgactcaccctctctcactcccgcgccctttctccgcctccgctcgccctcacaggacccgctggcttgcagccgcggaagcccccactgccgcgctggcgatcccgctaggcgcccgggagaactactgctcccaggttgcctttcgcgccccgaggcctgctggggctctcggacggccgggcggggacagagggaaagaaaccgctttgcatgttgggagtagtagtttgtgtaatatcgcgagctgtcctttagttgactgctctaacagtagaaattaattctcctggatttgatggtgaagagactgttgcccaggctggtcttgaactcctgagggctcaaattatcctcctgcctcggcctctcaatgtgctgggattacaggcgtgagccaccgccccctgccagtatttcatagggttttgtgtgg

SEQ ID NO: 59539 - DNA, 926 bp, Homo sapiens
tatgatataactttaaaattaaggtttatatcactttgagcaaaatatgaaattgcttttaaaatcagtgtgactaggccaggagcagtggctcatgcctgtaatcccagcatttcgcaaggctgacgcgggcagatcacctgaggtcaggagattgagaccagcctggccaacatggtgaaaccccgtctctactaaaaatacaaaaattagccaggcgtggtggtgtgtgcctgtagtcccagctactcaggaggctgaggctggagaattgcttgaacccgggaggcagaggttgcagtgagccgagattgcgccgctgcactccagcctgggcaacagagcaagactctgtctcaaaaaaaaaaaaaaaaatgtacctggtactcaaattattatagtattgccaaggtaatcatctttggaattgatgtaaaaggattatccctctactgggagtcaaacacattagattcaactggattaaccagagtgcaggagatacaaaggtcaaagatgaatgagtcatagttcctaactttcagaggctaacagtctaagtagaacagctagacaaatacataagcatcacaaaacaatataataaattaaaaaatgaaggagaagaaaggaaggattgtaaggaaccatgaattttgaagaaaggtggcatcagggaaagattcaggaagccagaaagttttgaatttggttttacaaagagaatagtattttcccgaatagaaatgagctgggcatttccatcaaaagaaggagtattagaggctgggtgtggtggctcacgcctctaatctcagcactttgggaggccaagacaggcagatcacttgaggtcgggaattcaagaacagcctgaccaacatggggaaaccccgtttctactaaaaatacaaaattagctgggc

SEQ ID NO: 59540 - DNA, 1085 bp, Homo sapiens
agtttccagagttctactgatagattttaggatactgcatcacattattaaaagaactgttgaagaaagcaccaatggccagctgtcacaaacgttacactccaccacccccgtatttcaagcacgttagagaaagtgtatccatttgctaacagacagaataaaaggatgacaaatatatgtttgtacgaatacttattgctaaaatttccattttaggaacagtagtagaatgcataattttcaaggtcatgaatctcaacattaaggaaaacaaaacaaaacaagatgtttactctccaaggttaactacacctgagaacagcacgacttctccattacccatcacagtaacagtattactctgatgctttggggaaagttctgagtgtaggcaggtcagaagcgacagcccgcggggcagcagcacgggcaaaccatgctgtgtaactcagtatatggagtgattccataaagaggcaatacaggaggcggcggggaagatcaggaaagaactgtgagtacctaagaaaaagaagaatacacgttagctctctttactgaggtcggaaccttccgagacccgccacatttcagcccgacaaacccgagatcacgttcacttcctggttcacttcttccgggttaacgcacgctcccggcccctcctccgccactaccgctctccggaggagttgtcctcgagcatgcctaacaatggactaaaatgacaaaaatgagctaaatgagaaaaatgacaaaacgagaatgaaattgtcatcagacaaccgcccccgcgccgtccttatccagagcgtgagcccagagcggggatggagatggtgggagggagggagggagggaggggccaaggtgggactaaactacaactcccagagcgcccaccaaagaatcctgggagttgtagtttaccttgcggcagcctccaaccccctccactcactatccagccaaatgtggagtttttggttttcaccgttaactgcaaacctagaagagagattctttacgattctgattaagagatcaagatttagaacacattgcatgtgaaattacaataa

SEQ ID NO: 59541 - DNA, 2091 bp, Homo sapiens
agttcatctttcatcaaaagtctactttgcatcggacacttaaattcctaaatggggagaaatgcaaaaaactctgactcttcagagtcataactaacattatcttgcgccacaagcttatcaagagtgcaatacaagtcagtgtcttctcttttctacttaaaagaaaattctcgtttttatttattactttattgcaaggagaagcagacaataagtaggagtcttatgaggcgttctgatgcataggagcaatggtgaatgagggtggtgactcaccaccccatgggactccaaggttttggtgacagctcgcctgagccccagggggtgccgagattgcggcgaggagagccgcagcacaaggcaaatccacgcggttggtccccgctacgcccccgtagtcacccgcagcccctcgccaaagggcgctccgcgcatgcgcacaggatccggctcgggaggcggaccctggctgccatcttgcagtgcgcgggaaccgccgccgccgccgctggccaaaaagcggagcccaggggaagcgtgtcctgctcagaccgccttccttctccattgccacccgtgccgaacagccaggctgcccaattgcaactgtagaccaatgaactaatccatcgcccgcagcccgactctcagcagcggttcgtcccggtgcccacccccgcgaagcggagcgcccgggcacctagcctccctgccggccacctagcctccctgccggccacgatgccgaacgtgctgctgccgcccaaggagagcaacctcttcaaacgcatcttggtgagtggccgtaggccgcgctgccgccccccggtccccgggtcctcgggccttaagggcaagcggtctggcggcggccggcgcgggccaggcttggcctccgctgcccaccgctctttgtttacctcggaggtcgcgggaccccactttcccgctccggccggcccacgggggctgccgagccgctcctccgtgcgcttcctttccgcggtcttctgcggctcgcctcacccccgccgcgctctttccagaaacttcacgccgctctccgcagtgcccgggcacagccgcctcggccggtagtggctgccgtgctctctgccgcgccgggctcgcagcagcccctcagggatcctcccccggtggtttattttgccagtctctcctcggctaggtgttttgcgttctgcattctctgctttgcgtttagttagattgcacagcacacccgcatacctattaaagcgggatcgatgcgatggtggaatttttcctggttacgaggaaataaaaccggcaactttaggaagccaggcctggcaccacctccctttgggaaaaagtttgcctgtttgtaatgtaccttatttacctctttggaagtgaatatttgacttgaagtgcgtttctgagttgtcaccaacttcaaaacagctgtttgctttttagtcgcacaggccttgcttgagtaattaaagccgcgtggactggctggttttgcatttgaggggagcatttttactttatcgcggagcagaagcctgaataatggccccgtagtgatgaccgctgcggagccgggtgggcagttttctgtgggctgtgtgccagcgtccctggtagctttccaggttctgttcttccaaggagaagaggcagcattcctttgctttcctcagtatcctctggctaccctaggttttaaactaatattgttagtaggtaactgtcttttctagtttatcttttcacctgaaaaaaagcttttatttgctaaacatgcatttaggtttaaaggtgaatttattgaaagctgggttggctatatggctgttagttgttgcttaactttactataaataaaatactaattttagagtaattttaagtatgaacagcggcagataattcatagtagctgttctgtttcaagacgatagaaacttcacacttagtcttcagattaggatacatagtagatgggataaaaattttaaatattatgtggtgcttagttttgaaccaataataagatacaaatgtgagaacattaaaaatacgaataattaa

SEQ ID NO: 59542 - DNA, 728 bp, Homo sapiens
aatgatttccaatgatgtaacacattccatataagaaaaaaaaattattcttagtatagtttgctatcaatagagtgaaaaggtaccaaataaaaactgaaactaaaagcagctgagctcagctgttagaaattgctcaggataggaaatttctggcttcggcataggcttgactaaagtcatccatgggttcagtggtaggattggcacagatgtggagagagcttgcataatccttccatggaagcacactccagggaggccccgactgatttgacaacggtcatggcaggaactgtttgtagtcaagaggggaaagttctcctgagaaagtgccaggcaggttgctttcattatgggctggtgaagtaatctgctaaacaggatcttacacatgagggaataagatcagttccctgacacggaactaggtttcttatattgggctgaggtaagagggctatgaatgtgtttgacttttccctcccttttaactgatggctagagttctttctaattagatgatagtgaatgaaactatagaaatctttgatcatatggtctgtcacagggtcaatgtaactggtcaaagagcagtcaacaaatacagtttttagctggtctttagtaaaacaagatactggctgattaaaaccttcagaaatactttagcaaccatccatctatcatttgattgtgtgactgatatatctatctaccatttaaat

SEQ ID NO: 59543 - DNA, 2856 bp, Homo sapiens
gggtagtgacctgaaaattattctccacacaggccacaggtaatgtcagattcctaaaacaaagttatgtgatgggggtctggcaaagaaattaaagaaaagattttaaaaacgacttttgtgtttactaagctgcacatcttctcttccttccacattactgaattagtgcttttcttttcttggcagtttgaaagcataaaagtgacatcaaattgttctagaaacaactgtcaattaagattacaagattaagtttgattttagacccacgactgccaatttgcagattttaagaaaaagtttgttagttttgctgacgataaaaaagaagaaggctgcgtgcaggggctcatgcctgtaatcccagtgctttgggaggccaaggtgggagaactgcttgaggccaagggttcaataccagcctgggcaacacagcaagaactcatctctacaaaaaaatacacaaatcagctagggtggtgctatgtgcctatattcccagctactcagctgggtaagctgaaagggtcacttgagcccaatagtttgaggctgtagtgagctatgattgtgccactgcactaaagcctgggcaacaagcaagaccctgtctctagaaaaaaaaaaaaaaaggaagaagaaaaattccagattattctgttattaaatatttgctgttattaaatataaaaaataatgagcagagttagtaatttcaagaaaacacggtgggtattgagagtgtaatggtttgaggcaaattcaacatatttcttaaaaacttgttgagtctgcccaaattaagaacacttatacatatgcttccatgactactcacaatttcagatgtatccaaacacatttgttgaccacaatgattcagtaaagaaagcagttgttgactcataccaatgacacagaaataagaactccccaaatcaccagatcctctctaaataaatatttaaaaggagtgactctcccttccccctaccagtcactgcacccccagctctcagtggcgactcagcaattctggttacccaggaatacaggagatcacagagctcaccaagagactcaatatttcatcctgtcatcattttgttttgctattacattgcaaatattttaaatttatggctgtctaaaactttacatactacaattatagttacttaagggagacgttcttattttctatattttttttcagttatatgatggacactgatctttaaagtaagagaacagtagaaaatcactaaggttgttttattgttttcacttgaaggtttctctaggcttaatagacacaccaggtgtcttcagtttcccctccagggcacctgctctgtgtcctgggagttgatctgtgtggacaatccgtgttggagctcagaaatcgataccctctaaatatggtgcttggacatgctgaactgaagaagcagcatcaaggtctcactgaccttcctccctctccccacaaagcactggataatttgttctctgaagtttcttcaactgtctaaagttcagagctccaaagaagaaaaccattactctgggcccttccctgagttttcatcaactgaactcatatcacaggaagaaaggctgaagtctgtcaacacacctggacagacttcggtcacaaaccattgctttgtgggcccaacagactctgtcccaggccactgtgtgctcttcaagtccactgaattgccctaaaaccatttactacccccgtaaaatcatctacacttctccatctccttttcccttaagaagaagggtacataagcatctgtacttcactgtgtggagggggactcacccttggtttcaccccggtgcacattaatacatttgtatgcctcttctcctattaatgtgccttttgtgaggtgattttcagagaaccttcagagggcgaaggggaagttttcccttggcccctacaatcacatcagctggcctcttggctgctggctcccagtgggttctgctcatgggaggcactggtggaggtcagggggtgagggtggagtatttattcccttggccccctctctgctgttgcccatgggttggctccccttctgctgaaggccaccactccatcaaccaccttctccaggttccaggaactgctgtctcattctgcccttttaggcctcagagtgagttagatccctgctgttgctatccctgggttactgcactgtttatttttgattttcctaaaccccacccttatttttgtaaatagtctttgtactgactgtttcttaaattacctaatttgagcatgccttatgtttcttgctgggaccttgagttgaataataaatagtataatatttatggagtttttcttcttcttcttctttttttttttttttaacataatgctttccttggttaccatattcaggatttgtgatattttgacacaactcacgaaagcaagtttctgtaaagagggctagactatgcagagctgaggctagcagttcaccatgacttacttgtggctccagctcaccccgacgtttgtagatggctttttctccagtcagcccatcaatgatcttggcatcatctaattctccagtagcttgatgtcttagccattgtctttctttacctttagcctacaaaagacacacatacacacacaaagccttaattagttatgcagagtctctgacatactttgtgcatgaataacaggaaacacacctgggatcttttcagtaagtgatggttctgcatgaacacagtcatataaatgaagtggtttctgctctgctgacaaataaatgccctttgtccgttttaattctt

SEQ ID NO: 59544 - DNA, 485 bp, Homo sapiens
tgtgtattttttatcaccttgagctaaaacagaaacctcaaatactgaatgagaataaatgttctgtattcctccctgtcaggttgagcactgggaaaaatccattcaccatgggggagagcgccagaggcttattacaattatgtaatgctaggcctagactaccatggggcagactgacattcctgccctatcaccccactggataatacccacttaggtttcaagatctagctcaaagtccacatcctttgaagtcttgcttgagcccttgcataaagctggccattcccttttcatgtgccctatacagacatctaccatgaaactcgcatactttattgctttaatagataggcctgttgccctctgttatggtgttttcaaatttttctttccatagtaggaaatgttttacattgagatcttgtatacacaaatgcatgtatgtatataggataactgaaccaaaaatttaatgaaaa

SEQ ID NO: 59545 - DNA, 902 bp, Homo sapiens
agcttatctaattttgtgtcattttatgaatgccactcactcactcacaggaatatagttctttaggtggatgggaggagtacatatgtcaagaagttttcaaagccattttaggacacctcttacatcaattgacaatgattcataaaagatgcaagtcaggaattctaggacagtccaacccaggacagaaagaaactggaacatactcagggaggcttatcatttgaggaattttgtttcctgggacagccatgtggtagacagccagtagccattcagaaagttgataagctgctgtttgctttcatgtgcgtgttgaaaagcatttggaatgtacttcctttgagagctggtttcatctagaaaaagctcaagtaagtaattccaattactgacataaacactactgaattcacttaaagggatcaaaaatttccccaaaaaagaaaatattatggccccttataacttttgatgcaacccgatgctgagccccttgatgtatttctcacagctgacacaatctgctttcttttaggtaagtgtgctataatcgtaagaatcattatccccttacatgtgaattaaaatggaaaaaacatggatcttgtaaattacaactcataaaaatgttccagagtaaagccagcacagggaagggacatgactcactgaagccctgtaattctgggcaaggcccatatattttaggctcctccttgagttcatgacttttaaaagccatcaataaaatgatataaatagccagattataatcctggaagaaaagtgagcttttggaggtatgactggacaacacagctggagactagtgtggcaaagcagacatttctcatgtgagcctacctcacgttcatttcctcttttttccttttaaa

SEQ ID NO: 59546 - DNA, 901 bp, Homo sapiens
cccatggacacaaagaagggaacgatagacgatggagcctacttgagagtcggcggtgggaggagggtgaggatcaaaaaactacctattgggtactatgctcactgcctgggtgagaaaataatgagaaaataatatgtacaccaaaccccagtgacatgcaatttacccatgtaactcacctgcacatgtactcctggaacctaaaataaaagttggagggggaaaaaaaagaacaaagtgtttccagaaacatcagcatagcaaatgggtgggccacgcttggaagcaaagtgctctttatgtgggtcacatcactactctacgatttcaagagagccctatgtagccaagtatattcaaggaaatgaaacaactccctcccccgctcctattcttcttagatacaaaagacagataattatctagagtatttctcaatatgaacaaaatggaaaagtgacctttgagtctgtgacagtctattcacgtcagtgtttttagcaggagcaaagcaatgtccaggcttagggaatgcccacaggagccaacttctgctctccctcacattacatagaccataaataaaaagaaacagtttaacaggcagccagacccaaatagctcataggcacctcctgggagtgataaaattctcctgctggtagacttacataaaccaagatgcaatgaaatttttaaggatattctccttgcttaataaacctgaatgttttaagcctcaaagatggctagactaagactaagagaggaaataaatcagtctagcaagaaaaagcaatcattcagagtgttggtagattagctgaaacatacaagagatcaaattcagtgatttaaaaatcatgtacttgctagttaaaatgcccatttctagctt

SEQ ID NO: 59547 - DNA, 501 bp, Homo sapiens
gattttcatcaaggatattttctgaagtttgggttgtatgagaattctacactctgtccaattcttataataacactcatgatctgctgttcattcatgacctcactcaggaagttcagttttgctacaaatattacaaataccaaactgatgtttcctaactcactcagtgttctgcccagattgcggcaggcccctttttatggctctggcagctgatattaggacttgattacttctgaactcctgaaaacatgtttgctgtcagttgcaaaagaggtggcatgagagcgactcaaaacatttccagtatcatgactgttccatgaaagacttgagagaaatggataccttaaaaaaacgagaataaatgtgctgaagtgccaaggaaaaggcagttctctctctactagctccaatttaggatttgcacttcaatctatacttgctcacttgtgaaattaaaaatctttttttttaaatcacataatatcagatgtg

SEQ ID NO: 59548 - DNA, 3867 bp, Homo sapiens
aagaatttcttttggagaaaataaagtcacaaagcacatgaagaattaataaaaaccttgaaaaatatagaaaacaataaaatgtgaagtgtttgttcattttttccataatatttattgaggagcttatatttaatatataaagaatacaacaatgaattaatcatgacccttgccttctgtcatataatttagttagagaaataaaaagaaatgtaaaaaaatgaatgattcatctgcaaatctagcatctcagtgtgggtttaattttattttacaagctaattttgtggaagtgttcaagaattaaaatagtatttgcaccatataactcacttcacaccatatactctgaattttatttgtattaaaaaattttactaagcatgttaaccaagcttaaatttctttcataaacatcacccttagaatgtatcattctgtataagatataattctccattaagaatgtgtgttagaaatattcttttaaaaattaacatataagaagtgtcattcaccactacttgacagttttgaaaatggtaatgatatcttagagttttccttaagaaaaaaataaaattaagttaaaaatttataatctctattctagattaaatattttttgaatgagtactttttgatggaaaaaatatttcttgtataataaatatgtacaacgttaaaatgaattcttagcacttaagcaatttgggataatattagcctttgtaagcaaaggaagtcctaaaaatgtttcatgcccaaaaatgagtaagcataagaataagcagttgattaaacaaatatgatcaagcagaaaaagaagttagtatcgtcttccattttcctacctttttagggtctaatacttacatattcataacatggcataagtgaactgaaaaactgtatctttctaagtgacagaaaacatgtatttccagccactgctgtatttagaattagtttataagcaattggcaacatgaaggagttctgttgctccatccttttagatgttaatggtttccttctgtaaatgactaatgatagattctgtctgggtttaaaaatagaattttgcgtcacacatgagtacatgtaactgtggctttggcactcctttaaggggggcagggaggagacgcgagtgagcaattttattatgtttgtatttaactgggagaaaagtaacctctggatgacctcaatgtccctaaatctgaaattctaaactttgtacagatgtaataaataatctcatggggagtgggggaaggggagggtctttatttttaggcatggcaaagtttccctttccttacttaagattttattttagcaaggaatttttgaacaacttcttaaactaaccagggacatgcatctgagcaaagctttatgttaaaaaggcaaggaatagccgaattcatggaagtacttctctataatattttgcttcattttcagttagggtagaatgaagaagaaggaattgatggcagtctacttatttttcattccactagaattatttatcagttgttaaatttcacagctgtgtgctgttcacatggaattttacaggtctgacatcttgacagaggtatattgtaaaataagatactctctccgggaaaagagaaggcagtttagaggacaggtagagaggaagtatacagataaggtgtgcaggtctgctcagggttccgaagcagtttcctggaaaacttgaaactgtggccaaaggggtaagtaaggcagtatatgaggaggcaagatgctggctatggaagtcaagcacagcttcacaatgaaaatcagattttctttcatgaaagtaattgaaattaaataaggtattaatcagcaatgttaccaaataattggatcttttgaggaaataaaactcttgctgagaacctacaaatctggcacttttattaaagaatttgtgtatgtaaatttgacagttaatttgacagctgaaaatgtggcaggactgttaaaataaatattccaaatgtagtctcatccaattttgactgatttactaaattacaaaccaccaagatatcatgtaccttttatgacacattgttttggttatagagttaaattcaatggcatcaatactttgttgaaaatctttaaagtaaaaccctcattccaattttcaggagataaagttttataaacaatatctggatgtttataaattctgctcctaggagaaagtaaaagtaaaaataaaaaagtgaaaacaaaatcagaaaaatacttataactcagaatttgtgataatttctggtggcaaggactaaagttaaagttgacttatttcctcaatgaactactgatatattatgcaatacttttctcttgattagtgaaagtattatttcttggtagcactttgctctttaaatattcataagtaacaacactgcatttaaaaaatattttcctattatgagtactttttaattttcaaactaatctttttccccaaatctgtagtgagtgagagagtaggtgatgtttaattctggtagggtcaatccaatatgctatgaatctcagttctgctatgtacttgccagacaagttacttgaagtctgagcctcagtcctctcatatgtaaatgtggctgagagctaccctcactgggcagctggaagaataacatgagtaatgtaagcaatctcttacatgttatgtcatcagcatttaacaattgatccttatctttgagacattcatcacttgcattcctggataacacactcctcagcttatctatctactctattggtcactcactttcaaactcattttcaaatcattgattcttcctcatctccctgatttcttaatattttactgccccaaggcttagtgtttgaacttctgttctctatttacattcactcccttggtgagttctttcagtctcatggctttaaagaacatttgttaatgaatcccaagcttgtatttcctggtaggagctctccattgaactccagtcttatcatctacgtggatatttaatagacatctcaaactgaatctaatatcatctgagcttccctcccaaactgattgcttccccatcttagtcactggcaacttcaagttgctcagtccctaaattttacggttgtcctttactttctctctcaccccaaatattggaattgtttggaaatcctgttggttctaccttcaaaatatatctagaatctgtcattgcttatgagccccatcctcctccaaaccaccattatttcttaactagtttccctcattgtgccttagcacctacagactattcacacagagcacccagagaaatcctttaatcatgctagctccctgctcaaaacctcctaatgtcttccccttttactcatagtcaggacccagaaacttcaacggcctacaagactctacaccagtggcccccaacctttttggcaccagggaccagttttgtggaagacaattttcccactgactggggaggtggggtgggggctgtgtgggggtgtgagatggtttcaggatgaaattattctatctaagatcatcaggcattagattcttacaaggagcgcacaacctagatcccttgcatgcgcagttcacaatagggttcacactcctatgaaaatgtaatgctgtggctgatctgacaggaggtggagctcaggcagcaatgcttacttgcccaccacttacctcctgccgtgcggcccagttcctaacaggccaggagccaatactggtctgcggcctgggagttggggacccctgctctgcacaacctgcttctcaccacccccttcactttgccc

SEQ ID NO: 59549 - DNA, 2597 bp, Homo sapiens
cgcatagtaattcaacaaaaggactgagactgttaaagaaacaaatatttccctttatttattacatctactcatgggacatacataataatcaaaattttcaatttacaggcctataaataatgctatttaactgaaaagcagccagcaaacagcaacatatacatgtatttgaaaagcttactcatggaaagtaatttccatagcaactcagttttgtagaatggaatgataaatcaagaactatcagcatttaagaatcagaagagtactgaatttgccttactcctttgccagctgcacactggtaggctttgctccgataggtatcccgtatttgtgtaaagtgttaatcaatatctccctcatgtcattgttgtaggaatcaaagtcaaacacatttcgaactacactggagagaccttcagtcggaaatttctgtattaaaaaaaaattcccttattatgcatgtgataaaatatacaacattataaagatttatgaaatggataggacaataatgatcaaatgaactacagcagaaatttactggccttgtcaaataagcaggtagtaggaatgtagacatttttccctttcagtgtttgctcagatgacttaacaatattttcctttttaaataaatgccagaatttgaggggaaagagttcctcctctcaaatgttagagcagtgcctagatcctggtgtcagtgattgccactgctttctgaaatctcctgcctttaatatgagtaccagatcgaacagtttaaaaatgctagttatgtaaaggagcgtgttaaatatctatactgaagttttcagaaaagtcagtctatgaataaatgaagaagaaaagataaagcaacaagaaaagaaggaaagaacataaaaagtgcaaacaacagagaaacagggagcagtagagggcaagaaaacaagtatgactacaactgaatttacactgctcatgtcctctgagtcctttcctgggtctgctttgattttctttaggtgatgggttctgagctggctgaattggacttacggttttataggcagaacaaagctgttatttttaatcttgatttctttccatatatttttaattgacaaataataactgtatatatttatggggtacaatgtgatattccaatgtatgtatgccttacagaatggttaaatcacactaattaatatatctatcatttaacacacctttatttatggtacaaccattacttaaaatctactttctcagcaatttcaaaatatacattacattgatattaactatagttaccaggctgtgcaatagatctcaaaaacttatttctcctgtctaactggaactttgtatccttggatcaacatcttcccctgtgtgtattctccctgccccacctttctacttttctttctagggttttcttggagggttggggataaggcagaggtcaagagttgttgggttgtgactgttagcttggagacccttatttgttctgtaagtaagatttatattattttttatttgtttgttttctttactaaggtggagtacacattgtacatggtcgcaggaaatttcattctcctgcctactctatcttgtgaaacttccttgcggtatttacaggtatttaatcagtacggttagttcctactctgtttactgttgtctccatgtgatttgcttcaaaatgaaaatattttttacctgcataccacatgcttgttgtaaaaagccaaagaacagaacaggaaggtttccccactgactcactctcttgcttcacctgccctctaacagcctcccaccaaatttcctaactccttggtaatgattacagactttgccaaagttaattcaaaagctgaacagataataatgttcattggcctaccatatttataacttagattatacacatttcaaatcatgtaatctgactcattattgtatttatggaaattaaaaactctggtacaaactgtacagtctgaaaaaataaaaaagagagtgatggctcttaggtacaggtgtgtgccatacctacctgtaaatgtttgactatgttgacaacttctctggtagaataaggatagttaataatcccttggtcagccaaactcctcagctctccaaaggcagccacaagcttctgaaggatgggctcaggcacatttggtccatactgtctgagcatctcgagctccgagtggggtttggggttatcaactgcatggcagctaaaaatatcacctaaaggagagaaaagattcacattcagtatgcaacaaatccattacgatgtcacaggaaaaaatggaatggttgtttaaagagccactggttgctcatcaaagcatagaaagcccatccaacaataggatggtacagagaagaaagcaaaagactgaagcaaaagaaaagaaaactgggtgatggatggtttatctccacgaatttatttttgttaaaaaacttacataatacttgaatacatgctcaccgggagatattccaatacaaagaggaaaaaaaattctcctttaagtctatgccaatgccactccctccccaaaaag

SEQ ID NO: 59550 - DNA, 1428 bp, Homo sapiens
ctaaataaacttgaaaggctgtctaggccacaggaatacaattcctgggcaagtcctggtgctatgctgagtcggtagagttggagtgcatgtgacccagtcagacaccagtgcggacagccaaggcagtgcttgcactgtcccttcctcaactccaggcagcacagcttgcagctctggcagagattccttccactgaaggaaaggagaggggagagcaaagaggactttgtcttacaatttgggtaccagctcagccaaagtaaaataaagcactaaacaaattgctaaagtccccaattccaggacttagctcctggatgacattttgacacccaccctgggccagaagggaacccactgccctgaagggagattcccaggcctagcaggatgaatcacaacctgactaaagaatagttgggccatgaataaacataagtggtagccagacaatactcaccacaagccttgggcaagaccctgtattgtgctggtttcaagtctgacccagcacaatcccagtggtgatggccatccctctcccaactccagacagctgagcatggagagagagattccatttgtttgagggaaagtaagtgaagagagcaagagtctctgtctagcagtccaaggaattctcctggttacccaagaccaccaatgtggtatctctatgagtctgcaagaatcacagcattacagggcatggagtgttccctaatgcaggtatggctgcagtgaccagaattagatcacacactcaattctctttgaatacttggaaatctttcccaagaaggacatgtacaaacaagcccaggcaaggaagactacaataaatactcaactcttcaatgcccagacaacaatgaacatccacaggcatcaagaccatccaggaaaacatgaccttaccaaacaatcaaataaggcaccggtgaccaatctcagagagacagagatatatgactgtattagtccattttcacactgttgataaagacatacctgagactgggaaatttacaaaagaaagaggtttaatggactcacagttccatgtgggtggggaggcctcacaatcatggcagaaagtgaaagcacgtctcacatggcagcagacaaaagaagagaacttgtgcagggaaactcccctttataaaaccaccagttctcatgagacttattcactattacaagaattgcatgggaaagatccgcccccgtgattaattatctcctaccaggtctctcccacaatttgtgggaattatgggagctacaattcaagatgagatttgggtggggacacagccaaaccacatcagtgaccttaaagaaagaatggaaaatagctattttgaggaagctcaatgaaattcaagataacacagagaaggaattcagaattctatcagataa

SEQ ID NO: 59551 - DNA, 1230 bp, Homo sapiens
actttctcccagtgacctctggaaatagagctaagcctagtttgtatttatgagagtgacataaatccatagtgatgaaggtggaaaactttgagaagaaagtactattaaccactctgagccaaattcctgaaagtattttcatttgtaaaactgcctgtgaccattagagaacttgggtacttttcatagaaaagggttgtcatttccttgacatttggagacaagtagaatgcttctgatgtcctaagagaaactgccaggcaggcatgctgtgaactattgcaaaattgctttgattcatccttctgaaaatataaactgttccatgacccgtgattcacatgcaaataatgtgccaaagccgactgctattaaccaaagttatgatatgcgaaggatctctaacttgcctccctaaacactcaaccaaccatttaccagtctaaaagaatttgataatgtatacctcggaagtaaaagcagctgtgtaatcaagtgactttttagtgacttgtaaagagacaggaaggaatttaacatttcccctcttggaaaaaattccaagaaattttttaacaaatttcttcttaaaatataaacaataataaatacacttaattatcttttacgggatttaaatgttttaaatagggcagtaaaccctttgagtggtgatacagcttcaattaaacagagagattaagtgatgaggagttcctctgtatgccaatctctaattctgttaaaatatccatggaaatgtagcaagatagaaaataacatatttgtcaaacttcattctatatagtatgcagctgaaagaagtattttccttcaaactttttgttttgaaatttttttaactcacagaaaatgtcaaaaatagactacaaatatccatatatcattcacctagatattgctaactgttaagattttaccacatttgtgttctcactctgagaaagagagagaaaatgtctgtttatacacacacacatacatgtctttttttctgaaatatttggaagttgtagacttttttttactttatcccttaagtatctcaacatgcatctcataagaataggaatattctccttcataaccacaatatcattatcatacttaaggaaattagtaattcaataatatcatataacatagtccatatttaaacttttctaatttttttatagccgtttttattttgtttcctcctccagg

SEQ ID NO: 59552 - DNA, 1036 bp, Homo sapiens
tcctgaagcatgctggacctttccctagtgcaaggcaacatcccactaaaaggccagtggtaggagagaagaggtgacagagattcctcctaggcactccaggtctttatccagtgcaagacagcagttccttaaggatggtactggggccagatagctgagataaatccctcagaagcactctccaccttcactgaagtggcctctggaggctgagggcagtacaacaagacaagagacagctgagttgcagcaagcagaatataagactgaatagcaaagagaattccccagcattccaaaaatctggcagctatacagcaaagagattttcacagacctctttggccccaggtttgccacagtttgtgaagctggtgttagaagaggaactaaaataaaaataaataaaaattaatgcttggaaatcaatgaaataacaaatggacaagcaagagaaaaaaatcaatagtcaaaagctgtttccttgaaaagttattagcactgataaacccatagtaagactaattaaaaagaaaaggaaaaaacacaaatacaaatttccagtatcaagaacaaaatagagaattatcactatagattctacagatatcactaatcactacagattctcagatatttaactaataaaggctatattatgaaaaaatggtgctgatgaatttagaagcagagatgtaatagacctatccttttaaaacaaagcagaattataaaattcttaggaaaaaaacacagaatgtctttacagtcttggtgtaggccaagatttctgacacaatgagcactaactttaaaaaataaataatcaataaattatgtgtaatcaaactttctgccaaccaaaagatatcaatgagaaaatgactaagcaaatagattgagaaaaagtattcataatacttatacatgacaaagtacttggatccataatacataaaaaacttttgcaactcaataataaaaaggcagacaactcaatttttttagtgggcaactgactttaatatatact

SEQ ID NO: 59553 - DNA, 559 bp, Homo sapiens
ccataatgagaccaagtaagtccattaagttggtgacagagagtggcaacaatgcccaaagtttcagtgaatctgtcaaaattgagaagctaaccaaaggggcaaattgttaaattcaaccaaatttggtctaaggatgcctccgtacttggagtccttatgtaatgaattgcaacataactttgtatgtaaattaactgaaaccggaacttaggagtatactttggtaacaaatagatgagtcttagccaatctgagcagctgagcttgggtcaaccacaggctgccaactgatgagaccgtgttcaagtaaggcaaacactgagttatagccaagtaagctgtttccgtacctgacttccattttctgtccataaatgctgcctgctcacgtttcagaatggagctctctgagcttattctggttctgaggactgcccaattcacaaattgttctgtgcttaaattctgttaagtttagtgagtctaaagtttctaacagtagctttgacaaagaagttggtttcatgagggtttttcaacagcggccctatgaaca

SEQ ID NO: 59554 - DNA, 3375 bp, Homo sapiens
ttcttatccttttacagttaagaaaactaggacacaaagttaagtaacctaccctcaacgacccatggttagatagtggataagtggattccaacccaaattgtttaactccaaaacccaacctatagtttatgctatacttccacctttgacctctgccttctagggcaaaggagcaaaaaacaaataaagaacacacaaaaaatgtaaaaaacaaatgaataaacagcccagaagtgagagtaattgagaaaaagcaaaaaaaaaaaaaaaaacaaaaagtaaaatttgaaattgcaacactatggtgggggacgggggtggtgtatgtcttcaatgaataaaacgaaatacgtgggacctaaatatgctttttttttttttttttttgagatggagtcttgctctgtcgcccaggccggagtgcagtggctccggtcactccaagctccgcctcccgggttcacgccattcttctgcctcagcctccggagtagctgggattactggcgcccgccaccacgcccggctaatttttctgtattttctttttagtagacacgggggtttcaccgtgttagccaggatggtctcgatctcctgaccccgtgatccgcccgcctcagcctcccaaagtgctgggattacaggcgtgagccaccgcgcccggcccatatgctcatttcttagcaaggaaaactgggggttgcggggaaaatgcaagaggacaacgaaacctacaatttcatagtgaaaacctgttattccaagcagcactgacattgacaaaatcttgtctggaatcacttcaccattcaagggtagcaacaacagatatcctttccttaaccatcacagtaactctaactccaccaacacacaagaaaaagaattcctaaaaccagctcaagtagagccaaaaaatactgagcttagaaatcaaagcatgtgattctagcatagtaattagttgtgtgttctccagcgaatcacttttcccttctgggtttcaattacctcatttgtagaggcaagtgttttaactaaattaaggtgtaactgtcagctctaagaattacgtgaaactttaaggaaaactcctgtaaaacttggaaaggctcggggatgcatttaaaacaccgtgaactatgggttctttggcaagaatgttcccttctaagccgccacaagccctggctagaacatgacacagaccggcttccaggcccttgaggctcagagagcaaggtcaaatccagctttcaataattccatagggctgaggcattaacctctacgagtattataacctaagtcagaattctgggggtaaaggcagcggcaggggaaggagaaatcactcttctaggtcatcagaaaccttagtccagacccctcgggttgcagaatcaggcacagagagggcgagcgccttgcccccacgttacacagcagttagcgccgaggtcgggactagaacctcaatctttcagctccccgctcggcaaacggtccttccaagcgcagcgaagcaacagagaggaggggcgggggcgcgcggggacccggcacggagcgcaggggcaccagggaggacaggggcgcaccccgagttacctgtgtcggcccccgagccggcgtgcaacagtctgacctccggccgctgcctgtcgccacccggcctgcgctgcaccacctgccgcaggagcagccgcatgcgccgcgaggccgggccgccgtggcctccgggtgccccgaggagtagaagccgggattgcatggcgccgggggggctgtcggggacggcgagggggctcggggatcgagcggcgtcccgtgcaggcaccgtgaggcagcgcggagaaggggacaggaagcggcacctagccgagtccgccggaaactccttcccccgcggcgcggccggctcagtagactcagcccggccctacccggccctgcatggcccagacgggcggaaagagcctgcggagctccagcccaaagagccggcaccgtcccgggactgcccgcaccgcgggggtgctccgagctgcggcgctgggctctggcaagcgcctcgcagtccgtgagactgtctgttcacctggatgcaccaggccttcacccgccgtttccctgcgatcccacagaatctcaggagttcagtaaatgccaagggttttaggagcatttgtcggtgtgactcttcagatgcttgccccaagtcttcgtttcttagttaaaggcccagtaagtatagggagctttccctgtattcggcttcagatttcggaaatggagaaaacatgcacaagatgatgggaactttcacaactgtcttgattcattgtaaccacactagtgtttccaaaccgtacgtgaaagctttaccctttgtccttttggtggtggttgtttgtttctgtgttttattaccgcttcctaaattctaaggaaaaaattcacatcttagtgatagatggaaattgcttaaatatcagaaaggatccagatcaagcacttttctagtcatgctgtaatacaaaagttatataaagatgatttatgtctttagtaaaggaaaaagtaggacactggctaaggctgcctccctcttgtacattccaacatcggaaatggtcctaccacaaagcaaactaagcctaatgtaattagactgcatccccaaaatgtcacagtgaattgactaaggcaaaatatttgagacaagttatacaagcaaacatcaaaaagaaggcagaagacctcactttcagctaaagaccttgctaattctagagctgccactgtctaaatacatagcacctaccctgcgcctgaccctgtgatgagtgctgagaagagagtgttagagtggagactgtaaaagtcaaacaaggctaggtaaggaaggctttgggcatccagcggaagaacttgaggaatgaaggctgaaccaggcttctaacctagatgaggagacagtgaaaataaaggtaataagtagttacacaatatattatgacttcgtttcatgtgtatcttctcatttaatcctcatagcaaccctaagacataaatttaggatgtaagcttataaaatgcttttcctactttgagcacattgtatgtatcaagattttaatgaattatcccatttcacataaaaatgctttgaggtactattattatcctccgttttacagatgaagaaactgaggctagaagaattgaataccttggtcaagatatctccatttaatctcgctggaactcagtagacacctgaaagaatgggagaacaacctaaggcaattttgcaaagtggttgatataagcactaagagctcttggagttaagacaatggagag

SEQ ID NO: 59555 - DNA, 861 bp, Homo sapiens
gaagacaagccgctggggtacaggaagaatataattgaaatcctatttatatttttaaaaatgttaacatgagaaagaaatgacattttcctaacatttggaaatccacttggaaggcttgactcatatttatatatagaatgacattgttgcccccatcccatctgtgtcatgtcaggtacacaagatgtcctgggggaagactgagcattgcataatgaccttgttgacctctgtgatctcattcattcacttgcttgtagcataatgccacatactgcagtttacagggatttatgacttataatgtctagttttaaataaactaatcctcaaaccaaaaacaaatgatttttaaatatctctgcaaagcagctcctgattgaagacgataccaataatgcaagccaagggaatatgaaatggtaagaactgactttctagtaagagctctgcgatcagccacattatgaggagaaacaataataatccaattagatctgaacagaagtcagctaatgagtgagcaattgattaattactcttcaaaagaaactgagttatgaagagaacattttaaaaacagagatttggcagtgctcccattgttaagtgattttgttgcctaatcaatgtaaacatgacacatactaaaaccgtcatatctccataactaaagaacttgggaaaaagactttttttctaactaattttaaaatcttccaaatgaagagtttctgtggattttgatccatttgttaaaaattgtaaaatacaatgccttccaattaatttgcgaggacctctcattgacatcagggaaagcagaaattgaccatctgggtttcaacaaaaacttct

SEQ ID NO: 59556 - DNA, 1523 bp, Homo sapiens
aaattacagtaagaagtaaaacattagattaactttatgaatattaaataaaatattaaataaacaaatttaactttagtttgacagtttgtaaagttctaaaagttccatgtcttgtgaccagagacaccaagcttatgaggactatttaataagatttctgcacaagtcaaagttaatgatttacacagagtaggtattctttttattggtaaagaaattaaactttaagatgttgaggtactttcttgatgacaaaaagcatacgtatactgaaatggtttttcacatccaagttagcagcactatagtgtcctctgtgacatgcagtgcactttctaccatgaagatgaaacccaaacaaccccacccctctagccctcacattcttcactgccctctccagcagccactaatgggaccccccagtctgccatcagcctcactgggtgcatgatctgtgtgagtacccacaggttgggggctgcataaggggacaggcaggactgggcagacagaatggcatgcagtttattctgggctcaggtacacctggaacccatttgtggcacaggcatgacacaggaggtaacaccagccaggtcaggccaagctcctgaagtcctagcccatcatctgcctgtggccttccaggctccttctgggctaaaaaggcagagagatggaggagagaaaggggcacctcaggatgattagctgggtccccggtgggtgagaaggtgcaggaagcagggtcaaaagaaatcaaatgaaggagagtgtctaggaaagaggtgtcatgtatgcaagaggctggtaaaagggagggacagactggacccagcctgtttaagacctttgtactgagggcagctgctgtatcctggggcaacgggaaagaaaacacactttagcactggattccagtccaggtcataacaacagttaacatttgcagtgcgtttctcttccttgtgtcctttattcttggctctgaaaagacagagttctccaagtcttattcctcaacctgcacaccagacctttccccactgattagtcctctctctttggaatgtctttctattcccctactagctcctttacacttgtcttaacacatgtttgtttccctctattgcaagacaataataacctccctccacaacttcaccacctgagttcctgaagtgtagtccattctccttcccactcctccctttgcaccgtgatttcctgattcgtcttctacccctttttattggtaaaaaaattaaactgtgaggggacttctgtgcgcttagaactccacatcttagctccatttcctaacagtgctctgaccttggacaaattgtttaattcctgaaccttggtctcctcatctataaaatggggataatgataatctcctcatatggttgttctgatgattaaaactaaagtgtcactcatttaaaagagagctttaaaaacctgttatgtgcaaaagtttttaaaacctatgggtttctaattctagt

SEQ ID NO: 59557 - DNA, 2735 bp, Homo sapiens
cgctgcaaataggtcaagtaagacgggcattggaaaatatacaatggtttaggggattttcaaaaccacgaagtgactttcgtcagtgcagtccccgtggaacagccggcacagaagtcggtttgcaggatcctgaagaattagagggctggggacgggctagatcaattatgtgtttttgacttgacgatttgtttttaaaatttgtgaatgcatttgacatgatggcatgattgagggccctgaaaagatgctgaaagaacgaacctgaaagtccaggagggggagtaacctgtgtaaagccagtcacacttggactggaactagatgaaaatcgcttacaatgccaagatgatccgaaacgctttttcaaagggcaggaggagacttgctgtttactgagtgctcactgagagccagcccatgtcctaatttgagtctagggataaaactggaagacagatcgactccttagccggttctttccatgaaaacgttgataatgaatttaaaaagcacgccctcaagtttaacctctcctgtagttggtaacccatctgcattcttttgaacgtcacaaggaagaaacggtgcccggcgcagcttgccctggagcgtagctggagtgcggctgagttttcgctccgctgaagccggttactgtccagtgggatttcgctcaagcctcagcacccccaggaggggaggcgcctgcagcgcgggccgccagcgtttggagggaggcgggtgcgggctgcaccgggagacggcgagagcgagagacaggggcgctgggaggcgtctcccgggacccgcgtctgctcccgtcgccagcgcggtggccagcctagcccagcccagcccgggctttcctcgccgctctccgcgcgcccggccccgggggaggccgctcctttccgcgcggccgcccggtgcccgtgaccacccggcggccgctttcggttccgcgccttataaggcctgacaggggggtcacgtgtgtcccgggccacccgccgggaggaggggcggcgggggggaggggcgggtagcggggaggaaaaggggagggcgccgggggcggaggaaggagcgaggggcggattctgcgcccgtgggaggctgcggcggtggcggggagcggaccgctcggagccgcgcaggggagcgggaccgtggagaaggaggaggcggcggaggaggaagggaccggcgcgggggcgggagagcgcggcggaagccggagacggcgggtgggccggtggctggccccgggcggggagccggggcggcggcggcggcggccgagagggaccgcggcgagggaagcgcatccaggagccccggcgcagcggcggcggcggggacccgggtctgcgcgcccgggcggccggcgggcgcgggctggcgcgatggagcctcagcacgtgcgccccgcgcccggcgcccgcagcccagcgtgggaggaaccggtgggtaccgcgcccgcgcccaccccctcccgcttctcctttgctccccccgcccgggccgggttccgttcaggaaatggcccgggatgaggtccccagctgcttcccagccgggttagcgcttcctccgccgcccgggctcctcctcgcgcgccgcctggagcgcctttgtccggctgatcgaggctctccccgaggaaccgctggcaaaccgctggcgacggccctgcgaggaccgtttcccggcttcaccgactcctcaacttttcacttgctttgagaccgtggaatgtaggcgggggagaggagaagccaggctgcgcggtcagcgtggggagtctgaggagcccggttttccctgtcgagaccgcgccctggtcgtcacctgggcgcgcaggttcccggggacacgcgcctggagaggctgagcgcggcgcggagcccagaaccacgcctccgactcctgccagccgctaaagcttgggcgtctggagggtgcaacgggttttgccggggacgaagcagaaagctgacttcgctttcgcctgggatttcgctgcacacgcaacgcggaggttgagtaattttaggaaccaagagtagtgtgtgtgcgtgtcttaagtgtgcgaggataaggaggaagagaccagggggctttggatttgttccctcaaactccctcaacttccttctctcttccgattcaaacagaaccgtctcacatccctccagggattccaccccggaatccccctctcactcagagctctggaagcctgtgtgggctgccttttccctggcgtcgaattttgactctccacgccctgcctcgatatttgctactccttcttggttgacattgtgagccagtctgaaaagccccgtccgaaatttctggcctcacccatgttccggtcaacgtgttcggatgctgttttcccagggactctccgagtctgctcaggccggccctctgcctgttgagagccgctaggtcaggtgccagggttggctgtcctttttcttttctagtatatacgctctcagctcctttgcccagagtacctcctttgcccagagtacgtttctcggcctgattcctgacctttcagaagcgtccttcgactctgatccctctgcatctgcagctgtctttgctttcgtgaatttgaacatgtcgtcaggttgcccatctgctcttgtttcttccattgtggttatcacaggggcttaagctagtctccaaattaaaaatacaatcca

SEQ ID NO: 59558 - DNA, 2220 bp, Homo sapiens
gaaaggaatggtactgaaaggcatgaacataacagagattgaatgctttctccaggtggagagactccacagtctggcagggactttttgtcctatttaaaaatatagctaacaccagtttggtgttctctttggatgacaagagggatctgtcgttttaatgtcttctctcgcagccccctcaccgcagccccctcacacctgtgaggcttctttgacgttgagcgtgcacaacccgctgccagtccgcggttcccaagtgcccgcgcagccagcttgcaggggagttgtgcgcggtggctacagcctgttgatcccacttcctcctgctctagtccgggctagggagtggctctgccaggacttccaaggctttttgtctcgggtactggtgttcgcatggctcgagtgtattgttttcttccaggcaatctcggttagcgcttcagcttagacacttcttgtgcgttctgtcgtcttgggctgcgtgtagtctcttgtttctgcgctttctccacgcccttcccagtttcctgttagccgaaggggatcgctctttctgaacgaaaagttctcagagcggagctgaacctcccggaaaatgctcttctcttccgtgtgcgccggatgggggtgggggtgggccagaaactgaacgccgccgtcaggagagctgaggggacccgacggccctggcggaggcgggagaggtacggtcctcggagtggggctgggggtggggaaaccgacgaggggcagcccccgactgtcttggtggcagaggggacttttattcagctggaaccgcgcggcgaggcccaagtgtctctggagagattcggggttcaggaggtggcgggtgcacccaagggtgctgggaggaagctccaggttcccattcttccccagggatcggcgttgcccctgctgtccagaagtgagagggggtgtgcgggcatcgccactacggggtgggctgcagaggtttcctgcctcccccaccctcctgtccatcctagggacccagaccgtaagggagtggaagagatgttgctccaaaccctgtcaccccatcctctctacccgcgctggtcctatccgaggctgggtgcgcaggggtccgaggcgggcgggggtccgttacctctgcgtcccaccgtggccgccgctccggcgggaaccgagcggaggagccgggtggacccctgcctggagggcgcctgccccgggcgacccttacctcgcgggggtagctagggaaacggaagatggcggcggcggccgggcacggggttccgggctccgctcgggcagagcccacccgctgaccaacgccgccgcccccgccgggcggtgctgtgtccccgcaggagtcggagaggatggcaggggccggaggccagcaccaccctccgggcgccgctggaggagcggccgccggagccggcgccgcggtcacctccgccgctgcctcggcggggccgggagaggattcgtctgacagcgaagcggagcaagagggaccccagaaactgatccgcaaagtgtctacctcggggcagatccggaccaaggtagggcggaggaggcgggcctgagggccgcgtggaaagcgggaggtggagagggcgcgggggcgctggaacgcgccgggcgatcccgggaaggcggggaaggcggggaaggcggggaaggcggggaaggcggggaaggcggggaaggcggggaaggcggggaaggcggggatggtgagacggtgaggcggggcggggcctggggcgcgggcggggcggggaggggtggggcggggcccgggggcgctggaccgcggtgctgcgggacggattcccggcggctgcgcgggaggctgcgagcctgggctcccagggagttcgactggcagaggcgggtgcagggaacccgcggctcggcgggagcgtgggaaaaagctgacgcgcagtcgcgagttcctacttagggaacttaaaaggagagtttcaatttttcttccctgccgttcgggggagcgtgcgcatgtgctggccaaccagcctgcgctgcagtgagccctgctgctttcccacttaggcccactcagagggtgggtggaaggtgacaccggtcagcctttcctgcccctctgcctcctgctgcggtctggaaggcagaagccccgaggcaggcaagtgggacatggtgttcgcggcttaaccgcaccct

SEQ ID NO: 59559 - DNA, 1648 bp, Homo sapiens
acctttatgactgtcttagtctgtttagtgctgctataatagaatacctgagattggataatttataatgaacagaaattgactggctcacagttccagaggctgggaagtccagtatcaaggggctggcatcttgtaaggaccttcttgctgtgacatcccatggctgaaggcagaagggcaagagagggccagagagagagagagagaggaaatgagagcaagtgcacgagggggttaaactcgtccttttacaaggaaccccctctatgataacaacattaatccattcatgagggcagagcccctgtgacccagacacctctcattaggccccacctcccaacaccaccacactggggatcaagttttcaacacatgaactgtgggagatacattccaaccatagcagtgacctaaaattgtatgtttgattttttttaaaaggcatccttttggagatgagtagtgaattatcttctcaaagtctgtttagactttgattctgctactttgatgtggacttctgctttcttatctggaaaagtattgtctgagttgtcataggatgttgtcctaaactttgatgtttattcttccacatgctagctcaggttttctttggtcatgcctacaaactggtaagctttataagtagataaggagattaaacaaaccttttatatgtaggtaaatgaaattaggtgtcagaaatcctttctagatcttaaatatggccttcgatatatggttagctccctgcaagcaggcatttttctttgttttgtttactgctatatctccagcactctcagcacttcctggcatgcagtaggcactcagtaactatgtttaattaatgaatagatctgtgaaaacaatgtatttcatatgtgaataattaaacctgatttttaccttggaacttaaggaatgtggtttttttttttttaattttttttattttgagacagagtcttgctctgtcacccaggctggagtgcagtggcacaatcttggctcactgcaaccttcgcctccttggttcaagtgatggtcctgactcagcctcctgagtagctggaattacaggcgtgtaccaccatgcctggctagtttttgtatttttagtagagatggggtttcacaatgttggccaggctggtcttcaactcctgacctcaggtgattcacccaccttggcctcccaaagtgctgggattacaggcatgagccactgtgcctggcctcaggaatgtgtgtttcttaggcatctggatgaagtcatctttatttgccatgccttccaagtgaaaagctcagcaagccttcgagtcctgcctggctctgcatactctcagcagaggacgactgcaccgtgtgcagagcagcatagacaatgagagtaacatgtgatatggcctcacatccaggacgtaggaaaagaaatgcttcacttcatcccaacaatgaaaaaagtctactcttttcaagacagctattctcaagtagagtggcatgtgggtaggatgaagaaataaagtaatttggatgctggaatgacttttggggttagggagataaagttagactatcttctaaagattgagtggataaacttaacctgttttatgatttaccttctcct

SEQ ID NO: 59560 - DNA, 1690 bp, Homo sapiens
ggcggagccatcagaaaggatgagccttccttgggccttcggatctggtggggctgccactttgggaagggccccgggcttcggaagaaagcaaaactagccttgtggcgaagaaggagcccagctggccccaggctgttaagactaaggggtcgagggaaaagaggcagagcctgaaaccaaatctgcggagcaagccaaggcctggggacttgccagagggaagggttaagccgtttccaaggcaacggaccaggaagcgcgcaagacgtccgccgcaggttcgtaggtcgccctcgaatttaaagctcccaaggctgagtgggtcccggccaatggagaggccccctttaagtcatgtgaccagcggggctgccccgcgggctgctccgcgggctgcactggagcacgtgggaaggctttttttcctgttccttctttccctttttaaacgcccacccacttttgcgcgggctcggccgcggaatttttctcgcgagaggcgcgctgccctctcgcgagagagagtgggaggcgtggagagtaggcggtgttgcgggccggagctgcggcggcggcggcggcggcggaagccgaggggtgggcagggcgggggcgggccgcggggctgggagggggagggctgggggtcagcgcgggagggggccagcttgcttgcccggctcgctcacgggtcgttgaggccggtgacatgtctgtgagctgcggaggctgcggcccccaggtgagccgggcgccgacgtgctcgccgcggaggctgcgtttagatggggtggcggcgggtgtgcggccggcatggatggagcggcccggctccggcgctccagcccctccgcctgccgctggtcccccttctggcttcggggccgcccgagagctgcgccttcgcatggcggagggaggagggcgggaggagcgcggccgaaggaggaaactcaccgcaccgggcccagagtagagggaggtgctgggtctcgagacgcgtcttcctggggtcccaagtgtggcggtggagctgccgccccttttaatgacaggctgtttccatccccggggtggtcttcagagacggccccccgggtgcgtggtgcgcgtgcttagtgtgtgttcgtggtgtgcgcacaggaacatttgcagcggttgggaggacgttgcactttgttcccgaacagcatccttcactgtcagacccccggagccttggaagcaggcgctgctcagatcttgtaaacggaaggcgtcaaggggctcctcagagtattgatatttggatttgctgtcaaatactctcctaggctgttaatggcttaaggctggccataaagtaccccgaatggattgagtatactgctgttaatccaggcatctaagctgctttataaaaaatatgtagatgtaaccgaagtattaaaaagtgacaatgacagtaaaagctaacattttttctcttccccatattaccagctttcattttttttctctgctttgtctgtcttctaaaaccatataaagttggatgtggtttagctttagatgttaaggagtttcatggtgagaaagactgctgagatacatacctaatagctttagtacaaactggagttaattcctgttctcttttcagcttttcaatcgcttgcaaaatgctcgttttgcttagctgcttccc

SEQ ID NO: 59561 - DNA, 1016 bp, Homo sapiens
gtttctataaacactataagtgatagtttcccccatcctttcattgacattatttgccaatgctgccagtcattctggcatgaaaggtgtgtgtgtgtgtgtgtgtgtgtgtgtgtgtgtgtgtgtgtgtaagggagtactttaaccttgccagtttgttccctcttttattttactgttttctttttagaaacccactgttaaaatttaaaaaggtgctttaaaataaaacgcctataaagattgtgcagtaagaatttttattgacaataattaaaattttttttgacaattttgggttcccaacttatcttacaagtgaaaacttaaattgtaaaacatgttgaaattttaaaaattaatgttaatatggaaatgcatttagagaagcccagtagtttttattgttggatttttgaaaaaacctctaccaagaatgtggtgttttttttgtttgtttgtttgtttgttttagaaaaattgggatttccccccaccccgccccacccagataaactatatctacactgtctcgtcaagttctctgacacgatctttctgggctctacatttcctactagtttgtgtccagaaactgcaagttgacatgaatagaggacaaaggttgtgtcttgcttttgtctctctcttccctccctgcaactctctctcccctcctcccactctcttccccctcccccctcctcccactgtctctcacctcccccaccccccactctctctcatctctcgctgtgtcctgtgtatgtgtgggtgtgtgtgtatttgggtgtgtaaatgttggttcttccactactggattttgtaatctaggataaatcactttttttggggactttgattttgctccattacgttttcattttttctgagcactgactgttctgaaagctgcacaaaacgtagaaagaagacatagcgcctgccagggaataggaaatgagggcacttacacattaatgtgaattagtaattgtggtatagaaatgttttat

SEQ ID NO: 59562 - DNA, 465 bp, Homo sapiens
aacaatgctggataaatgaggcctttaccgcatttctttttcttaaaagtatagttacttttaaaaatgctatcttcagacaaatctgtttgctgattatttggttagctatctttgattatactagtccctccttgttcaagttgtttaagaaagtgtcactataaaatattgaaagtggccgtggcatgacttggaaaaatgacccacagttctaattccattccaaagaattcaagggactttccagataaattcatttggagtctacatggaatttgcagttaggaaaggagctgatagaagcttatactttaaccatctataaagacagggtttacaaagcagataacatgtttaactttcaggaaacaaactccttaagtatcatcaggttttgttgcagatgtctgttcacaaacaaatggtgtgtggtatatgacattcctgatcaacctcatttta

SEQ ID NO: 59563 - DNA, 655 bp, Homo sapiens
ctgctgtcataatattatattgctggcttggcttttttttgtttttttctgtcagtgtggttattgttacttcatctgtggcctgtttccaaaagcaatgagtgagcccccgcaagataatcactagattatctggttctttcatgactaataggccaggggaatgtactaaacaaacagttcagctcgaacgtgttgcaggggattgaaactgtctgaatgaaaataaaatatgataaaataatataattcacatgattcatcttctgcaggacaaccaagtctgacattcctattccatataagaagtggtaatttcacagtgtacattcagtaaggatataaaatgtaattttggcaggtttcatggtataaagttataatatggttttgggggtttataatatggatgactttatttaccttgtggctgactatgaggtaaacttgcaaatatgtgtccatattacattcatctactatgagcaaatactttcgggttgtgaacccaagggaagaaagtggtaaaatggcttattttgccgcatgaatttcagtttactcgggtaatacgaacgtggcaggggcacatttgtaatttagggagttataacatcagtggttacatttaattaaatgaccatcaacatgggat

SEQ ID NO: 59564 - DNA, 3432 bp, Homo sapiens
cagaatggtggcaagcagaagaaaagaacgaacagaaactgaacagtattaacactccaaaggaatctcagtgctgagccctttggctcatccatgctctgctgggatcaggtctgtagctaaggctgaggtggagcaaaaccaagatggtggagatgttggcaaaatggaataaaaccaagatggtggagatgctgataaatggagcaaaatcaagatggtggagatgttgatcttctagccattctccacatttatcctactttagtagctttatttttctcatatgctcatggatttttaaaatatacctgcattatcaagattttttttccagaaagaatctgatagattaattatctccacactttagcctttagcagaagttagggattgataaactggcagggcaggtgaggatggcttgcctccaaaatgctaccagtcatagggggctccctttcttcttgtaaggagagtaacaatggctctttctattccaccattcttggagaacagtaatttgttgaagaaaatgaaatggagtttgtaggtgaatgtgcatttcaagttataaattaaaaaataaaactctagtaccacataagagttttctatgtatgtctgtttaaagtcaagaatagcggtgatataataacaataatccaaattgatcagcagttataatttttctcttcttttgctctcctctactgggtgtccctgaactctgcttctttgaacaatgttgttcactcatctggattagcataaagactcattttggaaattatattccactattgctatttgtttttacagttttcaattcagctcctacttaagttattcaacatcactaccatagttgatctgtaataccgagagcatgcactctccatcagttaaaaaacaatgtccttgaaacatatattaatccataggtagtagaacattaaaacatttctaatccatttcactgaagttgctgtgaactgcagctcaacaaacaaggaggttagaacatcataactgatggagaaaactcaaccctgccattccaggttggttgcaagaatgctgggacgggaagctcagggaaaggaatccagaagttcagcatgcagccttggtgtgggtcaggcacagccaactgctgaaggtgtgttttgtgtccaagctggcaggtttactagggtacgcctcttgaagatggtgggtagcctgattagagcctagagtcaagaatgtcaatgggttggcccttctgatgagttatagtatcatgtcccaggagagctagattttcacgaactcatttcctcaaattcaaggttttagatagtttctctccatggctatgaggaaatgaaaataattaactatgaaacagtgactttgtcagtcttagtgttactgccataaaactttctggccatatgggaggaatttgtttctctggtctgatgtggcctggtgtcagctggaggggatccatctcagcactgatgtcactcctggccagttgtgtactgtgtgcttgggtatcgagtcatggtctgaagttcatcttcattgatcatctcatagtgaagttaattatttctgagactctgaagtcatggtctgttgtgagttcaatcaggatgaaactagaatcattaaagaatgagagggttactttcttcctgctgactggagagtgattttcaaacactccttagcagtagactcttttggtcaaacacacctttctgcagaattccaatataggaaataggtaaaagtagatgttctctggtacccctggtgtccaaccacagactttacccccagacacagcatgaagcctgctcaggaagagataccactgaccaaagtggaaaattcctctgcaaatttgtacgggaacagaacttgcttgcactgtggtagcacatggaaagaacctggcgacactgaggaatgtcataggaagcaattctatgaagcttatttctgtgtttactgcagggatgttgtcaaggatgtggttgatgacattccacagtgtttcctttatgatgatctgctgaagaaattttcctctcccctcaggatgatgattaaccacatttctcctgagcagctgggcagttgacatcttgtaggtattgtaaattgtggcctgtccctatgtgtacctatagggtagggttctcaaaccttactgcacactggagtcatctagggaggtatttaaatgccaatttccaggcttactccagactaattgcatcagaatctcaagagggggatcgacatctttaaaaagttttctgggtgacccaaagagtagccagttttgaaaaaaacaaaaaaaaggtttatttaatcagggagcctctgaagacacctggtttctgttgaatatatctttttttttttaaatgagaggatatccatgcatatgtatatatacatactagcttatgattattaaataaatggttaaaatagtcatcttcttttagagtaaaattcaattattcttatagcttcctcctgtagtaaggtgctacttaggattttccaagaagcagacaccaagttggaattagatgtgcaagaaatttaccaacaagatgcctgggagggaaaatagagaggaagctaggaagggctgtgacagctgatagtgccagctgttggtctgaactttgggagggagagagtgaaggaataaggggtggatgaggagtcctaacttgagtgcagttgtaggtaagcctggcaaggctgatggggagccttgagtcaaagtgatcagtcagagaagcttgaggctcccagggacgggccagacttaggatcctgccgttgtcttagctattgatggggagcaaccgagtagggtgatgtgggggcgtgaggagctggccttgtgctaaggcaatggcgggtttcagagcgtagcactcggggccagcaatccatgtgcttgctgtagttgcagatctgagaagcatgtttttctggcagtcacagtatatcacctgaattccttgcccccccgattcttcccatcatttgtgtttagaaatagcaaaggattgtgaggagtgaggatgtgtgacacgaggatgaaagaaagcagcagggtcaggagagtggcaaatggggctttgtgaaggttgctgcagggcattagatggagaattagtcctggttcagcaacagatcaaagagaaagaggcagggtgggggcaggaacaactgggagaggagtgagtaaaaaatttggagcaggagtgaatagactgctggttagaccttagcagagaaagattaaagtgtgggtgttacttgctcataagaaatagacgcatattttcacctaagggtggctacctcgccccatccagcaaggcacatttcagctttaatatgaag

SEQ ID NO: 59565 - DNA, 1240 bp, Homo sapiens
tgacataggagtatctcctaatctttagtgcctgtaggtctgaggtcctcaatccttttcaccagtaggacagcagtggtaaaattcagccagcaaacattgcatgcaagacttcacttttatagcaagtactgaatgaaccatgtactcaatgccagcctagctggacctgctgtccttctaaatggagcaattgcagaaaaagcaaagttctatggtgaatccaaacagtctgaaaccatgaagctgggcagtctggctgtgtggtgcagcccattcattatggtgtgtcctgatcatgtttatttgtctaaactcttcttggtgttgccaaactgccctccttggacattaaacaacagaagagtgagaagccatgcagttgtagtcatctgtggctgcaggtctatggtgaggaggcccagccagactaatagggagatctgggacacagggagccatgctgtgtctcaccgggatggggccctacaagccccaggttccatggggcacagttttggtgtgactggtggggtccctagagccaacggccatctcctttatcatcagccaaaagttgttcaggttaaactgatggactggggggagggagatgggtgatgaggagagggaaacgctctcaagtcctttcctaaatgcctttttcctgccccagactgtggtaaaatagagcagagaccagctggccagccttgtttgtttaagttgttgactaatctctgagttcatgtgctgagctggttcatgaagttcttgaacttttattatccttggacttctgacacaatgagaatgaaataagaaactgctactatatttaaaagcagcctataagattgagtgacttaaatgtttgactttgaatccaaagattcaaggaattaaaaaaattgtataatattcactgagagctactctgtgccaggcacttatttgaaatataatgttttaaatgcaaaatgctaataagcaaatgtaaataagagattctagaaagtggatatagatttgcgctctccattgtggcagccacatttcaggtgtccatagccacacatggctaatggctgccatactggacagtacagatagagaacattctcatcactgcagaatgttctagtggatacagataatgaacaataaatatggacttatatagaatattttttgtttcaaaacattttgcaaactgcagtttatcacacctggaagggcc

SEQ ID NO: 59566 - DNA, 915 bp, Homo sapiens
tgcctgaagcaaaattcccataactacttaaaggagttgaaaatactcctaagtgtttatacttattcttacacagtaccatctctcctgagtggccctagtttactgagattgagccagctctgagacatctccctcctccttaagtttggcaaatatcctaaaacgtttgaaaagatgtttaaaagatctgaaggaagctggtctcaatggaccagagacaaagtctgcacagccaggctcctgggaattgcacttcttggatgttgagttcaggagaggcagtactagagaccacagttacacaatcacattgatcttttgtgtactttgtttcctgcagaagaaattgtgtaatcccagcatttttttatgagttaaatagaagttgaaatttaaaaaaaaaaatcacattggttgttttcctgtctgtttaaatgtactctgacagcaaagatgaaaagttaatgcagtctaaatagaaaaataccacaatgagaagattttaaaaaaatattgtgaaatatcctcatctctattgtttttagacgttggggtttcaaatctgcaaaggctgactgcggcgttgtcaggattgtcaatgttggacagcgtccactaggtggcagtatctcagaaggtttcttttatccttgaatgggcagagatttctttggttgctctctttggtagttcggtttcctttttttgtcttgttttgaagggttaaatgaagctatcataatttacttatctaaaattgcacttatctaaaaatgcataaattcattgcaaggcctacttgttacagcgtgaccataaatgagtttattcattcatgtgaattttcttggtaacttattattaatgatcctagcgtgtaacagatgatgaatatgccgtatcctgagaagg

SEQ ID NO: 59567 - DNA, 885 bp, Homo sapiens
aaatgtggcctgtctttccaaataggatccccataatttatcagcgtctttgaaactggaaactacagttgttagctcttatatcataactacttagagtactgaaacaaaacatttggaggaaaaagcaacatttattccccgtaggtatgaatgacacattcccatgtctaaccccactgcaggctgaacaaggacctgacaggaaaccacaaggcagcagcccttgctaagcatgacaatgaatcagaaacctatcgacatcctctttcccatcaacaggacagaattacaaatctatttccagggacagctccatcaaacccaccatctgtcaatgggtatttcataatttatttggtttgattactaaagattcaggcatttttaaaattaggaagtgggagaaaaggattaggaggtcttcctggactctttgtgctatattaaagtatcctcctgatataacgccgcggccttcaggctttggagaagagtcaagtagcaaatatccatgttttgatcccgttccacaacatcatccattccactccaaagttcaagagccaaaggggttatagaaacaatctgtttaacttatgactcaaagcaaccgagacaggccagatctacaggctagttgagttttttccaaagccactacccacaaagatgagaagtccttcctggacttcccagtgatggtccaagccctccccacccccacttcatgacgcaacactcttggggatattctgtcacgccacttatcacagtgtatttaaactttgtgtgcctctttactccaaatggaatataatgtcctcaagattagggcttctgtatccttataacttcagtcctcagaagagtatccagcaaaga

SEQ ID NO: 59568 - DNA, 932 bp, Homo sapiens
gctggacagacagttgctaggcagatgtccttgcagaagtactttttgtgtaaggttgtagcttttgtgcaaagttgtagtttttgcagagccttttgtgagagttcttgttatgaggcatatgtgcatgagaatcttcccttcatggccccagctccacgtgtttgacacaagtgacctcattttgagtctgacaactttcattctatgaaaggaccgaaggaaagaggattgagtagcaagatcctcagtgttatacagttctgagaaaatcttggacacgaatatggggagtcttccagcaaaagttgcctaatagaggagttctgcatgggccaggaataggctagcactaaaaccatcccaagaaaattgtataaaattgagcaagagaaaaacaaaacaataaaatccaaccgggcttgcagcagcaatcattaagccagcttgccctttggtccacttccttgtagctggttgttgctcactagcccagctttgagctgtccaatggacaaccccagattttctagcccctcaccctccatgaatccccttaaaaacccttgcccagaacccatggaagaaacaaacttgaggcttgagaattcctcctgtttcctcactgagaatgtcgcgatgattaaactctttctctgctgcaagtgccattgtcagtgtatgggtctgttgctgcccagagggcgtataagcctggcagtcctgcaacagcactggcaccctggaatgctcagccattggctgggatgggtgcagcacaagccagcactcacaggcaaggtgtaatggatccaaaagggtggcagctggggccgtcagctgactatgctccccactgtaagttcttctgaagacaatctgaataacaagtttctctggctgtccagaggccatttaaactcctgtgacat

SEQ ID NO: 59569 - DNA, 1860 bp, Homo sapiens
ctacaggcacgtgccatcacacccagcttattttttatttttagtaaagactgggtttcaccatgttggccaggctggtttcgaactcctgacctcaggtgatctgcctgccttggcctcccaaagtgctgggataacaggcttgagccaacgcgcctggcccagcaccaaatttttaaaaacagtaagggaaaagttatttccatactggttggagtatgagttctggagatacctggaaaatgacatcttactggatgcctaggcagttccgacacacccatatctttcaatcctgtagccagtcacaaaaatcaggaaagtagtattcctggaaggaaccgggctggttatttaccaaaggactgcaaactagccgactcaatttataaggtgcggcatggatactttcatttaagcaaatgagctttcattcagtcaaaatccctgttgttgggcccctgtggttttaaactccaaggaccaaggtgcttgtgagtgagtatgtttggggcccgggctcccgccccgaagccaggttgttaaaatactcaccgcctctggcccgcgtgcacgacgctctcccgcgaagggcccttaggggctgcctccaaaccctctctctggtcttccacggggctcagctccccttgccgcccagaagggtcctggggatcccgggtcgggcgggaggcaggggaggcgccgagcccggagttcaccactctattgcgggtgttcatggttcacagcccgcgggtcccgggccgccgtcgctgcgggagggatgcggctgggacgcttagcgagtctcaagatgggattccaaagtgcagaggcagcggttttaacagctgagtttcggtttctcagaatcagcagcagactgcgcccgccccagagaacttccccacgtattctccactgaggccccgtccgaccttatcgcgggttaacagcccaggatgttgacttgagctggcttggtcggctacaggtgagacggtttaaagtctcacaatcaccttagaggttaatcagaataactgggatcagccacggacacctggtgagcgattagcccgcagagtgactacaatcctgaaagatacttgagaaactgtttaacaggcaactctaatttgaggttaccgctggatatttgagactgtaaaaaatatattaaccttaaaataccagagattaggtcaataactaaaatcatctcaacaaaatgtcgccttttatcagtaatgactgctgtgtggctgttaccaatgcacatactttcaagttagaggaaatggaaactgaaatcaaaagaaaacaaaaacctacaaagccggagaagtaagctaaggtagacatgattctccaggcagccttgctaagtaattgactagacattcgagaactattaaaaatacctgctctgtgcagaacagtgtgcaacggtgatgtggggacattttaaaatatggatgtgtaaggctcagttcctgtaggttcaggggtgagctctggcattcatatttttgaaaagctcccagatgattctgatgtgtgccagggttggtcaccagggtcacaatgccgtctacacaaagatgagtgaaggctcttccctcatgctacctgcattctaggagtatcctagtagacaggtaaacaaatgggaatgccactttgggataaatgaaatgacaggcagctgtggaggcacagagaaactggggattagccctctgagtaattcaggaacagggacatttgagaatgagccaccaaagacataggaattcaccaagaagaaggagatgctatggcagaggcttgtcacttaaaatgacatggtgtgta

SEQ ID NO: 59570 - DNA, 1553 bp, Homo sapiens
ccctgcctcaggctcctgagtagctgggattacagggacgcaccaccacacccagctaatctttgtatttttagtagagacgaggtttcaccatgtcggccaagctggtgtgatccacccgcctcggtctcccaaagtgctgggattacagcgtgagccaccgcacccggccacaactttcttctgtgtaatttcaccttaaatacagccatttacttgggggtggagtaagcaaattgcctctttaatttctctcccggggtggtagaactgtggcattaaacagaagtgcgaacagaagttgagagtgggaagaaaggctgcccggaagggggtcaggaaagctcaggcaagcccaccctcaggcactacagctagactccgagcttactgggcagtcatctgattcgaccaacatcagttcgcagggcttaagcccagtcccttacggcggcctggggagggaccaggcccaagtatataaagctccctgagggtccgcgttggctttgcgcctgtgagtgtgattcaagaacgtcccagtgcccttggctcctttcggagtgtgaccccgtgcttgcacgggacacgttacccagctcgggtgagaagggtatcttccgggaacctcgcctttaatagcacaacgagcgcagagtccactggatctgcgagaagaaaccgcgctaactagtttgtccctacggccgcctcgtagtcactgccgcggcgccttgagtctccgggccgccttgccatggctgcccgtggtgtcatcgctccagttggcgagagtttgcgctacgctgagtacttgcagccctcggccaaacggccagacgccgacgtcgaccagcagagactggtgagtcctgccagcggcccccacccctctctggctcccttgtagtttctgcttcagccccctctaccgcctcacccttgaacctttgtactcccccgcattcgctcacggtctgtgccctagcgctcacttgttcagtggagagaccgctttgtgctgggctttgacgcctgggcgtggaagacggagcagttctgaggatctgtctcctcaaggagcttccagtcttgtctgggacacaaaccagaaaacaggcaattgcaaatacagtaaaataagtgctgtatgtggattttcctatctcataggaggccctaaaaacgtcttgcaggggacgtggtgggatcagggacgcttcttggagaaagctgtagttaaaaattaagatctgaatgaataaaaacagtccattcagcaaggagaaggggaaaaagtgtttcgggtaccaggactactgtctccaaagtctccggcacagaaacagggcccagttggaaactccaagtggtgtattcaggatgaactgtagagctggaaaaaggaagggtctaacagaaaactgtccaacagaagcatattgtgagccacatacgtatttttacgttttttttttttttttttttttttgagacggagtctcgctctgtcgcccaggctggagtgcagtggcgcgatctcggctcactgc

SEQ ID NO: 59571 - DNA, 1441 bp, Homo sapiens
gtctcacttattgttattggtatgttctgagtttctagttctaccttgtttaatcttggagggttgtatatttcctggaatttatccatctcctctaggttttctagtttctctgtgtaagggtgttcatagtactcttgaatgatctttttatttctgtggtattggttgtaatattgttataggaaatagaaataaagtatttgggtagacggggagaagagagtccctggcagaaaactttccttctaacataaagtagctcagaaatagctcccttctaacctcatgcagttcaaagaaatcacttctctaactaaacaagcagcctgaaagatcaggctgtaaatcacagataaacccctggagcacagaaggagggcggggagtctcctgggtaatcaccaaacttcacaatgggccccagtaaaaacagtgggccttaataagcacattcctttccctttaggacatcaagatagagaagctaaaagtggacttggggaggtgggggtggagacgtcgtgggggaggggtgttggggggatgcctgcagctgcaagaagatgtctgggaacagacacagaaactctccctctcagataagcaaaagaaggcatcacagactaagtctgcccatgtgatccaggaataaagtgagagctgataaaaaaaaaaactctgctctataaagatagcacacctggtcccaactaaatcgtcaggccctaggaggataagacatcccctcctcactggcaccacccccgccacctgccactaactccctcctcactagcccatttataaaaaccctgacatttttactaagcaactcactcgggacccatctcttcaagggagagctgttctttctttttgcctattcaactttgctccaaactcaagtctgtgtgtgtagtgtgtgttcgcgacctccgtctccttgactgttcgaccaagagccttggtatttaccccagacaacgaggctgcttcagtatctcccgtttcatttctaatttagcgtatttggatcttctctcttcttttcttggttaatctaagggtctaccaattttacttatcttttcaaagaactgaaccagtttttgtttcacttttgttttgttgttgttgctgtttcaatttcctttagttcttctctgatccttctttctattctcttgctgggtttgggtttggtttgttcttgtttctctttttccttgaggtgtgaccttacattgtctatttgtgctccttcagaatttttgatgtattacatacattttgatttaatattatgaactttcctcttagcactgcttttgttttatcccagaggttttggtaggttgtgtcactaatgtcagttcagttcaaatacttttttatttttcatcttgatttcattgttgacccaaagatcattcaggag

SEQ ID NO: 59572 - DNA, 1108 bp, Homo sapiens
cattatcagctgtgcaaagaaagtgacaccagaaaattaggtgtgggaaatggctgaaaataaatttttgtaattagttttaaataagcattcagacgtattttggtaaaaaggaaatttttctttttcaatgtagtgagataaaaaaataatgcagtaaaaacatttcgtgtccttgatctaatgctttcaaggctaatatcttttagattactgcttttcttaaattgatgaagaaagaggttggtggttatgaaatgagtagttttacagtaatgcatagtgaatatagaaggggagaggacagattgcttagagatgtcttacaggctgtctaatgcagtcttaatcaatgtgtattttgcctattcttaccagtccagtttgtgcaagttaaaaacagaaaccaaaagtaaacatttagaaagcttataatatcgccacgatacccaaatgtgtgatacttttgtgctatgtaaaagtattggtccactaaagattggaaatgtttaaaatatttaaaaagtacacctttgccgtagcttgagaggcactgatctaatcaatgctgcctcctaaatctgggctttctgctctgtcccggggaaaatgtcctattagctctccttcaagacttttagtgattaagagcttcctgtttcacaaggcagcttgctttactggtggacagctctaactactagaaagttctttcttgcatttagatgaaatctgcctgcctgcagtggggagattctcaaccttttcccacttacacacctttcagtaaacacgcagtattctcacacttccttattagagtgtttaagtcaaaattaaatattgggatcaaaaacaagtcaaagtaattatactgttgaatggattttctctaattattctcattgtaaagtaagctaatttttatctgaagtcctgataataatatattgtaatttcttacagtatattacatttaaaaatgtgttctaaatatttagaaagagataatctccaagagtcagcatggattcactaagaaaaggtgatgcctaattaacttggtttttttttttttttgatagatttactggactgtttgttttgg

SEQ ID NO: 59573 - DNA, 719 bp, Homo sapiens
tcaccatggttagataagtaccctgatgcacagggaagatactttttaaatgttgctatgaatcagtccttgttcatgtgtctgcaggagtctcatgggttatgctgaactcattttcctcactgttagacttaagaggaaaccagctgcttactttgaaacatacctcattgccagtattttgaaactttatcgaaatttgattgtcttctggaagaaactttcacacaacactggcaggcttgggcaatctaaacaagtacaggagtgaggatagcgatgctgggaatgaggttataaattccgcatagcaaagctgctaggaagtttgacagggttcagactaattgtactgcagattactttcagtaaatgtttgcacgggtgacgcacaagggaggtatgcaatggggtgtttggactgattcataaatcagagctgtttcattcacttacttgttcctgcaggacttttagtaacgcttgtgtatgggactgctcttcctttgcttgttccaattctgactttttgttgtttaactcctcctggatggttagcaattgctgtgaaattaaaggatatttagcataagtaggattgaaggtcaggtgatttaaaaatatccacaatacccattcaaaattatgagtagaagatgtttacaagtcttgaagcttaattcagacctcagttgaccttgtgtgttttccgcactaag

SEQ ID NO: 59574 - DNA, 697 bp, Homo sapiens
actgctcgatgttgttgtgcattacttttctttgcagccatatgtctggagaaagtttctgctatggcaggcttgtggcttgcacccaggagaggccaggctgaacctctggaactaattgcccttgaccgggccccgggaacagccttttcactgtgggagaggaggcccctcccatgtacacatgcttaccacaccagtctctagattcgcagaggcttttctccttggcgagtggccaggcatgcctgcttccctctctcactgctgacggatgagcaaacagttcctgtctattctcctagaggtagagaaaggcagagactctgtccttggcttgcatcaccactcatatcaggccaccctccacactttgccctcccttttcaagccgcccttttttccagtgaaccagaggatactccaaatgtgcccgacacagacctgtgaggggacttctccacctgggtctcacacgctccacttaaactacctccctctcacttctcctttctttgctcctttatcattgcctatgtcagtcacttcctgtccactacagatttttatactttactccatttttgttttcttctcattcccacattactttacctcacctcaacccgttttgtccttctttcccacctaataggtgggaaaagaggtaacctttctcacatcctcacaaaaaaag

SEQ ID NO: 59575 - DNA, 557 bp, Homo sapiens
aagcaacagttagcagggatttgtctgaggtttgaacaaaagaccagatgggaattcttgctgtcaggctgtgtccccaaatatgcagggctgaaagaaaaacaactgcctgcctttgggccagatcttcagggccccgtggaataaaaaaggttagttgccttcctttccctttaatcagtcctgtgctttcttcagaaaccacatgccacattctctggtccatctcgttttgaaaagcacgaaaagactttgaactgctcggggcctggcatttgaactccggttctttcatctcttccctcagaacttggcatacaacatgccctgcactttgctcattaattctgctgaccaagtaacaagactggtgaaagttttttttaaaagttcaggctctacttcacgttctcatcagatgcctggggaataaaccgagagaggtgtcgggggatcacatctccgtcgatgcttctgcagcagaggccgggccccgatcctataagcatgtacgtgccgcaagacctcagtgagcatactattcagagtcatcatta

SEQ ID NO: 59576 - DNA, 486 bp, Homo sapiens
gtgtacacaattttcccatattcttttacattttaaactcatgctgtacaaaatttaggcaagagtaagccatcaatgctttacacaatgtctgttatgccaaagcattgcttgcagcattcatcatttgctaaaaacttctcaactgctccagtgtcctttgtctgaaaactcttggatttggaaataacactttttttttttttaccttgaactagaaaccactgattgttgctcaatgtgttatatttgaagctttgtgtttgcctgccttgtattttgcttccccagttttttgtcaatgactcatagcttatcttttttctccactctatctttagttcctttcttccaaaatataagaagacagacaatagatactggggggaaggacatttagggaataaatatttgaaaaggctcttttcattcagatatggcctaaaaatactgaaagcatttacttgacaggaaaacactgatatt

SEQ ID NO: 59577 - DNA, 2340 bp, Homo sapiens
aaagaaaacatgaattttgacataactggtgctagggttattgaagggtgggtttccattctgggttagtgctcccagtctctagtcaagcacaagaacatgcctaccccagagggctcttccaaattcccagctatctgagattatgagacaaaggttctttagcgcctaccaaatgagcaacaatgaagataaaagggacctctccttccatcataaccagttccccaggaagcaccatttctcttactcttggaaggtcggatattttttccctttaccatacactggccttccatgtcctaactgctattttcaaataaatgaacgttatattcttggaggacagatcagggatgctaaactgcacctttatcatgattttagggatgagcgccttttacttaagtcctgctagtggcacatattttaaaaggccatagaggacatccgtgttgtcaacacaagtgaaggcgctcggaagagtgttggtcagcaagaatcagcacaaagacattggaggagagacaacagcttgtttctggaaacaaatgaacaacaaaaaaacactaaaacatctcgagggggcccctgacttgagccctgcatgggaaaagctgccaagagctagcatgacaagggactggccctgggctgcggtgaggaaacccagcgtcctgaccacactgctgggtcagcgaggcgtccctcagagaccggaaacgcggacttcagctcgcttgggaaacggcttccattagcagaagggagactgcggtttagtcccgaggtcgctccagcagcccggcctcacgcgacccaccattcccgccgccccctcacggtgcccgccgttcccgccgcccggctttctaaccgggcccctagttccccgccccgtgccctctggagacctgcagctcctgccgccctgcgcccgctcccagggcccgtcgttccgccgccctatccctcctcaaggggcccctagctgcctcctcgcgaccctttccggactcggcctgcccactcctgcccgctaacccgcctggctcccgggcgagagccctcgcgcggctctggttcctgttcctctaacgccgccggggctgcgggatgccgactccgcggaccgcccagacccggaactgctgaggcagcagcgggctcgcggcgcttggctcatcccgggattccccagctctcgcgctgggcccgccgcgttcgcaccaagcacgccaggcggccctggcctacctccctcccgcctcccggcagctggcacgagggaacctggccgtcaggtttcccctgggatcctgggacggtatcaggcggggaatctgtgcggccgcggcgaggtaggtgaggtgaggcggggcgaggtgggcgaggggggcgaggtgaggcggggcgaggcggggcgaggcgaggcggggcgaggtgggcgaggtgggcgaggtgaggcggggcgggtgtcgtcgcgctgggccgagcttacgactccagctgacccgctcgcggctgcccaatttcgttgaggctcaggacgagggacggggcggcaaattgtcacagaggtcgccgtagaccggtgtgcaaccgaaggtgaagagcgggaaggcgaggaccgaatcgcctctggtgtgcgttgtccgacaggaagtcccgaatgggctgtgagccgccggtggaggtgcccgggcaggtgcagagccacagcctgcgccccgtgagccgaggcgggtaggaggaacagggacctggcggcgacacacgttgggcggaaattcacaatgaacagggaaggggggacggtcacccactcaaaactggctaaatgaacctcagagggagccccgagagatggggagcaaaggttaggggaagcggcaggagaaaaccttcttggggcaaagggcgtcaccaaagggggtcaccggagccccgcaggttggggtgggagggctgggctggaggtgagcaaagctgcacggggagaatgaattaagaaagttgagaggaagcctgtctcatccaaatcactatagcttttgtggtcattgctaagtgtggagtactgcgcaaatcctgaagggaactctattagccatctcagcttttatcatcttaaaacgcgaatttcgcgtgcagctccatttagcttcgtaaacttaagcccccgcatatgaaaggatgagacctaatatgacaatcatgtcaggactaatgatatatcacacaggttgacactctgcaatttaaaaacaggactttgtctaaactccacaagtaattccttactcaaaagttctgtgtaaacaaaacagaggaactgtc

SEQ ID NO: 59578 - DNA, 617 bp, Homo sapiens
atttaattttcttttaaaatacactttattttttagagcagttttaggttcacagcaaaaatgagcagaaagtacagagagttcccacataccccctcacacacatacagagtgatgcatttgttaccatcgatgaacccacattggctcattcatttttatgctgtataaaaccatctgggatcgtgtgtttgcccagtttcagctaccttgtgttaagagtcctcttttgacctgcagttaaaattaaaaagtctctgcttctttgtcagcattcattctgttctcaacatgctgcagtaaagttcacttacccctgaactttgaccattctagcacatttcagcgtttgcatgctcaaaaccaagcaattaactttaatatgcattcttaaaggaaatcaggtacaatctctggaagccgtaaaggatcacattgtcacattgagtctgaaatctttgtgatgctgctcacactcatggtgctctctcctcctgcccaacagaccaaggcctggctcaggtcccaccacagctgtgaagcctgttctaacaagctccatcccacaacaatttttttttcatctttggcatcatatctggtatcaaacgctccca

SEQ ID NO: 59579 - DNA, 2395 bp, Homo sapiens
tgcttccttcccattcgacagtatatatcaatcaacacgactttcttgagttaaccccaacatcttcaagtacgatttagaggcagcccagagaacctggtgcaagccctgagctgacacagtgcaggatgagaaggcagacactagggaaggaagttcatctctctgcagatactgtaggtaactgagtgtgcatggggctactgccctagccgggccatgacccgttcaactttccaccaaatatctctcctctgcgccagcttctgaggattggacagaagccaggtggtgctgcaaccatgaagacccattatttgctaacttgggctactctccttttggaaccctcacctgcaggtgacccccatgctgcacagcaggctcagggtggtggtggagcctcctgtgcacgaagctcctgtggggtgctgctgccctgggctcccttttcctcatctgtgtgctctgtctgtttactctttacctacggattcatgaaacacacgtgaagcaaattggcagcagggattggtggccagacagatccaaggttgaagtccctgatcttgtacttgcacaagttgtctgttgtccctgggccctattttctttatctatccaatgaagctaaaaatccctaccttgcaggttgttgtgatgatgaaagctgtttctcgaccttaagtacacattagaattccctggcgagccttaacatgccaatgccctggtcctacccaatcagtctttggagagtagacccaggcaccagtattttgaagattcctgggagattcctaagcgaaccctaggttgtgaaccctgggttacagacaatgtgtataacctgagtgacatactgctttcagaatagactatcccattaataaatgataccaatattactataatattattgctgctcctaatcttccttctgccaagaaaggaagtacggttgtgggcctaaaatatccaaactgtaaataacagagcacatataagtgacatcactaggctccaagctgctcagtgagataataacaagagtgacttgaaatagccagtcagctgtgaggaccccagttctttaaaatacgtgcatgccatctctcacgtccctgcctcatccagcctgggtctatgccagtagaaacttttccagttaaagcccagtgcctttatttccagtactgattgtcacctgggagacagctgtcaacttgtgcaacccaagttacctttgctctgcagtaaatagatgagtcacagttggtcctagcaggtcaaggaacaagcagccctgggccatcctgtctggtggctgaggctgctgagacaatgcccttggtgcctatgaaggagtcataaagttgggcttgacactctttaaagttatcttagtttgctgattgtttggctagagggactggtgttgagcccttcctggctgtattagggctttgcatgataagtgtaattagggtgagaggaggctgagcaggcttcagtgtctgaggtggcaatgggtcaggcagagcagtgcaggtcattgacctcagtagaaaacccccaagctgcactttagataccaggtcccttctttttccaaactaaaaacgtcctgggtgttggtagcagaagggccgactataggttaatgttgctacttatcctgatttgtggggcagggagggctagctttagttttaagccaaatgtttaaatgtttctcaaatctatctacctctttacctccaaaccacccaagtctgggccagaatcattaaaagatggtgcacttgtgccgacttgacagccacagcctcccaccaggatccccacattctctcctgcctcacagagcagccaagatgatccagcctcacctcaggtcagaccatttcactcccagtgtgaaacccttccgtgattccttgatacttttgggatcaagcctgaccctttgatgtggtctccaagcctaggtcagcctgaccatcatcctcttaccgcctgacattgctgcaggtgggtggaaggcctcggctcctctcaactccaagcttcttttccttttaggtattggaaccacattcttccacccacctggggcactttctcaagcaaaactctcagccgccttcaattttgagcttaaactttacttcttttcttcctccccctagagttcctcacacatgagccccttgaactctgagtttgggatcctaaaacttcttaagctttattgttaccccttacctaaccagaatctaagttccatgaaggagggacctcatccatactccccatgccagtgaatacatttcgagtaaaccccaaaagtatttgccaatgataaggtaaaagcagtgggtttcacaaagga

SEQ ID NO: 59580 - DNA, 3740 bp, Homo sapiens
ggtaattcatggtgtgtatcatggcgtctatcttgttacacattagtaatactttgaatgtgtaaagtgcttctccctgttctgttggatttatctttgaagtagctcataaagataaagatatgagtatagaaaacattccttcactggccctattttataaattaaggaacaaagactggatgcaacatgtggcagattatgcgaaaaatctagtagctgagcaaacataagaattcaggttccctggattccaggacagagttgacttccccatctgaagtgatacatgagcacaataggttttcatcgtcattcagattataatggttccttttactctgataatattgctgatatttctagaaatagcttgttcatccatttattaatctcataaacccctgactgggggaaacagagtggaaagtggtcagaaatggggctggaacagtaatcaggaagccggaacctccattgcctcaagagctaagttcagtgtcaggcctttgtctcgagggcaacggggaactctgtaaaggtatttaagttggggaatgtagtgatcagcagcatttggcagcaatcaccctgggctggagtgggcctgacaggaatgggcaaatcttggggcaggaaatccagtcagaagattatgacgataaagcaggtgagagatgttggtgtcccaagggcaaagggggatcccatcaagacatgagaaccgccacgtcgttctttccccaatcccactgtttctagatttttccttctaggaggcctgcaaatgtgtttccgggaggaaaatccgtccctgctatttctccagccttcccttgttaccggtccggccctgcccctttaacattcaggaatgagagtggaagcagaaggcccaggtccccggaggtcccgacgcccggattccacagcctgtgagggtcccttgagcagagcgggacgaggccactggcactacgtcgtgacttcaccaacagcctgcagtactcgttaacgagatttcgccaggccccttggactaacgccaggattctcggtgcccgcagtcagcgctctgggattagacaacgccccacaggccgcggctctctgctgaccctcagcagcgatgagaccggcgcgcacaagccagcagccactagctctcccacaaggccgagcgcggccaaagggcagccccgcccgctccgcctcccccagctctattggctagtgcacctgccactcagccgcgcgccggactccggcttcgggcctggaggagggatcccaagcctcctcggctcggctcggctcggctcggctcggctcggctcggctcggctcggctcggctcggctcggctcggctcggctcggctcggctcggctcggctcggctcggctcggctcggctcggctcggctcggctcggctcggctcggctcggctcggctcggctcggctcggctcggctcgcttgtccttgaggtttactgtgtttggcatcgcagttccgacggcagccgccgtttcgcgacccacggcggacttgcataaacactttctagttggaatctcaccctgtgaggtgggcaaggtagtgatattcctgtttgacgccgacagaaataagagagattgactctcagaaccatgtggcgggattttaaaggaggatcttaacagtggctcggacagacccgtgttttctgctcctagcattaactacgtcgttaaacccttctgaatttatttcgtctgtgaaatggggaaaagatagccaccttgcataactggtgaagaattcgtaaactgacagcagaatctagtaagaggactggcccgtggtcggctcttaatggtgtgtatggggctatgaacattcccaggtcttctgacctctagtctgggactctttctgctaaactagggattcttagaggtccagagacttcgggagatccaggggcatcttcaagggggtccctgagttctaaactgcagaggaacactcttaagagagataataaatatttccaccacatctgttatggataatatatattttgtcatctatttgccagagactgttgtaagtgcttgtatacattaagtcacttaatctttacagtgaacactaaggtacatcctattataattcccattttacagagacgttaaatacctatctagctaaaaaatgtgggagctgttttacattcacgcaatctagctgataaagccacacaccttaatgtttgtactatatattattgtgcaagaggtgtatttgataatgattcttgtgtcaccatttacaagatgcttctggcttttattaaactctcaaagggcaggaaaagaaaaaaaaatacagaggaacctaaaccctaaatcagagacagactacatgcagatatacaaatggatgataagaaaccaaagttgtgggtaccatgtttgcaattccgttttagctgagtgctttggactatcacgtccctcagtggctccctggaggaagaatgattgaatgacaggataggaatggaatgtagccatcatcttatctgaccacacagacacctcccagcagatgaatgcatcacctcctcatgataattttgaagactttctgagaaagtgataatattagcctattacctcacaaccacaaggaacactacagtgactacaaaccctatgtgcctcattcaacaggtgtcacagaataaagaaaaagactgggagagagatgggagctgatagaccagaggagaccaaagactgaaactgaagactaaaccatggaaattgggaacaagcacttactcgcttagagggtgaaaaaagtgaatttgcctacagggccaatttggaagcacctctccctggaagccaggttagaattcctactaaggtgtccttggcctcttcagtggtggtggccttgaactacacagcacacttgcacactcagcttctgaatgtccagagcagtcctgagtcttgcctgagaaaaatactcaggttcttgggcttcatctctcccttctgccttcttttcctccacctttccaggtcagcctggggaatatgagatgtgaggagaggggtgagtggaggctgagttttgaccaatgttatatgacatttgaacctgacctatggcaaaaggaagatcctttgggaggcaggcctatgttctcatccctttttctgcccctttggatcaattagctctcaatcattttctctgggactggtaaagaacagagaggggcactggacaacatcagccaagtaaaagtagtgcgggggttgggtcccaagtgatctgtcaacatcctgaaatgatattttgagtgaccagagaaaatgcagtctccatgaaggagggaagtctagggtgattcctgtagagaaatattggttgtgagatttaaggggtgaacgtgagatagacaggaaatgaggcaagaggctgagagtcagtggcaccacttgctttggaaatggagcaaagtctccagcaaaggctgtgaagctcacaaaagcttggtcctggggtgaggtgtggggagggttggccatataggacaagagcagggctgcagacttaaaggcccaaggacaagcaatgtgactccctttccagcaagattgggacctcaccaaactaccatttcccaagcccctccatccaacaactggatattctctctatggcatgaataa

SEQ ID NO: 59581 - DNA, 861 bp, Homo sapiens
caagcttttctctaactctaggtcatgcatttctaaatcaaaggcagttgcctgtcttgcaggatttgttttctttcctttttgtttttctattttcctctaagcatacaaggaagaacagagatttcaaccattatttctcagtgaactaaacatcaaactataagttttcaagtcagccatgacctggcatctctccgtcttttgaaaacgaagccaaacaatctatggtgcggtctccttaagctgtgtccgaaatatgcagggttgtgcaatatgcaatgttttggtcagtcactaggtggcatctaattgaggcaccgggtgaactctcccagaaggagcgtgttttagagcacaccacagttctccattttggctgccattgtttggtgggcgtgttggagttaatccattgccatctgtctttattttgctaacttactcagtcggacgccacacaattgagttctgcaaatgtcggctctccagtacagcaattaccgagtctctctctaaacaatatcaccgcacggcattcttcctgccttgcctagagcttgaaacattcaggctcattttgactttctttgcttatagcgcttgtcatcttcaaagatgaaagaaaaatggtctgaactcaaagccacaacaaggcatggcttctctttccaaactgagtacataccaatcaacatgttcctattacataaaaaccccaggcaacacagccaaggatgtgggcttgtgcttgtgcagtccaggaagacaccaccgcctcctccaggatgcagacagagtgcattttgttgttgatgatgatgttgttcttttaatatttgagggactggtgggagaggt

SEQ ID NO: 59582 - DNA, 774 bp, Homo sapiens
tgagtgtacttatctccactcccagctttgcattgtgtcagtatttatttaacgtattcccaaagctgttaatccagttaattggtaaacattggctatgtcagaacctgtagcacagtaccgaaggaaggcctccagatagataccaaaatgcacgaatcagcagcaccctttggatatgtcctttcactcattaagtaagccctgcctggaatggaacttgagccatgtctgttactctggcctcatggagcacctgggagctcactagcaagctccttaactctctcctgctccagctccttctcagcactgttgtttccttcttctcctaacagataagtggaaattggagggccccgtgggcctgcctgaatccaactgccacaccccgggcaagcagagggccagggccctttgcccaagtttccttacaaacccatgaaggacagtttcagaaagcagcactctaaaggcactcagtgtcagagccaaggtaaacagcctgggacacagctgccggtccaaccggggttaggcaacgtggacagccagcgtgggaagccaagagaagccgaggaaagaaagagaagggaggtttgaagggggcagttgagagggaggctttggcagttcttgacttctgctgccattgcagtgggctttggaagccttgaaagggaccgtaaagatgagagccaaggaggtggccaccagaggatgcatttgattgggaatagacaaaagaggcatcatcctcacttcaaagccatt

SEQ ID NO: 59583 - DNA, 739 bp, Homo sapiens
ctgcacagctctgagaatgcccgtggcctggcctgtgctgttgttacatttatatctaattcatggagttggtaactgagtggtcggggcccagccagactgcagcagcctgtgcagttcccccaggagcccgttggccaggtttaccttgcctagtttcatctcaaagaaaaacatcgatttaacaaatatcaaaccttggacccctgagacattgaagcaatcaggttctgtggcctgtaggaagcttctgcaatgccaacctgctaaatggtaccaaatgcccaaacattagtcataggcactattatcaatgacctactgcatgccaagtgcttgtatataaactgtttcacttgatcctattccaaaatctctctcctgtcatcctcacaggcaaccgctctcattgaagtcatgatttctgcctttatctctgactggatttccctgactcatccacacatagcctgaataaacttggaaatgtataaatatgagcaagtcattccccttcttaagactttatgcattgccggtttcctttgggtcacatctgctctcctgggctcagcattcgaggccctctgttgctgccgctgccctcctcctgtccctcggcctctcttcttatgcctaccctgagtaggtgcacccctgtgcctttccaagagaacttcccctgcttgtggccaccggagagttcaggttcctcctttgggatcgctggcatcctact

SEQ ID NO: 59584 - DNA, 1225 bp, Homo sapiens
tcccaagtagctggaactacaggcgcccaccaccacgcccggctaattttttatatttttagtagagactgggtttcactgtgttagccaggatggtctcgatctctggatctcatgaaccgctcgccttggcctcccataaattggacttttaacatttatcctcaagaggaaaatgaatgggctaaattataatgtcgaagtataggtcaaatttggcaactctcctcttccctcttagccatgaccataatgaaaaaagccagcaagtgtgaccaggctgagagacgcttgaccaaggtgtcttctcggggcgcatgctgacaggtcgtaagggggctcccagctgatctccccgggtcagtcactctgaaggctgacaacaagttggaagctggaagacactgaatgcagttgcggcatggcgcacgtggatctctctagaagccgagtgtccaggacctttcttccttccctgctcagaccacagtaatttttctcctggtttccaatcactctgtgagccttcaacttgggaaactcgaactgcacattgagggccacactgcctaccccaccctttaagctgccaccgagttgtttgcataccatcgaatgtagccagctcgccaactgaccgccgactgtggctaccaccctgggaaacaaaatgaagcatgtcatagttttccgatgaaagacaatcaaagatgcaaaaggatcacaattgcaacagtgtgagaagcagccagcaaataaccattcactatggagtgggtgaccttttcattgaaagcaacagctatgactaaacagcctcttacaagagggtgttgcaactgaaattctctaggcctgactcatggcttttcaaccttggtccaggctcctctccacctggtgggagagcaggttgtctctcacaacaaactctgggaaagccccgccccaggcctgcctcagaacacaggaacatgctgccagtgttttcctttatcatttaaagtttgtttgtgtgctgggcaaggagacgcttgcaagcaggttcttgaactgggtgtaatgaaagctgtagggatcgcatggcgccctagacccactgccaaggccaaggggagggacaaaggcttaatggaagaaagtggctgcagctgctctccaaagctgtcattactttcttgctggaaactttgaaatattatttgtttcctgtttcaaacttctg

SEQ ID NO: 59585 - DNA, 650 bp, Homo sapiens
gaggaagggacactggactgagagccctgatggggatcctggatcccagggtggctggcctcctcttttacctaccttatgaggtgaatgtgaaggccaaacatgagttgtgagcatgttttttgtaaatggtaaaatgtcctacaagtgggaggcatcattgttttatttttttaaaaaatgaataaaaataagtttctgctttgaaacattctgttcactatgtcatgcctgcaaggtaggatttggtctttggcatgagcaaatgattaaaccaaaccaccagtgacattcctcctggcctgaatcaagtccaggatcaaagcgctgcctcaagatcaaaaggctctgcaatccagatgccaagcctggatctgcctcactgagtgctcctgaaggcgaccagtcccacaaaacagtagaaatcccctctttgttccaaagagagtagcactttgagaaacttccttccattcctgggaagcaatgagtgctcacagtgttagtgggcaaagtcaggagagaagcgggcacacactcccacatactactcaaaatgaccaacggaaatttcagaaacaagaactctctcctttagaaggaaatacaagtgcttgccttttctgttttatcatggacctctaatgata

SEQ ID NO: 59586 - DNA, 3978 bp, Homo sapiens
aaataagtgcattttattgcatgtaaaaataactcaatgaagttgatttaaaacaaatattcaattgtttctcactactttagaaaaaagttttaaaaagttagtatgatatacaacgtcttcaatgatatgaccccttctatctctctgactttttctttctaggcctccgcctggtttgctccagtcatactctaatgcctactccctccgcatcatcacactttctcgtgtctctatatctttataaatgcaattcccacttcctggaatctgaaccctaccccctgcctccttgtaatttgactcactcctactcatccttcaaggtcaactcaagactgcctggacttttctccaaggctggatccagcacctctcttgtgtgtcctcagaccatcctgtatagctctctagtctgatgttttcacactctggtaccaaagttaatattctttcttaggctctgagcatcttgaaaccaaggtctgtctatgttcttaattcctagcacaaagtttggtacatgttgcttagtatgtgtagaatggatagatgaatgactgaatgaatcaactaatgccctgtctactcagaaggatataatgagaatcaagtgacataagggtgtgactccctgcactctattatttgggtgtttgatttggccccataatatggtggtgtggccaagactatgccctctgaacctccacctccatccctgggtacagccagtaaacagaactttgcaaattcctatcttggaatcacaatgacaaacgctccaagatggcaggagcctctgagcaccttgagaggcaatcaagagaagcctgtctcagcagactcacctcactgccaggtggtggctgcacactctctgtggggtatcgcacctcaaaccacagctctgcaatcctacaatatctttcaccatcccacatagtatttgttaattgaatcctgtaatttaattgcattcgcatttctaagcacacttgttttcatagaacgtatactctttagcacctgaagattctgacaagtaaatgtcatccatgcctgtccaggtagatacgaggtagcgttgccctcactcccagacactcccctgtccattacttaaccacgtggagttggagtagccgttttctatgattatgatccattttcttcacccttgttggagctttcataagaatcagcaggaactctgcaaaccctcctccctgtcactacctcaccacttcaccaacatgtccccagcctccagttccatcccatcaatgccatttctggcacatatgcccactggatccacccagtgacaaccacctgcatgccattttcttgaatgaaaggaatgaaggcattttctactctatcatcattccttgaccttcacctgttttggtttttaaagtgttttctcttctgcattagccggagttcattagagagccgtccagcctccatacctggagttggtcactgatggccttttttactgtctgccactgaaggttagtctggtcaaatgatcttcagtgaagagcattcaacaagtcagtgctcaaaagcaagggggtgaatctttggaggagagactggggaagaccgatgagaggggagaattaatggttaaatctacagtagggtttcaaattcttttttcaagtttaggggaaggattcctctgttaattcatttattcattcttacaatctggttagacctatggcctcccagaaaacagctaaattagcctcttctctaatgtaggcccagggctctggctctatcggggattccaaagcccctcaacaccacccctgagcttaccctggagagtaatgttttccgggcattcacatcaactgagagcttaaatatggttcttctgggagagggccaggagacgggatggccattatcagcaatctgctctctgcggagtctgagccatgtgaacaaacaacctcacacactacgagtggggagagaagcgattggaatgttcactcctattttcctaaaatatccagtgaaccatgaacctaaactctacacctgaggcaaaccgggagttgctattttaacacagcacagcttagaaaacaatccacacatgttctgtgacttgggccagccccagagggattcctggcagcattgcatgggtgactaatattcacagcctctctgagggtgaagggtatgctattcacctgtctgccaccactcacttcaatatgctttgccatgtgggatctgagaggagtctttttctgggagttttaaatatcttttcaatggggcttttaagatacttataagtactgttttctgatctaggatcgctccacctagtctattggcatatctcttatacaggaggacaagagagtgatgaaaaatgagacaggaaatgcacccatttatttcgcaaacatctgcgttgggccattggggaataccaagatgactcagccacagttgaaggagggcagatatgaaaacaaatcattaaaataatgtagtcaaatgctaaataaggtttgtaccaaaggctgtgggaacacaaagaagggatcattaattttgtcagaggcagtcaaggaagactttgtagagagtgacctctgagttgtactttaacagctgtgttggaaagttcaggtgagagaggaaaggaacggtgttcaagacagagggaacagcagccgcaaagatgtggaagcttgaagacccctgaaaactttgctgagtttgggccacaggttacacgggagcaaatggggcaggtatgaggctgacaccgtgggttggggtgagatatgaaggcatgtggtcaggttaaagggtccagacttaattcattgggcaattgagaaaaaacagaggacttggagcataggtgtgaaacatcagattttagaaagacatatcagtagacaatcactgtatttcaggctttagtgattcctcacttggtccatgatacaagcctccatgtcacactttgcttgctgctttgtatatctgctcagctgaggcatttttacataaccgtatgttaaaagggtcattattcccactgtacagttggcgaaagagaatctcagggagcttaaaaagaataccctttggcaaagccaagattcacaccgaagtctgttggatcaccaagtctgtgtttcattatactgaattagaagataataacaacgagaaagaaaaaaatggtgattggcagccctggctgcacattagtttctccttgggagcttttttaaatcatgatgtccaggctgcaccctagactgattaaaccagaatacgtaggagtggaacccagacatcaggatttgcttaaagctcctcaggtgactttagtgtgcagccaagtttgagaatgactaagagatgtttcaaaggaagacttggtaatagttggctagcaagcgggaagaccgagagagaaggaggaaagaggtgactttaagatttttaacttggatgaaggcagaaagggatgtgagtggggaaatgaggagtttattctcacagtcatttactttgccatcatagtgtgacatccaggtggaaatacccaatagatgccttggcaaagtgaaccacgggcttcagaggagtcaaggctatatcaaggtcaacacctcatccagtgctgtgctgggggcagctcacaccagctccagggaagcaactattaaatattctgaaattttgcaagccagttgttaacacagccattaataaaaattaaatcaaaagaattaaataaattatatttttgaaaatgtaataaactctcaaaactcattacttctcattactacactttagtattgcctgtgctcttgaagttgtttatgtatactttatctgtgtggtgggaaagccatataatggtagcttactgtaggggatctttgccaactctgcaatcac

SEQ ID NO: 59587 - DNA, 1807 bp, Homo sapiens
ttcactcaacaatcaattctgagcccctgctgaatggcaaggactgccctgggcactgaggactcaatggctataaaaacaaagagcaaaatggccaacatggacccaggaatagtgggcttataggagatgctctctgatgtcccttctcatctaatattctctaaataattcctaagtggcaggagggcttccctacatctccccagctaatgaattcggccgctactgagtaagagatcggtttgttttctttacatttgagttctcaaacttaactactttgcacttgcagtgtgggtgtctgaaatgttaattgagcctcaccacagcccctggaaagaggtaagtgttgcaacatctgccacaatttaaaacacttactcaggtgcctgctcagtgcctatgcactaagtcaaagaggcacaggccagctgtccagaagcggccagaaacgctggaactcacccacacaaaggataaacaagcagctgagcaaattctgatagaatggtaatgtcaagcaaataaagagaatgtaaatgaggaactggtgaggaggccaccctttgagaagatggaggtgagaggggaaagagaggagttagcacacgccaggcaacggagtgggggtaatcactcactctgtctctctccatcagtctggggttgccagggtctttgaatggcagagaaaagagagtggagagaactgggatggggggacacagggccctggccctcagtgactgctccccaaaggcattaattagatatcactgcaaaatagcaaaaccagagtaaaacctcccccaggacttcactcacacaatgaccaggctctttcaccaagccctcccaggtccctccctccctgcttttacatcttacataaggaggcttctattgtgctaatatccaaggaaaaaagtgactaagggtgagtgtgcgactaaggaaaataaagaaggaagagagcctccaaggcttgcccccacccccagtttcttggctcactccacgattccgtcagttcgcaggctctgacataaaaggcaggaagctacacacgctaaacaaagctccttagatgtcaggaaattaacctgggaaatcggagccaagagagattaaaggcattgcaggccgagttcaaaaacctctatggcgttacatcaaaagctgttttctgggcaccccaggctcggctctgccaaaccgtacatcccgaaaaacctggccacagggctggcacgcctgtgtggtgtgccttttccctgccacagactgaagcctcactcagatctacagcttttgactcttcctgtcataggagtctaagccctgcctgccgtaggcaagtctgccctgagaagagcagcttgctgccctggattccttataaaggaggaagatcgcacacctaacctcagagggggtccaatgagtggccccagggaaaggaagaaagtccttaaaaggaggaagagacctgctagcttcagctgcactcatacacacacaaaaaaaaagagaaagaaaggaagaaaggaagagaaagaaagaaagaaaggaagagaaagaaagacagaaagaaagaaagaaagaaagaaagaaagaaagaaagaaagaaggaaagaaggaaggaaggaaggaaaaaagaaaagagaaaagaaaaagaaaagagaagaaaagaaaagaaaaaaaagagaaaaagagaaaagaaaagaagtgaggcagcctgggatccctgaccctcccagctaagaaaacaaaccgccttgtggaaggtgaaagggtcagagca

SEQ ID NO: 59588 - DNA, 2835 bp, Homo sapiens
gaaaaaaatggatttacagccgaagtctttcctgtttggggctacagcatcattctgtcattctaaccacatttatcctgaacctccccccaccacccgctgcccatgtgctggccaccgtgctgggatcaacaaaactgaatgagacacaggacctgatactggggagctgaccatctagcaggtgacgtatggatggatgaagcatcttaggacatctaaagaaagagatcactcctccatactggtaagtccacagacagctttacggagacatttgagtaaagtcctaaaaaggggcagggatgcagccatgtgcaatgggaagaaaataattcatcagctgtgaccatgaatgtagatagagatgtttgggcctcatccagatcccctctctgccctgtggggctcccatctcctggctgctgagaatttggttgttctctacccacagctgctccccttttctggaggtttgcccttggctgaccagagcacctcagcggggaggttaaccgcactctgcctctgaggatggccaacagccagtgatggcacaaagggccagccccctggcctcaagacaggcacaattctgaagtgggctcatgaagagactacccaatccccccagtggacagagctgaggttaatctccacctgagacctgatcttcgctgagttccttcccctcttctatcttgctcctctcactccctagtcgatatttcctgagaacacctcttcagtaaagcacacacatccaaatcctatccaaggctttgcttctaggagcccatcctagaaggcagtaggcccctggctttccctcattcagctgcacagttgcactaacaaggaattcctgaggtggccttctagcacctctgtaagccccctatcctactccacccttacccctctgcttcacccgaaactgacccctcactctttccccacctcatgtcttatttttgttagaaaagcttactccccacttacccatttctttcaagatctaactctagttttgcttattccaaggtttcccatgctagactctacccatgccccttacgtgtgtattttttaaccacttaagagatgtgccaaagcatgtatcaatttttatttttcagacaattgaatcagaacttagtcatccaaatagatgttgccactttgaaaatattcatcttgggggattaatcacttccttcaatgcaaccactgcccatcataatttagggattcctctttgtggtttgccctcagtgtatgcatcacccactgttgaacacggtagcctacagcaatgtctcagaggttttagaacatcattcagaaccatgactggtgattgcaggttactaagagcacatacatagatattttgtagttccacaatttacacatctccagctgtcccttgttgagtgaaaccctttctctcattatgctgctctaaatccaaccaattccagtgatggcaaatggttgctctgtgaaagtgacttttctttcctctttgagacatttggatccatgcctgatgagtaatgtaggtactgattcattcattcaacaaatatttattgaacactttccacatggcaagccctgtgctacaagtgaggctgtaaaatcaaataaaacatggtttttactcacatgaggtttagagtctatctgaggaaaataacaagtcaattgacaatgtagtatagttcagtaaatgctatagagagatacacatgggtctacggaagagagaggagtaaagggaggctggaggagcagggaagcttctggaggctatgttttaaagggtgattcagagttttctagataaagaagtttggtggggtcaatgagtagagggactgctggtaggaaggcatagatagaattctgaagcagagaaatatttgagacacttcccgtgaagggtggatttggcagaatgagcatagacaagagaggtggtcaggctactgagaggccaagaagggtttatctccagaggcacaggaaagccactgagggatcagactggggtaaaaaccaaccaacaaaccaaacccatgtagcgtgactaacaactaatgagtcattttaatgtgtgtgctcagtacttctgcacatgtgccatcctgatgaatccttcaacaactctatgagagacacatgactatcctcactttccagaggaggaaacagagactgggaaagtttactaacttgcttaagatcacacaggtagtaaatagcagagttgggattcaaatcctcgactccaaagctcaggatgagcctctaaaagaagtccagcaaaggatacgaacaaatacgtcatgttaaaggaaaaacttcaaccgcattaaatttaaaggagtttaattgagcaatgaatgattcatgaatctggtagcccccagaatcacaaccaattcagagagactccaggggtgcctcgtagtcagaacacaaatttatagaccaaaaaaagggaagtgacatacagaaatcaaaggtgacatacagaaacagttggattggttacaactctgcatttgccttacttgaacacagtttgaacactcagcagtgtatgagtggttgaagtatggctgctaggattggccaagactcagctattgttacaggtgcatactcctaagttaggttttcaatcttgtctacctattaaattggttgcagtctgtccacaaggactcaaatatggaatatattctcagtctatatttagtttgctttaacaatcatttaaaagagaactttaaattctacataaatttacaatgttcaacttag

SEQ ID NO: 59589 - DNA, 709 bp, Homo sapiens
agatgataattgtttagttcacaaggctattaagaagatgaaatgtgataacagttgaaagaggtctggaaagtataatttgttacataaaatcaaggaagtaaaacagtatttactataaaacaagcacaagtaaaaaaacaaaacagctagccagtatctacctcccagcctgtgtgttcaggcctcttggcagaaatgtacttacaggtaaagagtaatgacttataacctagatgtgttccttggggattcccatacatgcggcagaatttaacctgcctcattgcatcactgtctctgtaaacacatagaaacaagtttactcagggctccgctcagctatttgggaaaaaaccaggtccaggtaaatgcagctgcccactcatgaaactgaagcttcccagaactgtttacaagcacctgattacagaagaaggcttgaaatctaagctgaaaagccttttgacaaaggcaggtaggcaagattttctacagcatggtctttagcaccaagggatccaaatgctctgcctttcctaaagcactgcaagccggtcgggactcagggaggtgaatgcatgcggggcctgcaaggcaggcttctagacagctcaaagcatgaaggacagtgagggggagcaagggaataccaagacgtatcaggatttctgcatgaagctactcactaatgcccaggtattggtat

SEQ ID NO: 59590 - DNA, 1405 bp, Homo sapiens
ctggaggattataattaactgtgttaaaatgaagacattttattttaactttttgtgtcctacatattatcaaaatgatcgagaaagcagcagaaaatgagtcccccttccttacatacacacacacacacacaacacacacacacgcgctcacacttctcaagttcattgagtacagtttttgcatatggaaatcatcactctcagttaccaagcaactgccatgatttgtgtttctatcttctgatggttcctttgtgtcgcctttaatggagaattggactggttagtgtccaaggtccttgtcaacaccgagatgccgtgagtctatgaaggaggtggggtcatacactgccaaacaaagagcagagaggccagacaactctcaccctcacccaatgctaacactggtacggccctcaggcaatcgtggtgccaatacggcagtgacaggaagggactgggcatagttgaggttttcttaattttatttaaaaaaaaaatgctctgcaaacacaacttcaagacatattccagccactgtccaccctgccccacttcttagcagattgttgtccctaaggtcctcctatatagatactctgtagcggtcaccatctgtgctagtttctcagctgtaaacttggaataatagtaacaccgacctctctctcccagtagtagtggtgtggggattgactaattaagccctgtgaaatgccttgaaaagtagacaataggattctctccctgtcagaaagaattcacactattcccccaacgcctgacccgagggtggcggctgtagctcatgtcaccctttgctgatattttgtcacacttggacaaagggctctggagtcaaagggcagcttaaaccacacacccaatatcatgcttagaggaattcctgggaactggtttggtgttgacaattgcccactgctctgaatcacttcctttcttcctgcagattgactcttttcctgatttttgctcccagacaaactgggtgtgcatgtctgttgcgggagagggaccatggctctggccccaggcttgtatttccagatgacatgaggcctgcaatgcttctttctaatgtgcaccaggtagagataccttcagagcttcctcttcctgcccctcacctatttcctaatcttggctcaggtttcattgtgatattgatcaaccttaaggaaatccttgactagtaagcagttccaccaagatgaagctggagaaaccagagtggctcagtgctcaccacctacataattacccaggaatgttgtgtgattaataagttgctgtggtcttggtgcaaacaggtccctgaaaacatctgggctttccgcagatggtttactaatccacatacatcactgacaataagctcttt

SEQ ID NO: 59591 - DNA, 1710 bp, Homo sapiens
gggagtcaaggcaggccaaagcttcagatttagacagtaaccaccaaatccgacctgggctgcaggtccaaggcctcttcctctttcctgcatgctccgctctgccgctggcccatcttccaatgcaacccctacaactaccaaagcaaaaaggcctgtcccaactccatcctcacggcccgatccccaaccctcaggggatgccgcttcgtgtctcctctttattttacaacgcggccctccttgcagccctcacgaaaagttctgcagtggggtcccccagcgtggggcccttctcgagacccttaaagagaaggctcgtttggtggaccatacccgggcagcgcgggcccgggcctggactggttctacttgtgttctgaggtccctgaccaccgccttgggtccagccctcgtccagggggcggcggtgcaggggagaccgcgcggcccggcctgaagcgcggccgccctcatcccttccccggggctggggtgggtcaccggccgacaaacacaggaggggccgcgtccccgtccccgacgcgctcacaaacgccgtggtcgcccgaaccttcggccccgcagcattcggctacaggaccgcgacactgcagggccccggctctgcgcgctgcgctccggccgctcggcgcgggaggacgtgcggtcgcgcctgcctcggtggccgcgcggggtaggtggctgcggggaccggaaggatggcgaggaagtcggaaagggtttcctgagatgagagattacttccgtccgggctgcggcctctctctggagtcggctagccggggctcggggagcggggtgcgcagggctcggggccacgccttgccacctgcagcgcccgggtgggccgcgggggcctcggcgggacgcgctcggccctgtcgcaggagctaacgcagggggaatccttgcaggtgggagcatttcagagcgcacaagccatggtggccaaacagcggatccggatggctaacgagaagcacagcaaaaacatcacccagagggggaacgtagccaaaaccctggtaaggcggggtcggcgccggccaggcagagccctgcagcccggcggggtggggcggaaggtgggggcggggccgggcgggtagcggcgcagggtccggcctcccggctcccggcccgccccttctgcggggtcctgcagagtgggggctgagagctgggttcagggcggcgcggtctgcttggcgtcctcgtgggcggagagggccctggttggtcgtggcccctctgggagtggctacctgggctaccagggaggcgcagaggagccctcctccccgacccgcaccccctgtccccctgcccgggagacagctgggccttgtcccggagaaagacggaaagcctcatccttaggggccagttaagtcaactgcatgacacagagcctggaacctagtatgttctagaacgttgcatgacacagagcctggaacctagtatgttctagaacgtttgttgaatgaatgaatgaatcaatggctaaatggaggccacttgtcatctcctcccggactccacctgtcttccctccccaacagacttgcaccaggatcaagttttctttccagcccctttgtgacggtttcactggaggtgtggaaagagctcaaaatggggagtgagatttggacccacattccctccagcctcttttttctc

SEQ ID NO: 59592 - DNA, 976 bp, Homo sapiens
gggctgctccgagcacctggtcggccttcccagcacagggctcattgttttacaggtcacagccattttgaaaaggcagactcactgacctgtttaatgagtgcagtttctgcacgaaagcccatatccctctcccaggcagccccagaactttgctggggaagggggccaaatctcttctcagtgcctgagggatttctggccttaactgctggtggaattagcaggagttatctataaatccctgaggcatccatcagccgactgagcgaggctgcctttttaaagaagttcactgacctcttgttaacttaactccttgttaggaaatatctaatcagctgtgagctaacacgtcagggcccaggggtctgcagaagccgggctcactgtgggctgggtttccagctgtgtgcagtctggtgtctgagctgtggtgttttcctcttttcagctatctttcagatcattcagagcataaggatgggcatgtgagaaagccagggatttgacaccacctccctcccactggaggcgggaggacaacggaagcggtcagccagtttctgcgggaaacaagcaggccacacggaatagaaaaaaacgctcccccacttgttccctgatcacttcatcgtggatgtcagaccaaattgccttctcacaggacatcttggtgcatccgcgttctcaagcggaaaggacattttgcttttctgttggcaggattagtagccacgcgggtcgtccgcagcagtgctgtttttttggtttttcccttggtttcactaatgcgtgcatgtggccctctgaacgatcactggtttactttctatggatacaatctctcctccattgagaattgattttacaaataaatgtcttcgttcaaccttataccatgtgtgggttacagtgagaaaactaaagtgaagaaaacagcagaatagctcaaggaaagttgggaggtggggag

SEQ ID NO: 59593 - DNA, 2591 bp, Homo sapiens
tttctatctttcagcaagtgctgcaaataggcaaaggatggcaaaggaacagcaaccctcccctgtgaatcggggccattcacggttagagtcaccaaacctgtatttcaggggacatctttccagctcccaatctcccagcttggctggctgccctgaaaagggactgggacttggctctgggaaagacatggctccctttcaggctgagtgaaacccctaagggtccctcccgttttctaatatcagggcttgctacctgagctcattgtttgttagtgttggaaaagtttcctgctgctttccaacctggcccatctaccctggggctgagaaggggaaaagtcgctgatgtcataacccagcttggttttgctgccagtggcaaggggatgggagtaagccagcgagcagccttccctggggcagcaatgacggcaggagccccaggccggccagccgtgcaaaataggctgcaatcttcataacaaaaaagccacccttgacaacatatccctagggtgcggggggcctctttacgcctttgtctctctgtatgtctctctctctgtctctccatttctctgtgtatttttctgtctccgtctctgtctctctgtgtctgtttctctctgtctctgtttctctttctcttgctaaggaacagctcttgccactttatagtggcaagactacttattctctgttttgaaatgcagaatatgccagggattggggtatctagcacatcacctcttcagacttcatgcactgtgcccacagtgcccctccgcaggcttgtgctgggctggacaagccttcccttcgtccctccccaagcctagattccagcgtgccctccctgcagaagctggtctcccttcccctctccctgcatgctccctactgacctcttcccgcagccagggagcatctggggcaaatgcaaacagttctgtggtctgcttatttgcttttcttagtgcaaaggtggaggcagaatgtggttagtgcagccaccatggctgccaggaacaaagtcagttctggggaaggggagcgccagagcctgccagcccagcagccagccctgccggaaggcccccaagccaggatcctgtcagtctccatctagaaaccagacagaaagcacttttgtaaatgttaaccaaaaaggtccccctgtgatggctgtgctgtaaatcaaagtagacaatgtggggtgggggcagggcacacgtcttgtctctggagccatcgcaaagcagggaggggatgctccttcaactctcaggtggggactggagctccccgctagtccacgctggagaaaggtttttagggcctggagtcacccaggacccatctctgtccagggggtgctgtgtaatattcaccattaatcctacacatctgggaagcattctcctgctaaagataagataaagcccaaatgatttgtgttgggggctggctggggggctggggggaggccagacctggaaggctgggcacacaggagcaccctaaccagcaagcgggggacgcagcctccgcggcatactcccacagtctgtctgtgttgccgggcagattccctaagcatggtgcactgaggtacacagggaatctggaaaattattttgctttacacaatggagactgtgttatttaagtttaaaataccatgggggaggaaggtaagcataatcagctttataagagaacaagcaggcaggggagcttttcccagattccacccttttgttaaatctctgaggtttccagaatgtagttcttcctcgctcctgccgcctcccaccttccttccccactctcccctctccctctctgcctttctctgtgtctgtgcctctataacaataaaaatcatcaacgcagccattgctgtgagcaaggtactgtttcaagtgcttttcagatcacgtaacccccaaaactctatgaggaaggttctgctttcttctctgcattgcgctctctttctctcccgctgcctctgcctctctcatacacacactcaccccctgacacacacacacacacacacacacacacacacacacaccccttaggcctctctatatcacctccacacactcagacacatacccacagtcttgtccacatcaataagaagcagttcacctccaccggaagggacagcctcagagcctgaagaatgccagcctttgcactcctgcgctcggaggttctcctgagctacctggggtgcagtggctatgaaggcctcagtattcagacctccctgaacttggctgaagatcgtgaacaggaaagcaagctctatccctgctgactctacctgccaggctgcccagcctagcagggccaaggctggatctactctctcttctgtccttggcactgctctgacctttgaggggagagagaggcagccagaggtgagagggaaaacaaaagaagactctggtttccagcagcagcactgactagagaacagggaagcagggattctggtcccggccacgcccctcactgcacctggacagcgggcaggacatttagtcttcgtgggttttcatttc

SEQ ID NO: 59594 - DNA, 4852 bp, Homo sapiens
ttctttaggtgtggtttttgtcatgtagcagtttttatgtagatctatatataaaagtccacacctcctcagacagccaatgaaacaactaaatttcaatctgtacaacctaaatagtagttacagtcctctattgtacaaaatagttacactacatacacaaatatacaataagcaaaacaaccttcatggtaagatagcctaggtcccagctacctgtcaccattttgtcactctcatagttttgtgtcatccattgtttgagaagaaagaggcacagtactattgttttttatgaattttggtgacagttgtcaaatttgtacagtgaactctgttccccctcattttagtctttttaccctcctttcaagttcctcctggggggaggagaggagagaggcgagtccagtgaggagctccatcgcttcacaaccccatgtaggacactaagcgcaagcaggagagagaacccttggaagtgaggggtagggagccggaagggatggaaaggcacacagctcctgagcatgaattaaaccatttctcagatatctgccaagctgcatgaggtcccggtatatccatgctaattctcggattaacctttaattcacccaactaagaaatttctccaagccataagcatatgagtgtttaatactggaaaagagataatggcatatgtcagtctcacgtctctttcgcagcgagcaatgaaatgggtgactgtggaggcagattctccctagcacatcttctccgtctgttcagttcacacgcagcagccagttctgcgggggcataggcagctatgcggttggtcctgagccctgcgatgctggctgggcggggggctgtgtggtgccctgtggctgggtggtggcagggggggagccagtctgcagctgggcctgaaactgggcaagctgctcaggactggccagtgtcttcagcagattgttctcctgctccagctgggaatttttctctattagttctttgatttgctctttgaggacctccacttcttctctgaccgcatacatcaaatggcttttcactagatcctggaaagaagacagaaaaggtttaactcattatttggtattttctggactcttttgagtttccaagacattattttacatggatctccctaactatttacatattccacctttaaagttggttcaatgacacttggggaaatctgaatacaaacatgactgtacaatacttgagtttaacgtataaatgatcaagctttgtaaaagtctgtgcttctctgcagacgttggccagaaacgcccaagtaaggcttcctgagactgggccagagccgggcgctgggtccccgactgagaccagcagcggggacgtccaagccacagcgcgcccaccgcgtccccgcccccaggccccgccccgcgctcgcccggagccgcctccttcagcaccggctgcagccagttcctaccgaacatgttgccgcattttcttccctccaccccgcccccctcttttcgtgattaagctgacatcacagaaacctgggcagacgtcgcagccaatgggagcccgagttatttatagctccgaattaaaggttcagagtttgcctagcaacagtgggcagagaatcccgtgagaagagccacaggcgctgctccaataacaaagaacggccaaggcggaaataaaaaataggagaaatccaggcgcaggctaagaaaacaaaactttttctctgattcttcttcattgtgaaggagcccgcgccaccggggacccgtttgtgcaccgtctagaagacccttatccaggatcccgacttctggggccctccccacctcccggctccctagtaaaatattaggattcctagtaaagccacatcgctaaaggtgtgctcacgaccagccgaaggagatagttggccagcgcttccctaataaatccccagcaaaaagggtcaccgtgagaaaatcccgtcgtgtgaaaccagtccggggaagaagaccatttaatacccgcagggcccctttctccctccacggctgccgtggtaggtggctccacgctggccgaatggagacagcgccggcatttctacgcgcatcaagagcaatcatcatcatctgaacttagggatgcactggttccacaaaacatcttatttttgtgctgtgcccacatttagtataaatgatttttcatcagtacataccatagcttgctcgattttgttgtcaatagctaccacacttgcaccagaggagctgaaaaagaggagggaaaaaggtcatcgataaatggaatttatcttaagcttccaagataaaaaggatctcccaattttgtgatattgctagcatcatattttgaatgttatttaacactatgtaatgtatcaccctccagaaaatgccagcccctctcttactaacgaatatccaggcatctccctattttagtaagccacaaaggactaaattacataatgtggggaaagcctgttctctggccagacttgcaaaaataaggttttttaacatttcgaaaaacaacatccatgtcaccataatctctcagcaatggacaaaggaattcgcctggctatctttcacctgtattattataagtatcccacgaataaatttaaagaaactatcttagccgacatttacctattatcaagtctcacagaagcgttttcagtccccagcaaggatgacaagaaagaaattgaaaaatgtctcagttggtaaactcctagatccatcgccactggtctacaccattgggatttcatgcaattgcagccaaaaacaccctcgtggaaaaaaagagggaacaccagcagccttgtataagctagataaaatcttctggctttccgcagcccagggagaaacagaaaacggcagccctaatttaaagaaacccagcttctagggcttgatgatcccaggcagatgcggatcccagtgccgtgaagaggcgcttcccagatccgcagccgggctccactcagctctagaccaggactcccagtcttagtgcaaaatatatgcaggaaagagctgcgccgattggccggcacgccactgggaccgccccctactcccttccaggtcctcccgcttccctgcttccccgcctccccccacccccacctccgcccccattctccagatcccgctcgtggggtgggctggcctggcgcgggccgtgctcagagggagtggggtgctgggttcggaggtttccacggcggcctcaaaacactgggccattgcttcggcagaaaatgtgaagggtccctgaaaaatactatgggggcccccacacgtgcttacgtttaagggagtcagaccccggtccccggagctgtgtcccgcggctgcttaacggcgaaagcttcctatttgtaacccgaaccgtctgagctactgggcatgcccagtcccaccactgtaagacttcgagtgtcttgatttcaattatctagttcttaccggcagcggtactgggaggattttatagacggttttatttttaaagataataatcaccctgcaatcatgtatttttttaattttagaggaaaaaaaatcacatttgctctttgagagatactaccttttgttttatagaaacaaaacaaaaaacattatatattctttgctaggcatgagggaaagactccagataaaatccaggatcttcccaaaaagcccgtagagccacaaaccttaaaatcacatctccctattagcatcttctccctagtaactaaatatgccttcttctatttagacccaaaaaagtcaatccacaggttgaattccacataaatctatttttagttaagtccctaaggcacgtttttgcaagctgagtgacaattcctctaagactcaatccctcaatcctatgagccttcttacatcagagggattgaaatattataaagtatgtattcaaagcatacaaatccttgaagttagtctctgcccatttgcagtgtccagaaccagaaaagggaggatataatggtggttaaaaatagttaagcagccaatagatgctgtaggctcacctctgtttcaccctcttggccacactgaccaaataattcccttctccaaaccaaaatcgagagatgtgggtataaaatagcttaaccctttcaaaatttcctatattaatttaaaatacttgcagggatgcatcaattaaggctacaatttaatatactagaaatctaagccctgaagtttgctaaattataatacaacataaacagtttccaagtcaatacatgcgagaaagaaaacttaacctctacaatactgccctctaatggcataatataaaaaccaaaaaatctacaaagtacttggggagacctctctaatctgtagataaaattgtgtcatcacaaataattccaacataaaatctgaccgtagaacatatatatgtaatacacgcacatgcacaaacacacacagtcttctctccaaaataagcatctttcctcaagcagcatccttttctaaaattgccatcagatccatttagacagtttttaagttgactcaatgctggtagtgggggtaggtagatttggttttcagaaactgtccaaagttattaggaaccagaccagatcggtaagcacagtaaatgatgaagaccacaattctcttttgggttaaaaaccaaagtgtgaccaactataaagtgatgagattccctttttactgaaaggttcatattctccaaattttaaggcttggcttttgaataacaataattgttaacatatttataatttataaaa

SEQ ID NO: 59595 - DNA, 982 bp, Homo sapiens
ctatataaaacatctgaagaagtgacaagttgtcctgattatgattttctatttcgagaacctcatgcaagtgaggttcttgcatgaagtgaaaaatgaatattatttcttttacttttgcacagctatgaaaaatagatgctttgagcactttttaaaaataactagttactttaagctaattttcctgttaaattccagaagaaaacaacgataagcagtcctaaaagacctggtaggaactagactaaccaactaaccatttttctatgcatacagagccacttagggtcattagaggcagtctcttggtgactctaaaacaatcagatgaagctcaattacacagttgtatttacaacggtaaagataaatttaaggatattacctagctccagaatgtctaatgtagtacaggcctaggtaagcattaacacattggcaaagttgactctgtgtgctggggacacagtgtgtttacataataaatacctctgcttcgatcaagggacacatttctacattatggcctccatgggcagcagctctgtgacataaatgaggtctgagggtttctttaaccctctgatctattcagaattataaagcaaaatggaccttggagatcatttaattttcttattctctaggtttagaaatggaggctcaaaggcattaggtgctttgtccagggtctacctcatcaactgttggatggagcatagaaccaaatgctgattcaatatagtgtgccctagaagtgcacaccagaaattctagatccgtgtgtgtgtgtgtgtgtgtgtgtaagatgttagacctggaagaataaagggaccataaagtgaaatgcccttctgctgatctcaacggagccacagtattcattgaaagccacccattttacagattaagaaacaagctgggaggctgtgtggaaaccacagccagagacccatgctgcatgtgagtcaggcagcct

SEQ ID NO: 59596 - DNA, 676 bp, Homo sapiens
gttgtccagttagactacaaggtacaaagagaatgagaacactccatgaaaaaggaagggccaggcaaaagccagggtcatgaagcagcatgctgagtttggacacctctcagtagttgagtgtggctatggaataggaggttggagtttagcagtgggagtgaagagaaaggcagtagaaggaaaaaagtttaagacaggctggggcctcacaggccatgtgatgggagactggactttagtctgagggcaatgaaggtccacataatagggtttaaagggggcaaatgatgcaatgggatttgtgttttggcaaggtcactctgaccacaatgtataagactacaagagatggaactgggggtaaaaggaaggaaataatgagggccaaaaccaaggagcaaaggggagacagagagaaaagtgggatggattcaaagacattgcaacatagaactgaccgaactggcttgtgtgaggtaagggaggcaggatgactcacaggtttctggattatgtgaacaggtggaaggtgatgccattagccagaataaggctgtaggctaaggggagtaaactggttctggggtataacattgataggccttactaggcagtgggaaatacggttttggaactcaggtggggttgggcataagaaaatactggcataaga

SEQ ID NO: 59597 - DNA, 669 bp, Homo sapiens
cactagagaaatgctaattaaaacaatggatactaccacacccctattagacaggctacaatcactgacaacaccaaatgctgctaagaatgcagagcaaatgaattcatattcattgctggtggaaatgcaaaaacagtacagtcgagttgagacagtctgcagtctcttacagagctaagcacaggcttactacatgactcagcaattgcacacacaggtattttcccaaatgagttgaaaacaagtccacataaaaacctgcacaggaatgtttgcggcagctttattcagaactgccaaaaacatcaagcaaccaagctgtccttcattagatgatggataaacaaactgtggtagatatatacaataataagaaatgagctcccaagtcacaaaaagacatgaaaaaaactttcatattgctaagtgaaagccagtctgaaaaagctacacactgcatgactccaacactatgacattccaggaaaggcaaaactagacagatagtaagatctgtggctgccagagcctgaggtggggaggtaggagtatgtggcacgcagagaagaaggattttgcaacagggaggaccctgatgacagagcattcacagtggtatcagaagcgacaaccagaatggaatagattgaaaagtaaactaaattt

SEQ ID NO: 59598 - DNA, 1946 bp, Homo sapiens
cgcagaccctttcaaaccccctgggctcgcggcggctgctcggtgaggaaacgctggccgcggctggggccggggcgacgcggctgcgagcggggcggcggcgaggcgcccggtacggtgagcccagcaacgaggcgcgggcgggcgcgcagagacgccgggtcctcgcggagcacggccggggcgcggcggcggcggtggcagcgggagcccagggaccgctccatcactggcagccatggagcccgagcattttcctccctcagggcaggcgcctcgactcggcacacgtcctcggggaggaaggggccggcacccgagcctctccggagggcggcgggacgtgcgctagggcggagggtgcgaccctctcttatcctcttcctccgcagccggctcttcctcaccccgctgctcccgcgaccgggcgggagagggccgcaggcggcggcggctcctttctccgcggcgttggtggccagacgggctggtgcagcgactgcagccgacgccgttcaaaggaacgaggtggggttggtcggtgtcggcaaacggggcgggggagtgagtgggtgccgagggagggtgtcgggcggggagggggctgtggtggttgttactagtgctcttcttcggctcccccggctccaccgtatcccccagtctctcgcggcatcgggaggggagggaccagcgcggagcgcaggaggaggaggggcgaccgccggcgagaggaggcggtggtggctggggggagggggcaggcggaggaggaggagggaagatggcgtctgcgcatgcgcctcggcgccgcagacataaagccgggtctggcggggcaggaggcggcgggtcttcgggcctaggcgagcgccaggtctcccgacggaaattaccgaaggctggcagaggcgccgaagccgggagtggtggagccggaggggatagtgggggtggggaattccggccgaaggagcgaatccgggtcggactgcgtgattcggcccggtgggggcgggcagggtgcgcgcctgccgcgcgcccaggttaggtgtgtccgctcttttcacactcgcggccggcgcgcgcgggcacgcggcagaggagggggcgcggcgcggaagggccggcggaggcggcgggagcgccggcgcttggtgtgcgcgccttgggtggtgtcccccgcctgcggaatgggtaatgaggcttttctccgcagcaacagcatcacgagtttcagttcccaggagcccgccgccgcggctgctgccgctgccacgacatgagtcaggctttcttccctggcgcgtggcggaaacctcctccccctcgccgcacctgggctcgcccccggcccttgcctcctcgggggatgccctagggccgggagctgtggggtctatggaaggccggtggctcccggtgataggtgttgtcttttgtgcagtgcagttgctgccatgcggtcccctcgcccttccacgggcaggggcgaggcggccgggcagatgttgcagctgtttccagttaactgcctgagctcctctgggctaggctcttctctaacgaggagtggttgcaatccatccttaactggaggacagaagcaggccggccctgtaatcgactgacctcaacaggtgtctccaagcagcgacgcctttttcgttcatcgtcctggctatatcccccattggtttgactcaggaggcaaggtggtccggacatgtgagcaacacaaatgataagaatgccttttagggctagaaaagaaaaagccatccgaaattccagttttaaaatacacacacacacacacgttacatttcatgggtccaaatgtagttctacagaagcaatgttaggtttgattgggggcaatttactggcggttactttcttggtatttcatgtcaaaacctagttctaagcgtttcttaccaata

SEQ ID NO: 59599 - DNA, 571 bp, Homo sapiens
cgtccctaggtaccactgggcaccacaccaggcctagggtgacaaaaaaggagaagatatatgtgggggaaaagataaagagacatgaaagaagagagggcaagaaaaaagggagggaggaaggggaaatagaagaaggggtgctcctgggtagggcagctaatctggcaataagatccccagtctctggctccccacctgtgtcccccctggggcctgggtattgcaccacaggtccaaagggtaagagttcttcacctttcattttggccatagtctggcttgctcagttattgtctcattttttttacccatcctatttgccttttcacttcaaatctcagtaattgcagcagcttctgagcatgactcagccctcagatgtgatcggtacagcccacagaaagtttcacaatgcattggaatgcctgcagacagacctgcacgtctcgaggcattggaatgcctgtagacagacccacatgtctcgaggcctcagaatccccacttcttgttacatcctccacttcccggcttgagctgcctacttggccttttaacgcatttgcgt

SEQ ID NO: 59600 - DNA, 2033 bp, Homo sapiens
ctaccctgcctttaatatatgtattttctagaaatcttgttgtcctagaatgactttaggtaacttaaaagccctgcaatgcctccctccctctcccagcatcctcctaacaacaacaaaaaaaccctataatgttctaaaattgcatctttcctttttctttcaaaaaagagcactcttttggtcatttgctcatcttcacagtacaaggagaaaatactggagaaaaaccagcgggtgtatttcggcatgcgaccgcttggttcccccgctttccttcacctctgacctaatctctcacttcaaaaactgacttcaagctgttgccagatacgtcccttccgccgcctgccgcaggtggctagggtctgagcacacttgaacctcacacccgccccaggggtagctccttggttcccttcagccccgatgtgtccctcgtgctttgaaatggaattacagttttggttaaaaacatgccttttccgagttaggaagaatctaaatcgactgaacgccagtctaaaatttcggcgttcccacaccgggagtcgaacccgggccgcctgggtgaaaaccaggaatcctaaccgctagaccatgtgggagacggcaatagcgactccaagcctagacaaattgagtcttctcggtcggcttccgcccactccatcgcgttcatccgtaggcgtcaaacctgctcctgcgcctgcgcggagtctgcagcggtttaaaccgttcaggttcgcattctactgtttctctccttgcaggggcccttgaatctttcttcaatctactctcgcgtctttcgtgatctcatccagtctcctggtgctaggtaccatgtcgacaccaatgtagacactagattggatgagtcattgttcacaattcctcacaaaactcctgcaaagtccaaaagaactggggtttgaatgttagaggctggtgaagaagtgaggaccacggggcgtcataacaccgcgcagtggaggccacgctgcactggccggtgtccgccgacagggtgtgtgccacagacgcgcagtgccttgcccgaatctgtccctcccctcagcgctggtccaggctggccacaggcaccaccccgtccctgaaagtggatcttttcctctgaaaaaacaggaatgagaactgcccggaagcctggaacattccaggttctgatgactcagcggctgaaggcaggatttgtgtcaccgaaagcagccagagtggcggtctgtaaatgtagcttagaaaagtggagaaagtctcttactgcaggcgttcatgatagatggaaactccgtgtggtttccaaggccctcctcgatttgaagcatttcaagggagcggttgatgccttagcagtctactgtttgaattagggaaatgcaaagagtcagccattggggatagccggcggagaggagctgtggctctggtgtcctcagtggcttaagctacacataagttgtgtttactagcagaaactgtgttaatggaagtctggggacaaattgtggaagtttcgaacagttcaactagcagaggacactttgaagcccacttaaaagctaagatcactcctcacacccccaactgccgcagggacttagaaggtcctccttctccctctcaggctaaggttcatctgtgacattcatcctcaacagaggaggggcgagaatagactggaaatagaaattgttctgcctcgcactcattaccacgaagaagctccccaacagggaatgaacgcaacccaacataattaaaagtgaatatgggccgggcgcggtggctcacgcctgtaatcccaacactttgggaggctgaggagagtggctcacatctgaggtcaggagttcgaggccagcctggccaatgtggagaaacccccgtctctattaaaaatgcaaaaattagccgggcgtggtggcgcacgcctgtaatctcagctacttgggaggccgaggcagggagaatcgcttgaaccggggaagtggaggttgtagtgagctgag

SEQ ID NO: 59601 - DNA, 1784 bp, Homo sapiens
gctcactgctatatacccagattctggtacatagtcggaattcaataaataactgctaaatggaattaacagtcaacaggaaaacattctagtcagacatattttgagaacaaaggatttacaatattatataaacttagttgataaagcagcctcgacttcctgggttcaaggaatcctcctgcctcagcctcccatgcatctgcgaccacaggcatgccaccatgcctggctaattttattttttttgtagagacgggggtctcactttgctttgagatgctaatgaccagactccaagagtgcagaggcaaggcagagtagagagaggaagcagagaaaggggagaggaaagaacgggggaaaaaggtaaaggggtcgactcacgtggaaaaatagcctacctgcagggttgaaggacttctgatgccgaggaaacctatcagaagactgtctccaataccacgatgtggaagcatggaaattccaaggctggccgctgggttgaggctgagaatcaaggggagactgggcgtcgaaggggggttgcgccccgggaagaatctgggcgtcgaaggggggcggagccccggggagagactgggcctccatggggggctgcgactcagaggaaggctttgacccggctgcgggaagcgaggacgtaagtggtggtggcggtggcggcagcattgcccagaacatccagctgtcccgcggcggggcagtgtcgctcaggggccctaacgtgggagtcagctcgggagacgcatgccacccgataggagtctcgaaatcactagtcggctcagccataccactggcgggtccggagtctagcacgcgactgtggagcaagcattaggcgtcacttcctttaccgtgaactacaaggctcagccaaccacaggctttacgtcatttctcggcgccgggaaacctgccattcttcgctgctgatcgcgggattctttttggatagggttgacgttcgtggatagactcatatctgtgaccagtgtccgccaccgcggatggcaagagacctgatcggaccggccctgccgcccggcttcaaggcccgcggaacagcggaggacgaagagcgggacccgagccctggtaagcggcggcgtctccgctgcccaccaggcccatctacccactccctggccgggccctgctcgctgaagaaagtcggaggcctaggagggcggaggagtggggagtgggcgcggcctgacccgagagaacttttctcttcccaaacagtagcaggggggaggaggctgggggaccctcctagaaacgagctttggcgtggtttggcttcgtgatgataatacattctcatttagccttaatatgagctgcacgctgccctaactgactgatacccactcagtcatttaagccgtataagaaaaaaactattttcccatgttgcaaatgggtacgcccaagcccatgccagtgtctagatcatactgctagcaagtgatggagcgcgacttagaaggaagcggttctcttaacctctgtgccatattgccttctgattacaagaaccttgcagatcctgttctctccagcccccgacctgccttcctagcctctcattctgttattgcatctgacaaacacagcccaatactcaatccagtctgagttgctgcgcaattccttaacgctctaggcttctgggcttcctctggttgcattcctaaacataactgacaaacttctccccatccttcaaggcccaacttaaatgtcacaccaat

SEQ ID NO: 59602 - DNA, 1834 bp, Homo sapiens
tttcgttacagacttccgggttttggaaactgaggtgctccgcttgcttcatcagaacagctcgggtagcctctgagctgaaacacggcttttttttttccaggtctagaaacggcatgttttcaatatacccaaggctactaagtttgatcccagtgcccatttgtgctaatgacgttggccagggacgccaatttactaccctgaccctgtccttcaaatattgtctctctctccttggctagggttggacatgttctgacacctttcgtctctttgaaccccatttttccgttctgataatctttttcttcagttatgctgaccatgtctttaaatacattgctaacgttttagctcatcccaccctacgttttaatccctcagatgcagacatcgcggacagccacgcccactcaagaaatttccgaaacagaaagtttgtctgcaacagcgcgccgtactgacgtagcagtgcgcaggcgcagtcccggctcctggcggcgtgttcctcttttcctcggttcccagtgttctggcaggtaaggaacgccggctcttcgcctctcagcgcggcttgtcctttgttccggacgcccgctcctcagccctgcggctcctggggtcgctgctgcatcccgcacgcctccaccggctgcagacccatggccgagcgcggggaactcgacttgaccggcgccaaacagaacacaggagtgtggctagtcaaggtaatgttcgcgagtctcccacttgcgctcctcctaacacaagtatagtttaagtaacttgagcctatcccgctccgtgcgcctcttaaagttcttttacggctatctcgttagagcttcacacattttgagaggcaggagtcattgttgtatctgtttgcagacgaggaattagtttagggacgcaaagtgtctttcagccagttactactctgaatctgcctggactagatctctttctcacggctttcctggaatcttgtcttggtgtccccagatttggacggtgcattttatcccagactgaagaattccttgtatcttcccttggtgaaactggttttagccatgagcctgcgtgaggtagttgaatgtctactttctgtacagttttctcggccagaaagtaggactggtccctgcctactcttaaaagtgttctcttaggttgatggtccttaatgaagctctcaaaagaggcgagagagccccaaactcacagaaggagaggtcattggactggagtattcttttagagcacatttgggtctcgtgaaactggccgtcaataaacgttttatgtgaagacagcaattttggttagctcacagtaagcactatttgtgctttattgtttcatattggggagtgttttctcctaggggagtttcataatacttaagcatattcaaaatgtgatcctgaaagtcgttgaaacttaaaatgtaaggacttttggtttcttaatgctttaactgttttatcacatggctgagttctcgtcaattaaatctaagaggtctttcttgtcggccttcctaaaacagcccccttgtgatcatttgctaacacgacagatgtgtattacattcttcaaagcacttttcacagtgtagagtgattttgtgttcatatgttcaaagttggttacctctgtctttccaacacacagaatcacattccatgagaacaggatctttgcctgtcatacccagaatagtgtttggcgcatggtaattactcaacaaatagatgatgaataaatgcatgacctctcattcttcagccctcgccttagtctgtggcactcatttgacttattt

SEQ ID NO: 59603 - DNA, 428 bp, Homo sapiens
atagatgccccaggtgctgtcagtgttcgcccatagcctctcaaggccttgccgttactgtgcacactagccaacttttacatctcggcacctttgtctgcctgagagcttctcttgctgccaactactctgcctgcctggagggcaggccagaaatgccaggattttaacactcactttgggagtggcgttcagccaatatctgccaggagttgttagttgataaacacccagctcctttaatcctcaggtagggtgactaaggcacatattaagcaacagttgtccttagtagtatccagctggtactggttttctacactaatcattttataggctcatttcttcttcctcatttttccaaccctcagtgttttctgacaaataaactacctgaactttatttatttatttttttgagacaggtt

SEQ ID NO: 59604 - DNA, 2246 bp, Homo sapiens
ggaaattatttttagaatttaaactttattataaaataataacggcttttaaaatattttcttcctgccatattttggtataaggtagtcatgcttctcatcattgctttttctgcatcttcttgagatttgttgcatatgttgcattaagggaccctggatacattgattatatacggtgtgcttgtaattagttcgtacagagtctcctagattttggagacatccaaagatcactaaaaaaagattttttagtataaatatgtaggcatggttctatacactttctgcattttgatcaatttatctgtctcccccagtgaactgtatgcttcttgaaaacagtactgtgtcttaatcatcttgattccacaatgcctagatggggccttttgcatagcagacattttgctaatgttagtggaatgaagtaattctctctgaaaagatgaatcataaatgcactactcatgagccagggaatttcctgagtcttttcttaaaacccaggtgaattcttgtggaaatatgactgtttctaaccacagtcatacatttccagggtataaagctggtaccattatgagacatttatatgtgtattatacaataaggtaaggtctgtcaagtgaccacaccacaatgcttggtggccagtaggcacacaatagatgctagcctttgtttcctttttctgattctcctaggttttatgtcagagtcactataagaattactaaggataggggaaattgcctttctgtttggacaaatattcatagcagttaaagattctgttttgacatgcccagatttagaattctgcaggaaaacagaagtcagagcagctggcaggctgaactggtacacaatataacccagacagtagacctgcccagtgtcacagtattttctgggctggctgttttagtcacaaggtacttgagaattttattcacatacacaaacacacacacacacacacacacacacacacacacacacggtctttgatttagtggtttagactagctgtgttttcagaagttacttctttgtcaaagacgatagcctttatactctttaatttgattttatgcccttttaagctaccttatttagaaggagcagagtgtataaaagctgttcctggcaaagggccacagcagcctaataaacaaatctgacaggagcccagtttgttactaagccaagaataaggcttctctctgttctgaccagtgagattcctgaaacttaactattttttcttgatttttgatattaattatatttgattgtcatattactgtgtttagtgtgtcaaaatacagtcttgaaaatgataagtattatctctgaatccttttttttttccattcaagataagctgtcattggaaggaatagtggtacaaagagctgaatgccgaccagctgccagtgaaaactacatgcgattaaaaaggttggtgttttgtaactccagaatgatacctgatatttccctttggggattgagatacgtgtgttatatcgcctattgactgcattaaaactgtggttattgttgagtgtttgcttcaaaagctgtttggttttaaaagcaagtaagagtttctttggcactaaagaaatttcagtatctgggctgtttatttgaggtattttaagctactttgttaatacatcctggaatcaaagtttttaaactacattttctagttgtctttataaattttgattctttaaagacatgtataagatctttgtaatattttattttccagggctgtaatttttccataataaatatgtatccgaaatactgtaactgggccaggcatggtggcacatgcctgtaatcccagcactttgggaggctgaggtaggtggaccattcaagcccaggagtttgagaccaacctgggcaacatggtgatatcctatctctacaaaaagatagaaaaattagctgggcgtggctgaggtgtgaggattgcttgggcctgggaagtgaaggctgcagtgagctgagagcatgccactgcactccagcctaggtgacccagtgagaccttgtctcaaaaaaaaaaaaaaaattgtactgtataaagcaagtgtagttgccagaatatcgtcctattctcttgatctatagagaaatttttataaacatatatactgtgttagagagtttgtttcaggatcttcccctgccccctaaatttttatgtggttaacatt

SEQ ID NO: 59605 - DNA, 2404 bp, Homo sapiens
tgctgcaggccaatgtgtcctattttcttaccagtttacttaaaatttaagtaatttcaaataaacttgcctgtccttgcaggcactggaattttcaattcttggtctttgatttttctgaaacatttgaaaatgcagaaaagataccacatgttctttgttcaagaaaaagggtctcatttagggaattgaattgatggggtgccgaatggtctgggattgttaaatgctgttaatcaagtctttagcttactattaggaagaactaatttagactttgggatgatcaggatttaaatattcctagtagtttgtcactgacagtacaggaacacctgactcctaagtgtgttacattctatctgtcttgcttgagactgtaatgcagttgccatgggatgtattgtaaagaaaacttgaattatttaaggaatctttgagtttctaagtagagaaagagaagatgttgggggtttttttgttttgttttgttttttttaaaaaaaaggctgctcaaaggaaatgactttcagctagaatggttcagcctgcatagtgggtccctcacttttatatggcttcatattttatgaattagaagttctttttagtgactatccttaaaaaaaaaaatctcatttcctttctcacaaaaaagaaaattgaatcacagaaaagttgcgatttgcccaaggtcatgatttgtaaatggcaaagctggaatttgaacccacatctgattgattccaaaggaatcagctgacaagctacctctttcagctttcagtttcaaaaggttgcctggcttattcgtaggaaaagagaaaggagcagctggtactgtctctctcctccctcttattgaatgaccttcaaagtcccacaacttaaaccaacattgttagtaccatggttccgttacattataaaataaatacaagattcatataagatgtaaaatggtctcattcttttagtttggaatttttatctaatttctgattttttaatttaaaagcgaactttgatagcatgattgaattgaatttcaaagctccatatttctgcaggagaggtaggacattaaatgattttacgagtctgtgaagtttacttttctgaagtttatgtgaaatctctaatgctgtgtgtgggtagttttaatgaactagtagttgtgctgttttgaagatctgctaatctataatgtaccccagatatttctattgtcatatattgtacacttttgtttttatgacttgaaagcctcaaaatgtctaaaacctttttcttttaatgtgttatatatttgaggaaatcccaaaggaaggaattaataatgttcaggcagaaacttttcaaactgaaaaatagtacatgtcagaaaaacgggaaaggatgacatatatgggcgtggtgaggttacataaaacaaaatatgccaatgagcagtattcccagtagaacgcggctccattagggcaaagaccttttttgtctgattcatttatgggtgtgtttctcatgaatagaagagtacctgacacctagtaggtgcgtgataaatacttgttaagtaaagaaaggaatgaaaagcatgtgatttggctttatgcatttgtgtcctacaagctgcccagggtttgatcacaatgactcattcttttttaagctattgcatgccaagttgatttatctgcttttgttacttccctatatttcatagcttcagagtgccatttattactcatttgtttaacagatgtttactgagcatctagtgtatactaagcagtgtaacattaaaaagcaaccagatcttatgtttcttggaaaattgatcatactaatttaatgtaactaataatttagggtattattttatgctgtgtgagaaattggcacaggcagtaaatactagatttcagaagtcaaacttcatcatataagtattttccatacttatactaccatataagtatcagtagactttgactagataaagagtggagggagggctcccaggcaggaatggcacagcccaaccaaggaagggataaaacaatagcagtgttctgggaaacttagtagaggtcaccctggtaaagccgagatggacagaaaaaggaatacatagaattgcctggtcggttgggctgatggtagtttattttgtgccagactgaacgggctagacttgatctagtaagagtcactgatcgagtgtattttactctgaggggggttcctaggtctccttcagggctctgtctttggtacaattcttctcctttggttactgaccttagtcatctttgtaggctcctacttaccgtctgaactttttgcctccgaccttatcttggtaagtgatcccatctgcttaaaatgtatgtgtgtgtgt

SEQ ID NO: 59606 - DNA, 469 bp, Homo sapiens
gaggtcttattgtagtagtcttgtgcctgatgccactatctagatgcatttaattgttttctagagaaagaattcatttcccaagtatttctaatcaaaatgtatatgatgtgacttgagaatattcaagggcttggcagtcccaaatacatcacactggtctggcccactgtctatggcctgcagttcccctaaactgttcattcctctgagtcatacataccatcatgggactctgtggactcttgtagatggggagttggcaaggaaccaaaaggcaggaatgacttacttatctaaatgggagagtttaagcagtaggaggccctagaatttgtacttaggcataactgactttctatttatgaaaataatctgggagaagaaatggatagtgaaatctcctgagttgtgtatagtgaaatgatggtgtcaagaagattgctaagtgctctctaaattgattcct

SEQ ID NO: 59607 - DNA, 1073 bp, Homo sapiens
gcaaaaaactagccgggcatggcagcatgtgtctgtagtcccaggtacttgagaggctgaggcaggagaatcacttgaacccgggaagcagagattgagattgcgccactgccctccagaaaaaagaaagaaagaaagaaagaaaatgtaacataaggtgctaagtacatagaaagaacaatagaatcagagctctttggggggagtgatggattctgacagaggaagaggaggaagagggggaggaggagagaggaagagggggaggagggggaggagggggaggaagaaaagtgggagaaaggaggaggaggaggaagaggaggaggaagctctcacaaaggaagcagcatttatctggattggtaaacataagcaggctctgccaggtcgaggatggcagaggggtcattgcaggaggcaaaatggcaccggcagcaaggggttgggtgcagagaagtggagggtatgttggggctgcaggggtctcggagggagaagctggagaggtgggctgaagagtgaaaggctgggctgcggaaggcaggcatttcagtgaagctgctggaaaccatcacagactaaaatgttaatgattaatcatttgttactatattaacccactgcgagggctaacagtttttcaaaaggccctctggagcccggaagacttggctgaggggcagtctgttttatttttttaattttaatttttctaattatggaaaatttcaataataacctgtgtacccgtcctcctgcttcagtattatcaaccagagcccatttggtttcaactatctcaccactcacttctcccttgctatattattttaaaacaaatctcaagagataatgttctctaaaagattaagacttcagagcagaagaaataactattgggtacaaggcttagtacctgcgtgatgaaataatctatacaacgaagccctgtgacacgagtttacttatataacaaaactgcacgtggacccccaaacctaaaataaaagtaaaaaaaaagaaactaaaggtaaaaaagactagaaaaaataaccataatatcatcaatg

SEQ ID NO: 59608 - DNA, 684 bp, Homo sapiens
ccccagctttgaccactgcctgaaaattcccttcctgctatcatttcagaggacaaaaggccctgtagatgagactcacacttttcattacaatgtcaaatcagaacgctaagccaggtgcaatgcctcacacctgtaatcccaacactttagaaggccaaagcttgagatcacttgaggccagagttttcagaccagcctgggccacatggcatgaccccatccctacaaaaaatctatcagaatgcttaaaattgctattaagttcccaatacgtatttaggtttgtttccaatcacggggtgctgggggttaacattagtatctgcctcaggttttggacactatggacagtctggaatttgacactagggcaaactccagattgctcaaaccactacattcacatgttcaagcagaccagagtcactggcctgcttttaatctttcttttacaagtgtaatcaaccaggtaaggctgatagactatttcccaaaactcacgttttgaaaattcccctcccaggctaggcctgcactttgggaggctgaggtgggcagatctccttgagcccaggagttgagaccaccctgggcaactaagcgatactcggtctctacaaaaattagctgggcataggggtgcatgcctgcagtcccagcaactagtgagactgaggtggg

SEQ ID NO: 59609 - DNA, 2403 bp, Homo sapiens
agtattcttagttcttgctgaaaataaaaaaagcaccattttgggaataaagttgtgacccgtggatttctcaaaacgacctaacttaaaagagttgtctgttggccggaacaaaaaatggggtcattaaaaagttgtttccagttgcgggcatgtgatgcctccggttggtaagtggggacaggacaaacacgaaaggactccaggctcctaagccggaagcatcatgtcccggacaaccccgggaggaggatgggcgccgaggcggcgggcctatttccaggatcagctccgcctccagttttctagaaaaacccaagcccggaaagagcgtctcctccgccaggaggcggcggggaggattgcacaacctcaggcgggggagcggaggaaacccgagcccgctcggcccggactcccccacgcgcaggcccgaccgactcaccttcccctccacctccaggcacaacccgtccgcgatctcccggatcttgtagatgtcggagaacatctcatcgtctgccggatacacagagccgcccatcaccgtgcgcctggcgccgccatttcccgcatttcccgcgccggcggccgcacgcgggatctgcccctccgtagcacaccagagctgggcgcgagccccgggcaccgacccctccgcgctcggctaagaccgccggcgtcccctaggcccgcgacggctgcgccttccccgcccccacccgcaccccagacccccgtgtgcggcagtaaggatagtgcagtgaggactcacggctgatgaggtcccggtagataatcatgatggcgactgaagggagacgacgacggcgctagcttagcacgagcctgaaactcggagcgagcgcggtgcagccggagcggcgctcggggggaggggggagcgggcggaaaaggccgactcagccgctccccaacctcatatagagggcacgtccctctacgtcatcgcccgctgcgcctccggaagcgacgcaggcggtgacgtggcacgaagagccgcgcgggggcggggccacagcgggggcgagtcggggaggtgagcatccggggacttgaggcggagacacaaggctccgttccactgggcacgccagcgggtaggggtgggggcggggaggtgcgcgcgcagcgtgggaggaggccaactctcggggcgctccctagccctgggtgggtggagcgggggaagcggagtacgttggacccggctccgccctaccccacggggccgcctggagaggtgctgggagctgggtggagcttagaggaattaaactttggccctgcgcctcgtccagcctaggttccacccttttctgggaacgtgagtatcaaccaaggtaggagaacgtcgcatttagggagggtcaggccctctggcctggggtagatctcgggactgcccgagggcctctgacaacttttcagcatctgccccagggctgccccagctggagtttttgggacgcttttgtgggggcaccgctgagtccggatagtgggacccaagtcgtcctgctcggcccctggggaataatcgtgtggggcgcaaggtctgtgggaagggacttggagaggagggaagatgtcacgggagtctgcacagggtttccatgtgttccaattttgtcccataattgaaagcttgtggcattctgtggcggacggctacggagctagctcttccctttactatttcgcacttggtcttggaaaagtatgttgtcgctttaagatgaagttgaaattttatccctggtgctagagggtcacacaaagggagtttcccacctgccccacctgttttttgaaggactttacacccaattactaagtattaaaacaaaacaggtcctgcatggtagctcatgcctgtaatcccagaactttgggaggcaactactgaaaccctgtctctacacacacacacacacacacaaattaaaaattaattgggtgcggtggtgcctgcctgtaatcccagctattagggaggctgagctgggaggatcgcttgagcccgggagttggaggttacactgagctatgattgcaccactgcgctccagcctgaatgacagagcaagaccttggctcaatagcaaaacaaaacttccgtatttagtcacatcgtcacatctttggcataaggcaaagatacatgccagtatgaagtctgaaagcttgttctatttcgcaaatattttgtgctttgtatcccttagaactaggatttgcaccaagattccaattgtgaacaagttcgatccagtcctacttatagaagtgttcattctggtaaatcaaagtatcagacaattataatacattaacaattgttcataaatccaataatatagcattcagcagagtaagaat

SEQ ID NO: 59610 - DNA, 1116 bp, Homo sapiens
gcttaaatatgaactagagagccgcagtacatgggcaaacatccaaataaggaaaagggggcgggcgcagtggctcatgtcagtaatcccagcactttgggaggccgaggtgggcggatcacctgaggtcaggagttcaagaccacctggccaacatggcaaaacccagtctctgctaaaaatacaaaactcagccaggcatggtggcgggtgcctgtaattccagctactcaggaggcggaggcagaagaatcgcttgaaaccgggaggcggaagttgcagtgagccaagatcttgacactgcattccagcctgggcaacaaaagcgaaactttgtctcaaacacacacacacacatacacacacacacacacacacacacacacacacacacgaaaacggttctagttaggactggaataagtaagtagatgtccactaagctgtactggccacagcaagctgtgacagggctataagtatcttaggctgaaatctctgttcagtaaactaacccatttctttgttttggagctctttctgaagggaagtctcgtgaaacacttccttgaattccaaacacagttgtttggaaaaatcccaactggatctacagaagtcccaaggctgacaagccaagacagttagagagattaatgtgtccttagcagtcaatagtgtctgggcagcatctcggggaaggaattacaactttgcagaaattccagtgtcgggcagtggctgtagatcacttctgatttgacagtcctcttacagccatgttctctaagccatgctaaaacccagtaattccttacttctccttgctgcgttatgaacataatactaacactagcagtcatccctgaatacctgctgttaggcattgctatacattttcttcacagtcctatgaaagaggtatcattatccacatctcacaactaagcaaacagcctcagagaagaaaagtaactttccctggtcaaagctaccaaatattcaaactaaggtttctctgaaggatcacatgacccttcctctagatagtactttgcagacactatcttccaagggctgttaaaaaaatattggtggggggcagggcagggaatt

SEQ ID NO: 59611 - DNA, 2076 bp, Homo sapiens
gttacacatcctgtctacattttctcttacatggttgcttagtatttattttcacccacctgacctcatgtgtacagctgtaaagggaggtaattaaatataatactagctgttcgtacttttgaacgctttccaagtttctcttatttatttatttagaggcggagttttgttcttattgcccaggctggagtacaatagcatgatctcggctcactgcaacctccgtctcctggattcaagcgattctcctgtctcaacctcccgagtagctagaattagacatccgtcaccacgcccggctaattttgtatttttagtagagacggagtttctccatgttggccaggctggtctcgaactcctgacctcaggtgatccgcccgcctcggcctcccaaagtgctgggattacaggcctgagccaccgctcccagccgtttctcttatttaattcttggtaagttctttcagttttacttcctgttccctttttagtcttaagtcttaaaactgtaattgcacagcctttaatgtgctctcatacatttattgttccttgctggaccgactgccctttcaataatgccctttcatgaacttttcctatttcctattctttttaaaggtgcagaaggaaaactaagctcatcacagacttacaaaaagccgggtttaaaagaaatcttcgaaattatcatctcgtttcacgttaattaactgagcccgcggtcacaaagcttcgcaacggcaaagccaaaagcaagattcatgcctttcaactttctcactacccaagtagcaccgcaagccgaatccgcagggcagtgccaacattgtttgctactcttgcgcagaacaaaaatgctaatcactgcaactgctttacatgaaagtgcacctagaaagacttcaaaacccagaggtacattaactttccaggcaagttcctcccagcctgtgtgccacgagcgattccgaatgtggtgtgccctctcccacagtgcgaagctcgcgggcgctcaggctgccgtttgaatgaacgcacgagtgggagggacgcacaagcagggttgcaagcccggggctcgttagcagacgcggagatgccaggacgggcttcgcactcggatctgaatgaccctggaacaggaatcaccccacgccaacagcgatgggggccccgcggcaccggcccgacccaaggaggcagcagcccgagaagcagagccctgtccccagtccccggaacctcgcgccccgccgagcccggcccggcctgcgaagtggagagcacaggcagccccgagcacgcccggttgcaaaggaggctcctcggaaatcgcagcccaaccttaccccaggcccgggttccaggagccgcagagaaagcggggccggcaggaggaggcacgggccaggacttacctggcggcagcggccccacacctcctccaacccggactcagttgtaacaagaacctgaggccgctggagaaaaggaaaaaatgccgtcgcgggcggggcagacccacgagcctgcacgcagccccgcgccgccccgccccgtccgcgcaaacacgcgacctcctcagctcccattggtttctgccagcactagccacacccctgacagccccagatggggacacggaggggcggggcccgtcccaagtgcccctcaggatcttcccctgccgctgcctgagggagctgcccgggactcggtgacacctgatgtggcctccgatatcgactgggaggtggaagagaaatttggggaacgcatcgagaaccgtggaaaagcaaccttcgcagggggcaaccttctcacggtgcccccgtgaaccttcacagttggatggaagtaaacttgcccttatttttttataccccagcttttagcttgaaaatatacagattagccgggcatagcggcgggcgctataatcccagctacttgggtggctgaggcagaagaatcgcttgaacctgggaggcggagattgcagtgagcagagagcgtaccactgcactccagcctgggcaacaaagcgagacttcgtctcaaaaaaaa

SEQ ID NO: 59612 - DNA, 1397 bp, Homo sapiens
atgttaaaaaaaaaaatcaaggccaggtgtggtggtttgcacctgtaatcccagcaggccaaggcaggcagatcgcttgagctcaggagttcaagaccagacttggcaagatggcaaaacacagtctctaccaaaaaaaaaacaaaaaaaaattagctgggcattatggcacacgcctgtagtcctcagctactcaggaggctgaagtgggaggatcacctgaacccgggaaggttgaggctgcagtgagccgtatcgtgccattgcacccctgggcaacagaatgagactctttctcaaaaaaaaaaaaaaaaaattcaatctgaaccttaactggaattgcctgtattattttttttagcccatcatttggctaaatatttcactctctaactttctgagttgctttcacacaggtactgccaaagcaaactatcagacttaagtttatcacaggcaaagtttaaagggcaaattgtgacctccaagagatgaaataaatggctcttttcatgaaaaagaatttggggaactgtaagtgatctggggcacttcatgctgagaggttcaagtataaagggtactaaacaggtggctcccagaggtaattttagccagagtgttctaaagtgtggcttttcggagcgtcagggaggacagtgccccagcctgtcactgcagaaactccctcgaacattcaagtacattcacagaataaccaaggagagcaaagccagaactgacactggtttaggaattggaaaattgaaagttgtattaccctgtgagggctgtgttctcagttcttggaacttgccctgagaacagactgtcatgctccatttttgcctctgataaagagcatacatgagtttagcacgaggactctgaacataaccatgacatttccatctggtaatagtggaagagtcagggaagctggccgaggcctgaggctggtgaaaaaagtctgagctgttctgacggggccacagccatttatgtccatggctttcaaactcgttaaactgtaacccacattaagaaatgcattttacataataatccagtacacacatatacacacaaacacactactgagacaaacatttccggaaggaatacttactgtatctgtaatgcactgtattctttattattctattttttgttcacactgttcataaccaactaaaatgaaaatccagtttgaaaaaaatactgattataaaattccaatcaggctgggcgcaatggttcatgcctgtaatcccagcactttgggaggccgaggcgggcagatcacctgaggtcaggagtttgagaccagcctggccaagatggtgaaacccatctctaataaaaatacaaaaaactagccaggcatggtggcacgt

SEQ ID NO: 59613 - DNA, 2332 bp, Homo sapiens
aggccaggaggttgaggctacagtgagctgagatcacaccactgtactccccctgaaaaaaaaaaaaggaagaaagacaggaaggaaggaaggacggaagaaggaaagaaggaaggaaggaaggaaggatggaaggaaccctgtacagaatctaatatggacaacatacatcatgtaaaaaaaattaggggatggttgttagagaaatacatagccacacatatattaaatgtcttcccaaaatgctcaatgtatttatgacctaaagagctgatacttagctaacccacataacaggagctctaaatagaacagacactcagccagtgccggttaactaacaaattcctctgcagaacggcagctcaagaagcagatgcatttcaccctcgtgcttatgttggcactgataacaatgtcctgctgggtttctctcctcatcatgtccttccccacaggtcaaggccagttctcagttaatggtttgagtcacaaggacatgcagtcctcttagagtggacaaatgccaaacttgctctatcaacaccacagaaggatttttcaatggctagaggtctctatatgaccaggaactcctagccttaatatagactttccaatagcctaggaaaaattctacaaccagagatgcaagtactcacattaccaccatcaccctttcacctacttacctaaaaagggataactagaccttggctggggcttattgatataggccacagagtaccctctgtaccttgacagtctatttcccagatgtaatgcaatgtccacataaataaacagaataactctgtccccaaatatgtttcctttaatcaaagttcactgaaaaacaaaaactaaggatgatttaacaaaatagtttgtatgtgttcattgtcctctttccatttatactaaaaagataagaaggctgagtgcagtggctcacgcttgtaatcccagcactttgtgggggctaaggcaggtggatcaccagaggtcagaagtttgagaccagcctggtcaacatggtgaaaccctgtctctactaaaaatacaaaaattagccgggtgtggtggtgggcacctgtagtcccagctactctggaggctgaggcagaagaatctcttgaacccaggaggcagaggttgcagtgagccgagattgcgccatcgcactccagcctgggcaacaaaagtgaaactctctctcaaaaaaaaaaaaaaagaaaaagaaaagaaaagaaaaggaaaaaagaaaagaaacttgatagaatggtcagatggctttttcagttgttactttcaacaactttcagttgttcagtttttcagttgttactctatcatacacatcatagcatgatatgagtgctaaataaatattaggcaagttatcatcagtaaagccaatctggaaatttacaagattcagctgaaaattgtttcttgtctcggtttctatgagaataccaggggaacactaccagggcttgtccaggatgaatgtctccaactttacaccttattacttgctctcatgcactagtgcttcaccttaaaatgaatcataacagcaagttatccagcaagaacacgacaggaggtgatctgtctggctgtggtgcttccacagccagccacaggaggggtgtaaaaagattctcttgcctaggacaatggcatttctgattgctaattttgtctgactgtggtttacaaattcaacttcctttgaagatacgcattcacttaattctctggcccagcaaaccagaacagaatttctagctaccaatgtgaatcctgaatatttgtttccttttgggtttagtaaagtagaaaatgaaacaatcacaagaggaaatgtgcctagaaaaaaaacctgattaaatctgtggagagtggttggtaaaaatggaaacatttcacatttcaccaaaaatctcacatgttgctgtggaaaataaatgtattttttacttaaatgcatgcatttaacaatcaccgattgattgccatgctgggtacaaaaggtggggaaatgcctttgcatttagagatttacagtctgatggaagaggaaaaaaaaatccaaaattatataatggcctggaagggtgcttagaagtcttcttgggagaggccgggtgcagtggctcacgcctgtaatcccagcactttgggaggctgaggcgagtggatcacgaggtcagtagttcaagaccagcctggccaggatggtgaaactctgtttctactaaaaatacaaaaaaaattagccgggcctggtggcgggcacctgtaatcccagctactcgggagg

SEQ ID NO: 59614 - DNA, 858 bp, Homo sapiens
aatataaactaagttcctcccaaagttagtttgaccagtaatgaacaaggatagcttggaggttagaagcaagatggagtcggttcggtcagatctctttcactgtcataatttcctcagttacaatttttgcaaaggcagttcagtgggacgagatctattcacttgagtctcccacccctacaggaccctgcagctcctggcgtcctggttgtaacaggaaaagccatcccacctcagcagagacactgactccctcagttggaacccagggtgtctgggaggtgatgtcgctggtgcaggtcccatggttgttgatctcaacactgcagagggactggcttcaaagcggcatcattcccactctgctcccagcttttcattacgtgccccaagcttgtccctgacctttatcctgcacgtcatgccgggtttcagcataacagagaccttttctgacaagacagtgaaagcaattgagcttattttggagagctcagagctgctctgttaaaaattaacaacctcttaacaattccctttcatttcatctcttaaaaggctcctggtccagcagatccattgggaagaaataattcaaatgatttacacacagtcccataaattcatcttggagttttcacactgtcatttcccactttcttcctttaacttgttattgaaggcccagctgtgaaaggaaaataaatctccggaccctcaaatcactaagccaaagggaaaagtcaagctgggaactgcttagggcaaacctgcctcccattctatttcgaaaaaagatagctactaagataaattcccgtggataaaggacagacaaaactcaaagtcatccct

SEQ ID NO: 59615 - DNA, 1939 bp, Homo sapiens
tcgtttatttatagcagtatggactcatgggtatttattttattctgtaaattatgatccaatactatcattatttattttgttgctcaaatctacaatatgatttaaatggtagagtagaattacatgtctgtaccacaaattattattattatacattttgagacagtctcacttgatgcccaggccggaatgcagtggcaagatctctgctcactgcaacgtccaccttccaggttcaggagattctcctgcctcagcctctcaggctgattactggcatgtgccaccacgcctggctaatttttgtgcttttagtagagacggggttcaaccatgttggccagtctggtctcaaactcctgacctcaggtgatacgcccacctcggtctcccaaagtgctgagattacaggcctgagcccccgcgcctggtctgtgccacaaattcttgatccagttcttcaatgttggacatttaggttgtctccagttatttgataccattaatgatgtctgagatacacacatctttgaattttttatgtgtttccgtaaattagttttctagtaggggaattactggatgttggaaaagtttatgcttttggttttgatccaagaggcataaattgtcaacatgccaacatggaaatcatacactccacacattctacccagactacccagctgtaagcagagaggtgtagatccaagtctcctgccggcagggtgatttagcgcagttgtcaataatctgtacaacacgtaacaataaagttattgatgttgaggaaaagacttccggtaggggcatttctatttccattgggtcctgtcttctccaccttctacgtttcaaccggaaatagtcgtacccatttaaagccacgtcggtactggcctcggtcccgccccccacactgcggaaccgtttccggggtcagggcattccgtcccgccccgccgccggtgcagtgttggaagctccggttctcccggaagtggcccaggtctctctgtcggggtcccctccatctcgctgctgctgaaggccgcgagggcggcggcgatggcggaggcggcgctgttgctgctgcctgaggcggcggcggagcgggacgctagggaaaagctggctctctgggatcggagaccggacacgacggcgccgctgaccgacaggcagacggactcggtattggagctgaaggcggcggcagagaacttgccggtgccagctgaggtgaggtgatgggcaggaaccgggccggggcgatggggctgggattctcctcgggcgccccggcaggaccccggcctcactagcctctgcccaggatatctctccactcctccctggccatggtggcggatccggtgggaggggcctcatctcccaggctgtcaggcttcgctctgcctgcgaccccgactctaattctgcctggggacggctgtgggggtgtcctgcagctggtgctcgccggaacccagtcctcccccagcagcatgggacggttggcccggagccttgcaccgaacgttttgccccagacgaggcgtcctgtcagccgaggcgtaatcctgctgcccactctctcccagaaggagaggcagtcaacccgaggtgctgtgctgcaggacagtctccagcgcgtgctcgtttaccgccttaatgattcacctaggttgctttgtccatgggggtcttggggagaccaaaacttggtcctgagtgagtttcatttatcgcacattgaactatgagctctcaatcaagtgcaagttatgggagatcagatttatttcacctattgcaaagcaataaaaatgaattttatttgaaagttggctcagtacattattaagcagtgctggttttcggtgttagagtcaatgtgtttaatccacttaccattaggatattatgcactact

SEQ ID NO: 59616 - DNA, 1164 bp, Homo sapiens
tgtcattttctcaagtggaaccctaataggattcaaagtgttagatgtattgtgctcttaagcattactagaatttagaattgtcatagtaaagcaggagtagataaaaggaaactggcaggagtagacaaaaggacagattgaagtaggacttgctgctttgtcatttaacccagttccttctttcttagtgaggagatcttagtgaatatagcaatgacagttcagtttatcttgtagttgtatcttctatcccatttaggcatagcagaggtgtggagttggtttttgtgaatctgtagtacttgaagcccacacttgaatgccaaagagagatttatggccccttggggtgggagcattgaggacaatctaggaactgtcttgggcctctctgctctaaaaactgagggttactggttcattcagacttggtcaagttctcagggatcatttcatgatcaaacaaactcacaggagagtgagttataaattaggatgcccatttgttaatttactctgacgaagaaaccttttttaggaattagaggacactttagtcaccagcctgtgcacccactctctgcttatcaagggctctgaagaccgatttagtgatccctgaggtgtgttagtaatgatagaaccagggcccatggaagtaagggtcttgaaggagctttcatgtattaatgaaaaataagcagttcctgaattatttattctttcttcctgagaatgtcagcggcatttgaaccagagcaactccatctcgagagagagctaggaaaaatggggatgggatttgctgggctgcattcccaggaggttaggtattcctagcctctagatgtttacatttaatgaaacagattagtaatgtttactaaacacacccaggcccaggaatgtcctgatatcctgatatcttgagaacaaaagcattcctaattttgctttaaagataataatattgattcttgcaaaatatagtaattaaaaaaaattaaccctttatcacaagcctttgtagcagagtacatatccccatgatgttttttgttatcctatatataaacaagcattgatctagggtgggcacgttactcctcttacttttgggaacaccctactgtctacggagtacctactctttcaccactt

SEQ ID NO: 59617 - DNA, 614 bp, Homo sapiens
tatgaaggagactattcaataaaattgtaaaacatagaataaagctacagtattaaaacatggtgattcaagtgcatgagaaaacaaagcagattgttagaacagcacagagaaccaaatacttatagttctatttattagatttagtagagcaggaagtttagcattgtatattattagagaaaaaaaaatcccctactcctactgagtttttaaatctgtattccccattcgtctagagaggcatagaagcaagagagaacttagggacctagagaagactcagtgtaaaaaagtcaggacacagcagcaatttgctgtgaccaatgactggacaccagatggcagcaaggactctcagtggtgtcaatatggatggatgacaacagctagaaagaatgccctccaaatcgaatcattgacattgcatatgcccagtagtgtattagctcacaagagctaattgttgaagttttagaaattttgtgagctgattgttaaacacagccattgttaaaattaaacaaacagaattaaataacttatattaacaacccaggtagtaaatactcaaagctcattacttcctaaatattttattatattttgctatt

SEQ ID NO: 59618 - DNA, 632 bp, Homo sapiens
caaagagataccactacacacctatctgaatagtcaaaattcaattcactgacaacaataaatgctggcaggatgtggagcaatcgaaactcactcattgctggtggaaatacaaaatgatacagtcactttagaagatagttggcagttttttacaaaactaaacatattcttaccatatgatccattaattatactcctatttacccaaagaagttgaaaacatatgtccacacaaaaatctgcacacagatgtttatagcagctgtattcataattgccaaaacttggaagcaaccaacatgtcctttggtaggtcaatggacaaataaacagaatagccgaactttacactgtggactatgagtaataataatgtgtcagtgtaaggtcactgatcgcaacaaatgcaccactggtgtgagacactgatagtggtgcaagtcctgcatatgctgggggaggaagtgttatgggaaatctctgtatttaccattaacttttgctgtgatcctaaaactgtataaaacatagtgtttttctaaaaccagaaaagtgacaagtaaaattatctgtacttgatatcttaagtaaaatattttccctaaaatacagaatttttaaaacagaga

SEQ ID NO: 59619 - DNA, 1124 bp, Homo sapiens
aaaaaaaaaaaaacaagaccaatcacaagtaagatgtttttctctaacagatctggaatgagtatagaggaagattctaaatttaagcccaaattgctgcacccttccatcgcacacaaatacgaacaccatacaagggttcccgtgcttacatcaaatggtaacgaggggtacagcctattgtctgagtctacttatcgcccttagacaaatgccagaatcataatcagagtgagaaattacgcctgagcacagggggctattgcagagttaagggtgggatgctcaaggaaagctcaaaatcccagtgactcaagcaaagacgggggggggtaacccgggcctccgcattacgggtccgctcaatgccttccccagatacccacaccaattcacagaacgcttacttcctccccaagctcccttcgcaagtgcagtccggaggcaccaccgccgccgccgctccgaggagcgggggaggcgactctgtccccgcgcctggacccaggaggacgacgacgaggagaaagcgatgcgcgcgcggctcccgggaaccggctcttggctagcgaggagcccccgggatggctgagaagcagaaccaacccgcccgccgcctctccagggtcaagcgaaactgggtcgcaggaagaaaaataacgaagagattgtagattaagaaaaggcaacaaaaacactaccaggccgctaggaggaccgcctcaaaatgccgccggaagtcagaggtttgccctgttcctctgtagacccaggcagcttccggccgtcagattagtcgtcagtgcgcagacaccacccttcgtggacacgccctctaggcgtaaggttccatgcgagcggtaagagtgcggcgggacttggaaatcgaatctgtgctctgtgagagatcctaggaaaggaaactgggagcccgggagaactaaaattcccaattaaaagtgaatttaagtgagttttctctttttattacataattccttaccataaacagctgttgtaaatgcgcaaaatgcggcatttgttgacagtacctagagccactcattcattcgttcaacagtgtttattgagcagctgagctggaatgagaggctatgtttgtc

SEQ ID NO: 59620 - DNA, 1973 bp, Homo sapiens
ggactcactcgggtgaccgaaagagagcagagagggaaatcgtcccaaataggcagagcttcagtgttgcatctcatcatacaccttgggtggaaaaggtgtttccagtgttagaatatgcaggaattcatggagagtggcaagtgacatgactggaaaacccctcaagaacctggaagaagaaatcttgacagattggagacaaagagattggagaaagggggatgtgaatggaactatgagagtgggcagaaagtgtgaagatctttgtatcatttattaatgcctaaccaggagcacccacaacagaatagacattaaacagctgcataaacaaatgactcagccagttgatgtcagtcagcctgtgtcaacagccaccccaatgctggcacaaaaggcactagaacagaatagcctgatggcagagatgaagtgtgcatggctccagcagcacggactcctctcattaaggctgatctagctactgttgctgccccatgtctaacttgccagcaacggagaccaaagttgagccccggaatcagcaccattcctcatagagaccagctagtcactgggtggtaagttgactacatctgtcctcttccactctgggtatgggtttatctcgcctgcctgtagggcctcaggcaagcatcaccatacaagggcttacggagtgtttgaccactgataaaacatctcacataacatcctatcagatcatgggctccactttacaacaagggaattgcagaaatgggtccattaccatggaatccacttagcctctcacataccagaatacctagttgctgctatcctgttactgaaataaaaatggtttgttgaaggatcaattgaggtgctaacttggaaggcaacatcctccagtgcacactttaaatcaatactcatgtggtgctgtgtccctactaggtagtatacatggttccaggaaccaagttggagtgtttccatataccgtcactccaagtaacccactcggagaattagtactttaaatctacaaatatggactctgtacttataaaaattccggtttccagagagcataggaagagttcctttaaactgaaagctgttgttactgtccagtcatttcagtttcctcatgctgattgattatcaggaaggcgaggagttaccatgggttttctagccatgcaggaagggtaattgactccaataatcagaaggacattgagggctgcacttacatactgaatgtggcagggaagaatatgtttggaatccagcttaggcgttctgtaatattcccttgtccaaatttgatgtatacagacaattgcagcagccatggcccaagagggcccagtgattatgactcagatccttgaggattgagggtctgggttgtctcaccaggtaaaccacctagattagaagaggtgctagcaaagggcacctctttggggaaaacagaacgggtaggggagaagaggaatgacaagtattggttatggcctcgagactagctgtagctgtgaaggttgtagtttatttcactaacgttcctcttgtatatttcctttaggaagagggaccaagcaaaaccccagaagagttgatctcaaagcttattttatgaagaaaattgacctgagtgacacaaagggttggactgtagtagatgtcacgttttgctgcctagatctccatccagggatgaactcttatttcctcagcttctttgtctcctcagcttctgggagggttggcagctgatattctcacctgagtccctttctaggacttgcccttgcctgaagagagctgtgctgcccaacatgatgcctcctccaaggtacaatccacacccagtgactaataaacaggggttacaaaggcatgcctgcttgccccagtttgggacaactttaccaggccaacccagcctcaaggctctccacaggaacaggtgaggc

SEQ ID NO: 59621 - DNA, 2449 bp, Homo sapiens
atgtattaaagaaggagaaaagtataaaaattagtcaacaagcagagaaagaaagaaaatataaaggtaaaaatgtatgttatccaaatgagacctcttaagaagaaaaaataaaggaaattcaaaaaataagttaggaaatagtgagtaaaattatgaagttaaaaattcaccaaaaatttattgatatgtccaagttcagcttgtagtgaacagactcttcttatgcagaatttgagcaaagtgctaacacaacagagttaggtaatgggatgagggtcagtcagatcactctatttttggaaactggtttcatgactgcttccccttacttagtcataaacaggctatataaaaagctgtcagagtggaaagagggagaggatttgtgaatttttttttttagcatgtttttatggttctgtaagtcaccaccctcccaaagggatgaagtttcggggtgcactccccttacctcagcctagtagggggacttccaggagataatgagagagttggatgtttcctcaaatttacagacacaaagactggtgcctggcttctcctgataaagctaaacctgcatgtggctggtctctagttggctagatagtagtagttaaaatgaaaagaaacacttaatgttagatgccatccaatagggccacctaaagggatggaaggttctcaacaacaagagcccagaggtagaagcaagactcttagcggggaaggatggagtcgcaagtgaaaacctagacaaagaagcatctgtcctggtccagaggcttccccaataaagatgtctcacacaactctaagaagttagaactcgagaaaaagactaacaagaaaaagagtaaggtgtgtttgtggaagaggtgaggcagttgttttcctataaataatgttaaattaaactaaatttggtctgaggatgcctcgtaacttgagtcgctacataacaaactgcaacctaacttaggagtattttttttttgtactaacgaggtgagtctcagccaatcacagcagccaagctacagccaatcccatgtggccaactgatcagcctatgcccagtaagacaactgctcacctgtaactactcaagctgcttctggacctcatttccatttgctgtttataagtgctgcctgcccactttgctgagcagaactctctgaacttctttcgtttttgagggttacttgattagaaaattgttctttgttcaattaaattttgctaaatataattcttttaaagattttcttttaacaacaaagatggggatatttgaacaataccttggttggaggtgacattctaatttctaaattgaggctatttgtatttttagcaggacccaaggactgtcacttaaaagcaggctaaaaagccttgaaattttctaactttccatgcgagagcagtgatagataaccccactacgcaaaatgtcatggggcaatgggagacaaaaactaaagctgtgtttcaactgcgtctctgaatgatacgattatagcacttacacaataaccacttgagaaaaaagaacagccttgcaccaaaaatcgaatgagaagtacaagcacagtgaagtaacaggtcactttacaaaaaaaagtaaaggctgaaaggggacgagcaaattgcccaagtctgcatgggtgataagtagcagatctggggctcgaatccagatcctgagcttttaatacctatgcaacacttcctctgttccttcccttctgagaacgtcattatgttcattggggtgtatcccctgctatggtttacaggggagggttcacactttcaccattctgaaagattattttgaatttaaaaagctggcaagatgtctctgaacaatggaacatagcccaaggctgcaattttgttgcacacattacagtgttttaaggccactggtggcctgttctttgagatgaaaacaatacatcagtaggaacaaagtgaaagagagtaaactggtctccaggtacccaaacagtatgtgaagtcaacagaggaacacttcctgtggtctattaataattcagaagccctttatcctcaaccctcctccactctctaattcctaagtcttcttcctagtgtctcttacttcctctttccaaatagtctgggctggcaggctgcatttaggtaatcactgcacaatacaattactgattctgtttacaagattcttgctagtattttatttttaccctttatagtgtttggcttttaaaagcaaatgaatatggagtcatgattttttggctgcctttccctttggcatatgatatttatgcctttaaaacttgttgttgttccagggcatttcactgatgaaatttatcaaaatgaacctacaaatcagccactaagagactgcatgaataaaaactgttagtaggaaaatgattatgac

SEQ ID NO: 59622 - DNA, 1124 bp, Homo sapiens
actacttaataaattacattacatataccctggaactattttctccatgcattgcatgtgctatagcatgaattcatttgtgttcttctagatagtttatcctaagggaatctactaagcaaaataagaatcagataatagttctttatcacacaactcttcttcctttcatattccatgctaaataatcatgcatgatccaaacctcctatttaacacttcaccctcttcttcctcctatgttccatgtacaaggggaaaataaatgatccatagttaactttttttatgtgaagacaggaagaatatgaatcatacatcaagttagagtataaatagttacgtttataaaagatttaatttcttgaatctccatagtcactggatatgcgtatcatccaaggttctcccaataataaaaccagagccaggaaagaaaaaagaccctgtctttagtgatagcccattgtgctaaagtctacttatttgtcagggcaacttggaaagttctgaaagacctggccttcaaagtttaccattttgtccaccagctcagtgcactgacttgacacgacatgaggcaaacaagtgaggagagtggcccaccacagtctaagattctattgggttacctctgaaacgcgaagacatgctgctcacagaagagaacaatgggtacaaggactgcaaggctgcaaagcttcatcccaacagcaattttctgtacaacaaatttctctgaagagaaaaacccagatcattgattgcataacagccttctttacacactggttaaaatataacggcatgttccctcttgttcctgtgggtcaatcaacttagcttccatttccactcccaaaaagagaaatattattggcttagttaggctgttgcttgataattaaacactcaaaaagagtatgatgagagttgctcttaatttagactatctagaaaatgtgtaactccttggggaaggtagggccaagaataaaagggtagtaatacagtaggatcttgtctggtttattgcagaacaatagctatagaatattgactaatggatatatagcccatgttgagggagatctaccgtgaagtactataaatgtcttcccttg

SEQ ID NO: 59623 - DNA, 466 bp, Homo sapiens
aaaagcaggttctcaatatattaaaattcacatgaaaaagataaaccaggaagggagttggcaggaagccaggaagcctcctgtgttctctgcaggaggcttatctagttcatcaggatcttgggaacagctagtcttcctctgctgcattctgagagttaggtgatgagtcaccacctcaagaggccatctagttctggccgatctatctgactggatcgtggaccctaggacccagctaacttgttctccagccaatttagaagaatgagtagcaaaaataatatggcaagtatttcttgaagtgccctaaccctctgtccttattagtgtaccctgtcaggagtggcctgccttgactttctgtcaaactggagcagcctgagactaagggcaaatgccctcttggccttggccggccacaacttggatatgcaggtcaggcttattgttagggaagctctga

SEQ ID NO: 59624 - DNA, 2238 bp, Homo sapiens
tctacttggaagacattttcctctttctccttgttattaggcatttggcagacttaacaatgaggctattgtaaccccagaaagtcattgcaaagtgcctgcttagggggttaagagtagacactgcagggccttggaatagtaatggtttactatttaatgagttccctgtcactggaagtcatagagagattgctccaggcatggtgggagaaaagccagtttgacaggcggtggagggataagagggaagacttgagtgacgtggcacaaactgggtcagatctattaaagaggcagccctgggcagctggcaagagatcatgtcaagagacacaatgcaggtgccagcaggaccagaagatcagcttcttagagcgagtgccacctggaagggggaaaccaagggaaggggcacagcaaagggcaaagctgggtggtggaggaagtacccaaacagagggaagagccactctggccacatcaagtgaatactgatgatcgggaaacattcatgggaagttatttcactctctcgagtccagtgtaagtgagaaagtgtaatttaatttaaaagagcctaatttagccttccatcaactgtagatcttttaacgagacctttattcttctaggacagcatttctcaaactttaatgtgcgtaggaatcttattaaaatgcagattctgattcagtacgtctggggtaagggctgagattcagcacttctaaccggctcctagatgcccccggtctgagcactacacttagagcaagcaggtttgaacattgcgacttataacagtggacccatggtgtagacaagtccagaaatgactgctgaatcaacagtttttatgttagcttccgtataccttcagaattcagtgtttgtgtgcattctaattctctaaatgatgtatattagatttccattaacgaaaatatatgtttaagtggaactctccaattccaacttgccaaataaaataaaaaattcctgtcattttactgacctgtctctgagttgttaatggtgacatgctgggcaatgactaggttacctgtttttgtccctggcctgatgtgggttattaaatatatgtagatgttaggcatgagaaaacatttacgcagttttctttttgtcactcattcacaggctcagttggtaaactgtctttcagaaatagggagaaagcatactgagtaagagccctctttgacagcttaaaatttaattacaggaattttattaggaaactgtcaaagtgactagattgcataagaggatcggtcaatgcctctaacttgttctgagcatcagctctgctttctggatcatgaaattggcaggaacgtactgggcaaaacaatgccaagttcacgaagatagcactgctggcgtttactgcaagcccatctgcacactgggtggaacaaagaacagaggtcagtgacgacaggcatagtaaatgtaaggaaggtgggcccagggctcatcccaaggactgagagcacatggaaatgtcccgtgccttaagcctcagtctgaaataggctgatctaaggcaggctaagagtttacccggtctttacaatggagatcacaactgtgctcccagggacagactagggctgtgtgtgtgtgtgtgtgtgtgtgtgtgtgtgtgtgtgtgtgtgtgtgaatgtgagtctaggtgaacaaaatcactaagttgactgatactttaaaaggtcatataatccaatgcattgcatcagaccaacccagatgtcataatttccagacaggaatccattctattctaaatactccgcaggtaggtctatttcacaacttatctcacaattacttctttctgttcagcatttcctacattcaggaaacatttgtttataactaatataaatcaattttttaaaacttacgaaactcttactaaaaatctagaaatgtccctggttctgtagggaacaacagcaagagtaaggcccagttcctgcccacttctcattcatcacaactgaattcttccaaaaacttttgttgatcctatattcagaattaattttttccctgaggtcccatgatatttaatttagaaatttgttatcgcattgatcacattctgctttttattatggtttatgtgtgcatgcgtgctggttaacacgcttctttagacataaaacagagaagtttggattggctaaagcatctgtcccagcttag

SEQ ID NO: 59625 - DNA, 1705 bp, Homo sapiens
gctcaacctatgagacctgctcaaattcatactgttctggttttgctttggaattctttgtccagtaaattagctcttcataacgcagttccaccatttcttatccagcatagattcattctgcccttgacagctggctaggtgtgtgtgtatgtgagtaggggtgctattgattggcacatattgtcccccctggagtttaggggtggcagaaagcttttatagtaccaaaaaagtaaacattgataatatggcctgacaacaatcagatatgctaagctctagaagcaaaagcaaggtaggattgcctccaaatgttgacaggtattagccataccacagtaactagatctaatgtgagggctaaatgcctggagaggcagaaccctaaaggatgcttagttatagctccatgctgccgccgagtggcttgatgctccattacaccctccttggatccaaccttccattaaggctgaaggctctagagggcagagtattcaagatgttagatctggtccaagcccaaattctagagttaaaagcagaggggttcttagtggctgaaaaaaaacaaaacctgatgacatttgggactccagttttgaggaaaggctctgatgatgaggcttacttctgcaggctaccagagactcctgagacttcaacagcttgactgatttatcacacactccaagtggcccagagacaaggacggccagaagagatgggcccccccggaaggcatggttccaaaagtgtgaggagcaaagtcaagggaggcagggtaggaagaggggacagaaagaggggcttgcaacagatcaaatgctgacctccaggaacagggtttagggcaggtgtgatgtttcccctcctggccctcatcttgaacaaagaaaagggaagccacatgaagctggtttgaaagattatatcaaaattaataccactgcagcttctatccttggctaatggcaaaagcgagaagggtacctggaaaataacttctttcttttcctctagattttcgaagaagcaaataaatcaagaatagaaacctatatataggaggttgggcctcctgcaaagaatgaagcactttttgttaaatacaggagaggctacttggctgcactaatatgtgctttttggaatcttatagagtgtcaccaagttgaactttggaatggcttgaatcatccctggagcatctgtgccgggcagtcaggagtgagtgcaccgcctcccacccagccccattgggcctcacaccctcttcattcctttccccatgaggcaggcaaacacggtcatgaccattttggggttcacttcaaccaggtcttctggcagggcatacactcttgctccaatttttcgggccatagagatggcatatctaaaagggagaaaagaggaaaaataaggagagcctgagaaacacaacacgaatgggaccctggagggtcacagtcacagtcgttccatagtcaggacagaactcactcctgcagtggctggagtcagtcaccagcatcctcacacttttgtggacaaattttggctcaaccaaagattctgacaaagcatcagacttgctggctagtctcgtgatcattatcaagtgtattatttgtccttggagacctcttcagctcctgccttttttttaagttaagtttttttttttttttttgtagag

SEQ ID NO: 59626 - DNA, 1159 bp, Homo sapiens
cttagaacccctcactttcataaaaaatattcataatgtggaaaactgaaatgaattcattactatgaatatgttcacagctatatcacactgcagaaatggagagccatccttaattacctacatgtaatatttctaaaaaaggtgaattcatggagattgacatggaaaatttggagtctccatcctctgcacacatagcaaatggacatgtgaacagatattcctgtagctacgcatggatcattaacagtcacggcaataagaaatgctgagaaatggctgtgtcaaccctgttgtttcaaaacaatgttcccactgtgttgacagtcgacaaactgtttgaacaagtcaagctgtcagtacaagctccaattctttagaaattagaataaagatcctgctgagggaaaaatccctgtggctctctgcttgctctaattatcttaattagaatttttgcatgataatgtttgaagacatccaacatggaattataaataagcaattgactgaaataatggacacactttaataaagctgttcaggtttctgattgctgtactagaatttaatttctggaaaaacattacttgtctacgtttggctgccttataaagtatttagagtgctcttgcaggctatgactttgcctgtctcctggaacaacagaaccatcattgtttaccttcttcatattgcctcccagtttggggtatggcggtttgtttactctgttccagtcaacaggaactttgatcttttcatagagctggaagatgaccagggcatctgataagtcactgaacaaaacaaacacaaaaggattctcagatatccaacatttattcagggcctacaatgggccagacactttcttacatattagttcaaagaatattcacaacaaccctgcacacttggtagtcgtagctccatctatagaggtgaagaaaccatgactcagagagattgggggactcactcttcccaggtgtgactagctatgcccttccatccaacatatgctgcctcaggaaaagaaagagcactatggtgacgaaataatctgtacaccaaacccctgcaacatgcaattaacctatataacaaacctgcacatgtcccctgtacctaaaggtttacaatttgtaaaact

SEQ ID NO: 59627 - DNA, 2754 bp, Homo sapiens
caaaagagtgaaactccgtctcaaaaaaaaaaaaaagagtggattccacacagtgtaatttcaaggttataaatgtaagcatgtttaaggcttttcatacgagaagccaatttgttttctgaaaactgtgttcctgctagtgtacattcctggcaggctacacacttgttcttcccactacacaatcatcgagacattgagaattgtcttctgaaatatttaatactttcatatgggaaaatggtgtcttcttgtggttattttaattgtctttgttttaaattctctgttttccaatggttcaattttctagtccttctgagttttgtaggcagtaagcatggcataaatcctaaataaatagaggaaatgcttcactatttttcctggaactggacttagctattttatttttaaaaggaaagaaaaacctagaaaagggaaaatctacaagtgtcagaccctcccacacttctatggtttgttccagaaaaaggaacagcttctttactctgaggaaccagaaagaagcttgctctgttcctcttctcaacagccagagcttcagcgctagcacctgtgttatcaagagaagctgagtccagaacacgtgatgggaagcatgtgggtatgtatgtgtcaaagctgctttgagcctcactctgtgctttttctcttcttctaacaaattcatcaccggtgttattgtgtcagtgcatgctgagaattttatgcaacttagtgtatatctgattatcaagcattcaaatcccaacatctgtgctcaaatataaggaaataggtcaaacagagacgcctcctcctgctgcaacgcctttcacactgcgtcaaagagttgcatcaaacaggatgatcagtgttgcaaggtgtggagaccacaaactgtctgccaccactgccaggcaccatgtaacctcaattcttccctggcaaatagtgtctgacacagtgcaaaagggcagcactgttagaaagactgcagctctaactaaaactgatgatcaagcaagaggaaaaaatccgattatcagctattttagagtacatttaaattcccaagtgcaatgacccctaaatgcaaaccattgtttttgaccagctatgactaaaacagctaaaaaggattgagaaacagcaagagagaaactatgccctctaaagaagcagacttcctgccttggctagcttgtgttagagcagattctgccaaataataccactataaaacgtgtcttcaaaaaagctgtatcttccaaaagatgatgtaacagttgctctagggaggcaatagcaatgttcagatgaatggtgaattcctttcctattgctgctctaacaaattaccacaaatcagtggcttaaaacaaaacagctttattactgcacagttttggaggtctgaagtctgaaatgggtttcactaggtacaagtccaggtgtcagcaggggtgtgttccagcttctagaggcttcctgcattccttcgctcatggcctcactcctccatcttctaagccagcaatgtcaggctgagccttcctcatgctgccgcctttctgattctttctctcctgcctctctcttataaggaacattgtgatgacattggacccacccagatgatcccagatagtctcaccatctcaaggtcagctgattatcaaccttaattcagtctggaacctcaagtctcccattgccatgtgacataacatagtcacaggttccaaggattaggatgtagatatctttggggggctattattctccctatcacaaaagggaacaccagagtcttcagtttagcaatcttcaaggaatgttgacaaagcaagaatctgaggctttgagaatgtaggtaattttcccgaagacattctgcaagtaggagatagagctggaacatgaccagatctgtctgccaagtaagcccaggctcatcctccacacgctgcccccatcaggaggcaacctggccccttctactgaatctctacatcagatggagcctgcatatgactcagcagaaacctcagaggaaattctgcttccttcaggaatttcagggcatggtggtgattggaaagagtcaggacagttggcctttacttcatattgcatcacaaccactaagtggctttgggaagtttgctaaaactttcaggttctaaggatcctcggctgtgaaaccaggaacttggactagatggtgtctaagacatctttcagttctaaaattctataattgaatggtcttatgggtaaaaccactttgctgcagaacagtgccactcagagcatagtttgtcgacctctgtcagtccagagtattcggtacctgtccatgacaagataaggagcttaagccaaaatgttaaccaactacatcagtaagtgcactgttcagtactgctgccatttgattttttgtagcaaggctttcgtggtgaaggaagcagtgtgttgatttacttcctggcataatcttcttatctcattgcagattgttagcaaatagttcctggatgagattctgaataatgctgatgtagaaaaaacattaaagttcagaggtgaatatgtgcttaatatctgaaaatttttagagaatgacagctggttgttcttgcctcacagaaaggaatagtatccagtaagtatttgtaaaaatacaaatgatgaaactatctttgggatctgtgatagactgcagtatttcttccagattattta

SEQ ID NO: 59628 - DNA, 3158 bp, Homo sapiens
gcctctcctggcaccacccaatttcggggagcagccagctcatctttctcctacgacaatgtcttctgtcccccataaacactgccctcattttgagtttttctttcctatgtctgtagctttcttctgccgctcagcaaacactctgtcccactcgtattcgtcccttggcgctggcgtctggcccaggggtacactgtgaaggagggcaaccctagattctgagggccctagctcgaatctagcgcccctctaactgcaggggtgaccttagatacatttattaacttcctctgtagactcaggggaacaactttggcactcctggggtccctggattaatgaggtaacttacgtagactccctaaacaagcgtctggttcattgtaagcgcccaaatgccagggggcatctgcagggatgaccccatagtgaatgaaaactgcctcttggggatctctgggttaaacggccagaataaatcgcagaattgagagaaccctctcctgccccaaacctcactgtactgtaaatcccattcattgcctcccgccgttttatccgtgttctcagaccacccccctatccccgcaacctccagtcccctaaagcctcctgggcggcaaaaggacgcccagagagaggttcggcgcctcagttgccccggagcagacgtccagccccgccgtgtacccgattgcggggcggatcgcggcaaggcggcggcggccggcagaataggcgcggaggaaggctcaggcggggcagactgcgtgggggaaggaggaggagagagcagacggcggaggagggcagagcagccggggggagggcgcaggggcgggaggagacacatgcgcgctgccgccgccgccgccgccgccgcagtccttagcttcccggggacaggaaaccttcaagaccgagctgccacggccgcctccccgcccgccccccattctacgcgcctgcccacaccctcctcccctccttccagcgcctttcggtggagcactgcggcactcagcccgagctgccgttttcccctcgcggggaacgctgtgacccccccgcaggagcggcggggcggggtgggggggcccgggagaagatggcgacgccgggaagcgaaccccaacctttcgtcccggccctttcggtagctactctgcacccacttcatcatccccaccaccaccaccaccaccatcagcaccacggaggaaccggcgcccccggcggggcgggtggtggcggcggtggcagcgggggcttcaacctgcccttgaaccggggtctggagcgcgcgcttgaggaggcggccaactccggggggctgaacctgagcgccaggaaattgaaggaatttccccgtaccgcagcccccgggcacgacctctcggacacggtgcaggcaggtgagtgagggccgaggggcgggcaggggtgtgggtgctgtctgggtgtctgtcgtgcgttccctaacgcggtggacagtcggagatcttgtcttgctgggggagggagggtccatcggcccgttgtctcccgaagaagggactcgcgtgggcgcggaagaagcgggccctggagagggcacgggggccctgcctggtccggcgatgcagtgccaggagggcaggggtgcgccgggcctctgcgcctgagagcgaggggtctccggctctccaccctgtggctgccgcgccagggaagtaaccgcggggctgggacttgcaggcgcgccgcgtgcgcgcagtgtaagtgggaggtttcaggcggctgtgtcggcttcctgggccccgcgcagggctgggaactccagcgcggacagcggcgtcggcgcctccaaccagttcaagccgtctttgcatcgaggcgtagcccatcctggtggggaaacccagacaaaggtggcacgccctcggccgagccaggggcatcggcgcagtgccgcgagccccctcggcgacatcgccgagcgatcgggcaactcggtgccgcctgtgaggtgcccaagtttcctctccctgcgcttgtgcgggaaaagagccgccgggcttgtagtgaatcccagtcggctgccgcttcggaagcgatcggccctcttccttccgtgccttttgctcaccgcccacacagtttgggtcctaccaccgaggctacctggttctcagttacccaaccgttgcgggggccccaggaaaggacggcgtggcatattaaaggcaaagtaattaacgtgagcctgttttcctgtgtgagcccggcaagttgtaactcgcgccaataagcagcataactttttcaagttacgtcatgtgttacatacttctaaaacgtctgctttctctttggtagttggagttccaggagcgggatctataaacaggaaggagggtggtggaataggattggggccttagggtctatacagaactgacttggtttccggccatccggttccgctccctgggggagggtttgtgtcatagcaagcgcccaacatttcccagggcagtgggtgctccgttttggagccgctgcccagacctcttggctgtcatcgcctcatggcccagggtcagaccccctgggtcttggatgggttgactctcatcacaggagcacccagtttaatcttgtagtgggcaagggagcaggcagtgggtttttggaggctaggtttccagtgtcttttcccccttttaattcaataaacatttatctagagccttaatgaatatttagatacagttctgagttcactggaggcaaagatggctctccagggtcattaaactttgtaatttggatttagggatagtcaggaatcggcaaaaaagagggaatttccaaagttgagctgtcaacagctggggagtgtctttcaataagacctcttagttacatcttctcaagtggaacttattccaagaattgcctgaatcactgacttaaaaaactacattaaattttacttcccttctgctatagagtgtaccgtgagctagctatgctatggttggctatatctgcagaaaatagagctggcatgactaataataataggtttgtgtagttcagtaagggggcttcatagttgttctacttcagttatgctaaggattatttacaaagttaggtgaacttgatgt

SEQ ID NO: 59629 - DNA, 1284 bp, Homo sapiens
ttgcacagctgttgcttgtcagcttcttgtgttgactagatgtcagcaacacttcctcaactttggacaatgacttgaaagcaagatcagtgtgtgctcatgggatggatttaaatggaattgaatgatacagaaaccattgcctaatttatatttaggtaagtcatgttttctttctctctctctttaaatttttcctgaaatgcatgtatgaagctctttttggctaaaatgagagaatgaagcaggctcctgagtccttgagtgaagaggatccattgagaagtccagagggagagagaatgagcttgattaacggcagcacaggattggcaggagtgatataaaatagtacatcatctcagagtgacctaatactcgactttggaatgcatttttatttttggcagtggatttacctccctgtgtcctgcctggacaaacgttggaattagtcagcattccttaagcacatgctgattatggccaaagaaagtggcaggcttgaggcttgctggcgaccaggagaaagccagctggattagacatttgccgtgagccttttgttcatgtaacttatggggcagtctcctaagccagagaaacaagaaactcaaaggcagttttagcaaggttctcatgcatggcagcatattttaatactaatgctccctttaggcaggccctaaataagaatgtcttgttctaatttttttccgtagacttaagattgttgggaaaaaacttgttagaattcccaagtgaaaccatttaaatgccttggcttctgataactgggagtcctgagtgaagttgtcagttgctgctgaactcagcagaaataattgcgctccctatgccaatgatctgtgcatattttgagaccattctgagaccaaggaggctatcacaacatgttcacattgctatcgttgattagagccctgagctttacatgttgtctcctgtggtgtccttcggaatattggagagccatgcctctttcctttcaatgttctcaacctggcccagccaggattagaggctcccttctgaggttcagtagaattttatatttaccctttatcattattcaccttactgtattgcacttctctgtctacagtctccagcattccattacagtgctaggactatgttggcatttgtattcgtttttcattacttcataagaaattgccccaaatttggtggcttaaaatgatgcacatttatgatggcacagtttctatggatcaggagtccagacacagtttggctgga

SEQ ID NO: 59630 - DNA, 1553 bp, Homo sapiens
ttttaaaaatagcttacttaaaaaatagctttgttgtattaaaaaatagcacccagctaatttttgtattttcagtagagacagggtttcaccatgttggccaggctggtcttgaactcctggcctcaggtgatccacccgcctcaggcctcccatagtgctgggattacaggcgtgagccaccacacccggccaggctttttaacatagtaacataaacatttttattctcacaatgtctttatggtttgggaatggtggcttcctgtctttcagagtctggtgttatttgtttttttggtgtgtgccttgcagacacctgcacttgaaatctttcaggtattttgcagtcgttttctcagatggctggattatttcaagccaagaataacagagttagggtcaagactgtgaaccgtatggtcagtccttctaaggaagtatttatttttattcacttttgtttgcctttccttgggtcatggtcctaattgctgttccctttggctgcagttattcaaaactgaatttactgctgagcctaagacagtgtttttcaaacttttaaaattaagacacccagtaagaaatatgttttacagtttttttacatcctgaccagatttacacacacacacacacacacacacacacacacacacagaacctgaagtatttgttgcaagttgcagatgtttacagttactgctaaggatatgtgtttccatttaatttacataaaatactgttcattgaattgattttatgactcacattatttcatcatgcagtttaacaaatactgagcactggtgtcacagaactttgtcgttcatgctctttagcaacagtcagcttttctgctcatgactgatggcctattgctatgattctgttagcgctttaaagcaatttgattgtcaaagtcatgttagctctggttgtgtattcagttactcagtttcacctttacaggcagctgctccttgggaaatggggcttgctgagcaggttgaatgttccatagaatcagatctatactttggggaactcagcagtatgggaatcacaagccaacccaccctatccgttaaagggctcaggcccattggtctccattgtcacttagactagcacaacatcacctacctcatggatgctttgagggcagggccggttttgtttttctttttattcctcagagcccgcagcatgattccttgtgtggagaatatgcatcagccttggctctggtcctctcttcactgtccctcttctcctccctacagaaaacagcaaagcatgtatagaaagagatgtgcagactgtgtggaatgacctgaggggtaacttgcttagagggtagagactgttgtgtgtaaaaacttatgtttgaggcaaattgcaggaaaaagttctttaaatgaaggaaagataagattataagttttttaaaaagttgtcttaatgaatagaggagaatgactagtcattatttcatagatcataggtacataggtgattttaaaggttgagtgactggtcccttgagg

SEQ ID NO: 59631 - DNA, 1820 bp, Homo sapiens
ttttgtatttttagtagagatggggtttcaccatgttggccaggctggtctcgaactcctgacctcaagtgatcctcctgcctcggctggtgtgctaggattacaggtgtgagccacagcacctggcagaaagaaatttttttttattactcacatttcctaagagaagagggcattccatgccacacagggccaggaggagaagcacctatttgggtgaagaggaagagatgggagtcaggggaaagccgaggccagagcctttactgggtttttatggaaaaggcaaggcagactggaggaatcagcttggggttggctaggcgctgggatggtctttagttgtcagttcctggccctgagagatttagggcaggggaaatgtgggctgggtaactgagagttagataaggaggtggctcagctagatcacagaggagatggaaactacttggctgttaacttgccctgtaattgatggataccaaatagccaaatacagattcggagaaaatgcaggacaacttcccaggcttactttgctgccattcattttgtggtgaaccaaaaaaccacttacacaaacctgttggaaggggtctcttttgtgagtactgtcaaagagagctatctagaagagacctttttttgtgagtggtgaggtttaggctgaatttttattttgttttggtgcttttctgtaatttgggattattaaaaacaaagactagacctttttatagatagaaacaaggctcttttatttggaaataccatgtgcataaatgatgaataaatagagtcagtgaggaccttcttgccctcatgattcattgttcttctccttctcctttttctccttctccttctccttctctttctccccttcctcctcttccttcttcttctttttttttttttaatatgagacacagtctcgctctgttaaacacttgtattagtttcattgaaagtgtaatataaaatctgaggatctcagacatcttaggaagatgactgtcatttattatctattaaccaggtgagcaacttcctggcgagtgaggggtgcggcagggaagggtggagacgcaaaggcacagttccctttgtaatggagagcttcagctcctgggaaggatctgcaatgcttagtggggctgttcatctctaatatagttaataattactgatttgtatgaagcagaactgagggcagggagggatgtgggaaggccacaggagatatgagtttgcagccagagtttaccggtgatgaatcaccttctgatcaaagcaggaggctgggacctgtgggggatgcacttcgaccctggggtgtgacccaggaagtcagtgatttgtgaagggcatcataggtcacagatgcctttccaaagttaccagaacttgggatccaatttatttctcttagtccaggctcaggtttgattcccaatcccttgcattcacacgagtcacagggcagaaaagtgcagacgtgttcttgtgcgacctccagatgtggtgtggagatggaagatggtactctcatcattagagctgatttgctttggaattaaagagagacatacgcactgtgtttctgtggcccatcatagtttccactgatggtgccatgtgtcatttggggtaacattgacttgtatttccactcagtgtgaggaaaggaccataagacagaattggagtaatttctggaaaaaagaagtaaatgcttagtagagtgtcatacagtcttttaataacaagtatttgataaacatgattttgttatccatccttctgcaggaaaagaa

SEQ ID NO: 59632 - DNA, 716 bp, Homo sapiens
aattggaaaatcaggcactttgtagacagttcactctttgtttcatatttttgggctaaggaaaaaaaattgcccaaggaagtatttctggaaggagtctaacttctcaataaacatagtagtttagcctacaatatttttgttgttttgggaattgatagtgaccctaaatataacaaaagaatattgatttctaaagcatggatcgtgttggttcctaaaaagtgagtgataatgtagcaattaaattctgccctgtattatacacagttggtcagggtatcagcagaatgccatcatcattattgaattgtgtaataaatacttggggcagagtgccatagtggaaataaaactacattttggtttaggacttcctgccctagcccatggcctatagagccaagccttcacgtttcaagaagttgtgaggggaaagagacaggcattggcctcatggtagcagctgctggagggttcttttcctagctcattttctttcctcatgtttcacatttttccagggtgacatcacgtgtggtaactatttgtatggatcttccaagcccgcattttagccaagacatttctcatgggctccagacccacaatctggtggtcaacatactctctacttggttgctccatagataccctaagtcaaggcatgaatatctaaactgatcgtgactctcctctctcccaccatcacctcc

SEQ ID NO: 59633 - DNA, 1506 bp, Homo sapiens
tattttaagatgctagagagtttgttgttgatgagcctcatgaagaaaatgtaccataggaaaataaaataacccagactagcaaaactcttggcaatagtaggagtgttgtgaatctaagaatagggaccttggttaaaaagtctcatttcagcgttagcggctgccaagaaatgaaagttctgtatagtatttgatcatattgcttccagaagtcgtggtgagtgcttttacttttctagggtgaaatacactcagctaggcctggtttattcattagaagccccaacctctcccaacctactaggagtgggttccgaagcattgcctgtaaagaacagggcggtctcttgaacaaaatgttatcacaccataaaaggaatctgttttggctgctttctctgcagcctggcattcttttcggctgctgaacaatgtgcagaaagagccagcttcctgatggtcctataacccgtatccccacattcctctgggagtcacactgagaagtcatcttggattgggacaagtgtcttgcatgctagggttgccttagaaaacacagactttatactttttttgttgtgaactaaaaattaaatttaactacatttcttcttacttgtagaagaaatgtcttctctccttgcactgacaattctaaagaaagtctcaattgtaggctagtgtttcttctctcttaaaaaaatgaaagaattgatgatgtcttcctaaactggaaaggaggaggagttttgttcaattcgataaaaatgtgtatcccacattctttcatgaagatcttaccccattcaaagagaaaatgagaacactttagtgtgtatattaatgtatatattttcgagctggtctttggtagccaggttttgttttgtgaaatgacagatcagcagaaagacaccaaaaacacagtgaactgaactggagtttgaaagtgaactgacttaaaatttgaaaatatttttcacaggatagcagagttggaagaggccattggagtcatccagtgcatacgcacggccaaccatgtggagtttacgctttgccttttctagtgctcactgggcatctattttcaaggtggaacccgtagccaatggtccctaaaattattaatgtgtttataaattattgtgcctgtaaaattatgtccattgccattggtagctgacaggctttataaagtgtgaatgagtgaatgattggctatttcttatcagattgaattccttttaggatagttcatatttggcataacttccaaggaggattttcccattattacatatcacctgatcatagctgttgttttggatcagtgtgtattgaaaaaaagaacagagagacacaaaagggatattatgactttgataactacagtagtgtcagaatgtgttggttttgttttcagttctgtttctgatcttaatagagttgttaagatctttgtgcagcaggttagtgctctggaactgaggtaaatac

SEQ ID NO: 59634 - DNA, 688 bp, Homo sapiens
accccagatgatccgcccctctcagtctcccaaagtgctaggactgtaagcgtgagccactgcgcccagcccaaatacttcagatttatatcaccacatacaagaattgtgcactttcatgaactattggaacaggtctgtaagtagcaaaaaaccaaaaagaacgaaaagaatatcagcagtgatactcagtggggatggtgaaatgtttcctttcagattgtgtgtcctaagaactgggaaagcttgtttgtgtgtgggtggctgtggggggtgggctgaagcagtagctagtgttttagggcagttcatttacttttgttcaatcaataatttgaatgggtgatcttcagggaatttaagtaaactgttatgagttgtggcccctcaagtaaattagtcccagaaccagacccttgtgacctcagtaccagtaggagagaacagcctgggattttcagcagaggcaacctttgaacatttgaccacggtgccaaaaatctgcaagcagttgtttacagaattcttaggaccagcctggagtcctttcattccaccttgcatgataagatcggtaaaggaagtctcactttctgtattccttaggagtcactttttttttttttttgagacaggctggagtgcagtggcgcgatctctgctcactgcaagctccgcctccttggtt

SEQ ID NO: 59635 - DNA, 1073 bp, Homo sapiens
ctggcctaggagtcaataagtttttttaacttagatttttagaatcccagaaggaaatatctgctgccacagcactttaaaaatacatgatcggccgtctcaaaaaaaaaatgtatatatatatgatcaatgtccaggtaggatgtaggtgataccagcttagagagaaattggctagtcttgttagacataaagtcttaggatttacacacattttgtattttctctgagcttagaacaggttcttggacagagcaggaactcagcaggtgtagaaaataatcgacttcttttcagtatttgacatgatagcgccttcctttgttgtctttggtcacatgctttcctggtcacttttctacttcctttttcttctctattaccgtatctggatattctttctcttcctgcaacttagtgctagagttccctaaagctttggtcttcaatcttctctccaagaccttatgcctcttgtgtctcaaatatgttctttatccctttgactcagttgagcactagcccttatttccccggttccctaatattcagttcctcttagatgtcctagtgaccctcaaattccagtatgttctagactaagcccattttcttcttttccaaattagtatatcttcgatccttgtttctgttcatgctcctactgtttttctccagcaccccaggtcagaatctcagaaattatctttgacccctttcctccattcatttttacataaatcaatcattaactactagttcagtatctcattgcctcgtgcttggaattctgtgccctccttccactgttttcctggtttacctgtacgttttattccagaggaaatgagaaaaggctgcactgtgtagaggggagatcacagaatttgatctaaagcctgacccacccggtttcaaacctgaacacagaggcactcactagccaggcaacttataatgaattatttaaattctctgaatgtcagtttttgtgtctgaaaagtgggaggtcttagtacttatgttacaagatggttgtgaatataaataaaataatcgtcttagtgccaaca

SEQ ID NO: 59636 - DNA, 1415 bp, Homo sapiens
tgctgtataaatgccatgtgttataattaacaggcagctgtaaaaacaaacacactgttagaacacaataaaattgagagccttttatggggcatttgccaaagaagagttttctcattggttccctgtacatggtgacatgttgtggtccagagatgtttttttttcaattctgtcctctctgaagtcatgcagtgtgtgaaaatcatgtcttctagctcttaccttcacataagagaacacagtatctctgatttaaaacctgcttttctaatcaaaaatctcacaaggcctggctcaagtaacgacttgttggaaggtgcatttcctggccttgattggatatgctattttttattcttttttcatgaaatgtttggttgtgtggagagtttggattcaaagattgattattgagcagctgctgaggaaaatcccttcttcattatttgcttgggtagcgttccaatctctgagggagataacagcggaggcataaattcacgtgctcgccatgctgtttgtccattcattgtctctggaggcgcctcctaacctctggtttctgtgggatgattggaaacccagggcttgcgcaaggccctctgtgcttccatttctgcctttcttctgaagagcagtggggtaggccgtgtgtttgtaaacttaggagaactgtgcaacagagttttgctctggaaaaagacactggtgttgaaaggtgataatttgtcatcccagagctttcttgagaaagtttcaagtttaaatgaacatattttctttttaagacagcgagttctggccgggtgcggtggctcatgcctgtaatcccagcactttgggaggccgaggtcaggagttcgagaccagcctgaccaacatggtgaaaccctgtctctactaaaaatacaaaaattagccaggcatggtggcatgcacctgtaatctcagctacacagcaggctgagggaggagaatcgcttgaacctgggaggtggaggttgcagcaagccgagattgcgccaccgcactccagcctgggtgacagagactccgtctcggtggggtggggggaaagacagcaagttctgaccacaagcattgagggtttttgactgttaagaaatcaaaattgacatttcccggttagttacatacctgtgtttcaaccaaaatcatttcattatctctgatgtagcaaatggactttcctcatattggaggataattagaattatttaatccttacctgttcttttgatagagacacagaaagggtaagacatttacctaaagttacacagtgagtcatacaaaatgcacttccacaaaagggcatggctacgtgataggaggctactattagtagcttgcagttcctgtcagaacgtttgcattttattcaattaaat

SEQ ID NO: 59637 - DNA, 1351 bp, Homo sapiens
taattcttccccacgagcacgcccatttctcctgccaacaacatcacccaagtgactgtatctggtcatgagttccatagaaggatttgatttcctgcatttctaggactcacctgtgtggtatttgtgtgaggactcttttaaaataggatggaatggcaccttttgcttatttgtaacttagttaaggcaaagaaagctttcattgaaagcatttgattgttggctcttgtgactgagcaaaggcccccgtaattgggaaaagatggcatttcactgttctcttctcccatgtggaaatacattcggaaaggcagggcaatttactgactcagcgaggggctgagagtgactgaacacgatctctggacctcctaattctgtaattacttcctttgacgtttttgtctctgcagatgtgcttgtggagtttgtttctgtttttgttttaaacactggaagtgtttttctcaaacttgtgtgtgacttttctgggccaggagggatagagcaaccgcagttgggggtgatgctgctgaacacccggtgctctcagcccgtgccaccccacctcccccatcagacagctgtacagagaagcttggggaggtatctgcactgtgcacactcagcctttatagaggacaacttcattcctttttagcaagagtgatactgttcctcttcatcgggtggtatccattgagcactgtcctggtgaggacaggttgatagatcacctgaagccttttagatgagaccaggttagagggcagggatcaactgtgttgtgtacagcctggtctaaatgtggagcctgggggtgttcactggattggtcgatgatgagttcatcttatttgaatgaaagtgaaacagatttctgaaacgaggctctgctgccttctatggtgaaaggggagagcttttccaggttcaaaagtaaagcgggatatttaaggccttgatctcactggaatcatttgtatctttagttctgtgatgccaagtgggacctgcatgggatttggtatgtatgttggagcatcctgggtcctagggtcctggagacagaaggagccacagtattatggagtgtcactgtaagtggattttagaagtttgatccaacatttattgatcccttactttatacttggcactccacctggcagtgggaggatggaatgaataagacatggtccctcccacccaggagctcataggtttaaaggggaatgtaaacccatgagcaaatgacttacagtgacatgctatctaaaggaccacacaagaagaagtggtcagtctccctgggcattagatcagagtgggagaggtgggggaagcc

SEQ ID NO: 59638 - DNA, 507 bp, Homo sapiens
agatccagagtccagttaaatttttccagtgatttgctaagctaactttaattaaccatctcggagataggttgatattgctaggggaaacagctaggaggtgttcctcttatcatggaatcttcataattcttatcatcttacaaacaagctgtgaggtgaaaggggatcttgcttttcctattgtttcactttcatgattccagggtcctccaggattagtgtggcctgaggtcaatcccttatcctgccagaggggagacaagctgggttgagcaatgaactaactactcagggcaatttaaaaaacacagtcccttacattcccagagtgccttgaattctgagagaggtactggttactagaatcttttcctgctggaatttgacataacgtagctgagtaaagtgaagactgaagagcagtgtaggggtagaggagaaatagtgtgaatttttactccaggtcagtgtcttcagttactcttctttgtctaattcttgccc

SEQ ID NO: 59639 - DNA, 902 bp, Homo sapiens
tggaatttcaccaggctggtcatctgagtttatattttttatactatatatacttgaatacatttttgttagagttttatagtttaatgcaagaaaaaatgggaaattgcttaagcatgattttctattcaaagtagaatttggagggaatgattcccaaaattcttacatgttttggaaaggacggatttagtgtacattggtagggtgttacttaaaatgaaactgggaaaattgaaatatacagagtaaggatttgatacttacattttgttttgtcattgaaaaatgaatatgattgctattaatttctttgtagatttgcacaaagggcaaagttcacatatttaagtatctgagcatacaagcatgccagattaagacagctgactccctttatctccacaccatggagaggccacatttacaccagcacgtggaagatgggtgagtcatgccctcattcaaagccccagtttaaaatttgcctaggccaaggccctccaggtagctgacttcaaaatctgtttgttttaagtcaccatggtatctgcagaaaacaaagcaaaacagaacaatttggtttaatcacctaatttgtatttaaaacaagaagttgagaaactattgggatatgaaagaaaaaactgctgctattgagaatattttggtatatctcaaatatcatctgtctcctaatcaataatcagttcttcctgagtaaatatgtgcatacttataaataagatctagaatacaaatgtgaatattttttacttatcaaaataactatattgagcccagacatgcctttttagcaattattaatgttgaatatgcctccagaacaatgttaagaaaaaaatgaaggctttatttttggtcttttaaaaatgcagtat

SEQ ID NO: 59640 - DNA, 929 bp, Homo sapiens
acacagactaagacacaactatcgcttttctctgagaaaaaaaggccaggcacagtttctcatgcttataatcccagcactttgggagactgagggtgatggatcacttgagcctaggagtttgagaccagcctgagcaacatggcaaaacccctcctctacaaaaacaaacaaacaaaacatacaaaaattagcaggggcatggtggctcgtgctgtagtcccagatagctggtgactacagcaagactgtctccaaaaaaaaaaaaaaaaaaaaaaaaaaaatttgctgtcctctaagttgatttccacatagacatctgctacagtcacaaaagccagaggaaggggaaggggagaagacatgtctactgccttggaagactccacacagcctctagttagactgaatgtgtaggtggtgaggtaacagaactccttgccacataattttattgcttaactgggcagaactctgcttgaatattgactttgtgccgttggcttcttttcctgcttcctgcttcagctcttccaaagtgttgtctcaaatctcgttcagtctgtccccagcttgcctcttaatttacaaggaaaatgagggcctcagcagtgaagtgtcaacttatttcctgtcttggaggagtagatggcacttctccctcccaaggttagatgccaactccacagccttgggagattttatgttatttgttctctctctctctctttgtctcttgatctcctcctccaccctctcctctccacctatagtttaattattcagccacaaattcaaacattaccaggctataagaaagatacttttcttgacttcatcttttccctcaaaatactgtctagtttctcctctccctgttaagttctttaaagagtattctataagcaatgctggagtgtaaacttaga

SEQ ID NO: 59641 - DNA, 3727 bp, Homo sapiens
tcaaactctgtggcccagattggagtgcagtggcctgatctcggctcactgcaatcatctcggcccccgggctcaggtgatcctcccgcctcagcctctggagtagttgggaccacaggtggcaccaccatgcccaggtaattttttgtagaggaggttttgccatgctgcctaggctgggtctcttttccttcataaaaattcacatggcttgcctaggtaaggatttctattaaactctggggaaaattttttaaaaaaaatatagcatctataaacgccaaacaccttcacatggctctaaatatggtctataatttggtcccagattatttttctggtctcactccctattttgttagttaaactcaactatgcataattctaggatggcctggatgttgctatcgggtggctttactcaatgccacggtacaatggtttcagagcaggttttggggccagaccctccgggttcaaaccctgacttcaccacttattactacatgacactgggcaagctaatctatgcctcatttgcccatctgcaaaatgggtatacagtaatatatatcaatttgatagggttgctctgggaattaaatgagttaattcacgtagtgcttaaaatgctgcttctaccacacacacaaacatgagctattatttttcctgcaacctgaatgccctctccttccaggtgcgctcaatcccatttccctaatgaccccatcagaaatgacttccagtcccccacagcgctctgagagcattttacgacccgaacagattttgtcaaactccaaagacacgtgctcccctcggcaccatcaggtgagtgctcctgaccgcgccattggctcgtgccccgacgcggacgctgcctagagcagcaggtccacactcccccgaaccaggcgccggcggccgctagtaacgcgttgaggccagctccctccttaaaatgcgtacacatctacttcacattttcgcgcggtggctgcgggtctaggaaagtctttctgaacaggaaaaagctgtacaaatgtagcgggcagtaggtaaacgggcgctcgccccgggttacactaggttggaggctcagagaaggaaaagggattagaggcgaggctccgggtcacgggaaaaggtccttggcctcctgtcatggatggtggcgcccaaggcccagggtcgccgtctctgcgctcgtgcctgcggatacctgcaccgcaggactcggcgtccgccccgatcacgcctagccgtgccgcagccgcaggaaggctgacaacgtccaggcctctacccgaacccagtcttacctacggtggcggagtgaccagaagaagcgggccgaagtaaaaggcggggctcaagatggccgccggggcctcgcctcagccccgcccatatgatgccccgcccctccggtcccactcactctcgcttttaactccgagaacccgctcttctccagttcagtctccatggccccgccgcctttgcacattgcacttcccggcagcctccgcgtgggcgccccctccaactcctgccttcgcccgcgtttctgctctgtgtggttactaggaccaacgaggagggcgttaggttagtccctgtcaccttgtcggggatcagtctgctgtgcgtgctcagactcttcccagagccagcagcaagaacccgaggcattaataaacttgagatgtagcttcgcttaactcgtgcagagggtttccgtgtcacttatgtagaaactagggcctaatttcaactccctcaactcctctgtcccaagactatccacgtcacctacttggtagcttgagttaaacaagaaacctttgaaatctccagtggccgacacgcagtgggaactccatcagttttctgttttctcccttcttccctcaataaaaattaagttgaactgactaagatttgctagttgataatttacagcaaatctttccttttggtctctctgatttaagcaaactgttgagtgtactttgcctcttgagaaattaaatctgattacaacagagctaagtatttttcagcaacggttagactgacattgtaaatacacaatctgatagttggggctggcctcatgggcctgcaacctgtgctattacccggcccccagaacagaaggacgctacattttctctcagtaagtgttgaaccagggccccacgtttgtgtctggaattgggccctgcaaattgtgtagctatgggagctgacttaagtatggatgagctgccacacaagagattacctgccagaatctattgtgtggctcaggcccattttgccatagtgatctttggactaaattaacctgtggactgaacctgtggatcaattggaacttagactgaaaataatgtttcatcaaaataatgtttttattttgagaaagcattgaagtaaattgttttaaactttctttttactatctttaagtataaatcattgaaaaggggattttcttcagtttcaaaactgaaacagaataaatacctaaattgcaagttctttataactgatgtttgaacaaagagaaataattgattaaatgatatatttgcctaataagtggactgctgtgaggtgcagactagccaaagaactgtaagtgtgaagttctttactaaagggttcttgtgtgaatacaatgtgagaataagcagaactaaaatttcttttacccagcataaataaaatgttaatagatccacaaaagtcgattgcttaaaaatattaagaatatatataattatcattattatttggacatggaagcaaagaaggctgaaatcagaaattaaggttgacattttaaaaaatggcactaccaataaaaatggatgaatattaagtacacaaagaaatagtccaaaaattatgtgtaaatgtgtggctgagaggatataggactcttggtttgaactaaaatgagtaggaatataatcttaaggaggcaataaagggatgcaataaaaatgagaaaaagtcaaatatacttgaagcctgtaagaaaagagattgttttagtcagttccagcttaacagaaatttattcctcaccattctaaaagtctgggaagtccaagatcaaggtgctgatgaaatctgttcctgctgagagcccttttcctcgtttgcagaggaataccttcttgctgtagtctcacttggtgggtggggtgaggagagctctggttccttcatcttattgtaagggcactagtcccattcacatggactccaccatcatggtgtaattatcttccaaagtctccatctccaaataccatcacgttaaggatttagggttcaatgtttgaattctggggaacacaaacattcaatccatagcaaagatagttttagagagactagaaaagacaccatacatagaaaataatataatctcttgggtatcaaatatgctacttgagaagtgtccttgtggcttttccacagactagaacagggtttctcaacctcggcactgttgacatttggggccagatgattctttgtcgtggaggcctaccctgtgcattgtaggatgtttcgtaacatccctggcctccactagctagatgccagtggtacccctaacaagcttagatacccaaaacgtctctagacattgccaaatgtccatggaaggaggggttggtgtagaggagggctgcaaaat

SEQ ID NO: 59642 - DNA, 726 bp, Homo sapiens
gcttgccactttgcacataggtctctgttaatatggaaccagttcatcacccaagataggggtcctgcagagcaagaatgtttcccagaatggctgataatggtctcctcagtgaaaattgaatgacctcttgactgtggatggtgacaatgaagtcaagtgccaagggtgctgagtaatgggtgtgcaatgtcatattgccttaaaagtacacattgggattcacagaacaaggacaaaagagagacttccactgtgtcctttctctgtgggaagaagggtggtcatatgaaatctgggacttttttcacaggtgttgtgttgacaaggaatcagttctttgcacagaggtctatgttaatacggaatcagtttctcacccaagacaacagaaggacctgccacagtgtcactagtgtcatttctgtccagggaattcagtcatgcaagccctggaaacctgacacctcagctgtgctggcaaaaatgggggtggctgactcctcctgtttgttcattttgctcttttccaaattgcagttttgccagcatgctgctctttggtggaactgaggctataagccaatgtcctagctacaaagaagggtgggaatttgagtttcgattcttgggaatttcccaaaatactgaaaggctagttgaaagaaatatggcaggcacccacttcacttgacctacggcatgatttgtagctgctgtaattgg

SEQ ID NO: 59643 - DNA, 554 bp, Homo sapiens
agcgccttatgggggaagccacgctctgtctgttcggaacagatgtcggccctcggaggggtttctctgccaggaggcggcccaggcctcagtccgtgtttctgatgcgggataaggagggggcatttccttgtgggagaagccccatgccccacgccccgtgggctgggggaggctggaggagcagcctagggaggggcggggctccggagggaacgggctgctctcagagcggcggccgccagggggcgcccttgctccccaagcgggtgacgccgggggtcaccccaccctccagcctctgttttgggtcccgctctgtcactcctcctacccccactggagtttgccccctaggggagggggtttgggaagcgagaatcttccccgggatgccggggaaagggcaggcaaattaaatgaaatcattccggtgtggcatttaaatggtcaagtgaaggctggacttggaatgagtgttactagctttgtgcaaactggcgcctgctcgcccttgcgtaccgccttcctccttcacattctctagggctggg

SEQ ID NO: 59644 - DNA, 1315 bp, Homo sapiens
tggcttaatctatctgaacatcatctgttacatcattggtgaaatgggcataatgatatggtttttagaggtaattaataagattgttttaaagtattttataaagttaaaatcctataaaaagggatcactgttagtatcactatcactactcatagcgaatatttatcattttggggggtgtccagtatttatcttcattcctcccctttttaaattatagcctgccaatttccctctgaagagaacactcaattgtgtgtaggtcttagatggagggtagttaccgccgccagcctcttatcacctcccactgctgcctctctcatagaacctgatggagtttcattggccagttagacattccctccagggactttaattctttgaatacttatcaattgactcacattagtagcagatgtttggaggctagtttcatgggggcagctgcagcccaaggatcatatagtctctgccttgtgcccaaggctgtggtttggcatctagaacttccttggtttttcagttttccccaattaggttttggtgtttttttgtgagaaaaggtcttgtccaagacactgggaagcatatcctcatcagcaaagatgcggtattttgtttttaatttgttgtttctacctaacttggaaaacaaaatcagcaccccaccccacccccgcaaaaaaaagacatacaacttttgagaacaaatggtgtgactaatgtatatttaagacagtctgatgaagataattataaactcaacgttaaaaggaagatgattgttgttagttccctttagtgaatatagttgtatctgagtcatactgttaaattagctgcaggctcaagtgagagacaggcattctaagatgacatgaaagtgattctgcatgccacaagcatgtgattcctctgcttgaaagagaaatcagcaggtgtagatacaagacaatatatctttgccaggctactttgtatgcattacctataagccccaaagtgaggctttgtaagagacttagtaaacataagttcagagttgtaattatctatttgtcatttattgacagaaggaaactttggtctctaacacaaactgtcctgtcctttagttgtcaggatgaatcagctgtctccctaagcatgtttgattgatcatttgcttaacatcatttaaaagaaacagacaagatgtgagaatgacactctggattgaattttcagtgtaaaagacataatgctgttaattcaggggcaatatggccaaactatatttaatttcacattatttttttgaatgtcttct

SEQ ID NO: 59645 - DNA, 987 bp, Homo sapiens
ttgcccacactggcagggtggcaccaactatacattatggcaaaataacctttgagatcagggctaaaggtctcactgtattcattatatcccaagcacaaggaagtctctgggatataacaactactccataaacatggatttgaacagactgaagtagagtcctctacaactaggatgtcactccacgatgcatttatcaagcagaatgagaggaagctcccacctaatcagatgaaccaaccaaatcaatgaggtaggaaatggagtttgaaaccaaacaaaaacaacctaaagtttacacattaacaattattttaaaagaacatttagaaaattactgatgtaagccttcaccagaaatacatgctatttaaaccagatgatgaccctatgcgtagtcagccaagagagtgtttaaaaaacttgtctttctcaaaccccacttccattcagccaggaaatcatactggttctatcttcaaatttatccagaatcttcaccattcctcatcacctgcagtttagactctgatcccaaccaccactatctcttaactatatgacctttgtcccccacagaatattctcaaggcagcagccaaagcaggcacaccattcctctacttaaaaccttgcactgaatgccagtctcactcagttaaatgccaaagtgcttacaatggcctagaagaccttataataccctctacactttttatctcctaggccctcctggttgctcactctgttccaactgcactaatcccctcactattcctgggcatgttcctgccttcaggacttggctctaatgcaccctctgcctagaatactcttcaccaggtgtccatgtgggaaaagcccccgatccttcaagtttctctttaaatctcatgttgcccatgaagcttaccctactaacctgcccacctgtgaccaatcccccttacctactacacttctttccgccatagaattcatcat

SEQ ID NO: 59646 - DNA, 1626 bp, Homo sapiens
cttcctcacagttgctgaaaaacctgagaaactacacgtaaagcgcttagcacattacctggcacacatcaaatattcaaaacaaggccagtaactattatgctatagcctatccagaaataaggctatacaaaagattattttcttacctctccaactggttaggtagaaaacataatcttattactgctattaacaagtagaacagtatacaactacttggaggagaggggaaacttccctaccttgccccacaaaaggcaagtcagtaagcaccgctggtcctctgacattcccacctatgacagctcccaagaaacacaaaagtacttttgaagggcattcccccctgcccaaaaaggggcggcgcaagtctcagcccaccgtgccagacgccggaatggcagcagaaaatgtcctgaccccctcacctccactcagagcccacctgctcccgcccatctcttagaaactgcaggagcagccacggccgggccgccggggatcctcgcggactaagggctgggtcagagccgcgcaaacatgggctcgctcgtagtcctggcgagcagcactcccaggcaagtcgcccgagggccttgcagggcacccagaaaaatgtcactgccggcgaagtgaccccgagccgggccacgggacccctcacacctcaccctttctcctgccgaccctcgagacgacagcggactggaaggcattacctgagcagcagcccgctgggccgtccgaggccggtggttccgaagggtggccacggccactagcctgccgtagaacatggaggccgccatttctgagtcggaccccgtcccctcggcgccgcgcgcaggcgcacaggcgacaggcggcccaaggcgcagcctctctgcagcgctcacctacgccccgcctcgcgccacccgttgggggcggggcctcgggttaacactgcagccgctagaccagctccctggcgggcgcggagcaagctttgacctttggaactgggcaccgcagccccaatatctgccctgcggtcagagcaacctgaacacttcctagtgaattgcaatgtaaaggtgaccagcgccgccacttgggtgatcttaacttctctcagcctcagttgcctcatctgtaaaatgtgtttcattcaagaaatgattacccagtgtctacttcgtgctaaacagccttgagcccttggcctacagcaatgaataaaaccatttgtgatgctcaaagagaagatggtcggtgtaacgcgcttgtgatgctcaaagagaagatggtcggtgtcatgcgcttctgatgctcaaagagatcggtgtcacgcgcatccgtgtgaagacaccgccaaacagggtgtgagcaataaggctgtttattttaactgggtgcaggcgggctgagtccgaaaagagagtcagcaaagggagataggggtggggctgttttataggatttggatgggtagcggaaaattacaaagggggtttttctcttacgggcaggggcgggggtcacaaggtgctcagtgggggaggttctgagccaggagaaggaatttcacaaggttaatcactcagttaaggtggggcaggaacaaatcacaatggtggaatg

SEQ ID NO: 59647 - DNA, 731 bp, Homo sapiens
ctctcctgaagccacaggagggaaaactgaggaagtagatgcagaggtaggtagagggtaggttttgtacaagtgaattgaatgaggtcctgtcaaaagcttagattttgtctgagtgaaaggagtcaaaatgatctactggaaattaggtgaaaggtgagggagtcagaaatttgaagggagtgaagagggtttgaagttttcattatagagtgcaggaaagaaagttaacagaaaaaagtagcaggattgctggggtgtgttaagaaccatctgaggttggtgatggtgactatatacctacaaaaatgtgcctattgtgtaatttttctccagcagcctgggaggcccggggcaaacacagggaaagcaaaccattgtgttcattcagggtgtggttttgccaaattgtaatgaggaagtggcagtgggtcaaggcaatttagagtatttggtgagaatgttattgaaataaaagaccatgaatccaagaggagaagcctgatggactggaaggagtaaaggagagggggcagtagtggactggaggacccaaggagattaaagaacaacaatagcgaaaatggttgaatatgaggctagaagggaaagtagaagcatggcttgtggaaagtggggtggtggagctaccccgaacgttctccaaacattgcacttcttcaacaatgttcaggatattaaaattatgatgaaaaggtattagaggatac

SEQ ID NO: 59648 - DNA, 1420 bp, Homo sapiens
gctacagggcaaatgggtgcaccatggtgggcgaggtcattcacggaaaaaagaatgtgcagtggtgccgaggttggtaagagcaggcggcttgtacatgtaaatgcatggtttgcaggaatctgggagtggataggctgacgggtgatgaatattcaaagcacaactgtaagcgactttagttacagcgaaactctaaggcacgctgcccttcggaaggaaacacggcattccccaacctgatagccctccgcgacgcattacgcaccgcggacagctggagaggccgaggcgctctcgctttgatttcggcgcctccgccctcgcggggagagattggctgcggccgcgggacggggtagtgagcgcgtcacttcctgccgctgccaggcgcgtcctcccgcgcgctatgacggccagcgcacagccgcgcgggcggcggccaggagtcggagtcggagtcgtggtgaccagctgcaagcatccgcgttgcgtcctcctggggaagaggaaaggctcggttggagctggcagtttccaactccctggaggtcatctggagttcgggtgagcagccgcggacgcgaggaaaccggggcgtgcgcagagggacgaactcacgccgtgcttgcttccgtgtgccgtgcgtgagaacgtccgcgctgacgctgcgtcctttcttgcgcgttccctcggttcctcccctcgacttctgggcgacgtaggatcgcgcccaggagggggcgctgtgctgggtcaggcgaggtctttgctagctgggtctttccggctgcgcccctgctgggtggtggttgggagttcgtctgtgaggtgtgtttctcacagcttacacacaaaaggaggaaagcaggtgtgtgtaaacctccagcagcccgatattgtcagctaagacattgcaccgtttccatgtgattgattgattgatcgattgattgatttgagactgtgtctcgctctgtagcccaggccagagtgcagtggtgctatctccagtcactgcaacctccgcctcctgggttcaagcgatttttgtgtctcagcctcctggtagctgggattacaggcgcccgctaccacgccgtgctaatttttgtatttttagtagagacggggtttcgccatgttggccaggctggtctcgaactcctgacctcaggtgatccacccgtgaggtcaatgaccatagccaacattgagctctaatgggctttttgttaaaggctggataatatgccaagctctttgcatgtatactttcatttgatctttacataactggcatactcagtgggctaaatttgatgggagaacaaacaggaaatggttttattttctccttccactgccttcaaacatgattttttctttccctcttcagtgacgtttcctgcaaattcta

SEQ ID NO: 59649 - DNA, 1271 bp, Homo sapiens
tttgggaggctacatttaagaaggagttatgaacagcggggttggaacgagagggcaaattggagcgacactttaggaggtagaaccaagataatttaccatccaagtcaatgggagggagtcaaggaaggcttcaacttgaaagacttatcatgaaaggtgacagaatatgaagaacgacatctaatttcatctcctatctctgacacacaaccatcctaaacaacttgcaactccaccaagccaggctttttgcacttgctgttccatctatctgtgctgcctagtgagtttggcgagctcatgcttcccaagcagcactttcttcagagggcctgccctgactacaaccaaaaaaggtgcctagtccctgtgctccagtaccccgcagcgcagccctctaataaaaacaggccccaagccagtttacacatctgtctctctctcgacagctggcatccagtctacccttcactaccgtctccccaatgctgagcccccaaggagcgttccataaatgttaagtggctggccgcggacgaagaggctcagaccgcgcgagttcttatcattactaaaattccctctaacgggaaaaaccgccgcccagagtgccagagggctgcggaccccacgtccatgaccctcatgcacccgaaactcccgagctggccctccccgccgaaccccgagaacgagcacaaacgcagggccggccggctccggggtcagtcccccggcccagctccagcccggctctcaggctcgccgcattacctagacaggacctccaagtcctcaagcgcagacagcagccgctctcgtgtgctgttaccacccgccactcccaaaccgcctcccagccgctccttctccttctcaccactcgaagacgcagccattttccccagagtcccgccaccggcgcacgcgcagagcgagctgacgcaggtgcgtggcgagaaggcgggctcggaaggcggaagagtcacccaggagaggaaaaagaggcctggcgagagcgccccctttgggcctggaggcgcactgcggacaccggcgccatctgttgggccggcgagggctttctggtccaaaccctgggagcgacagctgaactgagaacagtgggggcaacgcagtctgattctcctgggcctaatggttttttttctttctttctttctttttttttttttgagacgagtctcgctctgttgcccagactggagtgcatcgccgcggatgtcttggctcactgcaagttccgc

SEQ ID NO: 59650 - DNA, 447 bp, Homo sapiens
aagccataagagactgtaccgggaagaatggtacacttctgcccaaatactgtgcttttcccatggtctttgcaaccggcagaccaggagatgtcctccagtgcctgccttgaggggtcccatgccacagagcccagcaagctaagatccattggcttgaaattctccccactagcgcagcagtctgagatccacctgggccactcaagcttggtggggggaggggcatctgacattgctgaggcttgtgtagacagttttaccctcacagtgtaaacaaagctgccagcaagttcaaactgggcagagtccactgcagctcagcaaggccgactgcctctctagattccacctctatgggcagggcatatctgaagaaaaagcagcagccccagtcagggacttatagataaaaccctcatctccctgggacagagcacctggggg

SEQ ID NO: 59651 - DNA, 899 bp, Homo sapiens
cctgaggtcaggagtctgagcctggccaacatagtgaaaccccgtctctgctaaaaatatagaaattagccaggcgtggtgttaagtgcctgtgatcccagctactcaggaggctgaggcaggagaaccacttgaacccgggaggcggaggttgcagtgagccgagattgcgtcaccatactccagcctgggcaatagagtaaggctccatcagcctcaaaacaaaaaacaacaaaactagcgctggtatctcagaatgatagttgtgcaatttcttagtaatgactataacgcaatgttttactatgcctccaagagtatcctttttccttgcaaaacgtagtttcactttcagaaagagacgaatatcaaagtttaaaaatggatcaagccaaaaaaaaggaaaaactagttaagatatacatgaaacagcaggctccctcaatagtatgacccatagtactaaagacaaaggcattaaaagagtcaagtgggacaaatactaacagtgcatagctacactgaggtattattcccctcatttagtgactcactggactttaactgagactagactacttgaagaagtttctgactgtatgggtatttcttgaaacactagcgatttttgtttcttttctgttgagtagaggtttatttgcagttccatgtaattttattctcttagggaatgtcttattgtgttcattcctctaatccttctatgcctaaaaaatggccccctgagcgtttagaaagggaagggaggtactgactattttctattccttagctattttcactggtgaaaccaaaagcagactacttccttagtatatcttttagcatctgatcagattctcttttataattttttttcccctctgtgtgtggtctct

SEQ ID NO: 59652 - DNA, 3567 bp, Homo sapiens
caagtacgcacaagagtggaacatttcgttttacgagtgtgagatgtttgaaatacaaatctgccaagagcttcctccacattggtctgggactaggcagaacaggccctgacctcctgagagagggaaggaagaccaggcaggtctgagccaggtaaacgcccttgggtgaggtccgtgaaagataaagtcagatctcaaggacagagagctttaaacatgtttgtgctccactgagtcggttacctaataagtgagaaaatgaagatgtggatgcacaaaaattccatggcctttaggctcgcggtggggacagggtacagggaagcggcggtctggtgctgccaaaggttagtcccttgtacccggcgaactcaggaaagttcactcgatttcgctacaaacctgcagcactcggcctggaggtaacctggttgggagcgaattcagaactggaaattccaggcggcccagagggacacccatccctctccgaggcgcgccgggatccggcgcccagctgcggggcgagggcagggtcccgcgcagcaccccacccccggccgctggccccgcccccgcccccgccccgcctcccaggggatgtgcgagcagtctccgccctcgcgcgggagctgggaggctgcgagatccctaccgcagtagccgcctctgccgccgcggagcttcccgaacctcttcagccgcccggagccgctcccggagcccggccgtagaggctgcaatcgcagccgggagcccgcagcccgcgccccgagcccgccgccgcccttcgagggcgccccaggccgcgccatggtgaaggtgacgttcaactccgctctggcccagaaggaggccaagaaggacgagcccaagagcggcgaggaggcgctcatcatcccccccgacgccgtcgcggtggactgcaaggtccgagcccggggaggtcgaggaagcgggtgctgggcccggccggggagggctgcgcggactgcagcggcagtgcgccccgaggtggcgggcgcggggctcgcgccgcggggacaagtccccgagagagcccggcgctcccgtttcctgtgggtccgcagctcctttgtaaggaagtgcgtgtgctggaagcggtgcctgacgcggggtcgggggcttgggaggcctggagagggaacgattggctaattgtgccgaattcccggtcgtttgtgcagtccggggagcgtgcgtgcagccaggacttggcttgttcgatctggggaccggcagcgacaggcacaacaacaacaaccgagtttggcacttccttcccagtataaataatgtacctaaaatggctgacatcattacaagcctaaacctctgttgtttcccactttcgtttctaggcttgaacagcacttggactaagtccagcaactgtaagcgtcttaattttaaaagcgtttctttacctcctttttccacggcccttcggtagtggcaggtgaacttcacctggagaggggacgaagggacagtccgcccgaagtaggtttgggctgtctcttaccattactagtaaaggccagtaatgactatgtggatgttagtgaaaaaccaattgttggcatttaaattgtatcagcgtctttgtgaggactcctgctgcgtgaaactaaacatgagaaatttgcccccgggtccctaataaaattctcctttattttacaaaatctccctttaatcctaggaaaattcatgaagtggggctgttactgtgttgacttttagtaggttacgatcatatttacttaaatatgagtgtaattgtctcataagttaaaaaagcccacagcctcttacccagaccctttttaggctgcaaaaattagaaattaactgtaaagttatgttgcttatcttattttttgttgttgttagcatttttcaagacctattatcagtagggtaaatttagttttaacttaaaaaaattggtgtgccacgtatgaataatgggagtttttatatggacgaatgaaaattattgctgaaaaacaggccactaatatactgtaaaaaattcacaatataatggtaatctagacatcatattataatttattatattctgaatataatctatcttcagaatataatggtaatcttactttctggaaatgttctgataaaaacagacacgtcagaggttgatttctaaatgacttgccttgccttgaaataggaacagtgaactgattccctaaaaggattaaaggttttggttttcgtattggtattgttttcctgaagccattgcaaacaatcttggtctttaaagaaaatgtttggaatgcacagatgaaaattgcagtagcaaattattatgttagctctttgtttatctaacattcgttgtacctaaaatagattgagagtcaagtatccagtcacaacagtctcaaatatatgtagtcttaatgctatcacatatatatatatacacacatacatttaaaaatcctattaacaaatataactgctcccatttagaaaggagagagtgagcgagcattggatgatgtcacttcagacagcttttctctgttccgctgtagtggagatttgaaactctggacaaacatcagaattacatttgctgagcaccattaaatctgacttctgacaatttttgtcatttctgaaatagtgactctgccagattctcaaaattgctcacgagttcaccatatttaaattttgtggtcattgcagctataagtaatcattggtagctccgtgctttgttttccattttttattttctcagatcctccatatccaaagaaaaatactactgggactaaagagtgagggccagagtcgtctttgtaaaccacccagcagtcacggatgagttggtagataaaaaatgactaattctttttccagctataagctgaaagacttctttaggggatgacaaaatatttctctacattaaaagtagaatccttataatcagtcagtcgcttaacgggaaaaggaaaaccttaatgacagacttttgtgaaagaagttctgatctcttcatttcagagcttgggcagtgattacataatgttctctggctccttgcgggtggctctgtggcagccaccttgtctgactgcctggactgggaacagaatcagccttaatgtgttttgccgagggcatttcctttgcctggttggttgaaagaatcaaaccaagctagttaatggcctagaactcctgaacaagaatttttcttatctttaaccctcccagatcacaatatcccgcagaccattgttttccaaaatgtgctcttagggaccacctgctctggttttaaaatgcagattctgttaccttatgccacaagaattctgatcactctaatcagctggcttatataacatgcattccagtacttttacattgctcctgtctttctatttttttcttctgcagggtgagaactctccagaaacagttctattaccccatttttcagtcttatcttttcagcagctattaatcctaacagccatttctattgat

SEQ ID NO: 59653 - DNA, 2078 bp, Homo sapiens
tgcttctctgagaatgcccgcctcacaagtggaacattttgagttaataatgatgatttttatgtttctaaggttgcttcctctctgaaataattcagaatccacccccatttaataaaatacctatgattcatttcacctcaagttcctaagacaaaaaatttcaattctgactttaggaggtcagagtttttaaagcttccaactcttaaaggatttagtctagaaaccaattctaattcaaaaggatattatttactcatggcttttcatttcatttcagtaatattgtcagaactttaagtcagtgagttgggtattcaggaattaacaattttagaagacaatatgtttcaataaaatgagaattggtttttcctactttccaggctctaaaattacatgaattttcagggagctgtgaacatttaggagcacattattcattcagcatcttttatatgcccaacatatgatattgtgttgaagatatatctgcaaagaagaaaaaaagccactgccgtcgtggagactcacaatctaggaaaagagagggacagcaaacaactcattacaatacattgggatcagtagtgtgagggagaaaaacaggtctaggttctttggaaaacatttaggagagtcaatgagactttcagaatgtgaagtgcatgggattaggtcatggaagaagaccatgtatgtcatcttgaggacttcattctgtagaccatgggccactattgaagttttgcattttggaaggagcttattagtttgttttcctgttgattatagtagtaatgcagtatcagggtagctgaactgcaataataatcccaacatctcactggcttcatgcagtaggaatatgctttcatcacagtccagtatggcaggcaacctccagactcccagggacccaaacttacactttactaaatgtaattctttcatttgaatttttaaaggtttttgtataatcatcttagtaaaacatttgataattcttcacaacatttgcaatcattgatttggccagattggtctaacatggtacccatgattttacttcatttccagtactattctgataatttcctttagagtcaattgagtagagagtacccctctcacctaagcttagtcatgtcccaggaattttggaactccaactgagatttcaggctcattattcattctagggctgaatgaataatgtgccctttgaacccttgtgccatgctggaaactgtggtcttggtgtggcatggaaaaaccagagggtgagggatgtggatgagaagatgacagagaatcagacatgcagagaggactgccaggtctcccagtgggttccagggagactcagctatccttccctcttcttgagttctgtcttagtccattcgggctactataacaaaataccatagactgagtggctttaaacaacagaagcttgtttctcacagttccagaagctggaaagttcaagatcaagtcacctgcagattcagtgtctgatgaggtcctccttcctcacagaaagctctcttctctctgtgaccttatatcacagatgactctgggttcctcttacaaggacactagttccattcatgggggttccactctcatgacctaacacctctcaaaggccccatttcctaatactgtcaccttgggggtaaggatttcaacatgaattctggggggacacaaacattcaaaccatagcaagttccataatgcaccccatcatatgtgtgtgtgtgtgtatttatttatttatctaagatagctctagtttgctgctttgcaacacattctgcccctattgcattggtttaaaaaaaaagtacagaagtcaagatgagactatataaatcttgacaagttgttggccgtgattgctcttttgtgatgcaggagtgagaatctggagaatctggcttaagaggtggctgagaattaaaataataggcatgaaaatgcttcatacagctctgtacagttgttgacagtgccttttttgaaacctatcactgctatatgttagcaagcaaacactgatc

SEQ ID NO: 59654 - DNA, 2200 bp, Homo sapiens
tacccatcggccctggtattggacaaattaactcctctgagcctgtttcctcatctgcaacgtagactagctaatactacccattggaaagcgttgtttcttagctaatgcatgcaaggcttaaaacctagatgacgggttgataggtgcagcaaacctccatggcatacgtatgcctatgtaacaaacctacacgttctgcacttgtatcccggaacttaaagtaaaaaaaaaaaaaaaaaaagaaaagaaagaaagaaaaagaaaaaaaaggctgtttctggggattaaataagacaattatgtaaggtggccagcacagttcctggtacatagtaaatgtcaggcctgcctgacagacttctattcagcagctactgctcccctgaaaatcttcctcagacgtttccacggtgcttcccgttcttacaccactacaatcctttattacactactatccgttcattccccacagctccctcccttcctttccctaaccagtgatcccaaaaggccagcaagtgtctaacattttctatcttctaagtgactggtaaagttccgcacctatcagcgctccaagtttgtttttgttttggccgactttgcaaaacggattgggcgggatgagaggtggggggcgccgcccaaggagggagagtggcgctcccgccgagggtgcactagccagatattccctgcggggcccgagagtcttccctatcagaccccgggatagggatgaggcccacagtcacccaccagactctttgtatagccccgttaagtgcaccccggcctggagggggtggttctgggtagaagcacgtccgggccgcgccggatgcctcctggaaggcgcctggacccacgccaggtttcccagtttaattcctcatgacttagcgtcccagcccgcgcaccgaccagcgccccagttccccacagacgccggcgggcccgggagcctcgcggacgtgacgccgcgggcggaagtgacgttttcccgcggttggacgcggcgctcagttgccgggcgggggagggcgcgtccggtttttctcaggggacgttgaaattatttttgtaacgggagtcgggagaggacggggcgtgccccgacgtgcgcgcgcgtcgtcctccccggcgctcctccacagctcgctggctcccgccgcggaaaggcgtcatgccgcccaaaaccccccgaaaaacggccgccaccgccgccgctgccgccgcggaacccccggcaccgccgccgccgccccctcctgaggaggacccagagcaggacagcggcccggaggacctgcctctcgtcaggtgagcgagcagagccgccgtcgcctcacgcgggaagggcgccccgggtgtgcgtagggcgggcgccaaggcggctcggcggggatccgtcctcgccaggggccgggtcccggcgggaggaggcgccctccctgccccccgccacggcggagcgtctgcagaatggtgacaggattctgggttcttgggcgaggggtctcggcttcaacttgacaggtgtcgggcgggtggggctagggtcctgagcgaagtgacaggtgcagttccctcttgtgaggctcggaggcagagggtcgttgcgagcgtccatcagacgcaaaaaatgaaaaataaaaatacaaaaatggtgtctgtgggagagtttttcaccggagaattggagtactccggtggtcgtctgactttctgttttggttcacgcgatgcaacagttgggaagtattttcttccgggcgtgcactgcatctgaagtccatttgtgggagaggccgaccagaaagccttggacaagaagcgcagggtcctgagtgtccattgcccacaggatactcggctcaggagctttgcggcgtttccttagaacaataatgcatcgaggccttggggactcaaagccatctgtagtgattgatggagcgtaactctttagaggaactgaaacatgggcaaaactttcatgagacatttaccagaagtgcttgaaagtttctaaacttttttttttcctgtttgatgaactcttcttgcgtgttagtcggcttcggcttgtctcattatttcttccattttgccttttgactttgaaccagcaaggatcttggtgtcccctctttttgcctttgtttttggcacaaaattagtggttctgtgcgc

SEQ ID NO: 59655 - DNA, 2015 bp, Homo sapiens
ttttacctgctgcttaataacacgcatgtactgtctagcaggaaataaagagattacgtttcacctagaatactcattctctgagcctaagtggctcttctattccagcccccaaatatctgtatcagcacatcatataagattacaaagcacagagtaatgacattgttagaaactcttcacagtagccccaggagtcacgaaactgacttaactaagacccactgtctagtaaggtgtaaaacccagcaggaacgcaatactaggaaggtgcaaagccaggaggctcaataaacgttaaacagtgtctgggggaaagagcaacgatccagagcactgtttgtgaactcaaccacttttattcagctctgacaaggtaagtcgccaagcgcggtacaaagtagctccatgaaatgcgttttgttatagtcctggtctcgaactgttgcaacattttatgtaatttttgcaaagaacaaaagcaaaaagttcattctaaattagccttccaactcagttctttctccgccaagacggagcacttggaaagttttcaatgtctgaaaacctctatttccagggctgagcagagcactatgttgcggcttaagacgctcggcgatttcttcccatccctccgcagttccaaaacggcttcgcctaacaaagtcaaacttttcgcgctattcctggacatcaggaccaaatgtcgaaagcatatactgccactgagttagtgagccgggccggtgcccgggacctggggtactagatttatgggacgggagcctaggggtcgaggccacagaaatgaaaacatcggcaacatatgcagtgcagcgagtgggttaggagggagaaacttcaggcaggacgctccctcgggacctgtgacgcccccccagccacaccagacgtgggagcttaggatgagagcggcctccgagcagatgatcaccctggaacgacgccaaacgcgacccctaccagaggactcgcgcatgcgcagcgcagcctgggccggcggcctgggcaggatgtagtcgcgagcagcgcaccgggcccacgccagcggaattgcgcatgcgcagggccgcctctgcctgcggcctgggctgggtgtagccccggaacctagctcttaactcccgccagcagttttacgcatgcgcgacgacgcctaggcctgtggcacggtcgcggctctagtcccctgggcccctcagctgtctctggcggggaggtcgggccgcaggggcggggaggggtggcctgccccagtggtacctgacagcatcccacgtcacggccgcgatccccctcggcctcccacaccactcctccaccctcttacctcctcgcaggccggagccttgtccgctccgcctcctgggtagcggttactgcacggtcaggggcccggcgccgcgatgagttggcgcctccccctgaaacggcccggcctcggcgggatgcgctcgggtgcccggccgagacggaaacgaagggagcgcagacaagaggagggggctggcgacggcgtctcgcccctcctctcctccctaggctgcccaccgccgcccctcccctttctcgcagacgccccctcccctcggagttgacccccgggagtctcccattggggccgcctccgcttttccagggagttcctccgtgggtcacccccaccttctccagggttatgttctcgcaaattttgggaatttgtggatacccgacctagaaggataaggcgtgtatgatgctgagagcaaccttttccacagcccctctcctccagcctgccccagcttttcttctattgctggcccctctatctgggggctccgatcacttcacgttttcaccccattgctgtggggcggaagtcttgtagccccctgtagtacaaatgctgaaataatgaggatgtgtgctggggggttcagggggatgacctcagttaccttggggccaagggcttcgaaaacagccaccttctccccttatgatta

SEQ ID NO: 59656 - DNA, 528 bp, Homo sapiens
atgggcctggtcataactgggtgtggtggcgcacatctgtagtcctagctactggggaggtagaggtcgggggatcacttgagcccaagagttcaaggctgcagtgagctatgatcctcccactgcactccagcctgggtgacaaagtaaaccctatctcaaataaataaataaatatctgcttttgacattttggaaaaagaataaacgaaaacctacccatatttgcttttgtgtttcagaccttttttagccaggcatttaagactggctgagtgtaacctttgcccttggcatttgggggcaaaaccacaggtataggccagccctggtattcgtgggaggattgcaccattcagcagtgtcaggtcatgaagcacagattctctccaacagtgcttcataaatacagcaagtgaatttgggaatgtggtctgtttaatttaaaattagcttctttctccagaagattttctcttccctatgaaaactgttttatctctcaggccttttaatcttttatatttt

SEQ ID NO: 59657 - DNA, 2208 bp, Homo sapiens
caatgtatcctctgaaattttagctttgagattgcaccaggatctaacatgtggtgctgcgatgtcctgaccatgccaccctggccagttcaccaggccaggcagggctgagcctggagctaaaacagattgcatacccaggcttccccccagggcccaggacagctgtcatatgcccgtttcaggccacagaaaggatgataaaaaaaaaaatctgtcttctctcctccttctcagagccttttctctgcaaagcagtgtttttttcaaaatgggatagccagcgccctgccagggatagagggcaaaagtcagcagccaaatgagtcaactccatggtcccttcatgacaccattcagtcatgagagtgttttcccagaactcagcacccatctgggacctctggcccctcacacctgctgcttgttctgtgggacatgtcctgccctctgctctaaccccctccttccttggacctgcctgattcccattcatcccataggaattaccttggtgaccttccttgggaagtctgtctgcctgcctcaaggttacagggtaggccatttatacatatgtggtccctcagcacctcctgttcacttcactataggatttatcaagctctattgcaattgcttgtttacttttattttctctcctactagactgtacactccggaggaaagggactgtgtctaggtcatggctgataaccagtgcccaattctgggcctcaacaaatgccttgtgggatgagctcatgctggaacctagcgggtgtgcagactcgtgcatcattcaggagcagtgtgctcaagaacagttactgatgtcagacaggcctgggctacaattctagttctgccacttagtagctaagtgttgttagaccagcccaaagctgaattctctcattcgtaaaataacaaccacaacaatgataatacttactaattttgttatgattgcactacctacctcaggatttaaataaggattaagtgagatattctaagtgcttaaaatagaccttagcacattccaaaggctgggcgactattagcaatacacctctcctcccccgatgccaggttcttctgctagagtccattttgaagagaaaaaattattagatttgatgaaaataaaatggaattgtttttcaaaggcagattcccatccagcagaagcacttaagacaatcatctttcacaacgatgagtaatatctctcacgctgtcatccagaatgactcacagcatcagagggtctcatgtccaagggcgcattcgaactgtttcttaagagtcatttcttactcatcacaaaactcaccattaggtggcagccgagccgggggccctcagagaaaagagcgaactgacctttgaaggcagagccgctaccagaggccacaccgctgagaagcgaacatctgactcatctggggagtgttagcccagaaatgacaagggcttaattcaacaacgtgtaaaatatcacatccccatgcccagaggagtacaatagacccagtaagcccaagagtaatctccccagaaataaaagaattagggctgttgacaaatgaagacaaaagcttctaaaccattttaggtgcttgtaataaatttgatcccaagataattaagtgatattgtgagcagcctcatctagtcgtgtgtctctcctgcttaaaagccttcactgccccaccgggtttctcaatcactgcctgtgtgggttgcacggggggtaagaccggtgtcagactctacaggggagcataaaaaaagaaacattcaatacacctcctattttcataatacaaactgcagagagtaaagcttgatggactctatctggtgctaatatgcagatgatagagtgaaaaggcatggaaaggacatggattttcaaaaaggcatcagaaacatgggcatactaataacaataatgttaattaacatgtattaagtacctgatatgcactgtgctatctaccttacgggctttatctcatttagtccttaaaatcagcccatgaggtaggaattattaatattcccacttgacaactagggaaactgaggctcagagagattaaatgatttgtctaaaggcacatagctagaatccagagacaggattcagacctcagcagtctgacattggagcgatcacaaggacatccgaggagcttg

SEQ ID NO: 59658 - DNA, 1148 bp, Homo sapiens
gaagggaggaagctaccacagttctccctccaggctagcaggaaaacaatctgcttcccagtcacactcctgacacagcgtcctggctattttgattggacagtcacctcttttcctctccaagaattctgatgttctgcgtagagaggggttgtgactttacctcttatgcaagcctgaacctggagggcacccatcctgtggggatgcagtgttccagaaaggctgtctacagatgcacccaggcagaactcccatgggagaagtcagagctttgtctgcagtggtgggtgagagggagaagtcctcttctccaataccctttacaagcaccagggctgcctgactgttgggttaaagctacacactttcctcaccgatcccaacactgtacctgtgtctctgctgaaagaaacttcccatgagtggaaagttcagggactcaaggcctgtactttggtttattttgtcccacatggtgctcccttaatgtggtaccctcccccttcccctaggaatggcagtccctcagggccagactactgtgaatcctgctgcttttctggatctagttacccactggagctgccagactccatgctggtgctggagaatgtttgcaagggatctagtgatgtgacctgtcctctagtcttccagcggtgggtaccagcagcagctgatgagagtgataggtgagtgacgcagactctgatatttccttggttataaatagctttggtgtgttagctttctcaaatgccagctgcaatagtaatgtgctggacacgtgaaccaactcaagacctcctggttagccagggtgatgcaggcaatgacgatagctgaatttacgcaaaagttttctccttcctgagtgctatgttattgtgcctgcagatgttgtaatgggctgtacccgttggcctccagccaggaagtagtgtttgcgaaagagcaccatctgcagtggtagtggtggaatttgtgtttgttttatgttagccagtgaaggtactctggtgtctcaggcaaggggtggggccatggagctcccaaatgtgcctgtccatggggttacattattggggggctgcggggaggggtggaggggcaaagatggcttgaggctgggttagataagtcaa

SEQ ID NO: 59659 - DNA, 836 bp, Homo sapiens
gaacatagaacaagctgatatacatttattgaacatataaaaaaatgtggaagacagacccacattaagagagttgagtcctccaggttctggttacatgagtttacttcctgttgctgcctctcaaacctgatatactttgacactattttggcacctggtggtgccatttttatttaactcattcatctctgcttgcagaatttgtatgtcctattttaatgttcaataatgctggtagataatgaggtggaaataaaacatgaagggagtaaaaatgtccaatattttgtttctagacggtgagtctttggggagagtcacacaaaaaaaaaaactcttaaagataaaatacacagatatttgaatgaatcctaatataatagcattctggtttcatgtactgatattttgttccatttacttcaagattttgagttctatggctgtatcttaaaaagatctcttttctcatggagagtccattttattcaatatattgagcaatgactcagacactgtgcagagcagaagggcacattcctgtgtcctgctcacccaatcctgtggctatgagatacactgctcttctttatcgcactttgtcagtaaagtccagataaggcctcaggatctttctcaacacagtgtcctggagaaccattaccaatgatcatcacttgcaagcaagatgatacctaattgctatccctggtttagatgaaatgaagactggatttaatgaatctataattaatgaagtgaatattatatttaagactagttttgctctggagtcttgaggtcttgcagaggcttgataaataacctgtgtt

SEQ ID NO: 59660 - DNA, 621 bp, Homo sapiens
tatttatcaacaagtatcttatgttgggttccctagcagagttcaagaagaggattcttttacaagtgatttattgaggaagtgctctttgaaaaaagggggatgatggaaacaataaagaacagggaaaatgctaagcaggaatgtggctcaactgaatattagctgtactctgactccacagggcactagggatcacaaattgctccagagaaaaggtcccatcttgaggcaagctgctctattgcaccacatgtcagtcagtcagccagcagcaggcttgtatgggagggagtaacttccctagtgaggcagtttccattagcccaaaggtaattctttggaaaactagtcagctgtaagctatcagatgccaacatttaactgcagtgaggcgtgcctgcaaagtgaaacaacagcattcattacaacaacaaagaaaagccaggcaatttaaaataccaggtaaaacaaaaagctatatcagaaatccagaggtccaaatgtgaggcaaattgtagcataattttgaacaatcaatattacatgagaaagtttatctcatttgattttgatgattaaaatattctcctttgaatttcataggttcagttataacat

SEQ ID NO: 59661 - DNA, 863 bp, Homo sapiens
ccacagagagtattcctattcatgtttcttgatgaacttatgtaaaaatttctctgagatacacctgggaacatagcatctgcattttaggtagggggctcatacaccccagcttacccaggatggtccatgaatagttaataacactcactgctgagtcatcctaggcaaaggacatgctacctaattggagtaagtactgccagcttcccttcagcaatagtgatcaactttgcatattggaatcatttggggagctttaaaaaaatactgctgcctggggtcaactcccagggattctgatgtaattggtctgagtgtggcttgagcaacaggatcttaaaagctccggaaaatcctaataggcacccactgttgagaacctctgctccaccagaacagtctttaccaatctactctcccatcagcaaggttttcatacacccacttggcattacccaactgaaagcattttgtaaaatgtaactctgtaaaaatcaggttttactacgacttgttcagttggccatgccaaggcttcagtgactcactctgatttaagatgctgcttgccagtgtgatatttcacattagcaatgattcttttatataagcaaatggtagttgggggcagagtaaacagggctttgaaaatgctttaaatttttatttgaagttaaaggtagaactgtctggtttaatgggatccgtccccttgaacaatgtccaactcctaggcagcatacctagctcaccgctgtgttcacaactgccccaggcttggcaatggctcagatgggcaggaacaaggtttgagtgtctgtatcttttcctggtcctgccagctaactgcttgtgttaag

SEQ ID NO: 59662 - DNA, 3284 bp, Homo sapiens
caccgcagcaatcctctgggacttaaacgtatggccaagatatcggtttgagagtcagttatcaacaaaggatttaattagccattgtattctttaagaatatagagaataatcacattttaaagagatttctgtaaaacagttttaaaaatacagctattttaaaagatcgcacaattaatacactgaaataaagcccagacatgcaacttgttacatccatcaccatttttgaaaggacagttcctgaggctggactcaccggcccaagtactaccccctccccaggtctccggcggcaactgtaagtcaaaagccctcaggcattattgcagcgtcccacattgtttgaggttccaggaagtcgctgctacgctcacttgtaagtcttcgtgctgttgtaaaaattgaggtcgtggttttccacgcgatttggctggcgaagagaccacgaagccaccccccacgttttcaactgagtaaatatctaaatatttttgcttgctatccagatcctgggttcgaagtctttgggattagaaacttccaagcccatttcagaggcttcctagtccttgggaggagtgtcttttaaagcacctgccagccttaagttcgcgtgctttcggaaaggggccgacagggtgcgtctcaggggagccttttgaaatgtggattgagaattgtgtgagtgtctctaggaacctccattaactccacttttcctgagtgtagctccgagcctggccacagcggatgctaccacaagccaggcgcagccgggcctcgggagaaagccggaagcccgagagggtgtgggcgctccgggagccaaacgcggccgctcagccgccacgcgccggtggccccgcggggactcgcgttccggtgagagagccccggcgcggcgggctcgaggcgggggttcggggtcccggccgcgggctccgtcggcggggcccgcgcagccgcactcggcgcgccgacttcgggctcctcctcccggctccgtagtaagcatggcggcggcggcgttcgtggtccctcgggtgaaacagaaagcgggagctacgcggagagggagcgaagagcggggctgaggcggcggcgtcactgccaggaaacaaccccaacagtcagcgcgccggcggccgcggcggccctgagagctgactctgcagctgaggtagagagacaacgatcaggaaccctaagaagaggcgccagaggagccgccttctgcctcagaacggcgtgactcggaggtgagagcgcgggcactccctccgcgaaaggcgggggacaccgagccgtcccaaccccgtcccgccccggaggaggcgccgcggaaaccgttaggctgggactgagggccggggcactctccagggctcggccccgtcgaggggcgcggaccacccccttctgtgggcgcgctgtgggcagaggtgcagaggggcagtggggccggggacaggaccggtctactagtcgggcacctgccggggccgagcctagccaggacacgcttgcgggggcgcggccgggggcgccatccagcccaagaggaggcggcatctagcccgagggaggtggcgctggtgcgcgggcggcccttctctctgtcccccgcctcctccccgcggcgagccgcgtagctccggagggctcgggggcgggggcgggggcgggggctggggcggaatcctcctgagaggatcgcccagcacccgcggcgccttcggctttggccgcccggcagccgccgaacttgaacgcttttctgaagagagttttccccgctcatcttggggttaaaacctcgaaaacccgccctctgtttgatcctgcgtggctgcttccagtacctggcagttcctctccccgggcgagttaaccacctgttcagtcgggaggtggactcgaggctgcagtcctcgcccggttttaacaacctggatcttcgaacttttgacacggctttggaaacgacgtcatgtgttaggtaaaggaaaatgaacagataatttcgctgtcagattgcgagcagaagagggactgttttaatggatgtggtcgttaattgttcttttattcaactgttagcgttacaagccttgggatattttagagggtggaatgcgatgatttgctgggggtgctagagattgtgaattcgagattttcttttgtgagattttacgtaagttcctttggacacctttgtgtctgaccatctattaaataagagtcgcaggctgatgagattttttttttctttttgcggtataatcattatgtgttcactatgggtttttaaaaccgaacaacgtaattattttgcttcttactgtggtctgtgttttttagttcttgaaaccaaagtgtgtatgcttctgtattgtaggaatgaaataacagttgaactcttactataatattttatcaccatgctgttaccagctccagtactaaacatacgccactcaggagtttgagccatatgttaggcagaaacgaattgagttttgtggttctgatcttatgtttggataaatatttagtttttgcgtatttactaactcttgtcatcttgtgtcacccacaaatgttcaagtgagttgaatcccctgtcttttggatattttcttggttgaattaatttttcttaagtaatgagatgaagtactcactgagacagatggtggcccaacagaaaacagtgatgaaggatttttaccacatcttttatgaaatataacctgaaatgttgcttttagctttgtagcctactaatcttgctttctaatcacaccagttagtgggaagaagggatgatgacaggagaaacatcttgttaaaattttaatattaaatcttatatttaaattttttagcactactacattaaattttactatattgtcttgtttcatttcatagatcatctgttagttttctatgtgtaggttaactggaaaattttttatcccaggctggctaccgttagccacctgtatgcttctgaattaactccctctttttcccttttgtctgaatcctccaaatcattgaatgctccggaaaaataaaatcctggttaacactgtcaagcatagttataagggtaattaatttatcccaaattaataataagcattaaaaaaaacattctaggattatcttcttttggtgacgtctgtgtcttcacttcctctatctgtgtgagtaattgagacctgatttattttaacacacatgtaatgattactctttactagtca

SEQ ID NO: 59663 - DNA, 2677 bp, Homo sapiens
tatatgctactttgcaagtaccgttatatgccacgctagagatttcacattttattctgaaaggaaagggaaccattgaaggattttaagcaggggataaccaaaactatagtaataagaatgagacctggaagctcagtgtggagggtgagaagaaactaggatgatttacaaatttcacagacaagaagaactatgagaacaactgtctcagcagtttttatattttccaaatatttcttttagatgattagcagttaaaaaaaaaaaaaacttagaatgagggaaagcccttgcttttttacattttttttttaaacactttttcttaagaaacaacactggttgaggaaacgccaccaaagcaaaagcctgagggtatgggaaaaggcccttggcatgttttcatgttagtctatgtcagagtaatgatgacagaatgaaaggttattagatgtgcctccagctttgatctctgtttggttttccagttcccctgggaagtgccagtcttacaacataaactaacaggaagggtaatgctttaagtgtacaggcctagtttctttttgggagaacctacagcaggatgtgaacattctgtgccaagcctccaggggtaagttctgttccttttatagaagagaagatttccaattaggtgtgggtgtgttttcagggataatatatttcgaaaccttatacatatgattactcataagccatccagctgtaaccattaaaaaattgatattttgatgcccgaaaagactaataaagttttaaaattataggcccaaagaagaagtgactattgggaagaagacctgaaattacagtaaattgtaaggccatagtgtagtgctccaaatctgaatcaaagtgatattttgtcaagcacagcatattatataaaatgcttaataaatggcaacatatctgcagaagatagtctaaaaagcctagatacagaagcctttttacagataattcagatggctagtagaaccttaagacatgtttctaagggcccagaccttaaagcacagaagctgtgaggaaactaacatatagattctgttgtatgggcaatctataattaaaataaaaaagtttagatattatgtaaaaagagaacctagcacaaccctttttgacactagcagtactgatttaatgcagtctgcatggtagatgactagcctgctttgtcacttgagcagtttttttcagtctgtggccttaatgtttgatcctgacaggatttgcgtcactgatccatatcactgccgtgtgatgtcaaagtgtgggtgttcagttattgaggcatagttaacctaatgtgctgcagtaaatcctaagtgctccttcctactaaaataacaaaagaatgattcatcattgttcatattaggctgatactaaaaatagtaatgttcacaacctgctgcattcatggacattaatatcacagcctctgcagctttctaaacaagtgcactaaaaataatttcttgtttagaaacaggtgcttggtaaacacatctccttcaagttttctatttatatgcagttcaatttagtgctaaaggtagattctaaccataagtcattcttcaaatgtactctacttagtgtttatcactgatacatctaattgtgctgcaaatctaatcatagaaattttcagttacttgtacacagataatgaaattatccacaattctgaatcatacttaggcccctaatttaagcattctgctttatccaaactttaaaaagaataataaatttccaaggaaaagaaaggtctctaaacatctaagcatgaataatgaccttgatcttttctctttctcctgtaacttccttattctgttcccaagttctgactcaccaatttggtgagttcctagatcaaggcttacactaattgcctgccttatatgaataaatgttgctaggtgtttcatagccttaataaataagcattccttattagtaaggggaccttatatcccaatttgtctaagacagttctggtttttgcctcatcttgatatctaactggtatgacatttgtcttggatttatcatttttaaaacaatattattagtagttcattaaaataagttgtgatagatttggttgaccaccattttgaatttccagcttccaccttgatctctagtaagtagctcatctgtctctttttcactttaaacttgtggttaaatcttagacaacccaaaataaatcattctctcttcctgacccttgccagaagcaagtcttaattaacagtaagtgaaagtgtgcttagatttaaaggactgggaactaactcctttcagtttcctggtagtagtggcagaagtatttgatgctgctgtctttgctggccacttggtgtcaccagggcaccaagtggaaggaccagtgggaagcatataggttaaataaataaatatgaggaaattaaatatttctgccactgaatatataaaaaatagcttgaatgatttttatcacttattgtattgtgtataactgttacttggcagtacttttttatcttgcagtaaactctctcagcaataatgagctcaaaaacaaggtctaaatttggtgaaacatgcagaagaaaaataaagacgattcagtgagatttgtaaa

SEQ ID NO: 59664 - DNA, 1531 bp, Homo sapiens
cttaagaggcaaataacagcctgaaacataaatcccacctttgagacacatgtctatcaaacctatattctatacacaattatttgtgtattgtggatattccttaaggattgagtatggagaattacgttatacaatgacatttcagactgaatcttttaaattaatattatctcaaatgttctaaatgaaaattagcggcaggctgcatgagtaaaaaattagaagatagcacctgtggtgttattgaacacaaagagaatcattgtacatcaaatatatatttctgaaaagtatactttgatgagcttttgaattggttcataaggaagtctgaaagatggtcaaattcagggcagcagcagtagaaatcatttaatcttttttttcccctatatcagaaatgctgcaagcgggaacgtttgcttttttttcccccttgccctttcctgggtcactgcaggtcacgtgatgactgtcacgtgactcggtcaaaggatcttttcctcttacagccttgcaaaaaaaaaaaaagccgttctccaattaaagctgttaacgtgtactacgctgtttccttgttggattttcttgttctctgctgctactgtaaaaacgaaatgagtggtaagatttgctgttttcgaacattctgcttttattttaagacagaaagcattgtattaatctaaagtcatgccgtgtgtttttaaaaatagatgctaaatatcatcgccataaaatattttaaattgttgccatgtaaatacaaaaaggttagactatgtagagttattttgtaattttgtattccacggaatattccattctaggatctttattttactaggtttttcttctagagctaaaatctgaaaattggcatcagattatttggaagccattgtgaacgctggcttatagagaatgtgtagcacagcggcagcacgttgcattttaagaattaaaactcctggacaaatttgtaattttatttaaaaaaaacctcttaaatatgaatgtatattaacaaggaaagataaagaagaatttaagttatactagttgaaatatcttctttaagtcagtgatggcactttttaagaagcaggggtggggagcttctcaaatttcttaagacaattggttagaattgtttactcttctgcaggtttttgaaataggaaatgtatccttaatagctccatgattggggtaaatcatgctcaaatcacatagattataaaggagctgctaagtgtatgcacagttgttgtcaggtattgctactcttgtgccaggcatacatttgtcaataggatctgagtttcttccttgggacaaaatctccctcattgcatacaaatttaagtcagtttgtagttaattttctgttactttctaaattaaaaagtattgttggaactaaggagctaatcaaacatttacatcattaaatatgcaaggctttaaggtttcgctactatagacacaggagtaacaacagacatgagatgctgtaaacgttgta

SEQ ID NO: 59665 - DNA, 1125 bp, Homo sapiens
ctcctttcagcctgtgacatgtgcctggcttacaactgaatattttatggatgtccttgagtgtgattaaacaatttcgcctgcccacacccaagttatcagctctatctcattcttaatccttctaggatgacacagaggtcttaaagaagaaattaccttttcagtttcacagttaatcaatggcagcagctgcacagtaagaatgctcgtatgcagtagtgtaaggcctataacctcttcccacccacgcttccaagggcttgctccctctccaccatcccccttggtaattgttgccacgctgagcctgtctgtctctcaggagaaactgggactaacagaaaaactgctaaagcaacagccacagagtaacaggaatctgcactccacaaaagtcttgcctgaatttgccctgccgtgtccctgctgtgtaaaaagaaaacctaggaaagactgagcccctggtcaatgtggcggtcaggtcctggcggtgagattgggaaatagctggccttgaacttctctgccaggggctcccttccagggccagctttgctatctctgcattttactaaagataccatttcctggtgcctggggtctagaggacccagtgggtcatgtgaatgaggaaggggctgagtgtgaagccacagatgccctgtgtgtggtgacagctgtgaggtgcctgcagagtggcaccagcctacaggctgcaggtggcagtctttggggaacatgagctcagagctgccacagcttccggttttgcaagacaatgcttccttctcaaactcccacacctccccggatgttaccactcctctcagcctgcggcacgtgcctggtttacaacaatattttatggatgtccttgggagctattaaagaatttggtctgcctaggcccaagatatcatgctgacaatctggaactttacctgaaatttcccaattgtaaaaggttggttcaaaacattatgaaatggccaggctccgtggctcacatctgtattcccagcactttgggaggcagaggagggtggatcacttgagcccaggagttcaagagcagcctgggcaatctagggagacccccatctctacaaacttcatgccttg

SEQ ID NO: 59666 - DNA, 1991 bp, Homo sapiens
agtcaaatcacctgaagagctttaccctcagaacaggcgaactagaaaaaattctacaagccaaagaaataaatagcaagctgaaagatagatctgaagaaattagccagaatgtggctcagagaaacaaaatgatgcaatattttaaaaataataatttagaacctcagaaggtttaacctatgcctaataggaattccaggaggagagtctagagtaatgttgtccaatacagtagtagccaatagccacatgtcactacttaaaatgtaaattaattaaaactaaatgaagttaaaaatgcagttccttggttgtactggccacatttcagatgctcaatagccacatgtggctggtggctaccatattggacagtgcagatatagaatactacaggaaatcctactggacagtgctgatctaggtcataaaacaagtctgaacaaatttcaaagaactggtatgatacagatgttttgtggaaataaactagacattagaaattaaaaacaaaataactcctactgcctcctctcacctttttccccattacaattccacctcttaatgtcttcatgttcttgatgagaagcagaacgtccctactgtgttccatggcaccaagttccccagaacccgccagtctctgatgacagaacatcctggaccgcccagctccacaccccaacccaagaagttctctaaaacactgaccatgacagcctggggtaggtttccactttaacattctgaccaaaattctcaactcgatgcagtcagagtctgcgcaacctgggacctcgagccaagaaatcctcaagtgaccttacttggcaaaaccaacaaaacaaccaaatacaggtctcaagcgatttacagctcggtgcttaactcggtcaccggccgaggggcagccctctggcgccaaagccccgcctctctatgacgtcacacgaggagccctgaagtggcggtcaagcttgaggcgtcatctggctgcgcctagtgggccgttgccttacagttgctgagaggaggcgagaggcgggggcgctagggccgagatcatgtctgactgggagaggtttccttggcagcagaggacgctaggtttgggatgaaagaagctgggcagatgcaaaatctggagagcgcgagggccgggcggtcagtcagcacccagactggcagcatgaccggtgagtgtccgggaccctgctcccgccaccctacctttcgctctgccctgtgcgtctcccgtcattgaactccagattccttgtctgagcctctttgcctcccctgctgcttttggatgtctcctgcccgccctctgcgtgtcccctccgcggtcgccaggaccaatcggctcggtcgcactggcttttgaagtctcgctttttacccctgttagctacttctcacaggacctagagctggggcctctgaggtcaaagagcctgaacatttccaaacggcgcttttgccttgatttccaaattaaccgcacgtgacgctttcctgtatttcgactgctttaccgtcgaaggtcagcgcatttttcgggttgtgttctaatcgctttccttttagcaacgccccatcacagtccaaagaaaagcttgcaccacgacgacgtcagatgcgaagacttttcacagcttgctttgggttgtccccctcagctatgtgtattagctgtaccgttttttcctgcagggtgagggctggagaaagaaggctcaactttttaagtggagaaggaggtagccacgactaaggctgaagcgtctactgctaagatacctctgactctcttgtcccctatctttttctgtgcctcttgcgaaagcagctgggcttaggctgcagcacctaagtggcattgagattggctccctttttcaccattagtaacaaagtttaaagtgtttgtcgtctcttttgtaggtcagataccaaggctttctaaagtcaaccttttcact

SEQ ID NO: 59667 - DNA, 1677 bp, Homo sapiens
ccaggcgtggtggcgggcgcctgtagtcccagctactcgggaggctgtggcaggagaatggcgtgaacccaggaggcgaagcttgcagtgagctgagatcgcgccactgcactctagcctgggcaacagagtgagactccgtctcaaaaaaaaaaaaaaaaattacaactgcccaggtcctacctcccagatacgtcaactcagcaggtctgtggtggatgtctagcattctgtatttctatgaagttccacagagattcttatgtgaactcctggtggaaaccacgatctgatactgactggtgcactattttgtaaaagacacactccttagttactgctacatacatgaccacatgaccagaatgcagatcaaagtgtctctgagccctacagagctctctggtgtgatggtctggcctcctgcctctgcctggcaccccctctgcccacccatccctgtcccatagctgtgcagtgcccaactctacagggaacacactatgaaagggcttagttatggggcagtgggggtttcatggctaagcctttaaggttcctccaccctagcaagtgtggggaaggagaaaactaccctaggatgttgagtaccaatgtggagaatacaagactgcagaggctcccatcccaggaggtggcgatgacattacatttccgggtttggaacaggaaggctcatggtgtgggcggcatgagagctagtccatgagtcaggcagagaatgtttacacgtggtggtaagaaaagcagcattccaggaatactgaattgtcccactgcaggctctgaggtgggcgggacaggacgtgggagcaacagtaagaatgagtaagggaacgtgggagctaaggcggcgccggctctggaacctgggttcaaattccacctctcctacatgttagcagtgtgtccaccagcaaagttttgttatctagaaataaaaggacctctgcctgtctgggtggggagaatgtgctggagaacatcagcagcttcagcacaagtaagtctcctgaaagccttctgttgtcactgtatgtggggagtcgtgcttgctggaggcaaagtgcctgaactgaattcaaggcctcgtcactgccccatcaccctaattctggtcaactgtacacacgaccgtgggcagccagttcatagccctcccagctggttgtcttcattcatggggctaagtgtttcacactcatcgaacacttaaccctcacaacagccctgaagtataagagctgttatcctcatctgttaataaggaaacaggctgagtcatattaataaacttgaccacatagtagtatggttaacagcgcagattcagaagcacacagcctgggcccaaatcctagcaccatctcttattagctttatgatttcacaaaacttgtttacctctctgtacctcagtttcttcatctgaaaaatggggatgataacagtacctgagtgccattaggtaactgtgaggcttaatgagaacagtatatgtattctactccatgcattcaaatggtacatggcacacagcatgcaccattcaaatgcatggagtagaacacatacattgttgcaaaattgcttttgccaggctcacagaactagcaagggctgaagctgagattaatcccaggatgcttgttctga

SEQ ID NO: 59668 - DNA, 1410 bp, Homo sapiens
agtaagaccacacggaaactattctcattcttgttctacatacttttttggctgaactgtcaagccgacttttatattctggaataagctggggacagaacttcttgttttgaagggaatagctattatagccaaatgctaggatctgagtgacagactagtgccatatttggcactggccatgcctgagttccagcagctctgagcgagcaaacgacacagaccattttcttacaccttacatggtttggtgggaaggggcaacacggccctttgctatcaaggttaacagggaaaggaaagggagaagatcatctcataatgtatccctcaatccatattgggcacatctctgggagagtcaggaccagagacaaaagtctcctgacctagtatcttagaattacacttcagcactttcattttgcaagtgaaaaaatgcatccaggtggatttgcccaaagtggctgctggcaactgagacagaacaaagaccttgctctcttgacctccatcggggctttcccaccacactatcctgctcaccaatagtaggaagcacgtgctgagcctattagcaggctaatgagagtcagccattaacaatccagcaaagacattttcaggactgggttccacattctttgcaccctacggaaggtgctctggggaaaaaaacctattaattaaacgatgtgaaaacaatcctaggacttagctgttacttttttctaaataacaaaatatttttggcaagtaaacaatgtagttcatacttcagtggaaggaacatagccggggtacggggcaggccaagttacacacatacaagtaaacaagcggtcaactatttttaaatgtacctaccctgtccaatgattaggtgacccaaattctgatcttctcagaggatggaaataggttatttttattttgcaacccactgtttccttctatatataatactgcatttttgaacaaaattatatgaagtttattctcatttaaagttctgtgggagctgaatgatatgatacacagccttctacaattccttcggtccaagggtcttgagagggcctatcattttataatgtgtaggcattttccaggcctacagcactctatttttgtttcattcttttttttgaaactttttatgaaataattctaacacatggaagagtacaagagtaacatatcagacttcatattcccaccattggctctatcaaaatctaatatcttttgccatacttgccttcagattttttttttaataaaatattacagatatagttgaaggctattggacactcctgtatgatatcgcttattctcttccctacttcttctcctgagatgaccattatcctgaatttggcatttggcattcccatgcattttgca

SEQ ID NO: 59669 - DNA, 1118 bp, Homo sapiens
aattaaaagaaaagaattgagcatttattctgcctctctggtatgaattatacttcagagtattctaacacctgaagctgtggtgggtgaatgacagtattctctataaaactactttagccaataaaaaatacaaaaggaatgacagaattcaaaattacctttttgtcacctctagcaaaatgacggaatcaggcaatgttcatcaatggatggtaaaacaattaagtttaaggttgatgggaaactttatagtggattagactgtcaccaactgaacccattgctcagtcttagcattactaaaagtacatctcctaatgtgatgaaatatgaactacatagcaccatctacaaaataactgccaaaatgaaactgcttaaaattttttataataaacttaaaaaaacaggataattgggagaaatttatgattttaacatcagccttctggaacatagtccactggccacagttctttatggatcactgagagctgttcagtgacctcattctcaagttctctcagtaccctggaatgtcatttgcctgagccagaagacaaattcatttagagtgagtaagtccttatttataatcttttcatagaacttgggctccaaatacattttaccatgtttaataccacatatccagataattctctttgatacacaagtatcaattgctttttgtcttatattctttatggttagacttaggttctatacagaatgttactatcatactctcatttatattattgtttgatgtgtaaatgtaccaatcaagttatgccctaggttttaaagtgacttcacaaggataattcggtaaaaatcctgacttttaagaagggctaaatctctagcattcagtgctaaattagaaaatggtaacaggggctgggtgcggtagctcatgcctgtaattccagcattttgggaggccgaggcaggcagatcacaagaccatctggctaacatggtgaaacctcgtctctactaaaaatagaaaaaattagtgaggcgtggtggcatgggcctgtagtcccagctactcaggaggctgaggcaggagaatcgcttgaacctgggagggagaggttgcagtgagc

SEQ ID NO: 59670 - DNA, 2869 bp, Homo sapiens
tttcccctcaaatgaaagacaatgcaatgccatccacaacaatgctaaaaaaaaaaaaaaaaaaggaggagggaaacaaggttaagtcctgtcttcttcctcctaccccaaaaagagctcagaaattaaggtgctttccctaacaaagcctcctcctgctccatgaagtgaccaagcatgtcatggcagacccagagatttataatcttcaacatatcgttatcggggaaatcaagatttgacaaaattcttccttcacgccccgtttctgcaagaccaccactttctagcttaaaataaagaaaaaaaaaagacagctgcaggaatgcttggctgcccgctaatgtacaattttgcccaaacgcagaacttgacgcccactattaccaaaggatggccttagtaaagtaacccccgcgaagagcaaactgtttagcagccgctccctcgaaaaggacggaagaggaggtctcttctgaacctgaggatagtagagaggcactccccttccactactagctttgctcctttctcaatcaggcagttcatcagctagcctcctttgtcaaagggggttgatggtcagaatctttgcgagacaaaaattactaaaagagctcccaggaaccaatgttaaggcatcaaaggccccgcccagcccccacaatgatcaacaaaccaaaacctgggatccctactattaccaccaccacaaccatcaccaccaccaccaccaccattcctcgctctctctagccagggatgagactcaggcccaggaaacccatcctttccgcaagtaggaaggcgctgggtctcctcccttaggcctctcctttaccccattgttctctccggacccctccactacggccaggcgctatgtatgttttcaacccccaagaagcccagtcccagccacacacaagatggcagcctcacacctaccggaggaaacagctgcgccaccactccagtgatgccggcctctcgactacgagtaactccattggctcagctacagtgcgcgagacaagccgagagcgctagcagtcaatcgggaggcggcgcgctcgggcgccactgcggtgccagcggtaagtgcgccgagtctctgaggcgtgaaccagtggggagtgcgaccaatcaatgggctcctggctgggtggtgggacggccggcgtccgactcctcccatgtagtgatcggtttaggtaggtcggcctggtccccggcggaggttacgccttccctcatccccggtagaggcagggcgggactgttgtggttgagatgaaggctagtaaatggtgaagtacttcccggccagagggcacctgcgctcgggaggtttgggcggcttggcgtcggaggagagccccacccgcggaggaacccagccttgccaacggagctggcggagctcactcctcaggtcaggcgggcggcgtagaaaacgcagcggagccaggtgaaaccaaggcaccgccgtggctggcccccgacagttcctctagccgggaggttggaggagctgaaaacgccgcggagccctcggccgcccgagcaggggctggaccccagcccttgcagcctcccttctcctggcacccaagtgcagtcctggctgcagaaggggccgcgggcgcactgagtttccaacctccatttcagcctgtctgtctcagggtgcagccttaatgagaggtgattcctaagctgctgggaacctgaggttgtcaaaggggcggcaggaaatggacagcagtataaaacccagaagcagaacttgaaggttaaaccactagcccatttcacaggtaagattacacgagcccttaaatacagcaagttcagtcattcatccaagatcatggagttcagattagatagtaacacttctgactcgctatcagccacagcccaataagtaattaagtaaggaaagatatgtaattaactgtgctctttggcatgtggaaacctgcagtgagctctgtaaatactaacacatgaggccaaggagaggagtaaatttgaagaggtcaaatggagtaaccaaagcataggctctgaaaccatgctgcctggttccttatttcgtgtctgccacttacggtatggcattccttagcttcctcatcagcaaacgagctgctaatttaacccacatgactgttagggggattaaataagaacacgtgaagtagttagaagcgtgactaacccgtggttcttaagcgtgacttaacccgtggttctgtcgttacaattaaaacgtaaggagccgagaggaaatggtaaacgtgtttttaaagcctgttttagaaacgaaaaggaaccatacattgaagcaaagcagactggcttaattatttttctaccaaaatgaaaaagtgagaaggggaaaaaagttttttaagcccatttactctctgaaatattaacaccagttgtctctggatgatgggatggtgtttaaattttctcctttatgctttattgtattttgcagattttctccaggaaacatgttttacttgtgcacgttcagttttcaaattttcaggtgtgaacgctggtgagagctgcttaaaaacaaagctatgggccgggcgcggtggctcacacctgtaatccccacactttgggaggctgaggcgggcggatcacctgaggtcaggagttcaagaccagcctggccaacgtggtgaaaccccgtctccactaaaaacacaaaaattagccgggcgtgtggtggcgggcccctgtaatcccagcttctcgggaggctgaggcaggagaatcgcttgaacccgggaggcagaggctgcagtgagccgagatcacgccactgcacccttctcac

SEQ ID NO: 59671 - DNA, 407 bp, Homo sapiens
agcctaggcaagagagtgagaccctgtctaaaaaaaaaaaaaagtttcacgctagcatttattttaaaaagaaggttgggaatgagagaaacaaaagaactttgtgttgaggtcaaaacaagctgtcctggatccaacctagactccccaggctgtcatcaaaccgctaattatgtttatttttcttgatgttgtgtaactctcagtatttgctctgtctccatatgaaggactggatagtgttttcttgagagaaattatttccctttcctcttttttctaatgactaatgttaaatcctcatgtttttgagtaaatcctatttccaactatgcttgatatacatttgttttgttcatatttgttaatatagatttatataactcatgcaaataaattagctggag

SEQ ID NO: 59672 - DNA, 1071 bp, Homo sapiens
acagatatttgattggctactgttgattacactctaagtgggttgtccaacattctgttgtaaacaggtaacagtcacaagggtctctttctccatatcatttagactaggtttgaataaagaatagggagtcttgactgggcgtggtgtctcaggcctataatcccagaaccttggaaggctgaggtggcaggatcacttgagtccaggagttcaagaccagccaggcttgaggtagagattctacctctacaaaagaattttaaaaatcagtcaggtgtggagttgcacacctgtagttctagctactctggaggctgaagtggaagggtagcttgagcctaggagttcaaggtcacagtgagcttatgatcacatcaacgtactccagcctgggtgacagagcaagaccttgtgtctttaaaaaaaaaaaaaaaatgtggagtctagttaatgtgtaacatctcaacacagaagtcagaaagcaatggtcatgcaccaaagaaaaaacaatcatgttacatgagtcctctttcagggcttaacttttccctttggcataataaatttggaaggtcctaaatttttattttctttttacatagctctcttcaactatcagacttttatttattcatttattttagagagagggtcttcctctgtcgctcaggctggagtgcagtggtgcaagtatagctcactacagcctacggttcctgggcttaagcagtgtttccacctcagttcctaaatagctagaactacaggcatgcgccaccatgcctggctaacttttttttttttttttttttctgtcgtagagacagggccttgttctgttgctcaggggggccttaaactcctggcctcaagtaatcttcccactttatccttccaaagtgatgggattacagggatgaaccttgtgcttggctcagctatcagattttaaacctttctttacttggaaaattaaagacagatatttgtttttcagttagccaaggagcaaccttgaaatacaatatccttttattaaacttcttttgagggggaaagtaagttata

SEQ ID NO: 59673 - DNA, 1712 bp, Homo sapiens
tcgaactcctgacctcgtgattcgcccacctcggcctcccaaagtcctggaactacaggcgtgagccaccgcgcccacccggccagtatgatagtttttaggaggaaccctcaggagagtgattgtttctcccgctgtgttgtggggggtggagtagggaagcctggcgtttggggtttttttgtttgtttgttttttgtgtgtgtttgtttgtttgtttgttttgagacggagtcccgctctgtagcccaggctggagtgtagtggcgcgatctcggctcactgcaagccccgcctcccgattcaagcgattctcatgcctcagtgtctggagtagctgggattacaggcacccgccaccatgcccagctaatttttgtatttttagtagagacggggtttcaccatgttggttaggctggtgttgaactcctgacctcgtgatccgccctcctcggcctcccaaagtgctgggattacaggcgtgagccactgctcccggcgtttgggttttttaagctattcaaattaagactagactggaatctggagcagtgtgtgtgacaacccctctctgcacacccaactttccccgggccggctagtgactcaaagcgacagcccagatttaagaaaacgaaacctagtgcagctggggcacttccgggatctcgctatccggccgccacccgcagctgcagcacagtcatggcccaggcgtcgccgccccggcccgagagggtgctcggcgccagcagcccggaggcccggcccgcgcaggaggcgctcctccttcccaccggtgtgtaccgcgggggcgggcgggcgggcgggcggggctgggcagcgacgggcccggtcaaggggcctgccttccggtcgtggccgcatgggggcccgacctgcccctactccgggccggggccctagacgccggggcggcgctggacgaacttggctcaccactcgcgtgcctgttggtgggggagggggccagaggacagggcgcggcccaggccagttccacaggtggctctgactgcccatggtttcgcgcgagtggtgggcacgcttcggtttacctcccccgcgggtgacagcccagtgcttccaccacaaccgatgtcaactctcctagcgcccctccgctcaccggtaaaccaggacagtggaggggcgccctgatgcggtgaggcagggggcggccctgagggaagagctgggtctcacgttcacggaggacgtgactggaacccgtctccccttctccagtcgttccagtcctccccggccctctacttgagtgggtgggtcttctgatgggttcctgcccttgcgtgtgtgtatagctccaaacggtgtgccaggctcagggcaaggtcctgagcatacaaagatgagttaggcagaccctgccctagagactctactaggcaactttaatgaggaggtcagaaccacagaggtacagatgagagactcctgactcccagtcttcagggaaagctttttgaggagaggatggctgggcttaccctttttttttttttttttttttgagaggagtttcactcttgttgcccaggctggagtgcaaaggcgctatctcggcccactgcaacctctgcctcccgggttcaagcgattctcctgcctcagcctcccgagtggatgggattacaggcatgtgccaccacgcccagctaattttg

SEQ ID NO: 59674 - DNA, 3773 bp, Homo sapiens
tcaatcatttttccattccttccggcattatatactttgatgttttaatgttattagcccacaatacacaccagtttcagaaactcagtttttgtcctctaagggcttttagtcctcccaaaaaaagaatagggcaaaagcaaggaagatcatgaatctggttttctaaaagcattattacaagactgctttataaaattgtaatccccagctgcagagttccgcagatggcttgaaagtgtcttacatgcaaataaataaaaacaaaaggccacttatgcgagcagaacacagcgtgctcgatagtcatcttaaaccgagcaggtaggtactttatcagaggcagacaagggaaacgtcacttatttagagttcaccgcacgcctggataaaagtcctcactaacaaaatccctgcctttgtggattctgtgtcggaaagggaaacgataaagaatacggtttgtgacagcactactctcaggagacgaaggagagatgctaagatcttggaaaggagagagaataggaagagtcggaggggagatctcctctcagtaaaacggcacccacagcagtcagacttcagctacgagcaaaatcgagtccgtgcacctcaaaaaagagagggaggcagggaaaactttccctcgcctctccccatccttccctcctcctcgcaggagagcacattagctgaggtgctggcggggccgggccggggaccccatccctcgccccggacgcagcgcccgcagggactgcccgggagcccgagcgagggaggcgggaggtacaggagtaacggggcactcccggcccggcctgcggggaagggaagcaggggcagggccgagggggaagaggcctccgcgagctcgaccccgcgcccacacgctacctgcgaggtcagctgctgccgcgccgtcccgcgggaccgcagggatctccgaagctccaatgggcgcagaagtgcgagcgagcggcggtgcccaccggcagcgaagaggaggagcgccagggcgccgggcccgccgggtcacgtggccccggccgcctcacgtgacccggtgcagcgcgcgcccgggacgctacccagccgagcatcccgcaccgccccggccccggccccggccgaaaccctgctcttcgggccctacaacccgacttctttagaagccgattggccgtctcaggcccgccccgaggccctgccactggagtgtccccatgaaatccggtggctgctgccgggacttagaggcttttgtgtctgaggaaccaggaacgcgcgaggcacgggctcctgctctgctccccgagatggcttggctgtggggagggtcggcctaccaccccagagacctaggacggaaaagcgaccgagaaacttggctccctgcccactctagagcgcgtctggccccggggcaccacccaggtggtgctgcctgggaggaaaggcggcggagctgggactagtttgtttttactggagacgcgcctccctccctccccgcccctcacttcctgattgaaagtacctgaggcaggccagggactagggaaggtggcagctggacaaaggtatgaaggaaggacgagatgaggcacaggtcctggtattggaaagaggcagaggtacctcggaagcatgccatagaggttagacgggacctaagagggcatctggtccaaccggattcgtgttaccagcgagtaaactgaggccaggagagggactgctacgagctgctccagcctatcacctataaagactacagtccctttgtaaaataccatacagctctcggagaactcccagttggcgctgcaggataaaatccaaacttgttggcatagcattccagccacttgttcacttacctttcccatttgagctcctaggaataaacagaaaaacatttcattttctaaatatcaccagataacttcacttttggtaacttgaattattaaaaaagtcctaccgtccctcatctcttgccacttccccaacattactggaggctctggctacaaataatttgttttccttgactactcaactttctttggattatttactttttctctaagtttctttactcctttttgctttgttcattcttttgtctgtatctgaaatgtcctgaatcaccacctcccccacttaaagaaaaccagggccaatgattaaaaaaaaaaaaaaaggtattaagaaactaatgcaataagagaattgagcttagttctgtatctattctgaggtctcgctcctgttgcactagttcctgaataaaatgtttttaccacttcaactactgtttggctctggttttcttcaacagcctccaaagtacacatcagtttcctactcatctttcaaaatccaggtcaaatgccgcctactcttgtcttcccagcatcctcttccctgattttttagcaattgaagttcatccagacagtgtcagctgcaacttcttccctgatttccagaatactatatatattctgatacacctcacactgcccagaaatagactgcgcatttcctgtaaaaggtgaattgtctattgctgtcttctcccttagattataaactctttgaaacaggattcttctgggtttagaacagcgcctggcatgtgatagacccttaatactcactgaatgaagtggcttgcccaaagtagtggcagttgagtgaatttactagaagaggcctgttttgctcaaagaaactaaaatcagtttcttttggttgcaacccgatcaaaagaacttgtgtaaacatgtctgagagaaaaacgagggcatggggtgtgagcaatcaaatatgtcctgagccctcactgcttatgtgtcagatgccatacttggagcatcttggaggattaaaagctgaatgagacatggttgctgataaggaatgtgtagtctggttcattattccagtacagggtgaaaagtattatgatacaaggtgctaagtgaacacaaaccagggaccacaaatcagggagtcagggagaaacttcatgagaaggtcagttggacaggaagtagataagaagaaagaaaaagacattccaggagagagcaatgtgttcaaaagtagtgacacatgaaacagtactatttgtttaggaaaaaacaaacaggtaggtgcagtggctcatgcctgtaatcccaggccaaggcaggcaaatcacttgaggtcaagagttcaagaccagcctggccaactttggaaaaccctgtctctactagaaatacaaaaattagccagctgtggtggcacgtgcctgtaatcccagctacttgagaggctgaggcacaaaaatcacttgaacccaggaggcagaggttgtagtgagccaagatcgcatcactgcattccagcctgggtgacagagtgagactctgtctcaaaaaaacaaaaacaagtaaccctatattgatgccttgatgacttcattcacatctaggataaaggaaaccaaattaggttaattttaatatacttgaaagaatgacatatttactggtattggtgttatttattgtattgaataactttctatcaggcacatcataggctctgcatctaaaattggcctaggccaggcacagtgggtcacgcctataatcccaatgctttgggaggccaaggtaggtggattgcttgagcccaggagttcaagaccagcctggacaacatagcaagacgctgtccctataaataaataagaataaaactggcttgga

SEQ ID NO: 59675 - DNA, 1819 bp, Homo sapiens
gggcctaagacctttgtctctcctggtatcagtgagccccgtgtagccccttttccttattccaggtctggaagctgcagtcacagacacacaaaggtgctggggcttgcacattcaccagcgtcactttctccagccacaccactacgtttgagggctctcctgtccttctctaacagaactagtctgggactagacgccaggctttgggctaagtacttgatgtgtcttcacttattaaatccttccaataacccttcaagttaggtaccattattatcgtcatcaacctcattttatagagaaggaaactgaggtgcagagaaattcaggttgaggttcacagcaaataagcagtggaggccaagtgtgcccccaggtggacccaaatcaaagccacactgttaccttctgctctgcgctgcctcccggggcagtagccctcgtgagcctccccacgttggggtgtctaatgaaaagcttccctgctggttgagctgaaggggtcagggtcggggctgtacagagaaactcaggccacaagggcctttgggcagaactggggtcacaaagtaatcatggtttcccagcgaacacaagactttggccctcaggcaaggctccttgatgtctgggggagcctgtgccccccagcagtgctcacagatccacccctgactgccagccggccccttgatggcggtgcctgtctcagattctgtggtcagtgccacgcagctacctccagaggcagcctgcagcctggccatgtggccccaagctccaggctagaggccaaggggagtgtcccttctctctctgtgtcacccagggcataggtcacccaggcagcctggcatggtgcctccaagccactgtgctaatgcttctacagcttctgctccctccctgcctccatggggcccaaacctagccctggtgctgctctgggaactgggtcagagcagcaccccagctcccccacccccaggagcccctcaaccttggcctgctgtcatcctcgtccggccccaatcttcctgcaaatcgggcccttgcaggattcctgctgactcagcagctgggcccggacaggacttagtcccagcgtgagccgatcccgctgcagtttgggcgagaatgacaagccctccaccagacgattctttattgctctgagacttccctgggataattccacccccaggagcactctatctgtttctgtctcctccccacacaccccctggccttgaaaaaggatgatcactgaccacaggcactgaaaagagcaaaccaagagcagcatcaataccctcacacagtggtgcacataacacactttgagtttctgacttttcctaatcagttcttcctgctaaaatacagtagcttaacaaaaacaatgacaacaacaatctggtgtttgccatttacaaggcactttctgtgtgagtagcatgacatggtaaaagagaaagagatgaattataaaacgcagcaagatcatgagtcaatgattcaccctgtcccagcctgcttctttttttttttttttgagacagagtcttgctctgtcaccaggctggagtgcagtggcgcgatctcagctcactgcaacctccgccttccgggttcaagcgattctcctgcctcagccacccgagtagctgggactacaagtgtgcgccaccatgcccagctaatttttgtatttttagtagagatggggtttcaccatgttggccaggatggtctcgatttcttgaccttgtgatctgcccgcctcggccttccaaccgagcctgcttcttttctt

SEQ ID NO: 59676 - DNA, 2272 bp, Homo sapiens
gggcggaggttgcagtgagccgagatagtgccactacactccagcctgggcaacagtgttagactctgtctcaagaacaacaacaaaaaaaaagacaaaaaaaaaaaaaaagaattctataaataaaggagttgagagaaacattcactgtcccttatctctacatgttgattatcagaataaaaagaattccagcaacatcagtcatgggcacaaagccaacccgtaaacatttacagaactcgatgattacccaaaactcggcttgctttctcaatactactgactttggcttcacattagccacaggtgtgtctagagttaaacaaggtcaactttacaaaaaaaaaaaaaaacaaactgatacttgggcatagtttaaaaaaaacttaaaagtgtgtgtgtgtgtgtgcgtgcgcgtgtgtggtggggggcggggcatttcaatataaatgccttaaacacaaccttcctggctattttataaaatgggttgaatctctaaggacacatatttcctaagacctcgactgatacacagagtgcaaacttgggagccagactagactgcctcagaatcatgccagctgtgtggcactggaaagtcacctaattttgcagcgcctaccttcacctctgtaaaatggggaacaataataactaatttatggatgctgtaaagatctgaaattttaaactcagtaatgcgcctggcacacattagacacgggtgtttcgtttgtcttggcaaaggcttcgggttttgcgacaatagccttgctgcctccggagcaagcatctctccttgccccctctggggcatttaaaaatgacctcaattctactctcaattatgtccagttcaacagttacgtgcaggttacaaagccgaggaagctgaggtatcttctaaactaacatagcacgtacagaatttttttaaagtttggtggaggaatcggcagcacaaggtaagctgcgctctgttcacagacctgggaatcagaactccggccgccgcggcctccaggcgcctctcagctaacagacttcctgcagcagggggaggggcggccagctcgctgcaaaaagccgcaggaccccctcaccccgccttgccgcccccgctcccactctctgggatggggagtgcagggtctaggcgatggcacttaccagcgcgaagtgcaccagcgcgtcgtagcagagccagatgagcgccccgcggtccgccgccccctgcccgcggcccaggcgcaggcccagggcgcagcccgccgccagcagcgcggcgcacagcagcagcgaaccgccagcctcggcccccagctcccactcagcgcccatgcttcaggcttccgacgccaacggcccaggaccatgcggcagaggaaagcagggagagaaacgacggggcggggctggccgggaaggggcggagccggatggccaaggaggagcggagctgattggccaaggcggtccggggagggacggggctccccggccgggtcggggccagagcgaggattccgtgcccgcctcgcaccctggccagcctgctgagtccggtggttttgccaggtgccgcccatggaggttccgtagaaggaacgtgctcaccaacttgcgcaaccgcctcgaccaaacctgttcccaaaccgagcccaaaggattggtaatagggccacaccttttgatgttgtttcgcttttaacaaggctcaaactttaagccacaaagtgaagcctaggtagtggaaattttgccagtagaccggggcagaattttaggggcaaaaggttttaattaggctgcagcaagccttaccagggaggctgggggccaagggagttttcagccaccagccggcttaaagcctttatggcctactctgacaatctttccatttcttaaaaatccagaaaagtagaagggtgggtgagaggagcggtaagtcctattggcttggcgatagatgcgtttaacctgtggcaggccaggtttcactatcgcaggcctccatcacaactgcttcagcactgagtggttaaattaaatattaaaagctgaggccgggcgcggtggctcacgcctgtaatcccagcactttttgccaaggcgggcggatcacgaggtcaggaaatcgagaccatcctggctaacacggcgaaaccacgtctctactaaaaatacaaaaaattagccgggcgtggtgacgggcgcctgtagtcccagctactccggaggctgaggcaggagaatggcgtga

SEQ ID NO: 59677 - DNA, 571 bp, Homo sapiens
attctccctgccctcacaaattagctacctaataatcccacagaaaaacactatttacaagaatgaggccaacacaccatactgtttcaagttcagaagagaacagaaaggtcatctatttactctactggttttccaacatatttagcaatacaatttttcaggctactaaagtaaaccaataaaagaaatgacttggcactttaacttcatctggggaaaaaactgtttgaaaatctcctgaaatgtgtccccaactgaagtataaacctggagtataaaccatgccctaggcctatcctaactttgcaactacatagaagaaaacaggcttagcgatctggtgattcattcaaggtcaaagatcttgtatgtggcattgcttggtgtcgtcacagaggaatataagcactggttgtagcttatgcaaaatcaagatgtttcctattaggtcatccaaattgaagacatcacatctttttgccctaaaataatagcaggcacctgaattcacatacccttcaaaaaaggatatagatgaataaataaaatagaactacacatataaccc

SEQ ID NO: 59678 - DNA, 600 bp, Homo sapiens
caaactcctgagtagctgggattacagtcgtgcgccaccacacctggctaatttttatatttttagtagagatgtgtttttgccgtgttggccaggctgatctcaaactcctggcctcaagtgatccgcttgccgcggcctcccaaagtgctgggattacaagcgtgagccactgcgccttgcctatttgcgtaagtttgctcatacttaaattgtagattgtttgcaaaaatggcagtaattccccttcccatatccagtcccgcactgactgtaggcatggctgtgtgacttgctttggcaatgggacattaagcaaacagacttgaaaagtgcttacacatcagggacaggttctcttttgcaacttttttcctgaaatcaccttgtgaacactgagccatggagaataagactgtgtggacaacaaacaagtcccagccaagttacctgagaccatgttagatcatctagtcaccaaccaaccctgtcagctgaccagagacagtaagggaagcctgcagaaaacagttgaactggcctgtgccagaaaacccactctgccaacccacaaaattgttagctcaataaaatggctat

SEQ ID NO: 59679 - DNA, 2379 bp, Homo sapiens
tgttcctattcccaagttttactttcgcttagatgtatttcttacaaagggtatttaaccatgaccaggaaagaatatatgatctttatttgactcatttaaatgggaattccacggatatctccctaggttctttcctactagtatttaattttgtagctctgaaaaacggcctgagtttgtctgtttctctacaaaatagaacactgaatggtatatttaccccacaaccttccttaagacaggataaaacacacctcttaatcacactagcttatcaaaaattacaaaactgcaaatcatgtcgcctagtattagcaaagaaggctgcggccttaaaaccattttccccctaacaaatccaaaggtcacggtcccagtgaagtttgtgcattatacttactgttttcagtagctgcagagagacctctagcgctgcctcaataagccgagtttgcaaatagtacctgctaatgtcaccttaatgagacaatggcaacatgctgagtagcaactaactgagtgaccgcgatgaatgtttagttttgcaaccacttggaaattctactagcttggagcaagaggtatgtaagagaattatgaacctgtgtatccaatttattttagtaaaacgtgtcaaagaaattatcaccctatgcacaccccactccaagaaaggctaagaaaacaagtcctatgagcggaggtcggagcaacctcttttccgaagcctgaacacaatagatggcaaactattgtccaccttcagctcgctccaaatgccagcagttgcaggagtatgagctgcaacagctcggcacgactagtccaaagacgagcactggaatataagaaaatggtcctggcgcatcctaccctcccccatcgatcaccctcaaacaagtcagttacccggctggtccccacccccctctgcgggccgccaccgcccgcctgggcccggctcgcagaaggtaggagcccggaccggcagagccgaggctccatgtgagccgcgcgggaggcgcagagggggctgcaccggacggaaggttgcaccggtggcgggcgcaagcagcggccgccccctcggctgtgcggtcggagggcccgggcggcagcatccccgttcatccgggcggccctggcccgcggaccccgcctcagctccacatcccctcctcgccgacaccaggccgcgcccgcgtgacggggccgaaaacgccggcatttcccggtcgccgcgccggcagctccggggggtgactgcagcccggccggcgtctcgccgcccgctccgcccagcccggggccgcggtgacgggaggcggcggccaactccggccgaccacaagccgacgagaaccagcccggcgccggccccccgcccctccccgcgtcgccgggccggcgcggccaggcgggcccagaccgcggaagcacactcacttccacatcgcggcccttgttcttgaagctcttgatgcggtggttctccaagctggggttctcggccatggctgcgcgcggctccggcggcggctactcctgcggctgcggcggcggcggcggcgaatcttggagcgggagggggaggagggggagagcgggaggggggaggggagagaagagcacgttctgtgacgcctccgagcgcgaggtggcagtagcgccgggggaggcgcgggccgactgccgggccgggtggggcgggaacggtgctgagagcggcgcgcggccgcggaggctggcgacacgtgaccgggggcggtgaccggcttgggcgttcgccgggctatacgtgcccgttggttctcgggatgaccctgccctcttcccctgcaagggctctccacaacccctcggtgctgcaagttttgtgccagaaatggagccggacctggcgacttttactgcccctcaggcgcggggcggcggtcgtcaactacagttcccatcatgccacgatccgcctggagtaattctccacgcctagtgagaacgaggagaatgccgggacccttccgcgcgcggctctttgcgcgccgcgctcatgttgctgggcacaaagctccgcccccacaaggccgcctctgggcggggaagagcgggggagcgtccctggcaccttgcgccctatcaggaggaagagggcgggccttcctgggagcgcacctcgctgcctgtagctagaagatcagaaaaggaacaaccgcgagtgctttgcagtctcgcttttttgggggtcttctcaaatagccaccttcattcgctcttcccatgctctgcttcagttttataaatagcatttctacctgacatgtacatgtgtatgtatgtgatacgagtgtttatatgcgttacctaggtgcccgcgcg

SEQ ID NO: 59680 - DNA, 2500 bp, Homo sapiens
caggaattacgtccacacataactatatctaaagataggaagaggaccattattcctcctccccacatcataaaggaaaaactttcacagaaacatctcagaagacttacctttaaactcctccactggggttgggttacatgctcatgccctaataataaaagttattcagctgagacaggagaatcgcttgaacccaggaggtggaggttgcagtgagctgagattgcgccactgcatccagcctgggcggcagtgcatgactccttctcaaaaaaaaaaagttattcaggttgagtatcccaaaatgcttgggaccagaagtgtttcagaattcagatttttttccctcccgattttgaaatatttgcattatacttaccagttgagcatccctaatccaaaaacccaaaacctgaatgttctgatgagcatttcctttgagcaccatgttgacactcaaaaaatgttggattttgaggcatttcggatttcagattttgagattaagggatgttcaacctttattgacatttttagcctctggagttggaaagtggattctgacagcaaggatgaaagatgaggagagaatggctgttgggaagaaaaccaccagactcacccaccctgagtagcttggtgtcctactcacctgtgtgctctgcaaagtacaacgcccaactatgactaggccatgctcttgaagcctgggtaagagccatctaacattactcaggaaggcctttagagtccgacctctgccccaaccctagcaaggttattaaagccagggatatcaaaactccttccttagaggagttttactcatctttatacctttactgcttctccacatgcacagcaattctgcagtctgagaattatctcattttttcagatatggaagctgagtagcagagaatttaagtgactcactcagagtcagataactactaaatggtagatcaatatttgaacccagggctctctggttccaatgtccttgctgtcactgaaagcagaacaaagacccaaaagaaaaagcaaagaagacagactaggcttaaattttagcagaagagtaaatatcttcttggtcctttagtaacttaaaaccattacaagtttctacagaggaatgtaatttctgtccttggttatctggaaaagataaaacagagccgtgctttcagtacttggccgaggacatgggggcattttaaagtgttggaatgattgaacacaagccatgctgctgagtcctggacacccaacactttaaatgaggcctggggagacatttactgaggatctggcccctgccccaagaaagggggtcccaggccaaaaagctgagtaaacagatatttttgccacagtgtggtaagtgctattatggaactatgaacaggtctgtgagagtgtgggtgggggagaggggcggggagggtggacggtagaaaaacccctgactgaggtcatccctgtgttccaggacagtgcagtcactcattgcaaaacagggaccctgagtcatgaggaaagagctaaagtaaattcagtagacaccattaaacaaggcaggggatgggagatgtcttggaacgatttccttccaatatggtttacaggaaaacattttagcaattctgaatgtaaatttcaggggtttgtttgtttgtttttaagcttactttatggagcattacacatggctttatgaggattagttcttacttcatgtaatatagtaagtaatttgcatacactatctcatttaaagcttaaaataatcctgtgaagttgatagttctattttcccactcaaaaaattttttttttattttcggtgtggagtggtaactcatgcctataattccagcactatgggaggccgtcaaggaaagatcgcttgagtccaggagtttgaaccaacttgggcaccatagtgagaccccatccctataaaaaatactaaataaaaaattaaatttttttcaaaaattttagttgcttcccccaacacagtgcacactattttaggtacagcaattgatcagagaggcaagacagcttgtccagggtctgtcagttcttcattggcagagttggaatcagaccctccctgtcatgaggccaaggtgccttctgaaaaattcactcccagcaaacacatgatttcctgggagaggtggttatagcttagtatactggatccagatagaaaataggtgttctgtgctcacagtggaaaagcaacaaaaatggtaatgaaggttgaatgatcatcagtagaaagaaactttttttaaaaaatggataatggacaatgctctatcctcatatatttctgtaacaaagaattaaggaattcaaagttttaaggagaaaagtttgtcaccctgtattttctatagcttgggcaaattgacagacgtgctacaaaatggaagcagttaaacaacatccaatccagaccattgccactcagagttcc

SEQ ID NO: 59681 - DNA, 4382 bp, Homo sapiens
ctcttgttgcccaggctggagtgcaatgccgcgatcttggctcactgtaacctccgcctcctgggttcaagtgattctcctgcctcagcctcccaagtagctatgattactggtgcctgccaccacacccagctaatttttgtatttttagtagagatggggtttcactatgttggccaggctggtcttgaactcctgacctcaggtgatccacccgccttggcctctcaaagtgctgggattacaggtgtgtgccaacgcatctggtagattagaactaattctaatccaatcctgtgcatctggggctaaacatcccccaaattgttgggctttcccagatttgtccatgattctacaaactggtgcttctggctaattctgattttcacaagggtctggaaattggaatattttttccacgctaactctatgacctgcagtgtggctaaccaatctagaccaaacatgcagctctggattgttcaggatttagtgtgccaatttagatagaaagctcaattaattaaaataaagaagcacagagaccaaaagttcattgagttcaagtagaatcagctcaatgggtgggaaaaagaaaaaagaatcagttcctataaaaaaggacagcatagttgctagaaccctctagagatgtacagatattagatagttttggcaggaagtggtggccaaaatacatgaaacaacaacctgaaaaaataagagttaatcagggattacagcagggatgaaaacaaacaagccaaaaagccacagcaacaacaaaaacaggtggaagataacaggaaaatctaatcttcactgcccatgggctggaatgtaatgttttggctatgtttttcttcttcttttttttttttttttttttgagacggagtttcgctctgtcacccaggctggagtgcagtggcgcgatcttggctcactgcaagctccgcctcctgggttcacgccattctcctgcctcagcctcccgagtagctgggactacaggcgtccgccaacacgcccggctagttttttgtatttttagtagaaatgggatttcaccgtgttatccaggatggtctcgatctcctgacctcgtgatctgcccacctcggccccccaaagtgctgggattacaggcgtgagccaccgcgcccggccttggctatgtttttcttggtaaacatctctactatctgcttttgaaatgatggagctacctttcagttttaaaaacaatatatttcaggcatctcaagtaatccacaatctggaggcaaaagtcaagactgagttgacagagcacaaatctgtttcatttgactacattaaagaggtttgcattctttcaagggcttactagcgagttgttcagaagcagtactgacacgggggcctgggattgttgagggatgcttatgcacagagaggaaggtttgctaatccaggagcactgaatcatcatgatgtaaacttgcaggacttcatggcttcagtgatacatcattgatctttaattccagtccacagaacttttttttatggtaaggaaaaggatatgggaagaaaaaagtattataagcatgtttctcatatttcttccctcttttaccctataaataaaagagcaaaggtattactgagcaaatgttctcttgaaaaacttgatttcttcttatgcttggaaattttgctatagagatagtcattgctactgtttacagtagacattccaaccctgaaaactaaactctgaagtatttactatgcttagataaatcacatatttgtcctcatgagtacagcctgttcaggtttgtacataccattgcgtaattccctaagaactctttccaatttaaaaggatgactttggacacctttgtggaagttgataggaaagatttttgctctttaaaatacttgttaaataggccagttaaaagtatgctttgtactgaattttgcctttatcagtaaaggctccaagaatgttgataaaataagagaaaaagaaattgggcttttctcctgccagaattggaagggagagacccaaaactaagaacggaaaatctgtcataataatggcagaatcctcaaaagaagatacacaaataaatgcagctgaggaacctggagacttccctggtttctgtcccttgtgagacttcaaatcataaaataccctaatatctttctgtaatcttctgtcatgttctaaaatgtctaaaatattgaaacagtccttattatcagaaaaaagtaatcatgaacagagcccagaatatggtataaaacattaccttactgttctcatcatgtcattgttcagtcctacctccaaacaatgtcccatgagaaaacccagaagacatctccctcactaaagcattgagaaatgcattaataaatggagcacctgcaacctctttcaaaggagagctctgtggttgctctcttctatagggtaggtggaaaatatgccattgacatggtctccccaatttcaatgatgggatgatgggatctcagagtggcataggtaggggtggcactgaatctccaaggacaaagtaaatgcatccactgtaaagggcaatcagaatgctttggcctgcagacatatttgatggtggttaagttatggtgttcttaggaatgaaatagatgggcaatctaccattgtattgcttgatctgtaacagagggaaaaattctaggtctggtagctaaaaacctgatgagtcactgcagtggacagtcatggcctcttgtgttgagatctaagtcaattcacagagccaaagctccttgattaaagaggaggctgggagccaggcacagtggcccatgccatcccagtgagtcaggaggctgaagcaagaggattgattgcttgaagccaggagtttgacctcagaccctacgaaaaaattaatctaaaatgtcggggcgcggtggcccatgcctctaatccgagcactttgggaggcacaggtgggcagatcacaaggtcaggagtttaagaccagcctggccaacatggtgaaaccctgtctctctaaaaatacaaaaattagctggggatggtggcatgtgcatgtaatcccagccacttgggaggctgaggcaggataattgcttgaactgggacccgggaggcggaggttgcagtgagccaagattgcaccactgcactccagcctgggctacagagggagacaccatctcaaaaaaaaaaaaaaaaaaaaaaaatctaaaatggatcatagatctaaatgtaaacctagaattataaatctactagaaaaaatataggacaaaatctgtgggaccctggcataagcaaagttttcttaagtagaacacaaaagaagatataaaagaaatagatggggcttggcatggtggctaacatgtgtaatcccagcactttgggaggccaaggtgggctgaccacctgaggtcaggaattcgagaccagcctggccaacatggtgaaaccccatctctactaaaaaaaaattagccgggcatggtggcacatgcctgtaattccagctactcaggaggctgaggcaggagaattgcctgaagctgggaggtggaggttgcagtgagccgagatcacaccactgaactccagcctgggccacagaagaaaattccatctaaaaaaaaaaaaaagaaaaaaaagaaaaagaaataggtaatcagttgggcttcatcaacatttaaaacatttctctttgaaagtcagttaagaaaatgaaagtcagctaggtgtggtggcttacgcctataatcccagcactttggaaggccaaggcaggaggatcacttgagctcaggatttcgagaccatcctacgcaacagagcaagaccccacctctagaaaaaattttaaaaattagccaggcagggttgtgcgtgcctatagtcgtagctatttggaaggctgaggtgggaggatcacttgagcaaaatcaaaactgattttcattaaatctcaaagtaatctgttgactgaaagaaaccaaacaaagatatatattgtattatttcacttatatgaaattcttgaaaataaaaactaacttatgtagctagactgcagatcagtggttgcctggggacaggttaaaaagtgcaatgaactgcagacaggtatgagaaaaccttcaatggcaatggaaatgttcagcatcttgtttgtggagatggtttcatagttacatatgtttaccaaaacttatcaaatagtgaacttcaaatatatgcagtttattattcaaaattatacttcaataaagttgtgaaaatgggagcggggaagcaacaaatactggtgtgagtcaacagcatg

SEQ ID NO: 59682 - DNA, 2071 bp, Homo sapiens
ttttatttcaatgcactgtcctttaaacaatcagaaacgtgtaaaaaatcaaaagtgcagaagtacagttagaataaaataatccacaaaaagacagtactctaactgaaataattatattgggaaatctctccttctagaaccacattccagaagcatgaaactacctgggaaaagtctaagaaataataaggtggtgaaagaggctatgatgggagaggaagaatgttagataaattatatggatttggaattaaaaggataaagcaagatgcaaaggagcaaagtgctattttatttttcaacagttagacctgttgggaagaggccagtcagatgaaattacagtacctctcacaatgactaaggagtcgggcaatgggaggttttagttgaaatggcaagttctgacctgaggtgcgacttcagacttctgcagtctgccttgtttcgactttaggaggtgagaggaaaattacttccaataatataggattcaacctataaatgatggggctcaagagacaggaccgacagtcagggcaggaggaggagcaagaccggacctagaagcattctgaaaatgtgtaggttttcactggggcgcgccagaagggcactctccgccccctcgcccgaggacgtgtgacatctccggaggaagcctccgagattcctgtgaaaatgggaggtccacacgcccattcgcgatgacagacacagagagggctgcgcagccttgaacacagaaccgggcccaggtggagtccgccggcttctggagagatctgcgagacgaaatggtgtcggcgcagcgtcgccggcgcggcggggcagcgtggggaccctctgaccctgaaggtccccctgcccgccgcgcccggcccccgtgagccgttgggtctggggaagggagggcccttacccatgtgctgcgtgtccagctgcacggccggcatctccttcagagggatgtggccagtccccccgtctctgcagcaccgcaggcagcacaacaccgaggtggccatcgcgcagggaccaccgactccgccgccgtccctagaccgaggcgacactgccccccgccgctcagctccgtctcctgcccccgcccgaggtccggacttgtctatgtggagctcggaggccggtacagcgacaccctaggccgggagggcgcaatgcaggctgagcttaggctggcctgcgaggaagacgcggagaatcaaggggccggggagagaccggacagggcgagcggccgggctgggccggggagacgggtggggctagtggcgcgcggaggcgtggcagggggcgtggcgttgcgggcctgcggatgtgggacggcgtgcgcctgcgcaccagctggttttttctccttgggcggtttcgcgcacgcccccagggctgacaggtgagtggggctgtctgtccctcagtacttccaggggttttcctatgcagaatttttaaaacgcagcaccccttggtcccggcctcgacattatttctagggatggattgacagaagcgaatcagtttgggggaaggggagctaatggaaatgacttccgagttttccctccgcgggcccaggttgagcaggctttgccaccacggagagccccagtctccctgccgtggctggtttccctcacatgctaaatagactcacgtgggccccaggagtaatgcctgttagtgactgcactgtggatgttcaccggggctcacgcgggccctaatgcattttcggtgcagagacgcgccctacctggcccatcgggctgcgtggtccggggcgcgtgggaggccgccctgggagcagaacgctggggcggggtcgggggcgattcttgacctgcctcttccaagctccccctgtctggtgcactgagggttccgaggaatgtgacgggaacccaggaggctgcgggaagtctgctgggtcccgagggaagccttcggctcctaccgtccgctactttctgcttccacacgggaggctgtcacctgtcatctccttccccacttagatcatccttccgtggtagattttacatct

SEQ ID NO: 59683 - DNA, 1324 bp, Homo sapiens
caatcagcagtgtatgactggttgaagtatggccgctgggattggccaagactcagctattgttacaggtgcatactcctaaattaggttttcaagcttgtctgcctattaacctaggttacagttcgtacacaaggactcaaatacagaagtacagagtccttctcaggccatatttagtttgctttaacactgcctctcaaattctttctcttataattaatgctataatcctcttaaacatgctctcagttcaaaatgcagatttgcccttttttgtgtgtttcatttatctccacattggatataagctgccataatgcatgtatagacaaaatataatagaattagttgttataaagtaaaaattttgttcagaaatattattaaaagaagtacatgtattatatatgtaataaacatttaggccattcaagtcagtcacatcttcaatgaaaagccagacactaaatggccgtgaattggacattactatagagaggcagaagggccatagtctttcctagctggaaaagtaatttgctggggcgctgcccggtgcactttgcccccatcctagcaactcgagtgtgctcagcagaatgaagttagcaaaactggttagctcctgaaacagacttccctgtcttggcagattaacaccatccatgagctcacttttccttctaatatctgggattctaatatccattcattattactttcaaaggaattatcctctctttttgaaaagcacaacgttaaagatgttttgacactctttcacagctatcgctttaaataacaatcacaaataaagccaaaaatagtttctcaaggtcatttatctaagtcataagcaataagaaagaatgactacttcaaaaaaagagtctgtctgcttccaagacatgccaggaactcgagaactgagaacaataatgtaaagcttgtgtttcagagttgagattagcattatgcttaagattttctttaatgttttttatgccagctggacgtcttctgttagtgaatttcccattctgtactgggtcatacgaaatgagtttttaaaaactcattaatcagttattaaacaaaacatttttccttagactaatccaaaccacatttgtgatctttttaaaaatcagaaacattaacaaaaactcatttttctaaaaactgacatatttctggagccttgaccaattcattattataattttgagtaactaatagtgattgacatttatgtagtgcttattattgccaggcactgttctaagtgttttttaaaaataaactaatttagtctttgtaa

SEQ ID NO: 59684 - DNA, 2488 bp, Homo sapiens
ttctccaaaataacctatttcctccccaaacccaaacttcctcaactgggatcgaactcaatcctacagcgtgttctgagattctatactcgcctcacttctcccaagatcgtaaattctggaggagccattccttcatcatccatgtttgcatccttcacaccgttcactggttaagtgcttagtacgtttgctattgggcaaggtcctcaaacgggaggtggacgtcagaatagtcaggttatcgactgagtaactgttagtggtggataatttaaagccaatttgaaagttcatcctttcccccaaaggcaaaaacaggcgttccttttcttaaaagagaattttaaatagaattgggtctctggtgtcctgcctaaagcccgcaaagaaagagggtacggttgggggtgggggtgatgggggatactgaacccttttctggttgcgccttgcccggagcccccggctagagccctggcgctcctggcgcgctcccaacgcgaatcggtgactccgcaggccgcgcagtgcggaggtgcccgtcccaccctcccccttgtggggtgcggggctccatttccccaagccgctggggtcggcttctggtcttgagatgcggatgaagtggtgtgaagggttgggcttttttttttgttcctaaaaatgcaacgaacaaaaaaaaaagtacaacaatccaaacccaaccatcttaattgcacggcagcttaactgggagactttcttcccgggcggccccacccgggaccgcgccgcttcagtcgagcccaccgtctgggcaaacggcgtccacttcccggagccgctgcccagcctctgcgggggggctttgggcgggcgcaggactctggaagggagaaaagcccgcagcccggccctccccgtcccaggcggcccgcgcgggtggacggcgggagcaggcggcggttggagacgccggaaggaacgcggtctcaccacccggctccctccgccaaggcgaggcgcggccggggaggcgggacacaggcgaagcgggacggggaggcggggccggaggtgcaggcggaggcgggcgacggggaagggagggggagggggaggggaaagggagggggagggggaggggaaagggagggggaggggggaagggacgggaggggagggggaagggacgggaggggagggggaagggacgggaggggaaggggaagcgggagagggaagggggcggagctagccggagccgcgagtccattttggggctgtgcttggcgcgtaccgtgcggtccctgtagttggaggacgggcggtcgcgcggcctttcccactagccggaggtcggagataagtacccgccgcccggctcctctcgggaaagcggggtggtcctcgaaccttcagcgagggtggggagttgcccaggtcagcagggatctgcgtgggttgggggggctggcgaaggccgtctgagctccagtccggcagcgcggcagaaaccagcggggcactgtcatgggcctggggaggagcggcctgcggagggcgccggggcagtgtgtctgtggtccagaaaacctgctccgtccggagccttcctggccccgctaccagcgtctccacatcccctagaaaagaaaagacgggtgtgggccttaggttacagcgcgccgccagcgtttggttgcatggcgccgggggagggcgccctaaccgagaagctgcttaatacaaagagctccaggctcctggcggttcaccaggtctaaacagccgggctttatttgtgggggcgattgaaaaaattgagggtcaagattggggtgctgtgcaaataaatgcgttaatactgttctttttcttctttctttgcagtagcctctagttcgttagtcaaaacgtgaaaaaaaagacctgctttgccctgggaaatagtaaccctgccaaatacatcagcttgtaggagacagaggtaaactacaataattttcctgtgttatcttttttttttaaacacccaatttcaataggccctagaaccttccaaaatggaactgtgtgtagaatacgtatgttcccatccactttcattggtggtctttgttctttgcatattttgttaaaacttagaaaaacagaattcacgtttagcaattatttatgtggtatttatcttaaatatagccaaacattcatattacaaaggaagaaaggggcttccacacttttttcctacttttttttcccttctcctatgcttagtgaattgtcaggctgctagggcttgtagaacagggcttgagttttctagagacctttatataataggcactttaaaagcagaatttcatttacataggcactccttctagtagaacttgatggagctgttaaccggctatacttccttcttgcacaatgggagcgtccctatccctccctaaaaatacgttttttttcctttctcccagctggcttactaaacctc

SEQ ID NO: 59685 - DNA, 2895 bp, Homo sapiens
gaatataagaaataaatcaatcgttacatcaattccacggggaaaaactctgtaggcaggcagtcctaaagaagcgtgtcaccgcggttcccaggaagcgttattcctctttgcgaacaactgaacagaatagctgctgcagaaagcatctccggaatatttgcaacccagagccgtgcgccccacacgcaatacaccggcaaagggttaatctagtggtgcctccagcgcggaaaagaactcaagatctaatacatccttaacgcgggatttttacaaaggccatagaagtattacctaaagttaatgccgtcactggctcacatcactcaagagctgtggagtaagaattgatagaaaccaccagctaagggggaaaaaaaaaatcaccgaagggaaagacaaataacaactctcgtccctcctcctcagcgtcaagaaaaggtggggatcgcaaaattaccgttaagttgtccgggtaaagacttttgggggaggaaaacattaatagtttcacagattgcttttttccttgcgacatgtttcaaacaccggagaagaaaaaagtcttctaagaaagtgcgactcggaggaaatagccacgagaaggaaatcgttagctcgaagccccatctttcatctcacccgtgaacactcctcccctttgagaaaggacaacgctgcgagagcaaatgacaaaaatccccagaaagaagctaaagtccagcatctttcctaagagcccgctacaacctcaaaagcctgcccctgccccatcttggaagcgcgagccgcggccagtcctacctacctagagacctcaccgggacccagcgcgccgggggagggcagccagggcttgggaaactctttcctggggcacctcacgcttcagcgtcaaaagacaatatagatagatgggtgccgggcggtggcgggggggactgttgccacgacccaccggagggacccatgactccgggtcctgaattttctgtcgaccttaagtttcttgtcacgagatgacggccatcaccgggtcgagaaaacggcgagaaaaggcggcccggttcggaaatgggggaggggcgcgcgtccagtcctcctgtcaaggagcggccgcctgcagagaccccgcagtgcgccgtccccggctccggtcccgggcggggggtcttgctgacagatccgctgggcggcggctgctccgccgcagccggtccgcgtcccgctcaaactgcagctcccctccccccacagccccgtctctccgcgctcccgccacattccgcccgccgccgcccactcgcagacgcccaagttgcccctaaccctacttcctcggatttttcgcgattaagtgagagtagaccccgcgcccactccctgcacccaccactgcctgcgggtcccaccactgccacctcccgagtcccgctctgctacttcttcaggctcttaccgactgcgccagccttggcgaagctccgccgactgccctttgctccaagtaatttttggcgatttttaaagtaatttttccggcggagtcatagtggcgctatactctcggacaggttatcctgtctctcccgctagattgatgagatcaggcatcactcgaaaatggcgccgaaagcgctgaggctcctcattcaaattcgttagagccaaccccgccgccccagggaatgccgggaacgcgggctgcctccacagctgtcaataccgcctcttaaccccccttctcttgctttcccgacatttttacgcatgcgcaaactccaaccctcccccctcctcccgccaggcacatgcgcagaatcatcgtggtgcacggctctccctttgcttcttcggttgcagtcctcttgcttcttgcgcgtgcgtgtagcgcttttgcaaagccgcggaggtgaagtgaacttagaggttgtggggccgaggggtcgtcttatagctaccagcccacaggcatttagtctacgttggaggtaaacaaatacgggtcctgcttaggagaaaagaaaaacgtcttacagccagtgtctaaactccaaacaacggaatgtatcaatgagaccttgtatatggatacacgtgcatttaaaaccgccctgccggcttgtagagcttttgccgttctccagcgctttacaggggttatcgcacttaagcctcggaacaactttaccaggtaggaactattactgttctcgttttgaagaccaggaaacctaggctcagagacgttaagtaatttgcccaagacagcacaggtggcacagaagtggatgaatccacatctgtcagattcagcagccctggagttctctaccacgctgtacgattcaacctgagcccacacaggaggcgtggtctccttcttcaacggtgtgtgtgtgtgtgcgcgcgcgcctgcctagagttaatgattaagtttgctgaagcccttcttcccggtcctaagctgcctgttgcgaaggcgctttcattgaattcagtttctcttaccgtcttaacttgttcataaactttttgagataggaatgggcagtttttctgtgtcacttaggatgatttttttttttaatggcgtgataagtgaactgaatccagcaaagacgagtttctgttgtgcaacacgttggtatactgacagctaccacgtattgactgtgtactgtgtgctgggcactgtgctaaataaatgatttacgaattaatcgtgtttattgctcacaacagccttatgaagtaggtattatcttcactttacagatgaggacacctgaggttcagattaagaaatctgccccaaagtcttagaactggtaagtagaagcaccatatctaggcaaacctgtctaccttcaaaaaaaatgggcactctga

SEQ ID NO: 59686 - DNA, 3802 bp, Homo sapiens
tttagtcctgaggcagaataggaatttactcataaagcaagtaacccccctaaaattgtatgcaaaattttagtataggtatgtaagcgcatttttttttcctagagaaagagcccattgctttttattttcctcaaaaggtatgtgtttcccccaaaacttgtaggtctcaggctaaagtccaaattcttcagcatgcagggtatatacaaagccctgcccgacctggcctcttgcctccctgcagctaacctggcaattgctctctcttaacatctacctcctggatttacaaactggggtggaggtgggaaaaaagaatcaaaatcataaagtgaagccaaaactgtttgtgtagcatttatacactgttgaagaatcaaaggcctttttttcatagtgcttttcgggagggagaaattggattgtaaacatgtaatttacaatctccacattttttattctagataaatgccacacacaccttcctgttacagaatattgcatagcaactttcaacatcattcagttttttaatacctatccacatatgatgttatgtattttacaaatcctgcaactaacaacgcagttcttgatagactgcgatctactgggaggactgctcggttttcacctgaattattgctcgtggttcacacactaacacccaaaaagacactctacgggtcatgacgtgtccctaaaatcctccatctactccagaaaacgttctaactttttgagacgaactgttgtaactagtctcctggcgaggcctgctatgtcttataccacaggctctaactgccaaatctttttcagaagtctttcagttgttgcctccaaacggagctctttgcagtcctcgggcggacgaatggacggattcgagcgaagcttatttcccttctcctaacgcatctacctataaatagcgctcaccgcgctgagtcaccaaaaccccgagtttccccaaatagcgcgtaacgactgctgggatcgcgtccctcggggctctgtgacagactccaaccacacacccgctgggctggactgcgggcccacacggcccagcgggtctctcaccacccggcgccccagggacgcgggcgaggccgcggtgtccggaccgagtcgacagcgtcggacttcccgcgcgcggacggcgctctggggaaggaggagccggcgggcggctggacctggccttgactgcgcggggtccgcccccgccccctcgggagcgcagagttgcggggggccggcaccagcctccgccctgcgccgcccgctcacacaatgggacgcgtcgggagggggcggccgcggctcccattccggtcccagggcggggactccgggcggcgggagaagcagtcgggctggggccagaaggaaaacccctctctccctctgcccactcaaactgcgaaagggctccagccggcggtgccaggggctggggagcagctggggagggagcggaagtgccaccccctgcagtcaagggtggtgacgtcacccctgcagccagcctgtagcgggggtgtctgtacatcacatgacccggcccccctctccccgccgaagcccgcgcgcgcgctctctcccccagccccgactcccacctctcccccgccccctctccccaactttcgccctccccgctccggcaccgctgtcaacagcgccagctccgccccctccccgcgccctgtggaaccgccacggcggcgcggcgggcgctcgcgctcaggtccgaggctccgagaagcgagcgtgccccggttccaccctgccccccagctcagtgcttgctggctgcgtgggcaccagagccagggggcacggcggcgtgcagcgacagcgcttctctgctccatcctcccacagcagttagaggacgaagctgaggcgccgggtccgagctcggagggagcgaggcgcatgcagcggcctccgggccctgacgcgtagcctccgggggtcggcccacgggcgagagaagcagccgggagcccctcctcgaccccagcaaggcggcccgcgcctccgctctccctaccgcccgggtggcgcacgccagtcctccgtctttggctgcggcgcaggcaccggccatacgacgaggggccaggcggggaccgcctccttgagccccctcggccacccctgccgtgtggactgctggggttgcagatttgctggctgttgctgcagcgcctcgttctatttttcctctcagttcccttctaaaagtggaggctcgggggaggaaaaagaaagcccacagtgttgaaaggggcggtacggactgacctgtcaacggcggaggaggaagacccccgttcggggcgagctctcgagcccgcgcagggatcggagctctgggctcgcgcggaaaggcacggcggcagctgtgcctcagccaggtgtcccccctcggcggggcccgcgccgccgcgcccgccccctcccccggcgcagcgctccccgccccatcgccggggaccagggaaccccccggctcgattttttgtgcagtttcagcaaagctccgaggaagttggtccttttgttccactatttatagattgcgtcaacattgcgaaaaggagaaggcggagcggtggcccctccccctcccctccccccgccggctcctgggagagaaaagccccagcacacgacctaagtacacagcgcgccagccgcccgcccgcggccttctgctccccgcttcttccccctcccagccggggcccgaacgctgccaaccccgtcacgtgcccgcccgggaaaaccagctccccggggctccgcgccgcccgccaggcttcgtggcggcggcggcggcagcggcctcacccagctcgtgggctcgggccgcggctcaggcgtcacgcatagcgtgggcacccacgccctcgccacccgacgaggatctcgggctccgcgacctgtgggagtgctgcggggcgtcccgcacttccgccctctctcgtctccggctccccagtcgccgccccgctcgccgagtgtgcgcgcattcgggcctcgcctcggagccgggaggctgtcctgtccccaggcccctcgcgcggccgctcttccaggcattgcggtgctagccccctctcccgcgcacgactggggagggcagaggtgtgagggatgcgggggtggctcgcagccgttcgcgggcaggcgggcggagcgcgggaagcgcggtgcgggcgttccatggcgcacccagacgctctccctcctccgcaggtgcagcggggcgttgcgcgagctcgagtcccccttcccggacagctagggagaagggagtttgcagaccggagctacagttggaagaatatagtttttgagaagttactggaagttagatgtgagacaaaaacagacgaactttccttcaaagccttatgacgaaatgataggccttgccatacccttgaaatgaaactgagctccctaccggcctaaagccgctgttcctgagcttcatgtaaacaaggagggcggtaaacaccagaggaaggccttacaacaataccaagtgcaagtagctcatttgagtgttatttatcttagcagcttccctgagtgatttatgtatattgcagtttaactttacagggtgggaataaaataatttggcttctcagctcactggcggaagaaactagagctgagctgggacgagggcaagaagcgcgtcgcacctttcctggcagctgaacagtgtgatgaacagtctggaagggttatgttattacttaaggggttt

SEQ ID NO: 59687 - DNA, 783 bp, Homo sapiens
tttttttcctcacagttgttcatggctctttgcacaccactgtctaagtctgaagaagtaaaaagagaatgaaataagtgttgccaagcaagacccttctcttctttccatgtttggaaaacaacctcttggaatacagctcttgaaatgtattgaattatctttgtgttttgtacacagcccagtgtacaaaactgggattgagggattgaattatcattgtgttttgtacacagcccggagtgctcaagacattccaaaaaggttaaatgacagcagtagcagtcacccctcttatgcaagacattctgggcttcatccaagataggtggagcattgctgtatcactctcatgcattcatttgctcatttattctctaaataaagagataagcagaggccagattccgttaggccttccagaccataatgaagaatttggttttgattctaagaactgtgggaggccaggggactgacatggtctgatttgtgtttttaaaagctatctctggctgcagtatgagaatggatgatagaggtcaaggtcaggagcaggagatcagttagagaagctattgcagaattccaggctacagataatggtggcttagactaggatggttgaagtggaaatgaagagaagtggaccaattcttgccaaaacatatatctgtaagccgaaccctatttcttatattagtgttgccttcatttaaggctgggggctggctccagcattttgatgcttgggttagtgtgctagaagctggcctggaagcc

SEQ ID NO: 59688 - DNA, 1389 bp, Homo sapiens
ttaagaggtggaattaacaaaaaagtttatggaggataaagaatataatttatagatgctgataaatacagaggtagctgtactaaaaaaaaaacctaaagtatttgttaaaaaacaaaagacaaaaccaccaactaaaacaaccaactaatcaacctaagattaaattaaaaccaagacccaggtctggaaaaaaaaaaaaagatcagctttaacaagtgaatacatggtatttttaaaaacacgattattccttcaaaatagtgcctacagtgtctttcaaaaagttgcctttctctttttcaaatcgtgtaagatgtgtcatataagatttgggtgttttccctttgccgatggttggagagtggtgatgtgtcttgcgaaattaaaccacagagaacgtcgatttgaaactttcggagtttcggagaaactggccctagctcagctgccagtgaccagtgagatggattcagaatgttgtcctagtgagggtgctcagtgacaacgcaggtcagaggcagggccggctgcgactccacagacagactcacagccacagcgtctacaatacacacagctgctgcctggctgcgtgacaaaggtgtcttggcagaagcattttggctgtctgaaatacagcctttgcacaatcctgagactatattttacaagttcattttctaacatccaggcacgcttttatggcatctggagcattttgctgaatgacttggtagtgcactgctgaccagacagcacatttccagatttagattataagagaaaaacagcaagtggtaagttcagctgcaggtcaatggatacttatactacagttccctcactgagcactgggctactttatcccatggggaccaatcctgtaaagtgtattcaacagagatggccctaggtgtttgcttttatggttgttagccacattcacactgggaatgtgctgttatcacattgtaaacattattcttaatatcagaaagaaaactggggagagtgtcaagaattggcatgcacaaactgatagaattgccagtggacgttcttattttctgagcatttatgagctgcaggaggtaggtgcagtctgtaaaacaaaggtggtgagaaacattaaccattttttattgattttatttcaaactgtgtacatcttacacgttttaggttctttgtaatgttgggataatttggaggggacataatgatgttcactgacaaatagctttctgaaaaagtcaggagttcatacattatcctgcattgatgaaagactttcagcctttcaaagcattattagacttactacttaaaatttttgcccagcttgttcaattttactcttaagaagaagggagggttaaaaaaata

SEQ ID NO: 59689 - DNA, 1023 bp, Homo sapiens
tccaacccagagtgccagggttttgcttgccacctcttctgatctgtccttaccttctccgtgttttccattggtgaagatacatctatgtctcagctcaagccctgctcccattgcattggaacagtgtgtagctgtgcacactgtccacacttaagaaagggtgatgccagactcaaaaagccttggggaagagaaagctcatcccctttagatgaaagaaatcctggagtgaggccaggtggaatattctcaagtcattcctgatgtgtcatttgtctacagcagagcaaattatggctgccttttatgggcatttgaaaggccaaaggcagcgatccactctgagtatataccccaaagaattgaaagcagggtcttgaagagatatttacatagtcatgttcacagtagcattattcacaatagccaagaatgttgattgcaacccaacccaaatgttcattgacagatgagtggataaaatatggtatgtacatattctatacatatgtctacattaggctaaatgaattagccagtcataaaaagataaaaactgtaggattctagttgtatgaggtacctagagtagtcaaattcatagaaacagaaagtggaacagtgattgcttggggttgtgggaaggaggaaatggagagttattgcttaatggatgtggagtttcagctttgcaagataaaaagagttctgaagattgcacaacagtgtgagtgtacttaacactaccgaactgtacacttaaaaatggttaagatggtgaattttatgttatatgtattttaccacaattaaaaacaaacaaatcctaatgcccaggctgcaccacagaccaattaaatcagaatctctgtgggtggctttcagatatccttattttttcaatttccccaggctaagctaaggtggagaaccactggaccagaggcaggaaatgcaatcttgaggtggtagctgtaaaccaggggtgaaatgaaaagaatggaatcacagggaataaaa

SEQ ID NO: 59690 - DNA, 2234 bp, Homo sapiens
taacattcccaaagcagattgactttttgagttttgtattgcttccaactctctcaatgtcagaggcctcaaattaattccaacatccccttgctgttttcccttaagaagctgtgatggtgttgcattcactttggattcagtccatttgtgtttattggaaggccccttgaatcagcatttccactgctctcccacatttgtcatggtcctagaaatgcttatgattaggatggggatcttgatagtagtctccatcacctttacttcatcccatggttatgaacagttgtatccagttaaaataagaaagaagtcatgtggaaaaaagggggacaattgaatattattagagcctcaaggaaggaaggaaggccacagggtgaaaaccattgcatattaagtagctaagcctaatagaagccaaaggaaacagcagcaaactgttacagaaaattcttttgaactgccctccgcccactctctccccgctgctgttggtgacacgtggacagaaatccccctgcacgtagacacacatatgcctgccttgacttctgattgaccttatcccttgaacatcaggcttaggccactttcatggattctcatgtgaacgttcatgcctaatgcctgactgcatgccctccgcaccagccactaataagaagaaggaggcttcccctggccacccaagatgaggcagtgcccaccttccctcttgtcacattctattacatcatcacattttatttctctgcctaggacttaccactgtctcgtgtattcattagttgacttgtttattatctgtcttccccaaccagaatgtaattctgcggagaggctctgtctggtttagtgtaatctccaaggcctagcactgtccttggcatggagtagcccccaggaaatattcgttgactgactgactatgaaatggtggaagaggaactttgctccatgagttgtgagtgtatgcacagcacaggtgttcagagtgattttccctcccccacgttcactacaaaaagtaccctcagttacaggcccaggggtaatggcatcaccgcattgttgactcaacttgtaactgacttctagctctgtttctgacttagttttggcctttgggacaggtcaggagggtgcagcaaaaacaaatacaccagatgactagaagctgggatcttgggttgcaggcttggtttcagctctgactcactgtgtaaaccatgggtgactcacttaacctctctaattctgcttcttcatccatcaaatatagaggttagatagatgacacttcagatcccttgtaattcttccattctataatgttcccctttacctttctttaagtgtgagcacagcctagtctcttcatgcaggagtaaacgtacttacaaaatgtcctgcaacacttagggaaatgccaccacaaacattccgagagcagcattgctgtgaactgcaccactctccttttgttccattgaagatttcagaacacatgcttctttgctctgcactttaggaatctttgtacttgaagtggattatcctttatttttatatagcatttaatctgaggatatcaagatttatttgcaacctgccattgagtactattgttttttaaaaaatgaaaggatgacttgctgaaattataagaatcactcatactgtagttgtagctgtgtagctgttgatgctacacattggaaattcagttacaaaatagtgattgattgattgattgattgattgagatggggtctcgctctgtcacctaggctggagtgcaatggcacaatcttggctcactgcaacctccgcctcccaggttgaaacaattctcccacctcagcctcttgggtagctgggactaaaggcgtgcgccaccatgcggggctaatttttgtattttttagtagaaacggggtttcaccttgttggccagactgctctcgaactcctgacctcaagtgatctgcctgtctcggcctcccaaagtgctgggattacaggtgtgaaccatcacgcccagccaaatatttattttttaaattaatacatgcacagcagaattccatgataaacacctgcttattacatgaattaagtctatcacttgccaaaatgtctgagccccacaaatgactgggtctactgagtatgcttcccgacacttttatttttatttatttatttattttttgagatggagtctc

SEQ ID NO: 59691 - DNA, 729 bp, Homo sapiens
ttctcaccacaagggacttatattagatatctgtaggctccgagacagagagagagagattgagagtgagagagcccaatcacattgcttgcctcctgttttattttaatatcattattttttacattactgttccttgacccttgtacattaaacattaaatagaagtcaaggttatagtcatggggccagagagaggaatctaccttccttgatgactctaggctggaacaggattgaagggagcacaggagtggctagggctacagtctgtgcttctacagagaagcatgtggaacagaaggttgaggtgagaggccgagtggcacagatgaaagagcatgttattttggagttggacagaccttaactggaatgctaacttggccactggtcagctatgtggtcttgggcaaattacctggcacttccaaacttcagtgacctttgccttatctgtaaactggacttgcaagattgttatggtaatcaagtggaataataggtagtaagtacttattgtcccatataaggcatttcataaatattattttctctttcttttcattacgagggaatgagaaaaaaagccaaagacatgaaaatccccatgttctattaataacagcttccatttttctttctcatatttttataatgctttaaactatgtgggtaattgtttcagcatttaatctttccactgaattacttaattacatttatgac

SEQ ID NO: 59692 - DNA, 1991 bp, Homo sapiens
aatgcgcttgtatcatcctgaaccatccccctccactctgtgtctgtggaaaagttgtcctccatgaaaccagtccctggtatcaaaaatgttggggatcactgttgtagaggacacagagaggttattttgagaaccccaaagctgttacaaacacacccaatagacagcacacctatataactataggtattcaagggcagttactacaagacaagttttcaggaccaacttttcatctttgagcggatgcacagtccggactggttttcttccgtaagagagaaagagggagagcaaaagtgagaacttttggggcagggaggaaaagtcaaagggggatggtcaggttcaagcatgaggcccttggagactgctggccaggggtgctgcagagtcaccgtttctattgtgtaaactttcctatgctgacagattgcctggtgtgataacttcactcttgtgtgcaaatactcttccttaaagacacatagagaaaagctggccaagacccaagaaatggctgtagaaagatattcattctcagggcatttctgaaaacacattttctctacattttcagctttcaaattgtataaattttctcttgacttctgactcaaaaatcttctcaaaccaggcatgtcagtttcttaattaaaaatggtgtcttagtctgtgaggcctaccataacaacataccacagactgtgtggcttaaaccacaaaatgtattttctcacaattctggaggctcgaagtctaagattaaggtgtctgcagatttggtttcatctgaggcttctgtccttggcttgcagatggctgccttcttgttgtgtcttcacagggcctttttctctgtgcctgagtatccctggtatcttttctttttgtaaggacaccagtcccaatgtattagggcccattgttttgatctctttaaccttatttacctctttaaaggtcccatctccaaatatagtcacattggggatttgagcttcagtatatgaatttgtgtgtgtctgtgaggggggaaataattcagtccataataaatagtaagctgagatttgtctactatggactccctgtcacacagtaagtacttagcaaatatttgtagaatgagtcaggctgtgactgggtaactcatttatcaatgtgctgccatattttttaaagtctcataaaccttagtcaattaaataaatttttcattttgcaagagttggtaatgatggcctagtaactttataaatgggctaaaatcaatatacttatctttaacatgagccctagagggtcagatcaagccatagtgcaagaccctagtataattcctttcctttactgaagtgttacgctggaacaacattgcagtgaaggtttaaaactaaatattgaagatgaggtggttttgcaaactttctggatgatgtgtgttaagaggcacagaaggcaagcatcttgctcccttcttacaaagaaacagaagtggtgaagtaacttgcctaaggtctcatgcaggtgagtaccagaactgggattagaattcagtcttgtgtcactccagggtgctgttttttttctttttttgatgtgcttcttgtttagcccatttagctagtgaatgtgaagattcaaggagaaaaggcttttccttctgacattgaagtacctaaactctttagaaaatctactcaggtgcatttcataaattgattacagatgaagtccaatagtaacattgtttatatttgtgaaatctaccatacttgtcagtttctagtttacagattatataaggaaatcacttacatccaaaatacaatctttgccagtacaccagcacaacctcttgggaatcttgaactacacatatactgaattgatactgcaaatcaagtcatttgcccaaatggaaggatttagggataaattcagccaacagttacatgctcagattcaagaatctgaaataacca

SEQ ID NO: 59693 - DNA, 526 bp, Homo sapiens
aggcagtagccaccatgtctcacctcatgccctgcatgacttaagggaaagaagagatcatagacaacatctggctgtctagtaagtagagcttgacagtgtcagaaacaagatgcgatgcagctattactttgttagctatagtgctctgattgttatttgttgatgaaagctgtgggaagaaatggcaatgcatataaacaggagaaatttagttataatttatgcttctttagaaaatgccagcagcaaacatcatttccaaagcattcaaaccacctatgactaatcacaggatgaccaatgttccccttgtgacgtggtaatcaagtgcgttgaagacattccacctaattttgagcattttaagcagtatgatgccatgattcagattttcctattgcaggtgtccacaatatttccaaatttatgatattttggagcctatgcatttttccctatgggcattgatgacccacactgagtagaatgagcaatgtgggtgttggattgctgggcaattctt

SEQ ID NO: 59694 - DNA, 2338 bp, Homo sapiens
ttgactacggattctacacaccagatgctaggttcatcccagaagagaggccgggtccagccccctgcccctaagaccacctctagtatgatcttatctagcttgtttttatgatgcaatgttaatgcagccactgcccataaggggacacatgaatctgaaggtattttccatgcatgattaacttttaaagttatgttgtattccttggcctaagcaaggtgtgactgaccttatggcatctgtagtagccaagggttgacattagagaggatgaaataagcaagtggtaatggctctcaggaattatggtaacaaggagaagaggatggttcttcactgctaagcagcttgactaggtgagagacagccagcatcttactgcttcctggcacatggagtgttccactgagaatcacaggcagactcaggcaaccagccacttttcaaatgggctgtcttctgtagtgctgttccaccaccattctgtgggcccaactgttgccattctgggggatctgccattgctagcttaattccattcacttcaattcaattgctgttatgaaaggcctactagtgctattcccctgagaatctatagagacagggtagaactcttggatgaaaaggtgagggcttaggacatctggttagtggaacttacttatttttgggcctctttcatcaagtaacaccagctgatgcctaggagtgtgggagtcatatcggctttgttgtcgtctgttagaaactcttcgtgttcacaaaaaaaaaaaaaaagcagccttggagaaatcttcaacccagaaggagttaagctgtgtgtctgcacagcgcagctttgttctggcaaggtcccatcagtttaggtcatttctgatgacttcactctcctggtgacatcagcctctaatctcctgaaggtgaattcatgtgcgattgcttcaaaatactcactccctgagttccgagccattcccgttgatatatggacagagcttgtctttcccaggccacagtctggtttgtgcactgcatttgtgcttaccgtatcatattaccatgtggacattatgtcactaactggcacaaccggctcaaaatgaaatatgcttgctgcaagcaaaaacccaaaagctaacatcaactctccccaccccctaccccaggtacaaaataaaagggctagagggatggctggactagattttggtttaatatgtttctaactgttctctccctcctctgcctttctgtggcctgaatgttgatagtaactttatcatccttttcagtcctttatacccactaactcttgaaaatgtttggtcactgatggcacaaattaaatgtaagactttggaataatttagtttagcctcttcctaaaatatcaagtctgtgaactcaagtaacctttttaccttctaagaccactttcttttctttgtctttcaaatgtcataaaagaatacagagtagaaatgaaagcagcctgggcttattgggtaggtgccaggaattagctttgacaaagatggtgttctgtgcacttggcccaagctgacaggcatgcagatgcctctagaaattgtgggagatgaactggaagtatccccagagtttgtccagtcttagggtggtgtaagtacattttaggcccttctcctgttatccacaggctgtgttgacaccctcttgtgtcaccagggattcagaatgccacagtgcctccctgaccactatcatcctcctgctgcccccactctggggcagaagagggtagtctgtctacagagaagcagagtccccacaccacttccaggatcccaagcacccatttattttgattaatagctcttggcagtagacagtagcttctggaatacagaactggccgggtacacactgaggtttaaaatcacatcaagaaaatagcatactaacacaggattgttaaggggagaaactggtgttcaaacaataaaatactactctcactgtttatctttgtttcattttgaaggaaataaagaaatgaaaccttacaagtgtagcagcccagttatcaaatagtcatagccacagacactcagttttggggtcagcccacagactatgggggtactttctctgcctctgcacaaaataaatgttgaggctctcaattttttgaggacggaaataaaatccctggatgcttgcaaatatattttttaatgcagggatagctaggttttctgagtttcagttctgtttcagctggggtgcgggtgggggatggcctgcatcacaggggaaactggtggaatcttagtccaggaggctggcgcca

SEQ ID NO: 59695 - DNA, 1443 bp, Homo sapiens
tggttatcagagaggaggagaaagagtgagaatgctgccacatactcatagttctttcctgttcagatcccattcgatttgtgaagtgtgacattgagagtctgttaaaattgaaatgcacttttataaaaattctgtaaaatatggagccataggctctctatcaacaggtgggagtgagaggcagtgaaatctgagttatgactgttaaggtgactgtttaagtatacccaggctgtgaggcctgggggaaatcaggttacacagaagccaagttaacccggatccagctccaccttgcagagtttcgttaacagaaggggtccttggtacaaacccgctgccggtcagaaactggcctgaggccagaaactcattttaccttaacctcagaatgtccatcagatgatgaggttcttgcctaggacggatatttttctaagttggtactcagagattgacttaagagtccttaaaatttcacaatgagtcacacataaggccaggtttgctgaaaccgaaagtgttgaaactgcctgggggcaatttgtcggtaacctgtaggcatttgagaagctatgaaaaggattaatataatgcataaaatgaaagacaagcagtgggggtggggagtgagaaaactatttccagtgaacatagccctagttcagaagacgaaatctatatttcactcagcagagggtacaaatctgtattacattaactcagcaattctaaccaaaacaaagacaggatggcaaatatttaaacagtgattaaacagtgcccaggcaataggaaatgtctgctcttgccaactgtttgcttgaatgaaataaaataaataaggggcatacaaactgtgtcttcctggttgttctcagggaccttctctggcataggggcagctccctcaatcatgaacttgagtctcatgggtcccattagaaatagcctaatgagaaagaactctgaaaactgttaatggctaacagggtacagaatatgtatttttcttttaacgtattttacgtatataaatggcagggtacaatcagagcagatttccccaccaggaggttgaatgcttaattcaaaacaaacgcctattgaatttgatagtagatctctcccctctctccctaatttggctttttgccagctgttaatctaattgcaggggtggcagcctgagattctgtggccctctagggcaactcaaagtacatattgtcattactaattattatatagtgttgctgtgattaaaagcaccactgtcctttgaaaagcctcaaatgagatgacagcacagaagcacctgagtgtgccccataaactgatattctatttgctgtgccattaaagttcaacaatgccattatgtcttaagtgacaatgaaaagttcccattccagcttttagtcagaatgaccacaagtt

SEQ ID NO: 59696 - DNA, 1348 bp, Homo sapiens
attcatttttctgggcccctcacagcagctctagcacctccacctaaaaggattgaaagggaagatgagaccccattgcagaatatttgaagtggttactcatcagccctgtatatacatattaaaattctctgagttgttacagcagctgttgcaactgaaaataattcagcaaacaggatcattttctgtgtagtttatgggctcgggaacagtccagaagctttggaatttgagttactgtcagcccgctgctcagccaatctccacatgtcacaggctggtaatttgatctacagctcccttgaagtgagtttgtactgaacacagaaagctcttttttccccctttttgccaaacgctaaatagccttttatgtgtgtcttttttccccttacacaatcacgatttgattcaacaaaaatattacacaccttcttcctgaggattttgtgtccttttcttggactcgcagctacacattttgggcagcaagttcccttgttccctcggcagctgcctgcgcgcagtcctccggagagcctaggcctgggagagaccgccttggatttagctgggcctaagaaaacacaggcacagcagtgagaaaaatattatcttccaattccccttcctttcaagactcaggaaatctgcttcttttcagtgctcttatcactgctgtgaagttttgatttttccaatctccagtggtggtttaaaaggagcttagagcagaagctgaaagggcctcctgtatttagagagcagaagccccacctgctgtctctggggcacctcccagtggccagggccagggggtgtgtctgatgatggagacagttggagccacttcagcactggcgccgagtttatttcatctgctgatatttagattgtggtggggagggcagaatgcctgatgatgccgtcagttcaccaccatgcaacaggtagcctgctttccagctactttgcatgatatccagactttctggcatcaaggcttggtggctcacagggcttgaggcaacactactctgtagcttccattttttttagtgattccctcaccggtggtggatctacctaagatcacagtggccacggtggtatgctattttgggttactgaaaactgaaacctgtttttcgctgaagacagtttgcctaacagtttaataacctttatacttagaatatcaggagtcctgtctgtctgatcagccagtggtaccattaaggaaaaatgaaagattggttttcagagtcactgaagttctggtgatattttaaataaaaattgaatacttggacatctaaacttatttgattgaagccttgggatg

SEQ ID NO: 59697 - DNA, 756 bp, Homo sapiens
atacaaagaacaactatctgaaggtgagtaactgtaagcagattatggggattagttggcacatgtgtgaaaggataagacaaggtgtgtcttcccctatttatggtttttagcttaagagcaggccttagacaatgcccatagtctttctggcctgacgaactagaagaaaaagttgagagcagccagagccagaagaaagtgagaggaaacctctaaaagaagagtgccagagaggggagccccaaattccatgcatcaggtgcccaactttctggctgagtcccaaactttgtgtgcatgtggcacactgcaagcagctcagtaaagggtcaatgacctaactgagataagagctactgcccaaaagacagagtttgcagttttgtcaaaacaaaaacatcacactcgacgggagaagtgtaacagaaatgcagaatctccctaacaaaacattcccagtgtccaggaaaccatccagaattacccaacatacaaagagcaggaaccagattcctgacctattctgaagagaaaatataatcaatgaagatcaatcttgagatgacctagatattggaattaatagatgtagactttaaagcaactgttactacagtaattaaaggaacatttatatttttatgtgcttgtattagaaaagaagaaaagtctaaattaatgacctaaggctaccttaaaaagccaaaagattagaataagttaaatcccaatgcagtagaagagtagaactaa

SEQ ID NO: 59698 - DNA, 1717 bp, Homo sapiens
tacactatagaccacagaatttggaaaaaaaaaaaaaaagcttgctactaggtcacttagaagacaaggaggggacaatgtagggtgtagggtacttcggatttgctggtggttcattaccggaaacaaaaaatgaaacaacccattggagacatgttcccactcggtcatcttgtctccttcgtttcttggatcccagtttttttgtctgtctgtttatttgtttgttttatcaaagcagaaaataaaaactccaattctctcctcctcagtttgcttggtgttcaacatagttcctcctgctgcgggccagcttggtttctttaaactttaattgccacaaaaacgtttgcactcagagccctaaatcttccaagtcctccttttgtgtttcttgttttcctcctctttttctgccttcaggaaagaagtgagatgatgatggctctgtctcagcagctctcggggggacctgcaggctggggaggcagcttctctctgcaatttggccgctcctggacttgttgcagccaggcttcaaagagaaaccaccgcttcctccccgagccccacgccagcctcagaggcagctgggcctattgaaacattcaagtttcacttcaggctactttaaacatttgctttattccaaaacagctaaacttggagttattttcaaatataggccatttttatgccccagtatattgtgtggttttgaaggcttttttcatatcattagctgcaacccccaaaggttaaaaataatgattaagtaaaatctttacacggattcctctgctccctggaggggacactgggcagtgtccaaactgccagacaagccaagctgtgacaatagtgacttagcttgcgactcttagggttgtccaaatgattatattcttgtggggaggaacgtgaaagggggctgaagagaacagtgtaagacacaaatttggtttggggtttggcgaggatcaagatttttaaaatggctcgtgtgctgaattcattttttttttcttgctgtcttagagtaacaatcacataaacatactctgagtttattttctgtgaaatagttgcagttcacctttcagctgataagcatctgcccctagaaaaccataaaaaatggaagagtttacaagaggttgtgagttggcacaaccaggcaggggaggagaaagcacttaggacaagtaaatattttacagcacctatattttcagactgtcgctgcttccaaggccagcctcctctcgctcctggctcactgctcctttcccttacttttcctggggcttgctttctttctgtcttcttatttttttaatctcaaagttaatatttccatttaattctacctgcttcctccagtagttaacatgctagttagctatttaaacattttatagatttctctgagcttgtcataattattttcttggctgagccttctggagtcattccatgtcaggagacagtctgaaatagaaagacagcaactttagggtgggtgcagctgggttacacctgttgctaaacaaaacaggatttatgaaaacataaactaaaacaagtaaagcaaatcagaaaaaaaagacagtaagcagcctgccctggtaaattgcatgcttcttttactgttgtcctctttgtgtgagagatttgtttgggttttggaagggacacttcaatgcacaacctctgt

SEQ ID NO: 59699 - DNA, 1061 bp, Homo sapiens
gttagtcaagtgttttacatgcatttttaaattttaatctccataccaatctactaaattggcgccctattcttctgaatcccgttttagaggtgagagcactgaggcttgctgagaacatgccatcagctccagtgacacagccagcatggaatccagtttaaatgtgggcatgtctgactccacagcctctctgctacatcatgtgcagtctgctttttgatggccttttgttaattcctccttggtgccctgatatttcagaagttatatgtcatttagttacacattttaaaccttaggaaaccaagtctgcatcaacatttactaagtattgactggctctgcatttaatgttttacacgtccgttttgcatggtcaggatgtccaaattatttcattagctcattattttggtcatatgtatttctgaaggggactataataatgaaaactagcttaaattcccaattattcaggctatttcatttaaagatgagaacagctggcagtttcaattcctcaagtgttgaaaaattgtggaaaagaaaaaccccaaaccagcgtgttaacaaatggcttagcgaatgaatcggagggattgtgttctctctggccgtttctggatatcttctgtgtgtctccacaatctgggtgcggtgtgatgtgttgctccacggagaaaccacagttgaaagaataaacagggatgacagaataaacagaataaaccctgagtgtgggggaagctttgcaagtcaggctcctttcactcacatgcctggccttctgggaatgggcccaaagttttctctttgggaactggtgtaaacggcttattgcagccagtttgtttggtttctcattgactggtacagggtcctgggcaggcactagcagaatgaggctgcctttgggggagcctcgcaaactgggcactgctcagtaaacaaacacatgcacaaatgtgctgaggaaagtggggacccggcatggcacacacgcatgaacacacacacagactgagggagatgatctaatggagaagaaaagaatttat

SEQ ID NO: 59700 - DNA, 812 bp, Homo sapiens
ggggccacaccagcatcctccaaatgggagtctgaggatgcctcccatcttacatcactcacagatcactgccagagcaacaagaaacaaaaaccctaacaatttacagttcaccctctttgatgtaaggtgcagtggggacacgaagcccaggcctctgagtaggatgtagttggattggcacagaaagcaaactcttctttctttcctcaagaagaaggaaaactacactagcaaattaaaaatattagcaagcttctactcagatacatttagcttgatttgggtcaaggtgggggaagggaagagtaaggaattcaaacagcctgtgccaaggatttgctgaacatgttctttaaaaaaatgctgacaggcattaaattaagtaacaactgcagattacacaagggtaaacactgctgctaatgtttgactaaaagctaactgagggctctaagtgattccagttaatttatagatcacgccagtaacagccccaggggactggggctgctgaaggtgggagattcgttttatagccagaagccacgtttttaattttagaaaaagaaaactaaagctgtaggaactgatttagaaacttcagagggagagagagaaaaagagagggagagaggggagggaggaaagacagaaagagagagagaggtgtagggggaatgaattgaatgtctttgctgggcttgggatagaaaagtggctaagaaaaaaacagaaagaaacacatctaactttaaataactcttccaggaggagagagcatgctaggatcaagagttaactattcctat

SEQ ID NO: 59701 - DNA, 3365 bp, Homo sapiens
ttctagtattatcatttccttgttttttccaaaaagtagttaatctgagcacacatctgtttataggaggaggtctgatggccgggaggacaggaagaaggaacccacaatgaagcaaaagttgcgtttaactctgtcctcaccattcctctcctggacctgtcctaaactggaagctgggggaggatggagtgctggaatgctgcagaagtctcatgggagggcgcctggtgttcaccacatgtgtacactgttgcacgaccaggttggcactttgcatgtgggaaacgatcagagaatggtgggggatgcttaagaggcatcactggaatcctacggtaccacagaccagagccttcccttcccttcctctcccacagatggaaatttgaatgctggggctcagtggaacacctgaaggaagctggtgaggcagatgtcccgctatgccttccaagtgtcatgcaaccagttcatgcctgtcagcatctctgccggtggactctgtgagtcagcaaatctacagagcagagagccacaagtggggacagatgtggtcaaatgccatttaaatcagtgattctcaacccaggagttgtcatggcactggccttgagtgagctggaccaagggaagtggtagaattccccatgaaggaccaagtgagcagatagaagtttctccattttaactttttctgagtcaatttaaaaaacacctagtgcctttttctgtacatagtgcctgtgggtttgaatttaagcctacccaaatgtgcttttatcccacctattttgaaccttgcatgtctccgggataagaattaacataagctataaatattcttccaggactaattattaaccgtgaatgttgagcggccttgacaaatataaaatgttatatataggcccaagagtagatcagagagttatctatctacttcaagttgagactcagagttttcattaaactctgcagtctcacagtatttccaatcatttcagggcagacgaaagttccgtggtatatctttttaatgtggcaggcctcgagggtggattgagttaggcaatttatccccttttatgccctatattcacatgcaacactccaatggggtaacataaaaccacagacaggtttctttacaccggtatttaagggaactaggaaagcagcccaaatcatgtggagaaagctggggaaagaagtatcagaggagaaagaggaccttagcagaaatgacaaaagtgaaaaaccttcctaactccttcagacatgatgcttaaaattgtgtttctttggcaacttataattttctgaagctggttctcagcctcagatcctcccccaaggtttttatgttgtattttgactcagtaggagggatccagtcccagaccttccggctctcaccagtacaccacaggctaacgccatccagcaatcagatgacaggaggaggagaggttcaaagaggactactgtatttctcagaaggggctggctcatctaccctccactgtattactcacactgtagatgcagaaaacatgtcaaagtatactggggctctgcaatgcatgcacccacacacatgtacacatacgcacagacttccaaactaaaaaggagaacagagctcaaaaggggacagtgtgcaactggtgctccatgttgtaaggacctcccctcctgcgggcgcggctaccccagcaggcttgtccgggcatgtccgcccagttgacgccaggccaagttttacgggaggaattggcctgtgtctaaagctggagttcagctttgctgactatggagactgatctgttggttgtcagcaaagaaaaggtggtttcaaaagagcagcagaggactctgtgctagttgctactggccagctttgactccgattggaagcttgaaaaacatagattggaagctatgcagaatatccagtgacagaaataaatcagagattgccaggggctgagggtgagaggaaggagattgacttcaaaggggcacagataatttctcagggtgtcggaaatattctgtcttgattgaggtggtgattactcgactgtatatgcttgtaaaaatttgtagaactgtgtgcctgaaaagggtgaattctactgtatgtaaattataactcgataaacctgatttttaaaaacactgtagtttgggaggccatataaaaccaaataacattttgagtcattaatgcctctttaagaatattttggattgattttttttattagattaaaaaaattcttcatggtaaatattaattaaccctttaagagccaagtggaggagtggaatctgtatgttttagagttgtttgttctttttagttggtcactttacacacttaattttcaattttatttagaaaaagaagttatgcttatgaagcataaaagctgtaattccaaaagttgaattggttttgagaccccaaagtcatgactatgtagagaatttctaaattcttaaggataacctatttaggaaaacctaagaaatcaactattacaactaatgcttcattatgatacctggttacaaaatataaaaaatatccataatcagataataatcgtaaagagggaaaagagctcttttacaacaggggaaaaacaaagcaaaacaagcaagaataagaacaataaaacctggaaacaaacttgtttgtttatatagggcttctatcaatttagttgtaaaactttagttaatatgaaatcaggcttgaataaattgagacatattttatattattggatgatgtcactgttcctcaaattgatggttaggtccaatatgattctaatcaaaatcccaattggaatatttttgaatgaaaatgtgactgtaaggtttatctagaataatttgtggataaaaataaccaagaaagatttataaacaaataaggtaaactgtacttcaggtgttaaaaacctgttataaagctttaataacatgatattggtatacaactagacagagagaagagaatagagtccccaaacacactcaaatacatataagaatttagtatttgatgaagacacttcaaattagggaaggaaatgaaagattatgccagtgaatagtgctggggaaattaattcagtttttaagggaaggaggagacccaaatcatatccctaaataaattctggatgaattaaataaattttaaaatatgaaaacacaaatgagtaaaagaaattatgataagtatctatcaactctcaatgtatggaagcactttttaaacaaaaaggtagaggaagaatctataaaagagaaaacagaatgtttttacataaaaattataaaca

SEQ ID NO: 59702 - DNA, 1954 bp, Homo sapiens
aaaactgtgcacctcttttagtgatgaggacggagtccaaattgaggacatcccttgtagctcacaatgcacacatattctcacatcaatagcaacacagaatgcaactgatgaccaatatatattcacaaataattgaggaccatggctaagagttgcattcggattccgatgtgactgctattgtccttaacacggactagctccaggtgagtcccccggccccgggggtgtggcgggcgtcacccgttgtccgggcacacaccccgcagacccaatcctagcccgctggctagaccatggagggccgctgggtgcagccacagagcgcggggccccggcgaccccgccccgctccgcgtcactcggcgccctgcggcgcgcgatgagcacctaccactagcggagccgcgagggagaggccgcggccccttcccgttgcctgcggccaccggccggcattcagagcccctcgcctggcgctaaatttaaaaacgtaacacgagcagcaggctggtctcggaaacgaaacgaaattcggtccctgggcctcctcccgggcgctgccggtccctcagcgcgccgcgccacccggaacagacccttctcccgccattttcggcggggctgggagactgaggcccgcggcgctgagcctgcggcgccccggaagaggcgggcggcatggccgctggcgtggactgcggggacggggttggcgcccggcagcacgtgttcctggtttcaggtaaacacgcgcgcccgggcggcggggtcggcccaagaactggcggagcggcccgcgaccccgggcgcgccgccccccaccccggtggctcccactacccggcccggcgcgggatgggattctctctgggacagctggccccgcattttggtcacacgtcatagcaagccgcggttttcaaacccggaagcgccgaaaaggaccgagcgtgtttcccgggccctgatccccggtggctcgggtgggagggtggaagccgactcagcctgaggggagccacgcgggttcgcggtcaccggtgcgctgcgggccccggaggtttctgcccttggtgtcccctacctggcagctggccctgcttctgtgatcctactgggttggaaccagggatccagtaggctcgaagtggcctcagacggtgcgcagttttaagaaagcaaagggacaggcctgcagtggcgaggcaggagggaagcgggatgggagtcgcggttaggccaagggtagttcaaagcgattcagcaggatgatgaccacaggagtgctggagccgggcctttcagcccccgtgtggatgatgaccggccatccaggacatgcgagggcttgggacagtggacagccagtgccacacaaggaaggaccgattaaatgacacagttaaaggaatttggcctagggagtgcaagccagaaaggtttggtctttttatatatgtaacattggaaaaaaggaacatctcctgttccctgtattaagttttgactttagctcagcaaatgcagtgtttgtggcagtaaatatactctgataacaatattctttcccaggaatttagagttttatgatggttattgaaaatgtttacatgacaggctgtcaataatattttttgcctctaaaaataaaacatacataaagtgtacggattttaagtatgcaactcactgaacttttcatacgtatacaccaccctagtaaccatcccccagttcaagatgtagactgtttccaataacgcctcatgcctgttcctagatagccccaggaacctctatgctgacctctgtcaccagagattagttttgcctgtttgaataagagtgtaccctttgtgtctggcttctttcactctgaaagattcatccttgttgtgaaattcattcatgttgtagcagttgtttggttggttggttagttttttca

SEQ ID NO: 59703 - DNA, 691 bp, Homo sapiens
tttatgatggttaataggcaagaatgaacatatactcatttctccaacttaactgttttccaattcttgttcttttattaaacaaacaagcaaggcaggaaattcctcctgtctgaggttaatttgatcaccagcatcaaaaacctgctgggcccagctccagctgagaggatatgagcacattctctaccccagagcaatttctgtgactgcttagggtatttgcctcccttttcttatgaacaggaccaaatccacctagaaagagggaaggggtcttttgtggtgccaccttaagaggacaagaaactctttcagcacatcaggttacaagtctgatggcctcagagattggtctgcctgcagtaacacctcccggccttccctcctgacctggatggagccaccagccgcagcggggtaagattgagagtccaaaggccctaggccttgtgaatgactgactccatgccaggtacacatgcagtcatcagagcactgaaggcgctgccctcctctcccaccccttgcctgccctgggcaaagctcacccaacctcttgaaccctcgggaggcctcttgggagccagttttcagggccggctctggagctgcacctgtggctgtcagaggagggaggaaccagactgcccacagctgctcagcctggcagtggaactgtgagagtaca

SEQ ID NO: 59704 - DNA, 687 bp, Homo sapiens
tggaagagggtggcaggagagggcagaaaaatgaaatgtgagagagactcagcacaccattgctgactttcaagacagaggaaggggccagaagccaagaaatgcaggtagccccaaaagctggaaaaggaaaaaaaaaagaaaaaacaaacaaacaaacaaacaaaaactcagattcttccctagagcctctagaaggaactgaaccctgcggacaccttgatttttagcccagtgagacctgtgttggacatctaacctagagaacttcatattgctttaagccactaagttggtgatgatttgttccagcagtaataggaaatcaatataagcaccttctatgaccaggcactgaccctgccaatgcaaatatgcccggcattccagagacacatagtccagtagggagagaaaattctgcacatgcaggtaaagcaacatgctatgcactaaacatgcatgtaccaagccctgagggagcactgagctgatggtgctcccctttgcctgggggagccaaggaaggcttcctggagcagaggagacatttcagcttaacctagaagcctgatagaaggggtctgtactattctggacttacatggtcccagggccttttatttagacatgaatgctgaagaaggaagcagttttttattgtccaggctggtctagacccttgat

SEQ ID NO: 59705 - DNA, 4525 bp, Homo sapiens
gttgttaactgtgtatgcttcaaaagaaaacttaaatgttctcagccagtgactgtactccagtgaaaaacttcttacctttcagaatagttatacaacatggtcacattaaaccctgatgcaacaaacagattaatttcctctaacatctttactaatatagaaacgaagaacacgaactagtgtctctaagccactataatagttgcacatacaacatgagtgtggtgtggtaggatgcttttccttttaggtctttactgaactttcaagggattaaaaccaatgtatgtcaactttatagcaaaagtttcagattctaatcctgaataccaatgcattttagagggggaaaaaatgagggatgtaaaatatatatagtagggtaagagttttgcctttgaacaatgtgcatattctattttaatttggaatgttttatacttgcatttcatgttatgtagtttttggactggactgtgtttttccacaaaatgaaaaatcaactattttgccaccttattattcaacctacctgcccatagttgtctatgccagttactaatctatttaaatttaataaatcaaaagctgtccttagggattggccaagagtcgtaagtccttcagcctgaaggtttttcaattcattcataaacgttgcatggttttctttccatccagcctgaaaagaaaaatgtaagatttttttttttcattttttaaagccatgtacacagagccgttataatctgacgttcaccaagtagcagcttcacttttggttggtttggcttggttaacgtgttaatactgtaccgctgctgaggaaactctcttccaaaggtggcccaggaataacccagcttcctctctaggttttggtagttaactgccttaatactttataacttcactgacaaatttactacctaatctaatacccaaaatttgggtatgtgaaggtactagtggaagcagatgggagccggacttaggaagttaacctgcagctgtcccaccggccctcttaggacgaatctgacaagaccaatcctggcagccccgcatctggcttccgggccggccgggccgattcccctttaatgcaaaccggggctgtgcgcggccgggcccggctgtcactccggctaacttgaataaatatcccccacagttcattgctgccgctcacgccgcggaggggaaatgtcggccatgttgatagcagcgccgccgccgccgccgccgccgccgctgccgggccgggccgggaggggacggcggtggccccgcgactccgcgccgcgctaggacgctgccgagcgggggagggggtgggagcccgcagggaagagacctcagcggctgggagcgcagcgggtgggggaggggagcataatgaagggtgaatgggggggcggggagggcgagcgaggaaggaacagggaagggaagggaggaaagggggagggcgagggctgttaccttgatagcatagggcggctcttcgaaagtgaccagcatatacctgtctcctctgctggcagggtcccgggcacggagctgcgggacgggaggaggaacagggcgggcgacagggaagcacagaggcgaggttacgaggcggagaaggggcgcccagcggccccgccgcccccacagtaccgcacacgcagcggccacccctccacgccgtcccccacacacagatcgctccccacacaccgcccggggccggagcccgggccccggccgaacccggctcgcagcgcccgcccgcccgcgcggtgggggagggggtccccgagcccggcagctcccgcagtcaggtccccgacacccccgccccggccgccctcccccaccctgccgcccgcgggccgccgggccggggtcgccgcccgggctcggtcagtcggtaccttcatgaaggtctctaccgcgcctttggccgtgtccaggtaggtggtgcccagatggctgcgctggttcatagaggcagacgtgtctatcaggaacagtaagatgggcatagtgctggccggggacaccggggcccgaggtggtggagaaagaggagatggtagaggtggaggcgccggtggcggcgaccgccgctacgcggggcgggggagcacggcccccgggaggaaaacactgtctgggtctttcctccggctgcggggagtttctcccccgatagttgagaggaaactccccagacccagtgctccccgtcgtacccccgcctccgcctcctcctgcctgcctgcccgctggggcgggcgcccagccgtctgtctgtcggttcgtcccccccgcctcgggggtcccgtccccgctcccggcccctgtgtgtgtcccagcgggagacgggcctggctccccaccccacccccggtacaggagtggggacctgggagctggcgaagaggggagtgggctgagggaagattggccctggggctgttgggagaagtttcagggactccctccgcaccccggcggtgtcaccactttctcagcccctctcgctactgaagcgcttttctctctcacactccggttttaactcgggcaggggctgcggaggctccgcccctgacacgtccccgagccacgtgatacaccgcctcgccgttctactggtcaggccctatcctttcattagcatatttaaacagctcaggggcgggggaagcttgtaggccggctccggggacagttattgagcacgcgcagaggcggggcgtcgggtgcgcgcgagcgggcgggcgggccgacccggaggcgggcttcgggaaggggcggggccggactgcggaaggaccgcgaggtgggggcgggggccgcgtccgcgcgcgcggggcggccgcggcggtgagcctgcgcgtcagggccgccggcctctccttggctgttggaggtgataggggtcgaggggagggaaaaaggggctggcgtcagccgcccctgtgaggtggccgtagcgtggacgagtaagaagggttgagtaaagtggacaaacacctggttaggagaagagggcaggcccgcagccgccctccggaggaggactcggggcctcgcgggcgccggaggaggttcctgggcctcggagggccgccccggcgcgccgccccggcgcgagcgggcgcgggcgggggaggggaagtgagaggttgtttatgaccggggactaatctcctccgcgagtcccagcgctccctctggggagtgcggttgaggggctgtcctcgcacggagcctcgctcggcctcgggggagccacgagaggtgggagttggacccgcagcgggccaggagccctgtcattggaggacccgccaaaaaggaagcaaaccctctttttctttatccaaccccaaatagctagggcctagggggaagactcacatatcgataaatggtttgttgcccgttttattctctgggaaatacaactgatcttaccaaagaaataacctgtctcttgccgtgtttacttagagccatagaatacctgtttcagagctgaaggggacctgagcccatgataatccattacctcgtgagaaagcggaaaaactgacttcagcttgcccagatggcgcagagaatgggtttcccgtaaccccgcctgtgtctttccttcagcctcgtcccaaatgccgtgggagggaaggcactctctgtcaagctgctgtcaccttacctgaagtaaggagtccacgcctgcatgtccgaggaaaacagttttctcaaacacattagttgaaaaactgaagacgctgcctaaaatacaagctgagttagagacagcccttgtaagactaggtaggtatttacagggcctctcccactagctttgtttttccagagtttgttctttatccggaaattcttaatttgcctactgatcatttaaagaaagggttctattaacattgacacagaagagacactttgtggcactttttaaaaatctgagtctcgtgacttggtataacttctgaaacttactgttaatttatagcagagctatttgagtaatatgctcttctatgagtatgaacaatagaagaagtgtgatttttaaagtgatttggactacaaaataagagcatggaatataggctttacagccagtacttgctgaggatgtactgtgtattaggtgtggtgcatataaaaaataaataaaatgtggtccctgtcttcaaagagcttatgttttctaggaaaatgctacatattactagctactccaaggcagaaagttgttagacaccaaatcagaaaaaataaaaatgtattaccttggggtgatgcaggaacattttccaaggtttcagctttgccttagtgtttcttaaacggatcatagatctgaagataagaatcagagttctatggcaaaatacgagttattttaccagttataaagatgaaatttgtctttcaacttgatcatttgcataattttatacaattgctctttagttctttatatttgtgcttt

SEQ ID NO: 59706 - DNA, 4104 bp, Homo sapiens
ttacatgccttattctaaactcctagtctgattcatctgtatttttctaggtagaaccctcattctacagtaatacaatttttttcatcttgagcttttcctaaacatgtcactcttgttacttgctgtctccctttaatccactcagccttttgcagataaaaaattttaatttcagttaaagtgctctttatttttctcaccaacaagatccttttatactttaaggaccattttcaccttcataaggaatctgaaacctattcagatccagtagtttgctctttttcacagatcaagctaagcaaactcccctggcaggaagccaccagaaatttcagttacaggatactgccatattctttcacaaaaaagggcctggtaagtgcaagtgatgccctatttctcttagctgtctctaacccttgctcaaagaaagggtaagtaaaaatgggtgacatgttagacgtttaaaaatgaaataaaaatgcatacacacatggataaagtacttcctaaagtatgagctgccttattttctcaggtataaaattattttagggaagtttcaataaatcaaatgttaagaaactgctaaaacatttttttgtgagttgctttcattttgcctgatttataatttcaacactctgctctaccacagagtatgtaggtttgtctgtcatatcatagctttcaaagggatattcttattttaaatctcaacatcatcattaaattgttctaataataagaggcctaaattttaaatcctcagggacatcaaggcatctcatctgctatgttattcaagcactgacagcatattgcaaaacatctaggcaatagagggcaagaacaaaacctaatgttgttaccttattgacagttcctaagatacatcataaaattataaaatgttttgtttaaagctggtaggctattttaataagcgaagaaaaggggatggaacttctaagtgtatctatttcaagatacatcttataattgaccctttttcctccttaaataaatgtattcctcccagtacatagctcagagcattgttataacatccttgagaaggagtcatttaaaaatggagttaagaaaagttcacatttcagccttgtaagtggtttagttacgtgatgaccttgaagatttagctccaattgtacagtctcgtaaagggtacctagcgtagcttagaaaagacaataccccaaaattcacttttacgctactaaatatttttgcttattatgattttgttgaggaaggattggagctggtaaaaaggcaacaggcatttgtgtagtggtctgaagtttgacggccaaaaataaacataggaaaaaaatcatgactttcagatgtgtgactttgagatctggcacaggctgaattcaagtttacctttgcactattaaaaaaaaaagtttgctaggcagatgggtaaacagtagagtttatcttactttataatgagtgttaaactatacatgatctttagcctcaaaattgtttattcacaaataataaagagaagcattgcagccatacctaaaaaagacctcattttcatacctgattattttatctgcctttcacttatgttgctgtgtttttaaagttatagcagttgttaaaagttgtaaacttatttataaaaacttacgaaacttttagaaaacttctggtatatacacacacacacacacacacacacaaacacacaaagcaggggcgcatgcatttatttatttttaattgatacaggctttccccctgttgactctcagccagagacatttaactgggaaacatttggaaaggtatgagggcatttttcatttctcaatgatggatgaaggtcaggcagtgaaccactgactttcagtgccaggaactaagtatatgaaacagtctacaaaatgtgggactgactgtcccgcacaaccatgaattatcccatccaaaatgccaataatgctgtcacccttaagaaactcaaagggctcagctataaaaataaatgaagtgttcttcttgaacaagtacagaagcagaggagtgtaggaactccatgtggactgcagagacagacagcttgagttcaaatccaatttatagctgtatgacctgcatgtttaacaacatttaatgatctgagactcagttgtcctatctgtaaaatgggtataacagtaatacttgactcatagacttgttttaagaattaaacaagttaaaagatagaaaatgcttggcatatggtaatctctcaattgatgctggctagtgctattacaagttcattccagtctgttttatgttaattagtattggtgagaaaatgtacaaatatattttttgaaacctgaagcttctaaattaaaaaatctttaggtcagaattcattatgcattagaagatatttcttgataatgataatcataatgtaaacatgttctcagtcactaaatatattcagacaaagcagtaggaaagggttaagggagcattcccaggctgaaaaaaatttctgtggtctgtggaacagagagggtgtcagggggatgcttcacagggtgtagagatgcagaggaggcctaactgaattataaccgcgagtttgcacagtggtgagcatagctgatgagatgcaagcaaaaaaagagtattgctgacctaggaccatgaggaaaaaccaaatccaaattagtcaagttggaggacatttgttgaaaactccacacttccatgaggtctgtagccttgagcctatcagtgccgacacagaacattctgaatagttcaatgcctctttctgttaaagaggagacgcctcactctgccgctcaatcttggacttgtttgtgcacagaggtccttgcttatgtaacactcgcttttaactataattcacagagtcctttgaacacataaagggaaagccactttcgctcctgttaaggatgtataagcacaaaaaatgaacagtgaattaatcctagtgttttatacatttttttttaaaaaaagaatctaagccagaatgaggttactgcctaggcaaagaagaagacagctcatcacaggtgagtgtaacacgtttttcatatgtacaaattaagcagcctgaaacaaaaggcactcaaaaggtaaaagaataccagtcacccctctgatttgtcaaatcaaagttctgtcaactgttagatgtgttatgtgataatgcaaacgataaatgccttaatcacaaataagattggataatatcaccattagtaggagacttccaaaaatagcaataatagtactatgttgactcattctctttcaaagactgagtcacaaagtacaaaatccagtgagttagaattgatgacggtaaatatcctattcccctgtcactcttgcttcctcttcctactctctaaaccttcacattgctattcagtctcctccattatgttccctagctgtatatttacatcttgtacacacacccactttgcttcagagaccctctctaaagtttgccttacttagatagcactgctgtgaatgtttctcaaatctctgtcttcactattgtccccttcctcacactccagtcttcatgttactgggagcttttagatagtgctacttaaatacaaatattctacgctgaaattcacacattttcttcctacagttcacattcaaatcatcaacatatctggactgctatttacaaaatacatctagtatctgaccatttctcaccgcctccaccctggtctaagccaccgttaactcttcctgggttgttataatagcctcctcactgatctcgatgcttctacccttattccacttccctctctctctctcttttttttttttttttttttttttggagactgggacctcactttgtcacccaggctggagtgcagtggcatgaacatcatgaggtctgtagtcttgagcctatcagtgccgacacagaacattctgaacattctcactgcagcctcagcctcctgggcactcgagtgcctcccacctcagcctcccaagtagcttggactacagatgtgcactactatg

SEQ ID NO: 59707 - DNA, 3996 bp, Homo sapiens
ggaaatttaaaagcaaacaaaacctcattttaaagaaatacaaaagttatagtcaacattcaggtgactactttcaattttgatttcttgggatatagaaatgagtggcagatgtgttcacagtactacaatccaaggcatgattttgtgctgtccttggaaagcaccaaactaaagaagatcctacagaacatagatgatcccatcccggaccatatcctcaagtgaccggctcctgtgtccacgtggccttgccaaaaggcagctagacgttctcagggatttcccagaaggcaaatattcctttcctcataaaatttgcgtatggtgctcagaatgctctatgtatcccagaatttctattattttgatttctagccattttcagaagcccagatgctcccctcaggcacataaaattctgtagccgccaggatccacatagcagagtggagggacacagcagagcttggagtaggtgcaggaggaacagagcccaccataaattgttctctgagttccagccagatgcaatggggtctgcccctcaatctgcctttttctccaaaatgagtgcattgtaatccatcttggcccttcccttttctctgctttgtgggttatatgttatttttcctcacttcacaaaaacaggccattgtcacaatttaatattaatttagaaggaagctgacccgacaaatttgagaaaaccaagtcccagagaggataaatgacttgcccacggtcacgtaacttgatgatgccaagctgatttcctgcctcgaaagccacttttcattattatgaggaaatgcatatgattaacccacagtctggagggcatgtgttttaggttgttctcatagcagggacgattggcagtgacttcatccacaccctcctacccagccatcctgaacgggtgacacacagctgagacatctgctgtggagtaggaaggcttcacactggggcatgctggagggacacttgagagatacagaacctgtggtgctgtccttgttaacagcacacattcttaagattagagcatcttagagggaaaggagaagggagattcatttgtgtctccaacctaccctaggttgcatgttaaaccactcaccacaacatgcagagtgggaggtaaataattcagtgtatacaggttctgcatatatgtcatcaacgattgatatgtttctgtattcaggtggttgtcaatatatgaatgagatatagcctatattactccaaagaatttagtatttaaaattctatattcatttttgttagagaagatattactgcacaaaggcctacttagccccatattactggatgtgacactgatggtttcaggaaacttaactgctgaggactgaattatgtcccccatcccaaaattctacaggttgaagccctaaccccctatgtgatgatatttggagatggggcctttgggaggtaattagggttagatgatatcatgaagtacagtcctcctgatgggcttaatgcccttctaagaagagacatcatagaatttgctctctctcccccatgtgaggacacagggggaaagtggccaactgcaacctggaagaggccctccctagtacccacccaggctgacactgtgatctcagacttccagcctccggaactgtgggataatacatttctgctgtttaagccactcagtttgtggtgttttttttttttttttttttttgcctaagcagactaatccaccaacctccaagaaccatactaattctgttggcacacagcatgggtactaggaacaccagatgctctttgctctgggctgccaaatgtccagctttggagggaagtcaaggatccaaaacagtagcataagttctaatgctagctctggaagctattcctatgcaaggtatccagaaattaggcatgtcatagataaacataaaagtacaattgcacaacgatgtatgcattcactcatccaacaaatatttattgagcgtcagctatgtggcaggcacataggtgctggggatatagtagtgaacagaacagactcaaatccctgtctgttggggaggacagacaatccatgaaataaataagtaaaatatataatctactagacagtgacaagtgctaaggagaaaaattaagctgcaagggtcctaagggatactggtggtgatgttaaatagagaggttagggaaagtcttattaaataggtgctgggtgaggtgagctagggagctgtctgtatatcaccaaaagaacattccagaatgaacacaaaagcaaagggcatgaggtgtgctgggaaaatatcaaaaaggcatgtgtggcaaaaaagacacgaaaggaagtaagagagggcagggggtggcatagatcatgcagcattcataccattccatcgactccccttctctgagcagagctgcagcacgatctgctccacatttcaacacagtctctcaggctgctgggtgtgcagggttgctcaagtaaaggcaactttgaaatgtgtgctgtgtgggtgtcctagggctgccaaaacaaactgccacaagctggtggcttaaaacaacagaaatgtatgagctcatatttctggaggctgcaagtctgaaatccaggtgtctgcagggctgatttcttctggagcctctgcctgagaatctgctccatgcctctctcccaggttctggtggcggctggcaatccttggcttgtggctacatcgttccaagctctgcctccatcttcatatagcctttttttttccccctgtgtgtgtttctgtatctctgggtctcaatctcccactcctctctcttataaagacaccagtcattggatttaaagcccatcctaatccagtgtgacctcatcttaattaattatatctgcaaaggtgatatttcccaataaggtgacactgaaagttctggatgagcatgaattttggggggaacactattcaattcattacttatcactaaaatacagcctttaggtttataaactgaaaaaaatagcctttaaaaataatcagtactaaattttagtctgttcctgcagtttataggaaggtaaataccatatgaaatcagggttggcctcttagcaagttagaattggctgaaaacaaagtataataaagaaggccagagtccagggactctaagggactaatctggctttttttttttttcaaagtaatagtgaacatatatgaatatttgaaaagaaaacaaaaagatattttcacaaaactttcagtaatgatgactttggtcctgtccttagtgaatggccttgactctggccaggtcgttcagtagatctgtgcctggggtctccagtatacagtcagggtaaattgttccaatcctttaccagtgactttttaaaagggaacatgtttgtgctccatgaaacaaaaatgtgaaataaattcaacgtctacaaataataatcatcaaacctgaattcttatactggcacatctcttccccaaactcaccccttgggcacttctctctacaatgtcttccaaggccaggtcaccaaactccaggcagaagtctctggagagaagatcaccaaggacagcatgggttactgcttctttttcctgtccagtttgctgtggacagccatgctcccctaatggcattgtctgaacatgtttttatacggctgtgcgcccctcagaataatgtccttctggggaggttatttcacccccaacgcctgaccttgtcaaaggcctgcccctcagccctcgtacgctaatgctgcccacctgatgatacccaagtatgctcctgcccccttcccatttgctgatgtggcatatagagctttagctggatcacacatgaaatcaaattgcctgcaggacagcttcatgtacagtccacagtatgttgagagagaggcatcccaccaaagcctccagcgcagcacccgtggag

SEQ ID NO: 59708 - DNA, 4103 bp, Homo sapiens
aatctcctgacctcgtgatctgcccacctcagcctcccaaagtgctgggattacaggcatgagccaccacacccggccttcacttattattattattattattattttgaaataagtcttgctctgtcacccaggctggagtgcagcgacacgatctcggctcactgcaacctctgcctcccaggttcaagcaattctcatgcctcagcctcctgagtagctgggattacaggcacatgccaccacacacctggctaatttttgttttgtgctttttgttttttgagttttttatttttttggtagagatgggatttcactatctctaccaaaagatgatcttgaactcctgacctcaggtggatggccaggctggtctcgaactcctgacctcaggtgatctgcctgccttggcctcccaaagtgctgggattacaggcatgagccaccaagcccggcctgaatgatttgttttttgttcttagtgaatttaccaggttgtgcaaccacacaccataaatcagcttttgatcattttcatccctcagtaagatccctcgtgcccatttacagttaccagccccctcctcacccaaccccaggcaacctcctttgctcctgatgagcaactgtgataaagtagttcttggtgttgtcattacagtctaaacagatttggccagtttccctcccatcctaggaaccaggctttttcaccgtggctgtctttctggtctgagccagagggcagtctcaatggtgacgccaaaggctgggggaggaaggaaggaagctgtggctggcacacctccatgtgcttgaatccacaggcccctctgccccaaaccaaaccacactgtctgcctcctatgccagctctgctgagaacaactttttaaaaaactttaaaacaaaattttcaagaaaaatgactaaatgtctcagtcttaaattttctctaattttaaaaaaattggtgtatttttttttaaaaatcctggattataatgaccaaaaatttttcctaagtgaaaaacaccaagttgaggtaaaatgacacattaccatgctcaggtacacaaggttatgcctgtcactgaccatttggagttttggttttgtttattaaggaaaagtcaaagcaaacacaggaatcgagaaccactgaactcgaatgaggcctccatcaaggcctttttgaagagcagtggtcaatcacagaattaaaagaaaggcaatcaggtcaagttgtaatgcagtttgacttaaaatgcatgtgcacaaaacagctatttctgccttcaccttcccctttgctctgtgagaacaggaacatataaggtcgtctattaatatttttttaaagaatgaataaacaaatgaaggcctaatatgtcctaagcattatgtagccttgatgtcaagaaatccaaatagaatggagaagtggacccataaacaaataatttctatatgcagtagtcctcccttatccatggggaatacattccaaaacccccagtggatgcctgaaaccacagatactaccaaactctgtctatacgatgcacaaatttatttttccttcttcacaatatcacagatagaagtttcattcttactgtagattttagaaaccttagcatatgagttttttcccttagtagtctgagaacttttacctttttacttaacataagcacttgacagcatatccaaattgccagcatcaccactctttcactgtgggaccatcattaagtaaattaagggtgacgtggacacaaacactgtgatactgtgacagtcgatctgataacagagagggcaaataaagtgactcaggggcagggagtgtcaacagtgtggatctgctggacaaagtgaggatttccatcctgggcaggacggagaaggatggtgcaagatttcatcatgcggctcagagtggtggaaaatttaagacttatgttaataaattgtttatttttagaatttcccatatattttccaaccacagttgaccacttataacaaaatcactgaaagctaaactgtggataagggggactactgtagtatgataatcaacagaagtaatgtcaaggtatcataatagctcaccatgagcagtggttaatttgggttgaggaagagggcaatgatgagggaaactttgcatatgcaaaatatgagctatttaggagaaataggcattctccaggaaagcaaagacaaagaaggtcattccaggcagacgaaatagcctatgcagagggaagaaatagtttagtctagccagagcataaaacgtagataagtttccccctgtagccatgaggcacagggtaagcctgaaagaatgaagtcctgggtgaggtcagatgtgagaagcaagaaacagtttgacggctgtattagtcagggctctttagaaaagtagagccaatagtatatagctatacaatactacattgcttaatgatggggatacattctaagatgctttgttaggcacttttgtcattgtgtgaacatcacagagtgtacccacagaaacctggatggtatagcctactacacacccaagttatctggtataacctattgctcctaggctacaaacatgttactgtactgaataccatacacattggtaacacaatagtaagtaatcgtgtatctaaacatagaaaagttacagtgaaaatgcagtattataatcttatgggaccattgttgaacatgctgtttgttaactgaaatgtattatgtggcacagtgactgcatatatattcatatagagagagacaaagagatcgtatcaggctgttcttgaattgctacaaagaaacacctgaggctggataatttacaaagaaaagagacttaatttgttcatggctctgcaggctccaacatttgcttctggtgaagccccaggaagtttccaatcatggcagaaggtaaagagggagctggcatgtcacatggtgagatccgaagcaagatacagagggaggaggtgtcacacatttttaaacaaccagatcttacatgaatcagagcaagtacttactcatcaccagggggacggtgctaaacctttcatgagggacccacccttataatccaatcacctcccaccaagccccactccaacactcggtatcacatttcagcatgagatttggaggggacaaatattcaaacaatatcagagattgattataggaattggctcatgtgattatgaaggccaagtcccacaatcttccatctgcaagctggagaaccaagaaagctggtatagtgattcaacatcagttcaaaggcctgagaaccagggaaagctgatgatgtaagcctcagtctgaggctgaagtcccaagaacgagtagcaccaatgtctgaggcaggaaaagatggatgtctcagctaaaaaaggaagaagatttgccctgcctctacttttttgttttattcagaccctcgaccagttggatgatgcctgcccctattggggaggatggatcttctttgttcagctgctgattcaaatgctaatctcttccagaaacgccctcacagacacgtccagaaataaggttttaccagctacctgggcatcccttagcccggtcaagctgacacataacactgactatcacaatgttcaagttcaagggagttgggagaagaaagaactgggcataaagcaaagggtcttcaacagaggacagaacagacagtgtgagcaatggtgtagaataatgaagcaatttttttgtactaattcatttgcagctgaaagctgagaatgtagggaagtggcagttgtagaagccattgttttgatggactaggtggcatatggaattgttgtatgtgaatttgaggatagggagacaggtgtaccagataaaagtaaagcaaggcaaatactcttcaaatactcagtttgtcaatattttgtggatagggttagtgaatgggtaaatgtggacttgaagaaattttaacaatatccctaaaaccagtagaaaaccaaaatacttgaattataagtcaggtataaggacaattagggtgggctgagtca

SEQ ID NO: 59709 - DNA, 2299 bp, Homo sapiens
ctgtccgttgtgtctggagcaagctaaaaaggctggattgctggggaaatggaaagaagccagcactaggggcctgggttcaagtctggagggaaggaggggttgtttagccctaactttgcactaaagtaaccttggctgtgtaatttagccatctaagaaaacgaggggatagacaccccatatgttctctgagctcccttgaagatgtctgtatgaaagattctctccttttcatgtcccttccgtgccactattccgagcatcagtctgaccctaggagtggtgacgtcctactcagctgggggctgcccctcagttcccatagaggcaagtctgggtcctgacttggccaatggccctggaggccgctgagctcctcaggcccatagcgcagaaagtgggcgataggtcattccaggacaagggggcggaggctccaagaaactacgactcccaggaggccactgggttccctccggcagcctgggcctggtgcatgttgggagcagtaagcggcctcccgccgcgcttcattgttaagaccgctaggccaggtagcccgcgcgcatgccaagtcacgtcccaacgagttgggcggctttccttcctgcaggcctcttctctttccggtcttgctgaggcgctcctttccccgccccacctccgccctcttttcagggaatttcgaaggggcgtggcgtctggcaagcgcgtccccaggggtgtgtatacgcgcgttcacgggaggttaaagagggaggagcctaacccttgggtgtgtaaggcagagagaagaccgcgaggaacggaaagcgcatgcgtcctagtggtgctgcagcgcccggggagtcgcggaggggaggggtgaaaatgggcttgcgggactgacgcacgcgcattgggataccagatccccgcctcctgctccaggtttcccctcctccttcaccaccctcccggaagtggagccgccctcgcgcccaccagcggctaccccctgcggcaggccccgcccacacaggctccgccccccggcgctccgccccctcctcttgtagtggcgccggcttgcatcccaggtcgtggcggttttggtgcctgaagcagggagcgcggagtcgttcccgagagaggcggccaggctatgctcgccggtttccggcgttccgctccggccagccagagtctctgtctcaacctgtgtccgtgctccagcagtctcctcagcccggccccgcggcgcggttggcggcggcgccccaggcgcgccccctcctccgatggcggcggagatccagcccaagcctctgacccgcaagccgatcctgctgcagcggatggaggggtcccaggaggtggtgaatatggccgtgatcgtgcccaaagaggagggcgtcatcagcgtctccgaggacaggtatggactactgccattcggccgcgaggaggggcgggacgggccgacggccctcgagcccgcgtcaggggctgtgccttcacgtcggcgcgagtgtagacttgctcccccaagttttattgtaatgcgcatcctggtggtgccggtgttcagctgcgcgccgcctccgctgtgtggctccgggaagcggagccgggacggcggcgagcgctccggcttcaccccgggctgggtagtgcctgcgggagccgggtggccctcgggctaacggtgcgctggagggactttggtccatccctgaggacaggagggaaagaggggaggagccgcccggctttgcaggtgtgtgcttggggaacgatgccctgagccgcctctgcaagataaccaaggggtttggggtactctcgtacagctcccagggtttcaaacggagaaagcaaatgccactccttcttcccagacattcctactgaatccagataacccagacatcttaggctgaattcagtgaatattctaagttgtaccaagagtaagtttaggcttctgcgtggtgccttctttcctttcccctccttatctcttggagctcgaggagaagcgcgtagaacttgtaacggatcactgctgcaaatagctcttgagttccttccctttgcctgtttcctttatttttgcttaattttgcttaatatgcagaagtggaactagttgttctgccttcaaatactctctctgttttgcgttttcgctttaactgaatttccttgaatatgcaggaataaagctgatgaagctaatttctagagtaatgttgcttgaagatagtattatgataatttatctgaaattgtttctttggtaaaatctatataa

SEQ ID NO: 59710 - DNA, 1055 bp, Homo sapiens
caaacaaacaaaaccaaaactttagaaaaggaaatgtgagtttttacttgcacagcatctttctctggctgtctgttttcactttgcatttggctttgagaaagcatggagaatcatcttgatgtcattagaaataacagtgtggggaaaattaaaacactttgtggcatttagaaatcaataagtagattgtgatttaagactactgcaggtggtgatttgttgatatctgtaacactaaactaaattgtgtacagtatatacttagaagagactgaccaccataccaagcttttcttctcaactattggcagaatagaaagaatttaaaaagagatcacactcctttatttttatatgagtaggtctcccaaggagagtgttacaattaacctagaaattccctaacagagaaaaaaaaaacaaaaaaaactccccttgtgcaacttcagcaagcagtcttctctttaaaaaaattttttgtatttcggggcagggagcctcttcatccaaatattttatttagtccttagtaaaaattaattcagaagtatgagaaactaaccagtaagaccaaaaaagaaaaggtcatctccttgtctcttggcagggagtgctactttatggtctcctgtgcctttaatttaaggattcttggaaaagaactgggagtctgatctcagctctactctgcattgaccttggcatttcctggggcatttcatcactctaagcttcagtttgtccatctggcaaaggagggggttagatttcctagctatgactcttgtactgtgatgtgcttctgtagtgactagataagtagtctctgcaaccatatcatcctaaaatctcaagtggaggaaagcacgcattagggaaaaagcagcatgcttgtgtgaaactgtcagcacctcatgttgcaactgtaaaacgatgctttctagagcctttggatggcagcggttatttattcctggatgaaatattaagaagtatttgttttgtgttagtgcctaacacccagttgaactagattcactacattcctactt

SEQ ID NO: 59711 - DNA, 1212 bp, Homo sapiens
caggaaccccaacaatcgtccattaggtaattggtgatatttcttgaaagattttggtttttgctgagttttgttcattttcaggtcaatgagtctgttagcttcagctacctctgtaacacacatttatacatgcatatttgcagttcacacactggcacacacactctgatttgtaaacacgcttcagactaaaaaattcctcattttacaatgatcttagttaccttggtcatggttaactggttattatcaaaacaggcctataggctatgatcagccctcagttaacctgggaagtgccagttctagcagagaggcaaagagggaattaaccttgacccattgaggcatgatggagaacagccagtccttgggcttcgtgataagaaaggtctttttaatgacggaaagcaaaataccacagcaattacccggggtcaggtatggaaagtactcatgagactccacaaagtatatttacctaaggctttaataaagacaggatacagtacagcaggggaaagaaaacaaggcaaacgttcaagaggtctgggatattccaggtcctctgtcatctgacagaatgctctttgtctttggatcatgatccatctagatacatgtgagtgagatcacttggcctagacaaataggtcagtggaacaggatagagtccagaaagggacccacgtttatatggtcactttatttttgaccaaagggcaacggcaactccgtggagaaagaacaggcttttcaacaaatggtgctggaacaattgggtacacacatgtgaaaaaatgatcttcgatccatacctcataccacatgcaaaaatgaatacaaagcagatcatagacttaaatgtaaaacctcaaattataaaacttctagaagaaacaccagacaaaatatttgtgactagaatctgcattttaacaagatccctaggttattcttatgcacattaaaatttgaaaaggactgcctggcactataaggtgtgttagttttgcaggtgaaaactggggatggaggaggaacagttgcctaagcaggaggccagcatgtgcagggacatagaggtatgatgagttagggcagggatttcattgagcaagttcatgcaaaaggttttaccagtgtgcagtgaaatttttaaaaaaggggatggggcaatgcaatgagcattttatttctagaattaaa

SEQ ID NO: 59712 - DNA, 1455 bp, Homo sapiens
agaatcattctgctattttccttttttttaaattgtaaaatatatataacataaagtgtatcattttaactatttgtaagtgttcaattcattgtcattaggtatagtcacagtcttgtgcaaccatcaccactgtccatttccagaattttttcatcatcccaagcggaaattctgtatccattacacaatcactccttgttccccttcccccaggatctgctgcatttttaagatgactatcctggaagacaacagttaatccatctcagattcagaacagtagcagccaggggcatcctctgaatcactgctctttccatttactgtttcattgtttctactgagcatttttcacatgcctgccactgtaactggctggaggaatatggtggtgagtaggatgacacagaccatgccctcccactgtgtatagagccaagaacaatatttaaatctatattattcctctaatgatatcatcccgatttctcctacagggtggtattgatgaacactctcatattgttgaattgcttaggctgccagttcaagggtggtactcatgtttctcttgcctgtgagggactctggctgtgttgcagatggcatggctgatgctaataactagggccctgtccagcctccatgatcttctggtgcattgctgttcctgctacttccttgtgggttcttcctcaccactgcttggacaatattcgtttttctctttaatttccctttcttttttctttttttccctgtatttatatgaccttttaaaagcacttcctgtatgctaaatactgtatgtgataaaaatgaaagtattgtaggtactctaaaaaaacaaaaatgtttgaatctttattcaaataaggaattattgattattcagggaatttcttgtgtcataggaagaaggacttgctaactaacattgattaatgtgatgtgtcctaacataggcctgtgcaaggtacagtgggattctggagcttagttttgcctgaggaattgccaaggcttcatagggaaagtggatatgtgtgtatctctggggagagacagagggagtcagggaagtataaaacccacaactatgcaaggacaggaagcagtgcttaagcattagtcagtaagagttaaattactaaaaaaacaaaagccaagtctgcaatacaagggcactatctgcagacacaaaatagtgctatttgtaagaaaactactccgaattaagaccttgtggctcatcttttccttccccctctcgagggtcttactactgactgcttaagacaaccatttccaggtatattgtttgtaattctcacctggtatatgggtccaattaacctcatgttgagacttcattttatagattttaaaaacactgaaaatgttgtcacttgactgtaattttaaaaattctaaattgtgaaggctttcaca

SEQ ID NO: 59713 - DNA, 1294 bp, Homo sapiens
ctaaatagttaatgttagtagagtaaataaaatgttggatttagatgtaaaatactttttagtgctagaaaattgaagtcctaaatataggtatgcttaataaaataaaacgtgttgagtactgcaaatctaataaatattattctattataagcagggctgaatgaaatagtgtccatgaattaaatttttgctttgtcgggctgtattgctcattggaggctctattgaagaccctcttattgtgaaatcttgacattcaacttcaccaggataccgttagcacctgaagtttttatttgcagaagtcaccgttgttatttagttttaaagtttgaaccagaacatctcatgaggaagattagtgtctcctgccaaataatgcccttagcattgtgaagcagtgtgattgaaatccgcagcttaaccttcaatgaaacttgtgtttatttgagcaaagttcaactggtcagcaaaggacagaaaatacattagtcataaaatgaaagaattattggtgtacgtaacagaaattagaaaactttcctcccaaatcgaaatattttgagattgcctcctcttaagtacatgatttttaaataaacaagggcaattttaaaaataccaattttgagatagaagtattagaaatgcaaatagtcactttccctctaatccatttaattattgactctgctgagatttttatgctgatctcttgggtcccctttgtctagggctatgtctcctgtgctttcctctcttcaaattatatggccattaatttaatcgcccatactagagcttctctttgttttgattttcactgaattttaagctgaatgtttgtcttaagttacaaagacttcattttaccaaacactcagtgttatgaaagtgtttacttttattttctttctttattattttaccaaatatccagaattcaaggaaataaagggtctaattttaaaggtgagactctgacaggccagtcagatctaaagtcttgatactaatataagataataagaggtcacattactcatagacctgcacagtttagttttttttatcttatttgtgcatttcattgcttcctaaattttttctagtatatttcttttgactgtcattagtccgagacagaaaaggtagatgagaaatcttattcaggtaacatggaagatgagtcctgtactatttaccaaaaaactgtaatcatttttttccctagattttaataaaaatgttggggaaaatataggaagctagaatataacatcaacaaaac

SEQ ID NO: 59714 - DNA, 3308 bp, Homo sapiens
tagatcttaatccctctagtgcttccctttctaaatatgagtgcatacatgcacatgcacacacatacatacacatttgtatttctctctgtttcttacacaaaggtagtatagcttataaactctcatatgcgttggctgccccctccacacacacttgataatatatcctggtgtctgtgtataaagatctccatttttaccccagctgcataatattctattgtgtggatgtagcatagttaattcagtaagtcccttattgatagacgtttgggttattttcaaactttagctattaaaataacatggagtgactagccttgggcatgtgtcattctgtatttttgcctgtgtgtctctgggtggatctttagaaatagggttgctaggctttgtcaaccagagaagcttgttagagactccatgcctagggcttttactggtcacgtaggcagatctacctgggacattccaaaattccagattcccagaaggaaagcaggtattcagtgtaagccacattatttgaacagttaaggcacagtgagccactcttatcagttaatggtgggaaccttcccaaaatccaaattcccagacactatgccaacttcgtaagccgactttcagaggatcacagtcagagctgctgtgttaactcttttttcacagcaccattttgatttcttcttgaactatctattaatagttccattcaaattttgcccatttttctattaggtttgggatccttttcttcttgattgctctttttatattagagatttgggccctttgtgacataaattgcaaatatttttttccagtttatcttttggctttgctcataatatttgttgtgtttttgagtcatagcttttcccactccaaggttacaaagaaactttcctatctaaagcttatgttttcattttctacatttagatccctaattcatttggaatctgtcccagtatacattgtgaaatacagattctattttctttttccaaatggctatccagtttgtgccaacatcatttttttaaattcatcttttccttattcatttgaaaagctaccttcatcagacatttactaaatttcattgtgcttttgggtttatttctcgactttgtattctgttctgttagtctatttatgcaccaatactacacttttaattaaagaaactttataacattttttaatatctggtagggctaacctccctatcacataccatattgttcttattttcagagtattcttggctctttttgcttatttatttttccatatgaacacttctggctatagaaaacaacatgtgttgatattttttaaatatatagatttattttattaatttaggagcaagaagtgacatctttaagttttaagtcttactgtccaataatacagtatgtccttcatttagttaagttcacttttgtgtctttcagcactgtcttcacattttcctcagatgggatttgcgtatttcttgttacatttatgccctgttttttcattgtaaattccctcatttaattttgagaaacaatccttaatgctttcatgacagatttgatgttgaaacccggcatgtgtttatcggtgaccactcaggccaagtaacaatcctcaaactggagcaagaaaactgcaccctggtcacaacattcagaggacacacaggtaggattaacagtaaaatcgtcatgtgctgatagcacagtgagatatcgcctgctgcatctcctgatgttcagatatgttttgaaagtggcaaagtacaatccatgcttgtgcaaagatacacatgatatgcttaactcatttcaaaatggttcagtaagatataacatcaaacgtttttctgtataatccaaacaaaagagaaaccaatctattttgaaaatgttgataatttggttctctgtcatactgcaccagagaaagccagtgttggcatacattaatgaggcattgtttgagaccatgtggcctcggacggctcaaaccccagaaggccaaaaagacagctgcctcggtctgaccttgcccttcctggagttagaagatggtgtacaagaaagattcccacttccaagtcacatgaaaagacagatatactcttcatgagtagctagactttgtgaaaaaggtcaagttcctctccaactttccttccttcatatccttttcaggttaaaacctaaggtcccctttatgtttttgctttgctcagggtcacttaagcaaggtaatataaaatattcatgcttagcctttgaaagacttgatagatgataatgattaattttttactagtagttttaacgtgtactattgactctagaacttatcgaccctagaaaatgagtcatcgccagttttcatggttcttaaagggcttttccgttttctaccagctacaaacccatgattttgtgtaaaacaggagaatactgagtttagatgtcatataagaaaaaaagtaggggaaagaggatgtaaaattggatagtacctggttcataaggggcttcctaaagggaaaaaatggaatgctagaataagaaacatatagtaaggaaaaaattgaatccaaggaagaagattcataaaagatcatcttaattatttatgcctttgggaggaagaacacatggaaatatcccctatggataggaccctggtcttccctgactgaatttcttttttagccgcttacaccctcacctacactttggccaagactgggcctggggttctgggggggacccagaactgtcccacctcagaagtcttaaacttctgtgcgtcactgcagacttcagcctcctcatcctccaattccctacacctttcttcattccacttactgtttccccttgtggcgcattctagcccgcggtccttccattttcccagcgtctcttcccctgcatcacctttcctcccagtggtgcatcgcttcacccacggcttctcagcgttctcagttctgtgaatgtaaatgttctgccttcttggcaagcctgtctgattcagactaactctccaccttttcttcttgtgcagccagctgctgggtctacagtagtcacgctgccttgaggcttagaccatcattaccattgcacactcacgatttcctgtgcagactcatgaagttgcctaataatccctctccctgtcctcagttcactccttctcccaggcccctaaacagagaccttcaccatccttcccaagcccccatcgccatctcattccttgcctcttccttcaaaagc

SEQ ID NO: 59715 - DNA, 2035 bp, Homo sapiens
accacatatttcttgcccactgtatatccccctcaccccaacaaacaaactttttctctccccacttctcctcttctcagtgcaggagagctgccttcctccagcccattcttctcttctcagtgcaggagagcagtcttcctccagcccattcttctcttctcagtgcaggagagctgctttcctctggccccagtctatttgcagggtctccacgccaaaatggattgccttgatctctcttttgactaactcattcttctcaatttattaatatgcttatgttttttgcctctggtagaaaaacaaagcaacaccctctcaatcccatgtcttatagcaagttccttcttattctcttaatagcaatgcttctttttaaaaaattgtggtaaaatgtataaaacataaagtttaccattttaaccatttttaaatgtgctgttcaatgacattaactacattcacactgttgtgcagtcatcaccatccatcacagaaccttttccatcttgtgaaactgaaactctgttcccttggacattaactccccatcctccccctcggccccccagtccctggaaactgttactctgctttctgtttctatgaatttgactagtctaggtgactcataggagtggaatcatgcagtatttgtccttttgtgactggcttatttcactcagcataatgccctcaaggttcatccaagttgtagcaaacaatcgtgtttcttaaaagaatataattttcccagctgcttcatatttttcacttccaatttgccttccagctccctgcaatctggtttgtcgttattacgccactgaaactgctgtccccgaggtgaccagtggcctgctgggacacgttgtaaaccttgtcgtacttaacttttcagcagcattttacattgtggccattccttctggctgtaacggccttcctttggcttttcttctatgacgctgctggctttctcaggctccactgtggtctgcggtttcccaggatcttccctggatccccttctctttacgctctgtgctgtcccttgtcatctcagccattcctcccagtcccagagtaaaattgtcattgtcctcaaattcttcacaacccagtgagagagacaaaagctaaagcacagttctagtgcatcgtggcaagggctggtggggagcaagcaccttgcgcttctgggaacacagaagggcagcccactccaaggaagtggaggcagttagtgacggcctcctcaggagtctgcctgacctcagctctttggggatgtgtaagtattgagttcatggaaaacaactgagaagagtatctcaggcagagaaaaccagcgtgttcaaggcaaggagatgtgtgagagcatggctctctagagaactgccagtcactcttttttggcaggaacactgggtatgagggaaggagaggggaggtcaaggtggaggggcagccagaaagcaagagtcacttcccatcactgagaccatgctgggcatatccagtggtcactgagagaccattaaagagtttgaagcaaagaaggtaacctgattggattttaaaaggttgtctggcagtagagagtggaattggaaagctagtagggaactgtcccttgagatgggactgtgacagtgggaaaacaaggaatggatggattcaaggtaggattcagaggtgcattccgcaggcctggtgatggacctgatggttcccaggtttgctttaggcagaggtggctttcagcctgacttcttgactctaaagtaatcaggcactcacccactcactgtatggtggctgataggagctctgtgagttttgtattgttgcctccaggtcagaaaagagacagtagcaccttctaagcactcttgtcagccacatatggttcaaaggtcccgtgttttgcaggcttgttctgatacgaaatatgaccttggcattgtgtcttatctttcttaaagagtttaaagcattttcactttatttttatcaagaaatatatttg

SEQ ID NO: 59716 - DNA, 903 bp, Homo sapiens
aagtgagagaaagcattttaccaatacattcttattttttctcctttaaaataatattgaatttttcctggtacgaagacagatatttattaacttgattggaaaacacagaaattaagatcatgttgaacactgagttatctagatgatccctgagatttgaatgttcatgtcaaccgtgttgagcgctcaccagccaccaggctttaggcactggcagtgcaaggtgtctgaggcccattctcaggctgggcagaggtcacacagtgagtaaatgggtcttttcagtgcaatgtggttatgatagaggcatgccagggtgccactaacccagcaggtgtggcaggaggggcttcacagaggaaagggactttgagctcagtgttaaaggatgaggagtgagtcataagggggaaaaatggaaatgactttccaggcttcagaaacagcataaacaaacaaaggcctgagagctggagtcagtgtggtgtgtccagggatcacaagtgggctggagctgccggagaacagccaagtggctcagctgccatcccagaattgagctcgtcactatcagatgctgctgctccctggcctcagaggaaagcagcacacagctcaccacgaggggtttccccagaggctcctcctgcagccaatgctactattagtttatattataatagtatcagtttctttttctttggaaatccctagaactgttaactgaaggtgactcagggtaactaattctggatctttgggtgcacagcctctcactggagtctgagaggaggaggtggagactatcagtgcacggcccgcaaccaggaaggactcccagactaacgccaaaggtgtgttgggctcagctgctccactgtggaaaaggaaagccctggc

SEQ ID NO: 59717 - DNA, 671 bp, Homo sapiens
ctcagaagagagatctgggctggaagggggcccttgggagccaggcacatgatggcattggggcaaggatgagatcccaacagagagtgtgggaggagaaaggagggcacaggattggtctgggagggatgccaacatttaaagtccccgcagacacgctgcagctggctaaggaggttgagaaggagccaacctccgagggtggaatcacaggtggcttggaggccatcgcgctatgggagcacggacagctgtgcccagtgctgcccatggatgtggtagaggtgcgctctccagaaccaggaatatcagggtcataggtgacctcagcatgagagtggccaaaggtcagggagataagccgactggagtgagctgcaggatgcccgggactcggggaccatgagaggctggtggaggaagtgctgtgcaggcttttctccagggcctagccaggtgactgatgtcaccccctgctgtcacagccgcagtatgggggtcctgtgtgcttcactgagatgtatgaaagaacctgctgtactgcagggagaacccgagtatgggcacttgggcctcagctcattaaaaggacaaaggtgcttatttgggattgtgtttctaaaactcctcaaatgaatgtttgttaccagcacacctttaaaacactcacc

SEQ ID NO: 59718 - DNA, 1670 bp, Homo sapiens
tttgcatggatatgtcagggtttcctgctgctgatctttttttttttttggtcaaaagtttgctcttcagacagtatctcaggcacatcataaataagatgacaacttctgctgtgacccttagtccttgctcatgacacttttcaatctctgccttgtatcatggttatcactggacacagccacctccccagcaggcttagaactccatgagtaagggaccctgtctaatgtgccgtttctccttatggtattacacacagtcataggcatggtagtcgactaatggatcttggctgtttaaacctttttctctgtacccagtacctaagtccaaacttgcattcttagcatccaatgaatgcaacggcatcctctctgagcatcagtggacatacgtgacttatcactaacccaaggcagagggcacctaagtattgaacctacagacgaggatctgagcaagagccacaactcctttgacaaagcagagaagttccgtgccctgcctgagtttccccattaatcaagctataaaactcaaagctgtagtcgaatttatttctactcatcttaaaacatattgttttctcacctgagacaaatgagacaaagcaactccacattttcatgactcagaaagtctagtcaggttgaacaccatattcagcttaagcctggcccaactgaatattcctctgccttcaaaggataggaaaaatgttgtctgtacagagctattctcttttaaaatgtctgtgaaggccctcacccagccagagcgaacaaggctgctgagtcatatctgagtcagccaggagcctgtaccaatgactgcaaactgagtctagacacctaatccttccattttgaggccttgtctgccaccaccctaaaactccctcctaccagaaagcgctgtgtaacatgtatacaaaatccaggttaaaacagcaacaaaactcaagtgaactaaaagcaattctgctttaaacgttccacaagttatctgagcttcctggaagcgcctgagatgtctcagagtgaaaaggaggcaatagcagggaagagagaatcactgtcctagacaaatcagccacggagctggtgacatgaagcaccaagaaaagaggaaggaaatcatctgtgtccctctgaggcaaaacaggaggccacaaagcacccagaaggagaggctggcagtctgctgtggccaggagaaggaactggaaacaggtgcatgtgtgtaaaagtcccaatctgcggagccacacaatgagaaggctcaccttaggagccactgggccccactgtgatacaagcatggttactgaaattgaacaaaacaaaactcaactgggaccctttctgcagacaagccaccatctatagcggctgtgtgacccaggagtcatgaggtgacatcatggggactgatccccccatcagagcagttcccacaatgagcacggtaaacagtgcatggaggtgttttgttaagtagaaatcattctggagaaatgaggcggtatttcataaaaccactgaggtcttgggaagctaaatcaaccattctcaagaagctagaaatccacattggcctggaagagctggagagtcgaaacccgttttttatcatggtgtgtgatgttggtggagtcaatcaccca

SEQ ID NO: 59719 - DNA, 3823 bp, Homo sapiens
ctcagcctcctgagtagctggggttataagcgcccgtcaccacacccggctaatttttgtattttttagtagagatgggttttcaccatgttggccatgctggtctcgaacacctgacctcaggtgatccacccaccttggcttcccaaaatgctgggattacaggcataagccaccgcacccaggtgacattattattatcactattaataatgacagtaccgtccatgttcacacttgagctcatttggcccccaagccttcaaatcagtagggactttgagagcattttaaactacaaagaggaaactggaagatttttttccccctaaacacagacgtgagccctggaatctctgtgaaaggcttttccggtagaggcaagggcctgagtcaatgaataggggcttagctaggaggaggcattgtggggaatgagtgagaacttcccaaatacaatagagccagaaaaaaagcagtccacagggaacaggcctgaagagcccttctccaggggcaggaagctgacaggcttttctctgtgatacccagtcagaggggacattagcctctgggctccacactgatccgtattagagacgaatgtttgctgaggctggctcctctgggttgaacctcttcctcaaactccagactgggagtgctgccaagcgggcagtaccagcctggcctgcaggacatgtccccgccctctgtcctctgccttggatcttgccttccatacaagaattccatcctggtccgatctgttgttaataagacttgtcttttatgtactctgccccttattggggaagcattttattttcactctagaaatcagtctctagatatcagtctctatttttcacacacacacacacacacacacacacacacacacacacacacacacacgactttcccaaggtcaccagaaggtaggtgatcttcttcaacacccagcctcggtgccaaagggcagtccccagacaagctgcatcagcatcatctggaaacctgttggaaatgccctgcctactgactcagaagtgattgcttggcaacctgtggtttcatgtgccttgccagtgattttgactcaagctgagaggacatttgtacttactgtttcctgaagctgaggtgacagggatggggaggaggaagctggcaggtatctgtgtctccccacaccctcaatttacccaaatatgaaatttgcttaggacccatccacacttgcccagggtttaggagtctgtttaaaactgccccagggaattattaggttcagcaaagtttaggaaacagtgattagatcctcctgccttaggagcccaatatagggaggctttataaaaatccttgtgccaagagaaacgttgtaaactctaactccgcgctctcacactgaagtcaaaacaaggttgttgtttttctctcctattcactaaatccacaacagcaggaaaacccatctaactttgccaactgccttcccctcccctcccttcccccaccaatctgtggtggattgggccccttggcctcacttctaccttccctcaaggtggggaaatcagagcgaaagagtcctgggagaaatttttacagtctgctttccttggggcccacccctggttggaaactgacttaagctttcatgctgtgtaatgtggaaagatccagcaattaatggtcattgccagaggacacccctttgaaagaaagaggctgccactgtattcccctaaaaactgtgggacagggctcacgactacactccccaccattctctgcagcaggggctcctgagacagagctgaaccttctccaaaacgatgtggggtgaagagcagggagttgcaactcctacctcccctaggagtgctggccaggttgccgtgggaactgataaagccccagtgcagggagaagcctctcagaggtgagaatcacctggggcatttggatgaaatgccagtccaggcccctgtgcagatccactaaatcagaatctgtagggatggggcctgaaaactgggtacttttaattctcgcccagtgattctgatgtgcagacagggttgagaaccagcggttagcctaatcaattctaagagaaaacctccatctctcctccgtcacaggaacctgtcacctcttaaaaccacaatgaggtggagagccaactagggcacactgagcgtggtcacggggcgacgaaaccaccacgcaccgttccccagaagcacacactggctggaaagttccagctggagccaaaggtcgcagtccaggtgctgcatctttttaaaggaaacacacccaaaggcactaggacagagccttagctagcgatttagatccagccctatctgacgccgccagcagcaccacgaagacacttccacgagcacacccagcggggcgccgaggtgccgcccaagaggctccttggcgccggggccgcctgacgtcagtgggacggccctgggcttgggcgcgccacagccccgcccctcgggcgccagtctcggtcgcgggcattgagcggctggagtctggcgactgccccacgcccagccgtgggtcgctagacggcgggcgcacccgtcgttctggacacgcttagtcggcccagcgagagggcgaaggagccgcgggcgcgtccccgccaaccctgctcgcccgcgccgaggcgggccacgtgacagcccggggccccgcgccccgccgcgccgccttacttggtgtactcgcgcagccccttggcgaaccacacgacgctgcggtacagggacatgccgggagcgccccacgcctagccccaccgcgctcccggcgcggcctccgccctggtcccgccccccgggagtcgcccgccctgacatcatcccggttatgtaagagccgcggcttccggttccttgctccaccggtaaggcaaggggtctcggggccggccggtcgactccgccccagcctcagagggtggagtgagggcggaccggccctggtgggggccgcagtcgaggtccgcagtctcctcggggtcgaaatcgggcatcagcgccgtttagagaacaccgtcctgctgggcatggccgggatgcgaagatggccctgcaacgcacctcctagaatttggttacctagaaaaccatgtggaataaaacgacgaggcttatgatatttaaaagacttctgcatcgaattggtgttatcataagggttattttaataactggcattctctaagtttctacacgtgttgggggatgcagtgccgtgccacatttcccgtctccagcaagcgcagtcagattggcgacatcgcaggcaagaggcagggctggggctcccacccgagaagtaattgtctccaaagttggacttttgccactggttctgcgacttcatgcaatgccagggagagccccttgatttcccccaaatcctcatcagcctctttccacccaagcccagatgaacagtgtgagtaaaaaagagtgtggttgctgcgtgaacccagatctcagactagtcatccagccccattatgtaggactcagacacccctgtccacatctaacctccagccctaacgccacattagaaatgggggtcttactgctgctgtcactcctagtcaccctgttaaattctataccggtttacccaagtcgcccagagactgggccccacttacataagctgaagagaccagctgctttaatagcctcattacctaggatataggatcactgtccaacctcactccacagtgggcaagtttttacttcagaataacttttga

SEQ ID NO: 59720 - DNA, 956 bp, Homo sapiens
agacctagctactgatgtatccaaagcactaaccagtacctgccatctgctaacagaaatcttcatgcccatggttgttcacagctctttccgcctttgccaaggccctcgcaacagaagcctcagaggctttcatgtgggagtcatgcaggtgtccctgggcccaggtctttgctgctcacagatgtccaagcattggctaagtgactgggaatggctgacgagtcatggactggggaaaggagggtgggagaggagcccatggaactcctgtccaccccagtatcatagcccacagactctccccagtccccaacacagagagggcaacgtgggacacagtgaggatggaattgggcatcataggtgaggtaggatctgcaaactgcacacccgctggtcttctgccatggctcaagtgaaaatgaaaacagaaactgcccttagggacaggggcaaaaaaagggctgttcttcctttgtccagcagatggcacaccaagcactttcttctcacctgggaggaaagggggactaacggtgactgcccggggagtgcttctaaactgaaatgggaagaccccatgggactcacggggcctttctcttaaagctacggagaagaatgagcctcttggtttgagctgacacttctgatgaagggaggtgcctccattcatggccactcagggattggtttgatgagaaagcacgaaaacataacaaagttaaaaaataaacacagctcagcagtgtgtaaatatacagaaatgctatgcacgtggctgagagaagcacggttaagcaggtgccacgcacccctgggcactgccctagaaacactcatgacagtatcttcatacaaaattctaaaacatgggactttttgctcataaagaggctccccagcgagcactgacaacagacctggacttcatctctcaacagcggcagcca

SEQ ID NO: 59721 - DNA, 995 bp, Homo sapiens
ttcacaggctgcccagggttgccggactcacctgagctaagcagagtgggatccagaatcgggcagcactcagcacctctgtggtcccgaagtccagggctgcctctgtggggctcctcttgacttggggctcccactccctgtcgcacgctttctttctccctttctctcctgcagcacaacagcaactcgtggcttttcctctaaggggcgggttctctccatttcccactcccacgtgtggggagagcagccccaccgccggctcatacccctgcagtgttccccaggcccgcaggggggcagcagagcgaccctgggagctgtggaaacatggccgaccccttggagttaggaattcccgcgggaaacatttcatttcagtcccttaggcactaaacctagggacttagttctggtgcgagccccttctcaccccttgccctccctgcatgttggtggcacacgagaaagggtggaccgaacagcggctgcttaggaaagagtgtgaaggtactcaaagtgggctgaggtaatgagaggtgccctatggacttcaggactgccacgtagaaaagggattaaattgattccgagtcattgcagacggccagatctgagatagaatgaagttacaagaaggctgaattgtgccccatgtcataaactttgtaacagtggccttcttagacctgaagcaggctgctttgtgaggctgttgtgtgtctgtattgtaagcaagcacctagcagtagaagttctcagctgctgatttataagaagtgccagagattctttattgaaatgcagattcctgtaccacctcccaaagattctcaatctgtaggtctgggcctgggcccaggaatctgcagtttagactctgctaagtctcctgtaggtgctccatggaccacacttagagaaactggcgtcacatgacttaaaggcattctccaaccctgacattccaggttttttgttgtcatttcggt

SEQ ID NO: 59722 - DNA, 618 bp, Homo sapiens
acaatttttcaattcggacagggcttggcagggaaagcttgtctcttctccacatagcaccactgggggtggcctgaatggggctggcagttccacttccaagaagatagttcattcatcacatggctgccaagtggatgcttgctgccggctaggggctcagatgaggctgttggcagggacccggttctcttccatgtggcttctctttatgactaggtggggacctcacagctgggggcttctgggtactgagagggagtgtcacaatagcaagcactcctctagaacacatttcaaagtgcaagctcttatcaaacctctgcttgcatcacacttgctaacacccattggccaaaaccagtcacacggccaagcacagtcaatatgggcaggaattacacggagcttgaatacaagggtgtgtagttcactgagagggctacaattctgtcatggtgctaggactacctgtgtgaaacaagagaatatcatacaaatggatgcttgtataggcatggattatctctgggacagtgcaaaagctagtacagaatttgaggaagattaggcagctgaaggggaccaggtggctgggatacagagaattactttcac

SEQ ID NO: 59723 - DNA, 748 bp, Homo sapiens
accactgcttgtggacagacagcagggtcacatgttggtcactcagagttgccaggaaggactgctcggggctctggggcacatcacccctggctttctctatcgctgagttcacggccacggcttccctcctcactaaagcagttcaccttcagcagactatttggttgtgttagagagaaatgctttagaagtgtcctcctaattagcaaggggaagacacccttctactcctgacccagcccaggagaggctgccagcagtcttcagcctggcagcaagctttgggaacttgggcaggctgcacagtactgcacctatttgcttttgtttatctacaaccgtcccagcacttggcaccctctcactcaacacactgtgtgcagcactgcagatctttgcacacagcccatgcacaccctcacccagtgcacactggacacccggccaaggtgtccatgagcacaacatgtaatcacttgccagagtgcagcagtttccttttggccatgtgcactcctagaaacccagtctagaggcaggagagatatgccacttccttttattaccaaactgctagcactttcttggaattgcttcagctgcctcttccacagctccaatgttggcagcgtgcagaatacttggtgagagaagtatttcctaggcaacatgacttgtattttcaagaaggtgtaagaaagttccatgtttcctgtagctttgttttcccttggaccaaaggctt

SEQ ID NO: 59724 - DNA, 1116 bp, Homo sapiens
gcctatgaatagctaataaggaaaatatgttgggatcatatgtcccacatgcttttaaataatctattctgttagctccatgaaattgaaatacttcaccattcaaaccatttctagatggtggctcagacccagaagacagccagaaaagggggctggggccaggttagaaagggcagagtctagactttgtcctgtgggtggtgtagaatcaccaggagtttctgaggagagaactcacagaatcatatttgtgatctggaaacagtttgggcagaaacaagaatgaagacccaggagaggagggattacaaggggcagaaaatttaatagtagaatacgattaaacaaacgaggaggcctcccaactcagtgactgctggatcacagcaggtgacaaaaagtgggggcctgaggatgacaatgccatttccagtttcgcagattgagcacatggtgatgagtacaccaagatgagcggggagggtgggaagaaggcaagtctggggtaaacacagtggcttctcctttgctcccatagaatctaagagacgtgtggaacagccaaggcatgggccaccttcctaggctacagtattaagtccaaactcctctttctagcaccttcccctttcctcacacctgaccctggcttccctgctcctccccttcccggcaccatctaatccttcttatcctttaagtcctgcctctctgtggaatcctgctagcagctctctcccttatctgaattccagcatcactaatgtcaacatcagggtgccagcaggtggtcagcctgtaacactgctggaggacaagtcttctctgtccaccgaggctgcagtcagctcagtccacacttgttactgatgcctatgggcatgtgctcactttgggaaacgtggtcagatcctggaacacaaggatctcatatcttagctgcccacagacctaacatggtgatgaacaatatcagacattaaataagtatatttaagcagttaaatatttacatatttacatttgaataagtatatttaaccatatttaaataaatgagttcaattatatactgctcagaatgtgctttctacctagaatttcatggtactt

SEQ ID NO: 59725 - DNA, 2186 bp, Homo sapiens
tctgagtaacttctccaggtaactaacttcatcgttttgagccattagggctctagcacagcaactcgacgctcactttatctctccagcatcagaccccttaaaagcataaagatgaattttgaggtgcggggttttccattgctcccaaacatcagttgacggcacactttttctaaagggtccttttctcccacgccaagacatccctggagctggggtctggctcggccttccctgcgcaccccctgggggcgagtaagcgccgaacgcggggaggaaaatcctcctggtgggagtgagcacgctgcgcggacgcgggggaacaaaactcactttccgactggccccttctctggctgtgatctgtctctcctgctcaggcatcgtcccgcacggacaccgaattcttctctgatctggctcagagcaaaaggtcacctggtcggtggaggagagcggggtgttaaagtcccgggagaggaggcgcagagtgtgagggcatcggcgcggctcggctctaaagcaaacaggggtccgggaaccgccccttcatttgggaccggggaagccgcagccctcttcacacggatgattcaaagttgcgcgccgccgtcctcccgacctgggggcacggggatgagagcgtgaggggagagtgggcctcggaccctcgcccactccccaggtggctgggagtgcccaccctggaactgccggccccgccggtgccacagtgttctctgccgtgccagtgccacaatgtcctctgccgtgccggcgccgcagggcggaggcctgtcctcctccgcggtctcggccacctcgcgctggtgcgctccgacactgtactgggatctcacgcgtgtgcgggagcgggagggcaggtgagctgcgcagagccgggccgcagactcagctcccagggctcacccaccgcctgcggggaaggtgcccggcggcgccgcgtcgggtccgctctgcgctgccccctcctcggactctgcgcctggctgccggacgccgtgggtcccaaaggaagcaaccgcggcaagagtgaactccgcacctggaaaatcgatccgctgtgcgcaaaggccagccaatggcctccaacgggcggcgggctttgggccgggaacgggggcgcaggcgcccaggcgggggcttctagtgggggaggtggccgagggagggagcgacggctgtcaatcacaggccacgccctcctcagcccaaccccccactgctgtcccgcccacgggggcgggagccgtgtgcgccacgccgaacactagtctacgcctcggcatattctattggctggaaggccgtgggaagcggctaccagtaaccaatagtaacgcacaattggcccgtgggggcggggcgagcacggcttgctttctcaggagccaatagggaaaaggaaagtgaagcgtttcctgagttcgggggtcggcggaagatggcggccggcgaaaggagctggtgcctgtgcaagttgttgaggtgagcagccggtcgtgtgggctcacagacgttttctcttctgtaggggtacttgcccgtccagtgtagctaaattttgcgggcaaatggccttccttgtcatgaatctaaggtaatttctcaggccaatgagcagtctttctttttcttgggggtcttctatatagactggaatagactaggtcttaaagactcaatttaccgcgttttcttctgcttcactgttggccgaggggtcgagttcccttccctgcttcagctttttttttccctttcacactccagttagtctgtcataaattattcatattcattccttatttttctttacgattgagccacgagacattttccaatctatcatgtctcttttcggtaaagaagaaaccggatcttccttctcatcttagtttctactcttaaactcaccaaaactgccattgttaacacgtcacttaaatataaagcttatgttgaatcctctgctttttgataatctgttactttaatttttatgatgtaagaagttacataaaatattattttatttgtattacgtgtatatgctgtttcttctagaaaaattagaaaatagataagtaaaaggaaaaaaccccaggaatgctaccatccggagatagccactgttaacattttggtgaaaaaactcccag

SEQ ID NO: 59726 - DNA, 1018 bp, Homo sapiens
attgaccaattcctgtgtgtgggccactgtgttgagatttttacatgtattatctaatttaagcctttctaaacccgtttgataggtgttattgttattcccattttataaataaagaaactcaggcacaggaaggtttagaaattgctcgagttcagttacacagtaagtggtagagcccggattctaacccagatagcccctgctcttaacagcaacattttctctctccatctaaccccactacatacttactggtacagattcctgggccctaccctaatcctacagaatggccaaatgagaatctctggacaaggcccaggtagatgtattttgataatgctgcttaagtgattctgttatgcatcaaaagttgagaaccactgtttgcataggggcttctcacagtaactcttttagtcttttattgattctaccctcaccattggaatggctctcctctttgtgccagattgcatcataagtcttcaacttaaatctccttgcactttagcctttcttgtttattctggcacaaactgctatctctattctgacctgttaagcacacattttgctataaaatcaagtactgctttgtgtttaatttgggtccacatatatttctcaagcgctttgtgcctcacactgttagttgttaggggaaatgaggataacataaaagtgacatttcctaaactaagacttcaatttctcttatactctttttactcctagttagtagtgtagtgctaggcccagacattaagcaagaacttgttgacccaacctgttgcatgggatctgacctcctgtgcttccttccatagaaacttactaagcattcactctgctgagcgcttgggtggatgctagggatgtggtggagacaggagctgcttggcctgtcagaggcttcccaccctctggtggtaccaacaggctacacaggcaagtgccgtgccgtgctgtgccgtgtgccaggtgctatgctaaggaagtgcagggtgatgtg

SEQ ID NO: 59727 - DNA, 2222 bp, Homo sapiens
taaaaatttcctttttatattggattaaaagccagctgaatatcccactgaaaattaacagaaatttgaacttaactttaccttttcaaaattgatctcttttatgacacagtgcttgctatctgatttccctttagctaagtatgctttcccgaaggcaccttgcccgatggccttaatcacatcgtacttatccatggtctccaatgggctgagtttcctggaattagagtaatgtaaatttatcacacacgtctcataaagactaacaaagtcagaaaactgatgactaaagtgtaaaagaactcacttagctaaaactttcctcccagccttgccaagacagagacaaataactttctttgtggccacagataactgaaatgagacagagtttcttggtcagacacgggtcatagctcagctttgatacacttttgccctgtattctcgggtaagtcacttaacctggcaaaacctcactttcctaatttctaaaatggaataacaatacctgttttgcaagtttgttctgagaatgaaagatactatatccggtgtttcgcacctttataaagcaggaatgtccttaggcttgtgcacttttatagttcagcctttcttagtggggacgtactgccccctagggggaattctggaaatatatgggggtggggaagctgtttccccaagattcagaggcatgaggtttacaggtggttggggcctgagatggtaggattctgcgattcgagagacagtcccgcacaataaaggattaccccgcggccctacaatcttggagagtcttcctatacattcctgtgcgtggaaaaatccgtttgtggctagaaccaaactctattttacatcgaaatgctaagtatttttgcagttttaatgaacacttcttttttttttcgaggaatgcaactacatgtaaatcaaggcttgattgcacttcggtttggaggtttaccaagaattgttcaccatttgggaaaaccacgcgcttcactggccacgctgctcctggtcccggagacccaacaatctgcatttgctgccgtcacgttcaggcgactccccaggcgcggctactggctacttctctacattttccaagggtagtagtgccaagcattttcagattgaaatatgtactttcttacttattgctttccttctatttcctctttatgctacagttagggcataatacagttttgttgttgttgttaatggggtgagcagggggcttgttttcgaataattttacgtcagggtgggaagtcggtactgggttgcagggggctgggaaccagctccgcagccaggagaggctgcagacaccggaggatcgggttctgagagagacgcatacggacttggggccgggggtgactcgccgggaactgagggcccgcgaccctcccgcccaagtggcaccaaagggtggaagcccccaaattaggaaaattccttctcccctagggccgcccctggaagcggccgcgggtgagtggcaagacgcttacccgtacccgacctccgcgtgtggagcgttgccatagagaccgacgcgccctggacgctacacccacacagcccaggacgctaggccttttctgggccgcccccgccgccccaggccgaaactccatccctttcccccaccctgccgagctcccgaagccctgtggcggctccgggcaagaactaagggcggcccctgcaagcgtacctgctccgccggctccgcggggccaacgaagcgtcccggaaggatccgggttcccggggccgctgcgcctccctgcggccggggcggagccgcgcaaggaaacgcgggcggggcgcgggtctggaatggcctggggaccagtccacctcgaggcagggtcaggcgccagggagtttggagacccggcagagtcaccccgcaaccgtcccgttgccttgggtcgggattcctttgctttgcagtctacagtagcgctccccgctcttgcttaaggtgcaccagacgcttcgcaaacgttctctcttttctttacaacccgtcaaggcagtagtctcccagttttacaaatgagctaaactgatacaggaagagtgtttcttgtacaaggtctcaaatattgccaaaaggtggacgtgagactggaacggcttcctactctttgggccacagcggcggcctgccaagggactttctaacg

SEQ ID NO: 59728 - DNA, 1946 bp, Homo sapiens
aagaaacaagtcctttactactattctaacacctggtattacacggtttaacatggaagccaagtttccccatgatcttattcttcgtttcttcggggctttattctatgcaatggagagtaactgaaaattaagagcaaccagacttcttagctgaaaaccacatttgatattttctgcccacatttgcctgttactcaatattacacccatatgatcattacaagacctgaatacactctggacatggcaaaagtatatcggccccttcgcatgcctgcaacaatacttttaaaaacctaataaagtgatttgcaaatacccagaagtgggatcaccagtgagatacgggctaagttcagaaaggtccctgaaaccacctttacagatgtataagtaatgcgagaaatctaacatgactgactccatcttgcttctaacctcacgggctaagttttcaccgtgttgtcgttttcttattctagcacagaggctaggataactgggagagggatttcgtgtaaacttcaagacaagggaaactgaccccaccccttcctgggaaccaacgaagccgccccgagtttcagaagctcttgtgatttcatccccagccggtcaactgtttcagttccccagccccccgaagccaaaatgccctttaaaaccctcgcccccgaattctcggggagacaggtctgagaccctgttctggtttggccagccctgcgcttattaacttctttttttgctgcaacagcggttctcactggttctttccgggcagcgagcgagaagaatccgttgagccggggccggcgcccgcggggcaactgcaccgcgggggagcccagtcgccccgctcacccgtgagggccctttctcctggaaaagccgctccgccctgctgacccccacggcaccgcgcgcccagaccccaaggcggcgagggacttgcgggtttgcggcgagtggtccagaccgcggggcggaagtgaggggcgcggccgcgcgtccggggcgcgtctacccctcgctcccactcggctccgcgccgcgaccacgcgccgccctcctcgttctagaggcagcccgccagggcggggaccactcacccgcttccccggcgaccctagtccactccttggcctggcaaccggcggcttccgcggggcgggcccggcgggtcgtctctcgggttgcgggtgaaggaagccgcctgggtctggcgggaggcactgttcttggagtagccgggcctacgaagagcacgttttaaagctgttgttccacgttgcggtggaacagtgctgttaacattgagggaaattgtccccgactaactgagttctgtctgcaggttaagtgaaagcctatgtagataaatttcacgggcacagcactcagtgctagctagaacttactagctatgtgaccttgggcaattgtggaaggcgggataatgcttccgcctcaggatgtccacatcctactccctggaacctgtgcgtttgttctcttgcttggcagagggggttaagattgcagatggaattaaggttgcttatcagcggactttaaaataaggtgacgatcttggagtgtgtgcttgggtaattacaaagtaattacaagggttctctaaagtggaaggggcccaaaaagaaggtcagtatgagaaagctatttgaaggtggaggaaggggcaacagccaaggaatgcagctggcctcaagaagctggaagaggagcaggcacagtgtctcatgtttgcaatcccagtgctttggaaggcagaggcaggagaggaacactttagcccaggagttcgagatcagcctgggcaacatagtgagacactcgtctctacgaaaaattaactagacatagcgacgggcactgtggtcccagctgctcgggggattggggcaggaggatcactagag

SEQ ID NO: 59729 - DNA, 1700 bp, Homo sapiens
tcgaccccgggaagtcggaggataactgaatgtacagcacggggcacggggatgcccgaggacctgcggggccaagagcgctgaactgcggtacctgaccgttccatgccgagcagcgagtagcaaaattgcagccgctgatgtctccgggcttccacaggacaaagggtggcaggaaagggtgctaagaggtagaaacaccgagactctaccaacaccgcggaaacacaaagccaaccaggagcgcaactgtaacagtgcgtccccatgccaaacacatcccccgcgctctcctccgtttccggtctggcttgttcccctccctttgctttccggtgggcaacaggggtgggtaactgtgttccggactcgcccgcgggccgggcggagccagctacctccaggcgaccctacccaccccgcgattctattcctggagactgagtcctcgccagtgttcagcaaggttcgctggcctaggaggatcctaaaccgccgagaccgccgaacgagatagtggagggcgtgatcagttgtgcaaaaactacagacgcagtccgtttttaagttgtttttttctgagacggagtctccctctgtcgcccaggctggagcgcagtggtgcgatctcagctcactgcaacctccgcctcccgggttcaagcaattctcctgcctcagcctcctgagtagctaggattactggcgtgcgccaccacgcgcggctaattttttttttttaatttttttgtacttttagtagagacggggtttcaccatgttggccaggctggtctcgaacttctgacttcgtgatctgcctgcctaagcctcccaaagtgctgggattacaggagtgagccaccgcgtccagccgatcagtctgttctttaacagacacttactgtgcgttgtttggagggaaagggtctatagcgttcatcacgttctcaaaccaaagaggtttaaaaaaattaccataggacctgctgcccgatgaaatagcgtttcttttcagtctttattcttgatgtagagtcaaaataacacttaagtttcatttttcacaagtgattttaggccgggcgcggtggctcacgcctgtaatttcagcactttggaaggccgaggcgagtggatcacctgaggtcaagagttccagaccagcttggtcaacacggtgaaaccccgtctctactaaaaatgcaaaaattagccgggcgtggtggcgcacgcctgtaaatccagctactcagattccccgcgggcgcgcgggaggccgccagcccaggccgggggagttcggccagagccaggtgcagggaaccggctctgcgggagcgtgggtaaaagctgacgcgctctcgcgagttcccacttagggaacttaaaggagagttttaatttgtcctccctgccgttcgggggcgcgtgtgcctgtgctgcccgactagcccaggatgtagtgagccccgcggctgccgctgcccgcttagacccaatcagagggtgagtgggaggtgacaccggtcagcctttcccgcccctctgtctcctgctgccgtcgggaaggcagaagccgcgaggcaggccagtggtacatggtgctcccggcttaactgcaccctgcatggctccaagggctggccaggctttcgtgtcgcaggttcccgctaagtgcaggattcagatcttaccat

SEQ ID NO: 59730 - DNA, 1101 bp, Homo sapiens
gcttcatttatctgttcattcgagtttgctctgccctggtcccacaggttgggtgcagcgttcctgggacgccctggctcgccccatctactcagcttcccaaatgcccgcaagcccagttcacgcctggaagtctacccctcgcgtcgtcagcttaaagccctccttaatgaggaccgtctttaatttaatttaatccttgtatttcatactttttgtatatcagaaaggatttctttttggaaagaaacagtagctcaagacgcgatttttcaaggttctgtggccagtctcagtcactcggcaacatctgagccaaggcagagccaggttcacttaaattcgggactccgaagtgtggagaccaataccccttaaaagcgtcccctggggccgaggcgggtgtggggaggggccgccaccgtccacctgcgccttcaggctgcggtgaggtggcagagtccggaggcatttcccgaccccagaggagcctccaagagtctcgcggcacgggcgcgaacaccaggatgcggagggcgcttcttacctttcgagactgacgggcagcaaccccaggccgtccgggcgcgtggcgaggcggacgggaaggctcaggggcggcgaggtagagcgccaagcatcccgcgtcccagactgcacgccctgaccccgcggcgttcggctcccacagccccgcggggcccgcccccgacggcgtggggagggcgggcgccgggagggcggggggcacacgggaccgggcgtggtcggttcccgccccttctgggcagcgcatcctttcctgccggtccccagctcgccagctgctggacaggaaacaggcaggaaacgcgcggccagccaaggtcctgcgggagggggtgcggccccggcagacgcaggtcccctcaacacacacccgcatccacagcacacagccggaccaggggtttaacgaaggacgagcgagcaatctcctgacacttcacattcaatcacttctactctagtgtcattttcttcagggagaccacaaaaataagtccttgaagcggcacagcatgtgggctgtaaacttgctttcccaaatgtcactgaaga

SEQ ID NO: 59731 - DNA, 1121 bp, Homo sapiens
tctagtaatcttgtgcaaattgtataaaatttatacattatctcaataactccgtttatacaaatggagagagcttttatgtctctgggtaatgctctgagatgaaagctataactgactcatgatttcgtatcaggacacaaggaagaagacgaatggctcaatttccacactgtaataacaagaacttacatgtgtataacaactactctggagtgctttccacatcatggacatggcccatgccatatttgagtaagacagagcagatctcactcagacaggctaagccttgacaagtctggttgagaaacctcttgggaagagggtaaaagacagagttggtctgctaggcaactcgtgcatgactcagtactataattcaaaaatcactcaattcagttaatactttactaggaatctaccatgtagtcactgacctaggtcagtgagaattcaaaagaaatgttacacgacagtctttgaacttaaacccagtttctctattttcttatggtatcaagacaacatttaagagaacaagacaaaatatagttaagcatatggaaaagacagtaactcttgtagagtttagaaataatagagctgtgtattggaaacatttctgatgcaggcaggattgagcaaagtataatttagattggtgggggtgggcgtgggagaggggaggtgagtgggaagaagtaaagaaaggtttggacagacaagggaaatatccaggagcaggaaggggcacacctctgctgttcccttttcccaacaccttccacttactgacaatctcttggtctttgtgagcctagtttaccaggttcttcctttcccttccaaagccctccaccaggactaagggctcctttttctgtcttccccagcatggtacatatgccccttccatggcacatatgccccttccatggcacttacttcattccatcttcagtgaaagttgcttacatgtctgtttccccaactaggtttcccttttcttaaggacacagctgtatcttattcatctttgtatcccctcccactaccagtgcccaacaaaactgctcacacaaaattgctatgtgttcaaaaaaatgttttttttattg

SEQ ID NO: 59732 - DNA, 1324 bp, Homo sapiens
acaaaaactaaagtgggatgtctcaggcacagcattcctgtgacactggaggatacgaagcagcaatagccacttttcaggcagagataagggattgggatcccctgggtctgcagctgagggtccctggcacttcccagagggcactgcagcagcctctggcagtggccctccaccttacccactgacaatgtcttaggggtcccagagtgtgaacctgggcatccctcttcctggtcccaagggtgctcccaatacaatactttccctcccgcaggcttggccaaaaccatcaccaccctttcacttccaactcagtttcagaaagggtgtctcctgtcctgtggggtccctgagtttgagataatgcgaacatactggaggctgtagcaataacatgtgaagtcaggcagtcactttaaaacctaagcaatctacatgcagtattagccagttgttgttatctcagtaacatttcttaccgaagtagtttttccacacaacttacaacataaaggacaaagaaaaaatattgctggaatatgatagactttttaaagttcagtgttgaaactccttatggaaaagaaaaggagatattacttttccactttctatttcctgtctgtggctttgaggtaaaagaacactaaggttcctgtgaagttccctctgccattccaccagcacaacaatcccagggaattcctgagccgtctacctcctaaatttgtaatcataactctgggcatgtctatacagctctctagttcagtttcaaaatccacagcatttggaaacaaaatgacacagttgcattctttaaatgccagtcatgaaatcatcacttaaaaaaacaaagagaaactagatagaatatatataaatatatgtgtcaaataaaattatttcatttttaaaggtattttatttggtatgttgaagacatgtctatgactgcttctaaaagccctggggaggagcctcatatagcatgctgcagtatattttgtcccaacattgtcatgtgcaatcagtgaatttcagttacaccaaaataataatctaacctgtctgaacatgcaacttctctttttattctctgcaaaactaaattcccttctttataaaatgattagatttgaggatcaagttaaaatccactatattccaagttaaactctgagggttctgcactatagcatgattttaaattcatattggcattcacttttctgaattttcctatgcgtatactaaataaatttcctggaccatatttagtgagaaattaaaagagatttacattgcactgtgaagttcc

SEQ ID NO: 59733 - DNA, 1686 bp, Homo sapiens
gctaaggcagtaagtgaagttaggtccaagcaaattatttaaggaaaagacctttactcactaatacaggcaacacagcccatagaaaatgccctaagagagtcagaggacctgggtccaatgtcacctgtgcctctaaatagctgtaagcacttaccaggaaaagctgagttgaggaacttatatcaaagtacagcggaaagtgtcgttaataaaacggcaagggaagagaggtagcaaattaaaacttctggaaaccaaaaatgcttgtgggtaaatgagttttaaaatttttctaattccagtttatccatttcaatccaggacaagatatttcatagtttcagtaaagtatctacaaaatatttacttacacttcctatttctcctctcgatttgcaaacgcaccttctaagatttatgcttgcactacaaggcacggtctactattaatataacactttacaaaacacgctcagaacgcctttctaaagcaattagaaaacaaaacaaaaacccaatagcctttggcaagggcattccaatgaagcactgatacctctttaggaaatcctttcgaagcaatccctcacccctctgcccagatatgctaatccctccgactgcataaggtccaagctaaagcttccgctggggcacggactgtacggccaccgcgccctcctcacagaaaggcgaaacggggctgtccggtgccgacgccgaggttggtgtcgtcagggggtctggaaccacgccaaggaagtcgactgccggatcgccgcccggcgcccgcagacggcgagcgctccttctcccgggcactgcagctgtgcgctcccggaagcattccgggcggagggaagcggccgcgatccgcgcctgctgggaaccgtgccaaagttgggacccgcgctggggaggcagccgagcgccccacgccacgtgctaccgaccggcggggagcgcaagagcgctgcaccccgcacagaggcctgccgggccgccgagggccgtgagctaagccggggaccgggccgcgccgacccgggccgcgctgagccgggccgcgcgcccaccgggggtcccttccgccagcccgttgggaaggttggcagacgccctaccttctcctcgccatcgtagattcgcaccccgcgctgctggatcaccagggtctcgttgatctccaggaggccgctggtccaaacgaagcggtccatggccgctgccacccagccccggccctccgaggccgcgagcagcgcgccaggcagcctgcggcgccccctagcgtcggacgggacggaagcgagtcggggcgggtgagggacggagggagcggcctggcagcgagcgggcgcggctgcgaggtgcgcccggggacgtggagacgtgcgtggagcgccccctggcggtccattagccgccggcctttcagaacccttgatcagcaggcggtccaccccattctaaattcagagcttacagggacgcgagggagccccgaccacagcttggacttgcttattgtgcattatgcctgcatgtttgtggcagttttcttgtcagtgcccagaatgttgctacattcgctaatgattgtaaataatcataacccctctctttcaaatgaatatttatggcacgcattgtttctgtacagctgcagtcagtactacctgt

SEQ ID NO: 59734 - DNA, 1240 bp, Homo sapiens
gcttagaataaaggtatggaaagtagatcccaatttcagttccccttcacacgctgtgcaaacgtggacaaacaacctctgaacctgtcacctctcagtggaaaaagtggtgataacgtcccacctcagaattgatgctcaaaatgaagcagtatttgtgaaacgaaaatacacacgctcgtggtacgccagatcggtgtttacgtcctcgtcagtgaacgcgtcgatgtttaataagaagggcagccaatcaacacttttcttgtctttttctcgtctgccttcctccaaggactgtgagggtctcaagatgtgtcccatctcggttgtttgtcaacctagtcctgctatgtcgtggggactgagcaggccgactcctcccccatcgcacgtccaggatgaagagcgctgtttaggtttgaaacctgcagactcagtcccaaccgaactgggcagacaccagaccggccccggcaactgcagtccaggctccgcctccctacgcccattggcttattcaattcacgcaggaaccaatgggcggagacggcagccgcgccgtctgacggcttagccgcggtgcagactgcggcggcggtggtctgaggaagttctatcttggcgctaaagcggagacgcatcccccgacccgaggctacgatgagcacaccggccgtgccccaggacctgcagctgcccccgagtcagagggcgcagtccgcattcaaaggtgaaggccgcggtggcggtggcggtggcggtggcggtggcggtggcgggcgcgggcccggcggtcggggctcggggccgcgctggcgcgcttcacctctcccccgctctgtgagatccctgaacgcggcgtcggcctcgccctgcctcattcttggccttgtggaacggatcataaaaacaggaaccgctgcgtggtgttactgtgcggtcgctgctggctgggatgggccctcctaagaaggaatccgttaggcgaggggaaacgcgcgggcctcaggccggggtcggtgtcggagaccctgggtccgcttgggggcggggctgcacaggttcagggaccgactgcgcctgcgctgggtcctccgcctcttaggtccctagcgaatttctgcagggctggggtcgcatcatgtgttatttccaatttcacagcttctccttcgactttatggaaaccgagggttggttgggtcttcaaaactaatattgttattcccttattctacac

SEQ ID NO: 59735 - DNA, 925 bp, Homo sapiens
gtgtgggtgaagaaaccaccagacgcggtggctcacgcctctaataccagcactttgggaggccgaggcgggcggatcacgaggtcaggagtttgagaccagcctggccaacatgctgaaaccccgtctctactaaaagtacaaaaaagaaaaaaaaaatagccgggcgtggtggcgcacgcctgtaatcctagctactcaggagactgaggcaggagaactggttgaacacgggaggcggaggttgcagtgagctaagatcgcgccactgcgctccagcctgggcgacagagggagagtcagtctcagaaaaacaacaacataaaaacagactgatcatctgtagtttttgcacaactgatcacgccctccactatcttgttcggcggtctcggcggtctggaatcctcctaggccagcgaaccttactgaacactggcgaggactccgcctctaggaatagaatcgcggggtaggtggggtcgtctggaggtagctggctccgcccggcccgcgggcgagtccggaatacagttacccacctcagttgcccaccggaaagcaaagggagaggaacccgccagaccagaaacggaagagagcgcgggggatgtgtttggcgtggggcgcactgttcagttgctctcctggatggctttatgtctccgcggtgtttcctagagtctcggcgtttctacctcttcgcaccctttcctgccaccctttgtcccctggaagcccggagacatcagcggctgcaattttgctactcgctgctcggcgtggaactgtcaggtaccgcagttcagcacttttggctccgcaggtcctcgggcatccctgtgccccgtgctgtacattcagttatcctccaacttcctggtgtcgatgttattacctgctgggttttagaagctattgcttt

SEQ ID NO: 59736 - DNA, 2315 bp, Homo sapiens
gattgcaagattttgatcacagaaattccgaaagaatctacagagtattacaaataacaagggaacttagcaagatgcttgcatataaggtcagtatgttaaaatcaatattgtttattcttacgagtagaatataaaaaagtcaaaatgccatttaacattgtatacaaaacactaaatactcaagaataaatctaatgaaagatatatatgatctctatactgcaatctatccaagcacagctgcattaaaatatagatatatgtgcaatctacaaaatattgccaggagaaattaaagaccgcttaaataaatggtgggggaagaatgatattcatggattgaaggacttgttgttaagatactagttttcccaaacagatctatagattcaatgcgagcccaataaaaaatcccccccctttttaacaagctaattccaaaattcacctagaaatacaaaggccgtagaataagccaaaacaatcttgggagaataagttacaggacttaaagatttattataaaactacattaaattaacatagtttggtactggtataaagttagacaaagactactccctcccgctcctcaatctgcccccatccctagaacgtgctggcagctttctccatccgatctgcaagggttaaagggcgctgaggaagggctgaccgactggggtgggaaacaaagcggcactgagataacttcaggccaccttcctcccctcagtaccttcggatgaaaggtttcccttcttggtctgggaagcccactaagaagaaagcctgggctgtggcgttctggggaagtgaatagtacggccgccgggcgcgtcgccccaggaaccagaaggctttttgccgctattagtgcagaatgacttccggcaagtcccagtcgtttagaatccccagcccaaagatcgcggggatccacgcgtcatccgggcctctgctcccggaagagaccacgcagccgctaaagacgtaatggaggcgaaagggcttggctagctgtggcagccatgataaaaactagggaaaatgggagctcgaagtagcttccgttattaacagacatacaaacgcccctaaccgccacacgttccttagggatgacagtacgttacaaaagtgcttctaaagtactactgaaagctccgtgggagtgcccgctggcgtgggcgcggtggaagggaggaagaacgtgtacgccccaggcctccgtaaccatggctgcgaggggcggggactgggagcgcgggtcctgggccggggtgcggctgggaggaatcggtcctccactgtcccagccggccccgcgccggcgtgtcgcctcccgtccccctagcagcacgctgcgtggctgctcgctggctatttaggacggaagctcggttggtgtttctccagaagtttcccccttgggcggtggtggaggtggtaaccgtgatagtagcagctccggcggcagcaacagcgactacgagggatggcggcggctgcagcaggaactgcaacatcccagaggtgcatgtttttctttccctttggtatttattttatccccctttccttggctagtgagccctgctgaagtcgttgttttcctgacaggtttttccagagcttctcggatgccctaatcgacgaggacccccaggcggcgttagaggtgagagagcccatttctgcttcctccactcttcttaggggagctgggccacttcgggtccccgctgacccgccttctccccgcaccgccggacagggacccaggctcttgttgatgctgcgtctcagctccggtattgagattctccgtctcttttctctgttacacggtagccgcgttaccccagactcctgtcttgccctttccactccctacagctcctgagaaaaacctcctctatttcttgggagcatggttggcatttgtagtttggctgaaaggattttttttttaatgacatttatgattagagaagtggactctgggctcgatgaagttaattttttcgtttgacaataattcttgccattcttacgtaaaagtgtcggtatgaagtcagtctactggagcaaaacccttttccctcacgtccctgaaactttccagatgtcttatcacaattcattattcactcatttgtatattcatcaaaatttttttttggagtggctgtgtgcaaaggcgctgattgctgtgggttaaagtcttggttatatactcagctaacctagaaatcactttttgtaggtgtgcaatgaaggcaaaccataaagctgtaaaggaatgtaaa

SEQ ID NO: 59737 - DNA, 428 bp, Homo sapiens
tattcaagctgttgcaatatgttgttttggtttaagtatatgaagaaaatccattatcatacagacatgtagttggaaaagggaagagtattttattagcctttcatttaattgtggccctctttgtgatccgctataccaaaactttacaagtggtagtattttacagattagtggccctggaatctgaaaccagatcaatgaacttttcatcccttgttacattggtctgtcttgcactttaaacagatcatttacctatgcatgactttgtgacatcatccactgtccactgggaaaatactgattcactgagtcatgtagatcaactaaatttagaaacattaacatttgttagtattattaccagcagagagctctgtcttttctttctttctttccttatctctctccctccctctctctct

SEQ ID NO: 59738 - DNA, 510 bp, Homo sapiens
tgagactataacagcaatccctgtgccagcaatcttaggacaggacttttttagctggctgcaaccccacccctactctctgagctccaaacctagtagttcccttgtagggatttgccgactttcctccacctccaccaaatggcagcagccaggcaccgcagctttgcacagctccagttacctggcctctccttgagtttcccctcttcacctgggtccctggacagctccctttctgtcagcaccgccggtagagggcagctccagcatcgtccctgctgcaccctctagtggccgttaggatgttgcataacttgagaaacagctttccagctatcacattctcactttcgttaagttctcactcataagtgggagctaagctatgaggacagaaaggcataagaatgatataatggactttggggactcggtggtaacggggaaagcttggaagggggtgagaaataaaagactacacattgagtacagtgtacactgctcagg

SEQ ID NO: 59739 - DNA, 1127 bp, Homo sapiens
taatgttgccgggaaaaaagtatgcaaaagatggaacaaatagtaagacgtttctaaatattatcagagaaatagaaggctgtgaaatactagagagctagatttctgttgtcaattattttcacacttattttactacatcttcttatatgttttccaataccttagttctcagttctgcctttttttgattaatgaaatataagtgaaaatgtgatttccaggcagaaacttcaacagccagtgcttgctttgttatggtatctcttttctatgcagcggctgctcagtcaatctggctgccacagtgatagtgacagtcattcagtggaagagccctagcagacctaaaaaaggcccaaattgtcaccacattaaaaaatatatataagaatgtcatttggcaatctgtattccactaggagaaatttatacttctgctgcttctttttttttttttttttttttaaatgaggtagtcctctgggatttactgaactcagccataaacaatgagattagcacggtcaaagttcattgcagagtgattcagacaagcagagaggttcattgcatggagttgtcagacactggcggttgtaaatgttttgtcacagatttctaaaaaaatttgtttcccgtattctgtctctaagcaacaattgtagaccagaaatttaaaaagcaaaatgtggctaagctccaaatttagtgcaaagcgttagagttcagggttttctggtttacttagtttctgttttgtttgccttgatattcttgtattgggtcagattcctccaaacaactcatcactcctcaaactcagtctctgtctaaagatgaacttgttcaagattaagtagaaatgagtgttacttataaagtagaaatgagtgttatgttacttataacataatctctaaacatattcgtgattttctaaacctaaggtaggggtggtggattatattcattgccataaaagagaaacagaagtcttgattgaatgaataacacagtttttacttaagcaaaagtagcaaatttaaccaaagtcataattcaaatctaaaaatcattgaagaaaacttgacctcaaatatcttggcgttgaaagtagtctccac

SEQ ID NO: 59740 - DNA, 664 bp, Homo sapiens
ctatccaggtttctttgatacaaagttcatgatctttccactatgcgatatagttttcctaacatcatatttaataaagcacaatatctctaatgatatatttgtagaatctctgaatgaaatttgaatgctgatcatttttagccaactatagaaatacagaaattattctgccagaaaacaacgtgtaaccaattcaagtgataccaatgagtttttagaaattatacacaaaagccttttcataaaatggttgatttttcccaatacacacatctggctatctcatagcctttttaaatagagaaatataattttcagaaatgtgggtttacaaagcacggtggtcatgaactcttctccatatttcaaaactgggcagccagacacagagttcctctgggctgctggcccagtgaatcatgtcacaaatatagtaatggttgaatacactgagtgccaaactaaactcctaatgttctatttcaatccagcagattatactgtggctgattttggaagaagggcaggctggcttactgccatatttttcactcaaccctgcactgaaggcaaggagccagaatttgagagaaatctgtggagattttaattttttctcctatataattacatattatattaattgaactccacttctagt

SEQ ID NO: 59741 - DNA, 478 bp, Homo sapiens
cttggaagtgaaacagagctgggattgaattctgaatcaacagtttacaagctatactggcttaggcaagttattgaactactctgagcctttatatttcctctgtaaaacagagctaataatacctgtagcacaaagttgtggagattaaatgagatgaggtacataaaaagtactgaacacaatgcctatcagtattaatgttttactattgatataattgttatttaagctccaattctgtgagaaaggcagtaaaagttttgaagctaagaaaacaaatacagagcttgcaaagaatgtaaccactggtttgaatctagataagaaatgtagagataagagaattagagctttgctgatgtgctggcattacctggcatgttgtgatgaggtagataacaacagcaacaataataataatagctaccatttactaatgtcatatcgcgtgccttgtgttttatattaattgtta

SEQ ID NO: 59742 - DNA, 657 bp, Homo sapiens
tttgcctcacctgaaaggcaggacctccggtgacacagctttttgaaacatcattttaggtcattgttgctaaactgactctgaggaaagagtgccacctactgaatcaaatgtcccgggttgcctccaagggctggtctccagctttagaattgtcctaacatgcttagctataagaaacaatgagattgctgcaccatgcatgaaatcatcatatttgtttccagctttagccaccttattttaacaatccagcggtcacatctgtaaattaactatttaattcataagcttttcatttgtttttaaaaagtagtatacaaagattaaacaaacctaattttcctaagaagtaaatttccctaatgccggaatgtctcgctctactgtcaaagtgaccacaagggggagctagcatgtaacttcttatggggcaggagcattgaggttgtgtaatgaattgatcttgtttctggctgacaaattaggaaagaatggaaatatgccacttgaaactcatgaagctcaagacagtttttctctgaattacattttgcacaacttaatctaactcctcttcttaatatgtactagctaatacatcagatagagtataacatgttatttggttggacaactcttttttatccatggtca

SEQ ID NO: 59743 - DNA, 1124 bp, Homo sapiens
cagagagaaacaaattattaaaacaaataaattataaataagtgctaaaatagagctatgggaaaaaatactgcagaagcaaagaggacagaggaactagacctccaggggatttactatgaaagtaacatttgtgttgggtcttgacatgtaagtaggagtctgtcaaataaagaagaatagtagggcattgcgggtagaaaaagaagcaaatacaaaatgctgggaggtaaaagggtctggtgtttagggagaatgatggcagcaacacacaggaaggcaggatggctgttaattatcagttgctttttagtcattaaaaatttaagtaatttcttatcttatctttttggattttccaaaggaaaggggatgactagattgagaaaattacacagacccttgccctgcatgagagagaagaatttctgcttactcatatcattagtcttgttttttatccccatgggtcatactgtcaaccttgagcaatgttttgctgaactatgagatcagatcaaagattataaaagcttacttactgatatctaggtgtttaggaaatatggtaaaagaccagtagttaaaataaaacctggcacatttgaaccatttccatatgcttgcttctgttaaattaatatgctttatatcagcaaaattataatctttttgaccacaagaaaaggtctcactgtgaacatatgatgattaaggaatattcagaataaaactcaacctgaaatttcagtctgtatatagatcaattttagttaaagcatgtagaacgaataaaataagcaaaagacaggaagcaaagctagagaaagggaaagaagtaaacaaggaggaaagaatgttttagctcaagtgcatttaaaatgtgtgagaaacttttttatattcaagtacataatccatttgcagagggctgactgagggtgtttgtgactatgtaaactgtatttctttcatgtataacataaacaaaaggatacagtccactgatcctttgtaaacattagttaaaaataatcctgactcttcagtgtgaagcttatgcaatgttcatgttaggactcaaatacttcattcagcctaagacaagtcaaaaaggattttaa

SEQ ID NO: 59744 - DNA, 1203 bp, Homo sapiens
aacagtcagcacagcctagcccaaccgctgaagtcggggccgcagccaacacatctgaaaactcccgccacccgtgttggcccgggactggccaatcccgcgccgccggatcaatgacacgctgaggcaccgccccttccgggcactgcgaaacatgattggccttgcggcctgtctatgcagccgctcaacccttccggcggtccaggccgctcaccttaaggacgcagagtggcgtcagatttggagaagcgccggggaccgtggaggaagtcatcggcctggatttctttggatttgcagatagggttccagcagaactggaaggtgggcgagacaggccctgcgccaccatttgagcagcgctgggatataaaaccatctgctagccctctccttgcacgtctggggctggaaaaagtagttctgggactgggtacggtgctggaaggggtactaggcaggatgaaacgacggggcccacgacgctccaaaaggaagccttctggacatatttcctgcctaagtgctcgctctggggtggcagaggggtccacccaaaatcagacagagctaggctaggctgagcccttcaggagctcacagtctcctgtagtttccaaaccctaacacaattaaccaaggaatgtaaatgtctatagcagttgttttagaagttccttgagaacaaaaagggaagttattaaatctgaaggagtggatctggaaaggtaaaaggaaagctgcataggttttcactaggcaggaaacagtggcagggcattcatttaaaaggcattccattccaggcaggagcaaggccaagaaagcatagaggtgaagaaactttaaggtcacataacaaagggccttgaactgaaaccatgcaaaagagtttgttgtgtaaacccaaggtcaagctacaaggcaaacaccgttttctcaacacatcaatataccctctttaaaaatgagcttttccttggaactattcctttaagatatctgtcttctgattatatggaggtggtgtaggccaagactcggaaacatgcagtattgattttggtacaagaaacaactctaggtactctgaggagtttggcacagaggttcaaaaaatgagccttagttctcagtaagtcttcacactacagcttttcttttttaatatttgttttactgtgccagactctacagctc

SEQ ID NO: 59745 - DNA, 2727 bp, Homo sapiens
aatttatttttgagtcatctatttacctttaaaatggcatatctattcctggctcctgtatatgatggccgatgactataaattgaaatatacctgtagcatacgtatgacttaaacactgcatactactgcacattgcagcgaacaggatggagctacttgtgatctaaaattatctaaacaatatacttgggagcaaatctcaatagcattccatctaacgaaagcatcgcgattttataactatgacttttgggaagaccaaacggaataccccagctgaaatgagaaaaatctgtattaaggaattttagctccacccagggcaattatccccttccttccgtaactgccaatttcctccccaatcccaagagcgcctctgcccagttccgcagtctctgctccaagtctgtttttgatgatgcccttagaagcaggggcagcggcaagcggcggagatagggattaagttcctaacagtcttcttcccctgacctggcagatggggacgctgccccttagaagcctttttccccgcaatacgggacgccgcagaggtgaaagaccaagaaggtggagcaaacttttagggagcgcctcttgggcccgcgtacccttccgcctgttcctctctgattggccagcgtgagtcacggacgcccaatcgcgcggtagcgtccgccgtgccgctgggcgacggcggcgcgcatgcccactcagggacccaccctgcgccccagccctctacagcgcgggcgaagggcatcggcggggaagcggctgtggttgccagatctggcagtacagagccaaggtggcagggccgcgctaggacacggatggtcccagggggagggcaacaggaaaaacaagcactgacacaactgccccatttccccatgtcccctaaaagcaggttttcttgggctgaccagggcattttcactgtggtgtccgactggggcaactcgatctgcccgcggggactcaaaaaagcttgagctgcattttttctttgcgtccgggcggaccaaaaggcgaggtgaagggaacgagtgtttataagaaagtaaacttttgtgcagaatgggctggggacacctctgagttttgctgcccgcaacgtgacctttttagcgcggtcctggacgcgttccctcgcagccaacccgtcagtctcctcaggccttatcctgccctctctgaggtggccgcctgtgggcgctgcaaacgccacacttttgctctacgaagaacctcctcgcgactttccaaggtgtgcaactcagaaaagcgccccccaaaacaagtaaaagccttcggggaagaggcaaagtccctgaaccgtcctgactccagccaccagccggtgtttggtggatcaggtcccggagctccgcagcctgggagccccacaccaggccggcccctacggccgctcagaaaacgcggcgagcggaacccgcacgcggaagcgccggccgcactgagcatgcccagttgcagagccgaccagaggagttttttcttttcttttctttttttttttttaagggggggggtctcaagtaggaggcctccccatcacccccaccccagccccccaccacccccggcctaagcagctaccatggcccaggtggccggcgcggcgttgtcccaggcgggttggtaagtggcgagtcccgccggctgccgggccgcgggtgcgggccggggccccagggaggttgggttgggggcggcggggtgcgtgtcggggtaggcggaggctgtcgtccgcccccggcctctccccgggcccttcgggccggctccgcccccggcgccacgcggagccctgcgagttcccctaggtcccctggaggcggcggcggcggcggcctgggccccgggcggcgggcctgggccccgggcggcgggcggcgggcctggggagaggccgggggccgcgagccgggcgggtggcggcccagaccccggccgaccggagcgccggggaggacctgcagcgccgtccgcgcggcttctccggggagggggtgtttctgcagcgggatcgggaggcgagggctgggaacgaagtgcggcggagagggacgaacgcggccggagcccgcgggcccataggaagttgagggcagagcagagcacagcccgcgctgcggccggagccgcctcttcttaccccttatttcaaagtacagtgtggaccagtgtgaatctgccttccgcggcacacacacaacttctggagctaagaatgaccgcaatgtcaactcgtgggggtgctcggtagaacttttcttgaaaggatggtgttctgattttaagaggcctttcgtgtcaagattttcaggatttgaaaacaatacaaaattatgcgaaattaggcagtttctggaattgcggccattacggttgtaatcatcccgtttaattcagtaacgcttttcccaggcttgcacaggcacattctgggatgaagggtaggaacggggatgaaaaagatttgcaacggctctctgcaattactgctttaggagaaagagtgaggcattaaaagaccaaacaaaaccagggggaatagtgataaaccgtacgtacagaggaacagatgagtgcactgtggaatgggagggagagttactttcctaaagtggacttggaaagatggtaaggaaaaggctttctagcacagagctgctggagatgacacaggga

SEQ ID NO: 59746 - DNA, 590 bp, Homo sapiens
taagagagtgatatgatcaaaattaagcttaggaaatattgcagctggatgtaggatggattatagcaccaggagggaaagaatctaagaagctattgcactggtccattcaaacattggttagagttgcatgtcctgctgtgaaaagagagatggcagagacctgtgcaggaagcctttgtaagacagatcagcaggaagctcctgctgccatggaggtcaaggctcaatgtgtaaagcagttaaataaacgctgactcacttggaacttccagtttcttctttgtttgatgaaagaatggtattcccagtttcacgtgttagtcagaaaccttaaaaccaatagctaagcatagactactacataggtactgtaaacttattttcaaagtcctggtttttaacaccatttttaactactaaaagatgtatttttaaatgttgaaattttttttgacaatctggtccagcatcaatgtcaggaaaatgatcactgtaaagataactgttacagaactccatgatgccagcagaacaggcagcaggtgaggattatagtacccgacgctctgtattttctaagcaggaga

SEQ ID NO: 59747 - DNA, 720 bp, Homo sapiens
aaggtttgaaaaaccatccgagtgggaattgcttcacaatactgcaacttgtcggggtcgcggggttccttgaccctaacccttaccggcaggttcctgtagctggtgctgctcctgggacgatgtagacgccccatatccaggcgcgggtgccaggtcgccgggcaccagctcactcccagggcctgtgagctgcgcgcattccctcggccgcgcattccctgggaggctgcagtcagagcgctcttgaagggagggcggcagaagacactccctctcggttcatgcaaatcgctgggggaacttcagccaatagtcactggctcttcaattaaggacgggaactcaaagagtggcagaaaggcaagagggcagaagggcacattcatggtttcctgccccggacgcaggtaactccatactctgccagaggagctggaatgggggacttgctcctgaagactgcgaagaggcagctcggggttgggcacagtagcgcttacctaccagcctccttccttgccgcaccagtcagatgccaagtccacaggttgctagcaagagagggagaattaaaataaataaataagcttgcatttgtatatggatgtaacagagagaggaagtcggcgccacagagcaatcacaggcgcggtcccaaaacgcctgctttgccaacagttcctcctggagcctcggatccagcagtgttggcacaga

SEQ ID NO: 59748 - DNA, 618 bp, Homo sapiens
cttcaaggcaaccaggtctccctcacagggatcagtagcgttactctctctccccaggcacaagaaagagccgtgccctggctccaccctgtctgtctgcgagacagacaactctggctttctctctttctctgggcacatgtgagagccctgtgcacagtgtcagcagggcagttataccttttacaaacgacagtggctcctagccaagcatgagcttacacaaacaagtagaggttacacaaacaaggttatataacaagtagagtcatgcatctgcactccaaactcactgagtcactttggcctggatgtttaccttggcatatgcctgaccaaagcacatccacgtaccttacaaagggcgagagaggaagggcactgcagctctgggagagagggagcaaaaatttaccctccgcctacctttttgtttcatcctggcccccagctgtttggattgtacccactatcattgaaggcagatcttccctactcagcccacggattaacacatcaatctccttcagacgtaccctcacagacacacctggagcatcccaatcattcttacgaaacagcaaaccacttgggtttcccttgcagcagaagaggatg

SEQ ID NO: 59749 - DNA, 491 bp, Homo sapiens
tttttcagataattatgtctctatttctttaatactacaacaaaacttaaaaagaggtagttttttaaaggttagttgcaatgtggaacctgaaaccttatttataaatttcatactcttttacattagctcatttgaactttgaatgaatcttttatacttgcatgattttgtaacatcatgcactgatcatttggaaaatattaactcatggtgttgtgcaaaccattccaattctgacacattttattatgcaacatcaaatatctcattcataaataccaccatgaatcttatttgaaaagacttgaagtattgggaaattgtcaagctcttggtggcagatacaagctttgtgaaattctaattttccacttgaaagctagaatgttatcattggcaacaaatgctctccgttatttgaaaagacaaacttgctttatttattttctaggaaatatcagcccaatgcctaaatcttgactactata

SEQ ID NO: 59750 - DNA, 1313 bp, Homo sapiens
tgcgctgagcatttggcttagtcatcatgctttcttcctccaactgaactcttggcagttcatgacaaggagtaactttgtcacagtaatatattaactaactaggtaaacttgaatttatccattgcacaaacaaataagcttatgttcaacttcgggaccctgacacatgttcctacccagtggattttgcaaagttcaccttttcagttcttctaggggcagcagagcttcttcaaccccactgcaagttgactgacacccttcaatactctcttgaccctacagataatgctcatcaattcctctatgtaagtcctcttctgtcctcacaattcccattccagatctttccacctagagatacccttttgtcttccttcttgatgtctcaaaggtaggaaaagtcctctcttctccctcaaaagcacttcctttctcctttgttccaacaagccattttattttttaaccaggtttgcagagggtccagccagatggaggtagtcactacagctcaatgaacagtgagaaactgactgttgcacgtgggatttatgagaaaacaaaagctgattttatatagtcttctggcacaggccattaaatagaccagttggcttcccttagttatagttccatgtgatcaagtgaaattaatgataagatatatttcttattgtgcacttagttgttgcaagtgggtcacttgtaaagtgtttgtataatatttacctcaattccctaccttatggtacaataaatggaaccagtacgttccaaaacagttaagatataagaatgctttatgcgtaaaaaaatcttacaaatttaagtaaaaagaggattggggaaaaaatgctaaggatcttaaagtccgaagtaattcagtaagtggattaagcttatgtaccagataaaacactttttttttctttgtttagaaattctacttttatatgctattccaagatttaatggtctctatcataggctggctgacatttttcaaacaattctaacaatttaataaaatgtttaggtgccacgtaccgtaaccaaaaaatagctttatcctagccttttattgcgtaagtggtatttcagagaaatcttttgccataaatatcttggttactataaagttttagcaactctgtgcattgtccatttcctgagaatgcgtgttccattgagtttctgtctatgtgtgactttcaaggcttttcttaagaaacttttgacaaatgcagaaataaaggagacagagatagcaatagagttatattcccaaaataaataatcatttagct

SEQ ID NO: 59751 - DNA, 2261 bp, Homo sapiens
gatgataaaataaatgaaaagaacttgggtagcttctctgctttttacctgaagcttctgatttactttgaagggacagggaatggggaggctgaattagtggacctccctaccaacttgcacaaagatgatgaatagggaaaaagattcaaagttttggccactatcataccatttactatttactttatcctcctcataccttggtttaaaatgcaggacaggcatacaaaagctaacaagggtgggaggaaagcaatcaatgagtgaataagctgtgaaataatctggtaagaatcctgatttagaaaatcattttttaaaattacgtatcttataatcacacgaaaaatattttcaatggcttgagataaatgggatcagaattctataatcattcaattatattaagtccctttagtggctagagggaaattggatttgctgattgattgatcgattgattgtctacggcatttgcatcagccgagatctagttggaatacagagagcccgttagttgtttaaacagagagaatttaacatggggaattgttaattgttggaggactaaaggtacaaataaaaagtgagaaaaagaaagaaagaaaaaggacactgatgtagcctagtaatgaaaaattgcgagaaaaactagaatacctgtagagcttaggaaacagaaggaaggatttcggagttatcagagactaaaagtctggcacagagccctatggaattgggactcagccttccacggagaggaaactgactggcgactcttggtaactccaagagagagtgatgaaactgattccaggaatgcaaaaaagaaaccaagaaactggcactgcaaccagcaaatggctgctgccaggatgaagtgccattgctgcggcaaccctgaaaggaacggcctgcaaagccggacgcagtagctcccctcaccccgccattcggtctccctctagcgtgccctactggccaaacttattaagaagccagatggcaaagcggatatgcagagcgctgagactagcccggggaatcacaaagctggtgggtttggagctgaaagataacagcttaaaaactggcactgacgttgaattaaggaaattaagatgtgataactgataagaattctttcattctaaatcataatattattctgtggtaaaaacaagctgaggtactgactccagaaatagagctgagcctgtccagaggctagatggctggggacttctgagagcaacagaaaagatgaaaatgttcaaagcacaattttgtcatctgatctccttttttgagtctcctttgaaagaatcacttcctcggtgcttcagtgacattctctataaaactgtactgactttttaccctactctacgctatatataaatataagccaaaaccacataggacctggctatatttggtatgcctcatctatcatggatagttaatttgtgcattcatcttttaaaactaataatgaatttctaaaaccttttaaacgggcttaagttttgtaatccatttacggaacatgcctgcaatgaaaaattaattattaaacaagagccttgggaggacatcagcggccttgtcacccacgcacttgattgataacatgtcagtttccagaccacggagggtgctgacagctctcaaatttaaacccggaagggtaatgctaagcatgtcatggcataagtcacatttttaaattattttttattaaatgttagatagaataaattcatccatgcctctcaaactcagcctgattaaatgagctggcactctttcaaatgtaaagcatggttatggcttctcaagggcatcggaaaggctgaagcataagacacggtaaatacaaaaggcaaaagaggtggacagtgatatattcacaagcaccacgggcgaagtgaggtttttaaaaatgctgaggctaacaaaacaagggcagcacggtccccaaatggtaaatgcacctgcagtgagagactctgcttgagtgctggtgcataaaagtgtccaccactaagggaaaaaaacaacagtaacaacaacaaaaccctaagaaacagaaaggaacagctgtaaccaattttcaaaccctaagttttgaggttgggttaggaagttagaattgttccatgtttgtgtcagttctaccctttaatttcacaaagttaagatggttttctgtgactataaaaaaagaaaagaacatctgttatagtgtgtcttcc

SEQ ID NO: 59752 - DNA, 1504 bp, Homo sapiens
ttggtaaatcaaatagctgtataataaagccgaagaagaagtttcattcagtagaaagggctactcagctaaagagaagagagaagtttaaatcacaagatttgcaaaaaataagtgtcacagcaggtaacataaggagggccgtgggaggactaagtggtgatatggaaatctgtgatgtgggctctctgtcaggaaagacttctccactgaagcattacttaaatcaagagctaaactatgaggaagggaaatcacattttccacaaatgaatcagcatctgcaaagtcttctgtaatttctatgaaaactattaatagaagtaataataaaattttgtgaaacgagctatttttctgaagactactggaagaagaatgatatattttatttattccaaacagatcaccggccccactcaatggaatgcacaatatagtttaattttcctatttgaagtaacataacacatatgtttattaccattgctacaaactttgagaagtaaatatggctaataatggcagggaagcagtttttaacgtctgattatgtgtgattaatatatacaaaatctgaactcttcccaccacgctcattgctaacatcttctgcctagtattgaaagaattttgcataaggttgccttgtttctgaacttgctcatctatggtctcttctcaagagtaagcagagtgaagactgaggacagatcacagccttcttctgttcaaaaaatgacctttaattttgtgcactgtcttaaaaaataccactccctaatcaaagctcccactccctgatcaacattgcccattaatctctggaattgttttctgctatcctccctgtcactctcttttctccaaatctctggccccttactgtctgctgagcatatcaggcatgcttttacagggcctttgcccttattgattcctttgttattttgcctcagatagtcactggtctgcctgtccaactatttgtttgtttttcaaccatcattttgctgaggtgtcccttatcaccctatttaaaaaaacaatcactcttctcacctccctggcattccttgttcctctacaccctccactttcttttcttacaaatatcaccacttgatattgataatctcactacactaaaaggtaaattccatttttgtctctttgtatcactgatgtttagaatagtatctggcacataatagaatacgtatttgttgattatatgaataaacggatgacatcaacattgttcaagaaatctagacttaaacttgggaatcatttctcttcccattctttcaatttccttattatctcaccccaatatttgattctattgtcaatctgtttccctcacattgcatttcaacaactaccactaacattgaggtcatcatttttcaggtgaattactagagtagatattaagtgggtttgtgcagccaacatgcccacattaaaaaaaaattcacatgtatatcgatttagatat

SEQ ID NO: 59753 - DNA, 941 bp, Homo sapiens
cataatgaatttattagcatgtcctgggaacactcattttgaaatgggttaacaattcagtttaaaggattttcagtgtgttttaattttccagcccatgaaaattcctgtaaatgtaggacacggattaaaagtttatggatacaccatttaccccactagtttctagtatatgccaaacagagcagagatcaccactcttaggggattttgggacccccaaacatggaaatgtaggaaaaccttgagtttcttcaagggaaatttcaggcactagcttgccctgagaagtgaatatgcaccataagaagcaagaaggtaatagcagcttgaaacagtagccaaataagctagaaccacaggatagttcctttatagaaactaaaagcaacatcttaacatgtgtctctgagttgtttttcagaaactcccaaatggattcactggcacacagacctcagataagggagaactggggactgaactctgaccccattcttctttctgttctaaattcttcctagggagcctagagaaagtcccactcatgagccagagctgacattctcttctgctgatcccaaattgttaaataaagcttttcttccttaaccaactgcaaatcagaaactctttgaatctacctatgaactgtaagtccccgcttcaagataccttgctcttttaggccaaaaccatactccttcctttaaaaacccttacctgcaagccactggggaggtcaggacttaaccattaagttgcctggacttccttgcttggtgacctgcaaataaagtccttcctttttccagctgcaaacctcagtgtggctatccaatattactgcacctggtaagaggaccccaaactggttcaataacatatgttgccggcccagcatggtggctcacgcctgtaatcctagcactttggtggct

SEQ ID NO: 59754 - DNA, 1867 bp, Homo sapiens
gggtgattaataggaattttaaaaattccaaagtaggttgcttagttgccagtgaagtaggatataaatttccctcacccatttagaaccttctaaatacatgtgggtttgttatatgtgtgtgtgtatctttgtatacatacgtgtatatgtgtatcaacagaactcaaaatgtaaaccagtgtaaagtagtgtaactctaaaatatggaaagagtttttgttcaatttgtatgttggtgttacacactccaaataatatttctgtaactatcactcaatgagtattttaacctcagagtgaataatctactgatttttaactctaggtttgttttaatatcttcaattaaaccaattctcttcagtaataaacatcaagtgacattgagaagaggcaaaaaagagtaagaaagaaattaaaacaaacaatggataactaatagtgttaaatggaatactaaggctgttatggaatggaatggaatggcattatgcctctgtggaataccaacgctgttgagtaattgaaaatttctaaatctccccagtataccagtcccactaccgagtccttgttaaaatgcttccttttactgtagtcctagtatttataggagttttaataagcctcctctatcataagctggcaaaaagatcccttttcaaaagtcctatattaaaatgttcttctacattaaaatatcagaaaattgcaagtcctttagagcttcagttaaagtggatcaaaggtgaaggacagaaggaattttgcacagtacaatagtgaaactgctagaattagacctcagatcccttgattcttaacagtttctggacaaaaataatcataggcttgtactcaagcagaacaagggccccttcattcctgtgtttatggtcttgcaatctctagatctttctcagcctccacggactcttctggaaaacaggcaaactacacctacaatccgagaatattctaaacacagaaagacactcaaatgtaaaacactgacatccagacatattaatgttgctgacacagaactctaatatctgtttttaatactaaataacaaaagtcaaaaggtgctctaaatgatgaatgaaaacactttcaaatagaaaaaaaaacaggttaaatgctcagttaccgtctttatttattctacatacttcttaaagtaaaacacacattcagttgtttattttccctctaagtgtgaagaggatacatgacagagataatctaatctaaaagtttaaataatcaggaatgattgaaacattctgtaaaagagagagaaggattagacctgaactgctggatataaaacatcttataaatctactgtacttctgaaagaatatgttacagatactactgataaaatgaaaataacagagagagtagtatatacctgaatttagttcatgtgattaaaatgacaacaaaaatcactaatttactaatgaaaaatctgcttgagagacaacatggttatactcctacctctcctcacacataaaaatacactttctatacagtaggtcaataacacattaaaatatacagaaaaaataggtaaataattacctaaaatattttcctaagtattatggcaaaagaaacaacaataaaggaaataaaatagctctgctacacacatgtttttaaatgttttttaaaaagtaacaaaatgtaggtacaaaacttcagaaaatatcactatatatgactaggtactatatatattgagatagttacaactcagtaaaaatataaaaatgctacaaggaaaataacacaaatcatgaataaaatattattaaagttaaaatatcaaatactaacatatgtgaaa

SEQ ID NO: 59755 - DNA, 4578 bp, Homo sapiens
gactaaatattaaggtaacaattttataaaattttcaaaacagtgtaacatcgctccataaataaaaaatgactttaaagtttcaatactgagtttgtctgaactcagtaaaatttagcaatctaacttgcagttatgagttcatgtgggcaatgttaagtcatttcaaggtaagaaaatatccactatcttttcaggaacaaaagttgcatgctgtagaaaattctgctgcggatacttgacacaaggatacacccatccaaaccaaacagagagaatgttaccttcattagagtaaatgtcctagcttcttggtactactagcaggagtgggattcaactagttggtacttttattcagtgttctagtttgatttcattttcttacacttcctgcagtaagaataaattgcattttgtttgtttgtgttttggggtattttttggtagcagtctgggcaagtaaacctacagaaaacctgtaaaacagtggatatgtatagtaaaaactgtgaaatgcataagccaacagttttatttggtaataaattcaatcgtatggcataattgccatatggcataatagattttgtttgtttatctgtgcttcattaaagtgagctcccagcatttgttctttgtctgtggaagatctcttataaacatgacttcttgcaagccaagcaaggtaaaacatacacatacacctttaaattaactttccaagtggtcacagttttttgcaaagcaagaagccagagagtatgatagtattcaatgaaagattggcctgaactcaagataaaaatttaatcaagattctaaatatctatatctatgacaccacagcaccttcacactacaacctatttatcctaaataccttttcctaacaaataattttctggatgtcaccacaatttaccagggtcagcatccaaatgtagaacaagtaactcatttaaattagtttatttgctcagaaaaaagctatatgacctggcatgcatcatatgagcattaatttagttgtgcttgggatttaaaacaacttctttgcagtagcaggtggtttataacggtgaattaaagcacaaactgtgtaagatcatgtttagaatatatcaaataagaatcagaaagtcctttcagccaggccgtaatggatggaaaaataaaagatttccatcctaaaatctattatgggcctaaagccttacaatgtttagaagtttttttcttttggggtttgtttcttgattttattgttgttgaagatattgttgttattgtcaacattatttaatcaggtgtgtttagatcttagccgggatttaaatatatgatacattccttttctataagcagtcatctatgagagattatagctgtttggatcaacacagccccctcctcttcatcatgaaaactaccactgcattagtaagtaagctgagattatttattttcatttcaattttactttctttttaaaattaaatatagctattaaaaataactttcaaacatattcttagacattgtctaatataaggtaaataaatgtaaaacttcctattcagtaatgaactagcacagaaaagagtcatgaaaaaaattagagccaagtggagatggaaaagctgtgcaatcaggatgtatgtgtgacttacacaggaaaatgacataaatttgttttatgctttattttcaggattcaggagtagcccttagacataggtattgattggccagatgatgtaatctaccctgagaaatggaactcacatattttagaattgcctaagcaattatttgttgtggttattaaacaactaggacatgctgtggtggggtgagtcagacagacatccttagggctttagagaatcgtgcaagaatggatagaaaaattctgagccaggtggtcatgagtaggctgggctggtaacactgggttttaagcactcagtggcttttgtttaacattaccaaatcttccacaatcgggtgttacagaaaatacataaaaatataaagaaaacaaagataatatattcatcttacgctaattttataacttaaaacatcacttctttaatcatctcttactgtccctaacaacagaaaatatattgaaatttctgaagagttgaagactttctactgtttcccaagcctatgtatgtttatagtgtgtgaattaaaagcaagccttttaaattcagctgcatgtaatgctcatgcattaaataataataataataataataataataaagggtctgaattgatatcctgaaaaaggctgatacatccagaaaagtcacttagatctgcattattgttcttctctgggtctacatataatttataaccaaattttctatgtgtgccggccacctctgtggatgcaggtactgaccattgggatgaatgtgaatcttcactagtcctcatggccagcccctggaattaggggttagaaatcaatgtttaattcctttttctgccaccaacaactttgctttacctacccagcccttgctcctttgcttctttttttctcctttttgtgccacctaattttacagatccagtttaaagtactacattttctataagtacccctagctgttccccttcacaacaaatcaattgctgttttattattgcttacatatactttactcatacttcagtcacattctatcagttgtttagtcacagaaaaacttcatccaatatgacaaaaattaggttttattaatatttgaatctgcaatgtcaaatattaagtcctctttaaatacttgctgaaataaattgataatttatttgatacactttctcatttatggactgcttttaaattactttctcatatataatgatggaaaacatgttgattttgcaataaagagccagtatatgtttttaaacatcggaaaaatatcttgctttgaggaagtcacttgggccacgacagacagaaaaaaaaaaaactaaaaacattattctattgagaagaagcattccattgttaacacaatctatctacttattaatctatttaacaactactaacgtcctactgtatgctaggtaaaattctgaagacacaaattaatgacaaagtcacgcaaatgactcagcatagagaagcgggacagacatataaacaaagagctagtaagataatcttttcatctttttctggatgtttcttgatattaatatttactttaaaaaatttttggaattgtaagagttgatgtgcattataaattttgcaaatatgatttattttggccatcagtgtagtctgggacactcaagctcctatccttgctcgtagaagatccaactatttgccccacaagcaaacagtgagtatgagctatcattttaaaatgtgttgaacctgcaggccttgtgagttactgtattgggattggggaaatctgctctgtgttctgccagagaattacaacatattgctgcctggagcaatgttaacttttaatgtcttttttgtggaatctttggctatttttcctcccatcatacagaataattacagtgtttgtccttgccctttccacattactttgtatcacacttactaatcttttttacatattatcaggaatctcgagagaatgctgcttaaaggtatgccctttcagaatttctggctagaaatagtacttgtataaaagtaatgaatagaattttcttgatgcaaaatcatatgacaatggctatgtctgtaagaaaaatctttttgttttaaagtttagaaagtggtctgcatttggtagtgcaaaagattgggcactctctgagttttgttattaattaagtgtatataatcatatagaagtcatgtaattatcctgtgcctccatttcttcagctagctctagatttttgtttgttttgttgtttttttaaaatggcatccttgattatgatgactacactctaaacacattgttttaaagctgtacacatatctattttaaagtggccaagttaaatatattgactagtcctttccccaactcttgttagttgatccagattgagatgttttctttgttcttttttccttatttatgaataactgaattacagatgtgacaattccagctggaataaaggaaattagtgtctacacaaataaaatatggcacttaattgtaagctgtaagcattctcctcacatggtagagacgcctgagaaaggaaacaatatcttttgaatgcctatgcctagccatgattaaatataaatcgttcattgtaatttacacaattacaatgtgtaattacacattgtaatttcacaaagttattttgaatcataacttttagtttttaaataccaaataataaggaattcatcgtttaaaaagagtataacatgctcttttttggcatgttatacatattttctagttcaaaaacctcatgaagcatgcattatctccattttacagatgagaaagttgaggctcagtgtgaactaacatataaaaaggaaataatccagacgggctcagtggctcacac

SEQ ID NO: 59756 - DNA, 4068 bp, Homo sapiens
gtaaatgatgagttaatgggtgcagcacacaaacatggcacatgtatacatatgtagcaaacctgcacattgtgcacatgtaccctagaacttaaagtataataataaaaaaaaagaaaattatctatatttatttatcctgcagtgttgctgtgtagcaatgtgagaagctgggacttctaatctaatcattttgttcggtaaatattttgtcattcctgtgaagagccagggcttgatacgggtgagccaagtcatattcaggtagtaatataaggaagataactgggtggtaaactatttaaatcatatcgtttgtatgaaacctcaaactgtaagctcaacggaatgtaccagagtatctgtcactatttcctcagcctgctttgtcaagtgcaatttcgtaggtaaaaactttggggtgatcctcgtgcctccatcataaagatgaaaatatagcatgaattatctttggtgataaagaacacttaccaaaatagagatgactcaacttctacacacagcagagctgtgttgtaatggaaattggctttcagcttctgagacatgtaattttataatacattttagaacatttaacctctccacatttttttcagctctgtctgcaatagtgagaggtagtgctattgttacagagtctgctaaagctactaatgtcctatttatatacagaaataaaaggaaattcttccttctctggtggtctctttcagctactaaaaaagttgcttggcctaaaaatgtcatcagccacagggattatttgatttgctttgtccataattgattacttggcttttaccaaaaaaagcacatctcaaaaatgtccaaaaaaggagaggaaatatgttcaattctatgtaaaaaatttctaaaaatttttgaagctgaaaggaatgcccataaacaatctgattccagtcttattttcagtagtcatgcataaatcatgttctatgacacagagagaaagagattttttacctaaagtggtatttataagaatttttagcagactgggaagaagtccactttagctaaattaaaaaaaaattcaccgacttctatatattatgaagtggttttgaattctatctttactatttatttgaaattttctgagcaaagtactctgtctcattgatcctcaatgtcctcctatacaaaatggcaaaaagaacacatccccatttcattgaagtgttgtgagaaccaaacaggctgaaatatctggcctgtttagaatattatctagcacaccataagcacacaatacagggtgcccattattcatgtgacttatgtaaattgcaggaaatattaaaaatattattataacgggttttgtttgttcatgctttatttacagtttgtgccacctgttgatctgaactgaagcaggaaggaaaatagggtctggaggcagggaacataaggcccattcacacttcagctatgacaggaaatatctgctccagagggcataggccaagtgaacgactttgtgactttacttcatcctctccatttacatagggcgtaccccgagtcaccaatggaatcctctagggggtatttaaactcccaaaaattctgtaatggggccttttgagctcctatgctcaggcctgcgcccgcattgtggagggtattttcatttttagtaaatccctttgtccttgctttgtttgtgcattttgtccaattctttgttcaagacaccaagaacctggataccctccactgttaacagaactactgaacttattgctaatatgttaatatattattgaaaatagcctatacatatgagagtaagtaaatactttgatcaagccacacaaaattatccgaggaaacaaagtggaacagttatggtttaaggtaaaataatgtaaaacaatatcaacagtatgtatgtctatgtgattgagaaaatgaatcttgtatagtaaggatccagagcagtaagataatacctgtatcaggaaggaaatgccactccgttcaattctcaagggcaaaactctagtcaatcctatcacatgtgcaccttcttctgccctgacatctgccatgtcttattttgcataagccatggtgaattctgtcaaatcacccaagtaataacataaccatctgaaacattaactgaagactttcttctgacatcggctgtcacactatgtgtgaatcaaatttgcttcattaaaataatttgggttttgttctgactgctcaacattgccatttgaatctgtgagcagccttattgactcttaaccgctattaccaagtcttaatcgctcagagattcagcacagttggatattgcaatcagagcaaattccccatttgattccagcacagaagttaccaatgaaactaacagagtgataatacaaaattatccgacttcatctctttttctctcaattctctgtgactaaaatgaaaccatttaggaacttacttgtaatctgctatttcttgagtttgcagtggctactgaaatgcactattgtaagatttcgaacatatctcaaatatactactattatactaaatatactactttaaaattagaagtgtcctgataatcagcagttttgcttttcaaagtgcacgacttgtacatctggttacccaatccagttgagaggcaatcataataggttcaggtttcaccatagcacgacatctgctctgcagtacccaatctgactctgcatatgaacccttgaaataaagtcattatgttttcattaagtccaaagcagttcacatcagctgacatttggtcacaaatgataaacagttaataattaagccaactgaaatattttcaagtacgctttttttggtgcttgcaattatttttgtgacaggatagaatagttttctttctctgaaatacaacttcataggataattccatcagctgcattcccttctgctactgaaaatgtgattttttgatcacccccccccccccgcccattgtgttattttttaaaacaacactattcttggagtttaaggaagggttaaatcagaaaagagcatgcttgctagcatcagcggctacttatttatgacaagaacacttttagtcaattattgtctgaaatactaaatgtacctcctggggtccagcatttagtcatacaaagtgtctggctcacattgccagaactgaccattaattatgatggctacaggtaacaatccatgcatagcttagctttttctggaaattttacagcacagaacctgttagagctaaggtaagataagtttgccagtggaaaaattaagagaaaaatattgcaatatttgaaagaccctttaaagtaactaattcaagtgctttgatttagaaatcagaaaacccaagagaatgataatgacaagtacatacaaatggtatttagctgcttcaagtctagaaaccagtcctctttttagaggtatggagcaggtcaggtgttttcaaacctcagggcccttaataattaccttcagtgctttatagaaagtaataattctaggtgtccacccacaaagatcctgatttaattgatctgggatggaacctatacctggtatttctttaaaaaccccagctaattccaatgtgcctcctccactctactgatctctttatttgtaccttcaggagaaatgcttctctttttttaggataagaaacagtttgttcttattttgataaaggcatgccctggccactatgagccatgtgcagcacatttctctcatcatcttggctgttagaaagtttaaagtcaattataaagtgaacactgtgtgtctgcacagtacttcagtgaatatattctttcctcggtcagttttatgatcctaatttttctttcttttgctttttccccctcatttttttctgtaatatttactctcttgctattgtatgtattattggaagctatcttttcagcacaacttgggccatcaaaagagataaggaactagacgcctaaaaatgtagaaaagaaaataaaaata

SEQ ID NO: 59757 - DNA, 1585 bp, Homo sapiens
aaataaaatggttttatctttgcaattattcatatctacttagggtatttttaatagcagaggtgaaagtggggcaggaggaaatgtgagaggaagtacacatcgcagatataaagctgggaatgtgtatctaccagaatagcaacaacatgctgtttggttacaatctaaacagtcagggcccagtcttcagctctcctgttcaggcagcctgcagtgtccctggagagagtctacgcttgccttacattaaagtgacctctttgactcatgttcacagccgtgttaataagcttgaaaaaggtgccctatccagttatattttttgaaaaaccagaagaaataataactgagactgagtacatttggaataaggccagggaatttggggactgtcttataattactaccttttccatagccaaaattgtttctttgtatttcatggacacatttacaatgtccactgtttatacattccctcaatgagtatcaggagaatgcctttgcagataaattgctaagaaatagcttgggtatgggccagttctctttttgtttttggtatgtgacctcactgtcaaagcattccatccttcctctcttcccaccccctatcccagtaaatgagtatgcattacatgcaggataaaactatcatatccttaaacaaatgtccttttcaaaagtgtaatataaagcagacccagaaagtcggctgctataacgatttcatgttttgctgatcccggtcttttcttctgaaaggcttcttagtggtccccagtgaaaagttgagatcagcatttaaatgcaggtctatctttttaacatactttaagtcctcagaattcactaagtctcagtggctttgagaatttataagcgtatctaagatgttaaggctacctccatgtcttttttttttttcatcctgcaaaattacattaattggaatttgtatttttcttcccctctgtgatttgaaggaaatatactactgaataagatttcttcaagaccatttctttgtgtgaagcagctttccccagacagttagggaccaattataggaatacttatagtctttgaatttttacagctgatgtacactggttcctctcctaggtaacagtaacatgcacatgtgcaatgagtcacaggaaagaaaaaaaaaagaaaaaagtaattatgttgtttcttgttatatgcaataaccagcatttggttagaacacccgtgcaagttttaattttaaatgagaagatgaaggcaaaagaagccaacttcttttttttaattaccacttttctgcatcaatcaacatattcatttaaatttaaaacttagcattttatatttcagtcatgtttttcttcgatgtcctttgaagtccttatctatgttctttacacatgtcataaagacatttttattaaccattaaaagcctgagaaaaagctgattgaggtttgaatgtttcatattcttaaaggtttcagtctacatgttaaatggcaaaaatatagccactgaaaactgtcccaggatgaatttaacaaatagacattaatttgatctttaa

SEQ ID NO: 59758 - DNA, 3089 bp, Homo sapiens
actatttcttttactttaacattttcatttatcttccctcttcccacccccaaaaaaccacacaggggccaagaaattaattccctaaatgctgtcaactgggttgggaaacagcaataaacagcttactgtaaagcctccagctacaataaaacagctgtcaataagtgggctgagagttgggctgtgcaaaaacaggttctctggatatgataatacgagagggaaagaggctgacacttcctgtttcaatatgctaaggtagtggttctcaaagtgtgggccctggactagcagcatcagtaccacctaggaacttgttagcaatgtatattttcagtcctgacctcagtggtacgaaatcagagcctctggggtagaacccaacaatccatgttttaagtagtgctccaaatgattcccagacattccacagggagaatcagtatcatattttaaaacaatatctgtcaacaagaccatttttcttttaggcaaatataccaatgaattttatcatttaaagccttgttggaatggataatgttgtcgttttcatcctcttcaccttttggctgtaaactttgttgttttttttttttttacaaataattaccgagacatgaccttttgccaaaaaaaaaaaagtaaattcttaacctataaaggctaatcgcacttccaaaaatttgtaagaaataatctgtgaaaaatttagtgacacatgaaagctttataaaatagagtgaatgaggaatatgatttacagtgtttcctatgttctttgcaggttaacacaagggaaaacagcaaggggaaaaatatcagacaatataggaattgatgtaccacaaacaaattcatgatgaaaacatcagacgttatgttttcgttatacatacagtataaatgagtgaaatttaagtttggtaagcttttaaccaagaatcttgcattttacccacatatcaattaatagcataaaatgaaaagatggtgtgagcaatagtcgtcacacaactaaaatcttcacagattgtatttttttaaataaattcctttgaaagtttttgtagcaagaaatgttactctttcaaaattgtgtagcttcaggagcacattttatataaaagccactagttaaaaaagtttttactttttagcttaactagaacatctgcagatagcaatcatacagttcagtgaaaacaaatttttaaagagtagtatatatttgatgtcgttcattcataggaaatatgcttcttttatccaaaaaaatgtacatattactttgtatatcactaccacttctccaccgacttctatctcttttctccaacatcacactatttctttttcagcatgaaaacttttaaaaggtgtaagcaaagccattttaatagctctttatcataagagtgaattacctagttccatatgaacattggaatacccataggagaactgcaaagtgacacatggtcacaagaaatttctaaaacgcactttagttccagttagagaattactcagtatcctatttgaaagattacatcatacaaagacttttatgactgactaagcctcaagaaaagatctcttgcatactttgctgaaatgcacttaacatttatgtcactacactatatataggttcaacttttggggaggtcagaaaaagtggatctatacatcaatgctaatatcaccacgtatagacagaaaaaaagatgatgctggaagtatatcagtacatttctttggaaagaaaatgtcagattttacatgaaaaagtttaagtcatattagtttctcaacataattatgcatatcataaaataccatgtgtattgtgagtaaccataacagaagtaaataatttaaaaaattttctttctgttcattaagagcaactttttaatcaaactcatttagtttcataaattacttttcttatcatagttaactatttaacttttaaaaacctttactaagactgaacattttttaaattttaaaacatcaacctcttttcaaatactaacaaagttaacacaaaaattaagtcgttctaactttgacttatatgtaataatctcatagtctcctttaaaattctatactgattaaagtcctttcttcctgtgtatttaagctgtaaatatttgtacttttaaaacgctctactgtttaatattttactttaagaatggagattttagttgtatggtaatatgtattatacttgatgttctgggagtatctgtatgactcattgtcaaaattactcttataaatattttattaccatgaagccttaagtccttccagagcaataaatgatagttggtaagggggaaactgtttcaataaaacatcctacttcaccccaccctcagaaaataaaaactcttgattctccaaagactaatcaatgataactgttgatactgttctgcaaactaattttgctttacttgattttctaaaatctatgtgttccttatttataaacaagtacagatgggccatcaccataggtgaactccatatcgacaaagacagaactagcattacgaaatcctagaaagttggtgtgctgagagctaatcacaaaagagcaagcgaatgaacttaaatgctagttgctccagagcaactatcattaaataaaaggtatctttggctgtactaccagcttgatccttccctcccccttctccttgctactgcgggattggcacctggccagcacaagcgacatgataccctagtgccatctacaggctattatcgatattcaaattttgtggcaacagacaagcaccagtgaaataaattagacagcgctgcatttaaatctttattaacaaggaattattagacctaagaaaaactaattctggatttggttgaaatatgagtttctcagcctcttaatccctcttcatatggcatatttcacagtttaaaatgagttatgacagatcacttatgcattactaagatgagagaatatttacaatggattcattcttttctttttaaatcagttatattaggcagcaagcattcttttttttttt

SEQ ID NO: 59759 - DNA, 1344 bp, Homo sapiens
tgaggcgctcctttccgtctcgcgtgctctccctctctcccttcccctctgcccctctctccttctccctctcctctctctgaactgaatttcttgatataactctcaataagcccagagggagggcgtgactgcccaggccccgcccccgggctctgattggcctgcatcttgcggcgcgggcggccgcagcccggcgcgagggagggagcgcggaacaaggcgctgactgtctcccagcctcccctcctccgcgccccctcggcagcagcgaaaacccggaaatctgatcctggccccaggagagccgggttccatgaggtgcactgagcatgctctgcagggtccggcgtgggagggacgcgctggcgctccccaggcccgggcggaagcggcgctcgcaggcgctgaaagcgagcgaccctctgagcccgggtggtccggcgggcaagggcggcgcgggagacccgcagggcgcgggcgcggatccggggaaccagggccaccgctgcgggcggatgggggtcaccgaggcggctcgtctccaggcgcacacttcgcacatctctttgctaagtgaaggggccaaaatgcacagatgggggagtctacccaggaacagaggcgcgagacgtatagccacccctgggttgggagcacgagccagcagatccccggagcgcgttaaacggacaacatgcccggtgctgcaaatagaggcttttgctggcagggacattggaaagaagggcggagagggagtacagcgaaaggtggggaccgcagaatttggaatctctgcggagaccggaaagaaaattaatcggagcacttcctacatgcagagccacggaaactgccttggaaagagaaagtggcagcgtctgggtcccctcggtcagcccgggccagtcggctgcgcgtgcgaagtctcctctagcggagcgggaccggccgcggcggtggatcgtggcggtccctgcacttctgctccagccgcgcctggaaacctgagcccggactcgcggctgctgcaaaacccgcttccagcccacctcactgcgaactttgcttccgaggggctggaaggagtcccaggcagctgtttcccaagctgtggaacacttcctttcccctaggcactttctgctgattccaactttctttcctgtgattttcgtcttttcccgtgcatttcatttctccgactccagctctgtactaaatcctcacaagtttctcgttttcatacgggaactggatggaatgactccccaaaaaatacagctttatttctcaaatactgacccccaaagcactatctagtaatatatttgattgatc

SEQ ID NO: 59760 - DNA, 471 bp, Homo sapiens
caccatgcccagctaatttttgtattttcagtagagactaaattttagatttcaccatgttggtcaggctggtctcaaactcctgacctcgggttctgcccacctcagcctcccgaagtgctgtgattacaggcgtgagccacagcttccacctgttttctgtttgtttgtttcagtctttgctctatttgtattggcttctgtcctcattcttgttgcctcatggtcacatgatggctttaactgctccagacagtttcacaattaatgtacaagagattaagggggttgcatagggcagcttacatgacatcagccgagtttttttttttaatttgcatgtctttaggagacattttttttcttgatatgtccttctgttagcagaatttcacttaggttcaccagatgcgattgtgtttcttagccattcatagctgtcaggaagctgagaattgaggactgagaccg

SEQ ID NO: 59761 - DNA, 663 bp, Homo sapiens
gtcaaataaatattaatggtcatgaagcaatctgttaggaaggttgttagtattcatgatgtaaaaatttactaatttttaagtgatatccatttcctaagaaatatctttttcctaaaaaagatagtaatttcagaagagtggcaaagtgacagtgggctgaagaaaacatgtaactgtgtattgcacaaaaggaaaatattcgatccattctgtacccataatacaattgtaattctactacccataagcagagttttcagtaagcctacaataatgttgacatttctgtctgggaatggtttcatttctaatggcacaagtaaatgtttcagccaaaagagcacaccaccattctttaatcagatatctatgccttttagttgagtagtgaagtccaatgatctagaacctagtagtttcagtaaatgctgaaatagtcttccacggaaaggtccagccaaattatgtgtttcaacactgtgatgagctcattcttagataaatctctctcactaggctttcagttttaggcagtactgaaattcctttatcgcaaaagagctatgaaataaatactttataattgcataattgcaagattttagaaggcatttaagaaaaaatgatatagtctagaaaagcaattttgaacaaagaaat

SEQ ID NO: 59762 - DNA, 573 bp, Homo sapiens
tctcccttacagggtcaacagcttaactctttctctctctgggtgcgagcaagctgagctgggtcctggctccccccgtctatctgaaagacagaaagctctggctccccctctttttctctggatgcaagtgtgcctatacagtgtcagcagggcagttataccttttacagtcaatagttgctctgagccaggttatgagccttcccatgttatggctacatagctgtgattatgtaataagtggagttacgctcctgcgctccaaactcgctgagtcacacaggatgtttaccttggcctatgcctgcctggctgcagtgcaggcatattccttacaaataaacatttcctgagaaacacctacatgctgggcactctattaggcattaagtattgataacagaatgaaactggcatggcactcaggtaaatgagtattttgtgatggtaatgggataactataaaggcataggagaagtgcctattccagcctggggatagcagataaagattctaaggggatcattttttatttaagcataggatccctgcaattagcagggtgaaac

SEQ ID NO: 59763 - DNA, 719 bp, Homo sapiens
gcatgcctaacttttgtactagctaatttatgtctaagattttgttatcttgataagcatcattcatagcttttctagcttattaatgtcttttcagatatcatgtttgtaggggatcagtcagtgtggttagaaacattgtaagatgaaattatagaatatagacacaaaccttggaaggctggaaggtttgcatagcttcagtaatagatctggcatgaaggcagcctaatctttaccttgagtagatagcttaaagtaggtacaaaataatgtaagggagtttatctaaataacttgtttactcatgtgttgctaagactaacctttgatcattggcaggcaggatggctctcttggggggagggcaaccaggttaattacccacaggtgtattgactcaaagtctttgtcatttaatctaactaaataaatacgaatttggctggcttatctgggcaatgctccagactcagagcagagcctcttagccagactgacaggcaaaatatctgtgtcagtgtaggtctctcatgtgtcgccaggtcagggtctgagggttggacctcgaaaatgttaaccttttaagaaaaggaaaaaacaatacattacagtgaatatcttctccccagataagtcatcagattaacataatggacataatactttagattttctttaggcaaatcaaataagggcagaccgatacaacactcatc

SEQ ID NO: 59764 - DNA, 661 bp, Homo sapiens
taaggttttcacaacccacagaccaggagatttcctcaggtgcctacaccacaagggccctaggtttttagcacaaaactgggtggctgtttgggcagacatcaagctagctgcaggagttttttttcatacccaatggtgactggaacgtcagtgagatagaacttttcattcctctggaaagggggctggaggcagggagccaagtggtctagctcagtagatcccaccaccatggagcccaggaagctaatatccactggcttgaaattctggctgccagcataggaatctgaagtcaatctgggatgttccagtttggtgggggaaggggtgtctgtcattactgaggcttgagtaagcaattttccacttgcagtgtaaacaaggctcctgggaagtttggactggacggagctcactgcagctctggaaatcccctgttgccagactgcctctttagattcctgctctctgggcagtgcatctctgaaagaaaagcagcagccccagtcaggggcttatagataaaactcccatctccctgggacagagcacctgagggaaggggcagctgtgggcatagcttcaacagacttaaatgttcctgcctgctggctctgaaaagagcaaaggatctcccagcacagcacttgacctc

SEQ ID NO: 59765 - DNA, 1903 bp, Homo sapiens
agaaaagttctccaagtccccacccaacccagaagcccagctggcttcacctctcactgggatactccttcaacagttagcctagcttgcactgagcctaaatatcagcccaacctgaaaggttaaggtcatctcaggtgttttctgaacatgcctcttggctttctaaattcccaagtgtgcgtgttgcttttgagagttctagtttctaaaacaaacaaacaacatttcttagctttttcccacaggtcttaggtggtctattgtttgttttgactgtacttttctgccccagtcaacaaaggattgttagttttacttacagtatttttgagcaatgaccactactggagataaaatcctgactttgcctttcactactctgaatttgagcaattagtttaactattgtgttaaataaacttatttctaaaacttttatttttgttgttgttgttttcatttgttttcaaaatgtttcagccgtttggggaaggcagcaaacaagatatctgcaaacatgtttggtctactaatattggttattaatattattcctgttgagaccagaagtcttctcctcatggaaggtttttttctcaaagggttcgtgatctcatggacttcaaggaatgaagccatggacctcagcggcgagtgttacagctcaattggagaaatgcgtgcacccaaagagtgtgtggcagcaagatttattaaagtgaaagtaaagtgaaagcgaaagtaaagcttccacgaggtggaaggagacccggaaaggttgccgtttttggcttgggtgtcttatgcttatatccccttatgacccctcctcttttcctttttctatcctatagaattagcttattttcaatccgcttgtgggttggcaggcttgattggttaaaaacatcaggctgcagctagagcttaaactccctgtatgattggttgaagtgtcaatcccttagcttgcagctgtgactcattttggcttaggggaaggtcccctttgattggttgaagtttcaatcccttagcttgcagctatgacttatttttggcttaggggaaagtccccttagggaagtccctattgacccaggaagtccagccaacttagccacttagtccctcactgttaccgaaacactgtttactgaaacagcaatctgtctgttaccgaaacattgacattagccttaggttactgagaaggtaaatgacaggagctagtgaggtttctcttaactaggatagcagtgcttatatatcttgattttcccaggaggatcttagtttatatttattgttccagcatataaatggtgtcccttttcaaatgttaaagtattgtaaattacatagatagtgtccctagctgtgattctgtggacatcacaccatacattgacctttcagaaagggagtggtttagccagacaataaaagaagacatctagctttcattttactcctgtcttctacctcaactatgtctctcttcttcttccttaatagcagaaactcaatttttagttggacatattgctatctagaacaaaagacaacagttcctaatctctcttggaactttgccaaccagaggactaaattctgaaaactggtatgtgagtgttgggtgggactgttatgggtgagaaatatctgagtctcacagcaccaaatgtgttaccagtgcaagtagttgagtcttaaggcaccaaatatgttaccgatagtaggcatcgagtcactggcagcgaatccgtatggatctgcagcaatctcaattcttgcctcctcagaagaaagaatttgactgagggcataaggcagaaaaagagaccaaggcaagtttcagaacaggagtggaagtttattttaaaaggctttagactag

SEQ ID NO: 59766 - DNA, 662 bp, Homo sapiens
ggtgtcacccgcttcaagaggaaactaggataattatgaccaaaggggaacttgttcattcgccggatattaaaggtgcctacttaagtgcgaagaacaggaggcatagcggtgaccaaacacctggcccctgtccccgccgggatcccaaccttggggacccccgaagcgccccgggcgggaatcgggtgggacgcggcacgcaggagggaacgggtgtactgggtggggtgggcgtgacgctgtcaccgcaggagatcgggcgggtagggcggacctgggatgcgggatagagggggcgcggcattcgcgcgagagggacgcggtgcgcaaccggctgactaggggccgcaacgcctagcgcgcgcgacaaactacgcagcggcggagacaactctcaagggatagggccatcagccctgcggccctggcaggtccctaccaaagatcttggaagatgccgtttggggcactaaggggacctgaagtcctccccaggctcattcccgcctgggggccttggctctgggaaggcacgcaaggtaaagggagcgcaacggaaactcaccgtccatggtctcccgcaccgcattcagattcgccgccgcggccgccgccgccgccccagcaccgctgctactcgccatggctaaggccgaggg

SEQ ID NO: 59767 - DNA, 2188 bp, Homo sapiens
atttaacgtaatattcctcctacctatggtgctcattagtgaaagtatagaaatgcttctcttggttattagtcacatctcggatgcgtttatatacgggggcactgcgatttctcacttcttgaagaactgtttgtagcacaattacattcctgatggcagggtcctcaagaacatcaatcttaaagaaagataaagttaatttttcctatattcatttgtaaatagctctgtcaaacataaaatcctgttttatgttgggcataaatactttatgttttaaaaacactgaataagttaagccaagaagctatttggctatagaaaacgagacaatagtcactaaacccttcagatctattaaaaaaagcacacttaaacagaccaatcacaagacttcgtagaattaagggtattaataaaggaatacgttggcccacatagttttttgttcctaggcacttacaagctgcctgggagtcgcaggctggaggccacagaagcccaggtccccggcctccaggcacttacaatctaaggcagaagagacaccaggagttagaaaaataacgtgtctgaactacgactccaagaactaaattttttaaagcacaaggaaaagaacctcggcctggggaacaggaagcttcggtcccgagggggtttccctttcgctaggtatgtgacactgccaaagacccgcctccctgggcctcagtttccctgtcatacccccttgtccccgtggggccgcgctgtccgcggttcgcccgcccacgcacctggtgcagtaacacattagtgtcgggcagcaagtagtgcggttgcgggcagacgctgctcgccgggtcctggggctgcggctccagggccggcccctcgtgcgcccctccacacgctgcgcacccgggcgcaccgcagccgatgtcgtctcgcaggtagtgctcgcgcacgatcttcatcacgccgcccgcccgggtcttttttaagaacgtcttggacttgagcatcttgcctcgccgcgcagaatcctaaccccagcagcgctcttccagcaaaaggcgtcaatctagaatacgcctaaccccggaggttcttccctttccattcccggatattagtaacacttctcgcgggaaaatgccgagataaacattggttggctctctgacggccgcggggattgggcgagagtggggaggggcggcaaagcaaggcgaggagccatttccgcccgtggcctaggcggggcttccttctggacgccacctcacaacgtgtgttgctttccgctcctcggaacatccgggagagttgacttccggcggcttgtgggagtgctggttctgtcctccttgcgggtgcggagatggttgtcttggttacgggtcctaacggtcccctgccttgaaatcccttgttgagggcctgcaaccttgtgcttccgaccggagacgcctttggtccctcggtgtctgcactggctgctggtcaaggcttcagtgtggagtaattgacactttcgaggtaacttgcgactatcatcgctttctttcccgcgtggggcaaggaatcccccgagctgccaagtttggggcttaattttcacgccgagtgtataggcagtccccgtctcgggccctttgtaatcgaggagagaatttgtctttgaattcactttttcttacctatttcccttcaaaaagaaggagggaggccgatcttagtatagttctcgctgtttcccctccacacacctttccttatcattcagtttagaaaaactgaaatatttaatagcataatttgttatatcatgaggtattaaaacaaggtagttgctaacattcttatgagagagttagaagtaagttctatttagaatttcttgaatttttcttatatcctgttgttttcattctgctatctataaaaaatgtttttgtccccgttttccctatttaaaacatcttcaatgatgcctcattgcctgtagaataaaatccaaccctattttgacatttaaggccttccagtcttgatcgttaagggcgtgtgtgtgtgtgtgtgtgtgtgtgtgtgtgtttgtgtttgtgttgggggggcggtgaaaggagtaactattccaagacttggctttgtttttttacttccacttacgtatcattaataactgcatgatttctcc

SEQ ID NO: 59768 - DNA, 1196 bp, Homo sapiens
tgatagcattttttaaaggtaagatagaggaatataaatttggaggttggcaaaactggaggcaggaggccaggcgcggtggctcatgcctgtaatcccagcattttgggagggcaaggtggactgatcacttgaggtcaggagttcaagaacaccctgaccaacatggtgaaaccctgtctctactaaaaatacaaaaattaaccgggtgtggtggcacttggctgtaatcccagctactcaggaggctggggcagtagaatcacttgaacctggcaggaggaggtggcagtgagccaaggttgcgccactgcactctagcctgggcaacagcacttggccttccaaagtgctggaattataggcgtgagcccctgtgcctggtccctctatccatttttagcctgtttctttcaagtgtttttaaaatatgtttattatgaaactgaaagtttttctttatgacaaatcatataatttatctttttctctttacgaagattgaagaattggaggagaaacttaatgatgcacttcaccagaagcagctactaacattgagattagacaaccaattggcttttcaacagaaagatgccaggtaagaaaagttttttttaaaaaaaaaacaacatctatttagcaattaaaagtaattttattgcctgttcatgtttgtgactgtaagctaaaatagagaaattttaagtcagagatagcaataatttttacacctagaccacaaaaaaagtaggatacttgatatggtacataaaatacagaaagtcaaaattcaacattcattcaacaaacattggtcagtgtaaaccatatatgataaaggaagctctctaaactgaccaccattaacctttcttcttttacgcaacatattgattgattctcatgacccattggactttcctggcctgaagtactttctattattcctgtgtactttctctagctcagttgtgggcttatcatgcttaaatatgcctatggcaattatacttatgtaacttaattaaaaataatacaaacaatgaaataaattctttggaacgattcaataaaaggaactaaaaaaattatgaaattaaatataagcaacacaagtttaaagattgagggcaaacatgaaatccatataagataccttcattggtttcttcctaaatgtcttttaggatctc

SEQ ID NO: 59769 - DNA, 755 bp, Homo sapiens
tgacaaatctctaatggttgacatttttaaaattttaaatttgttgttaatattgatggcagcagcggcccatctggagcagctgttgtaaagatgccagctgcagtgggggaggcgcgtccagggctgcatgctccactgagccagcaggagccggaaacaggcagaaacccagaccccttccgagttggaggggcgggagccctcccaggcgcagctgcagtggcccagtcgcagctgcggacccaggcattccctcactatcttcggcctagggagcccccttcccccacgggttcagaaatgcctgttcccgctgcctgacctctccctactcccagcacccactctgatttcagagcaaagttgaggccaagcctgggcactgttgcaggtgtgcccgctcttggggcattgctgacaccccagccccctgccacctcggcctcctctggactttggacactgacaagcacggaagggaggctggccaaagtgggggatgagggtgtcttggtgcaggcctgcaggtgccctttggcactccaggctgggcgccaggttacagctggttgatggcggcaggaggcaggctggcttctgggcggaaaggggtgggtccctggtgaagccccaccctcaagccagggatagcctggagcatgggagctgcgccaccagtttcacagaacggagtgagaacttacagtacttttttcctctggcccacccattgccacctatggaccaatcag

SEQ ID NO: 59770 - DNA, 2280 bp, Homo sapiens
attttggatatttaaaagtacacactcattagacaaatctctaaaagcctcagcgcccctacctagctgccttctgggtttcagcttttgagtttcaggtccttgcacaacacctaagacgtgcaatactctttttcttcctaatcctggcagagaacagtgcgaagagatctccctccgcgtctccaccctaattccccctcttcccagattccacccgctccgctacttccctccgcccccggctccgccagcccaatctgtcagagaagttgtgtacaaactgcgcggccgccctgcgcgcgaagctcgtggcccgagaggggtgcggtcgggccgacggaggcggggccctggctgcctctctccctgctcataggctggccgctcaggcctggccggcctcggggcctcgggattcgcggcggcgctgccaatcaggcgatcgggccccgcccccccggagttgggtgaaatagaggcgggcgtcaagtgtcagtagtcgcggggcaggtacgtgcgctcgcggttctctcgcggaggtcggcggtggcgggagcgggctccggagagcctgagagcacggtggggcggggcgggagaaagtggccgcccggaggacgttggcgtttacgtgtggaagagcggaagagttttgcttttcgtgcgcgccttcgaaaactgcctgccgctgtctgaggagtccacccgaaacctcccctcctccgccggcagccccgcgctgagctcgccgacccaagccagcgtgggcgaggtgggaagtgcgcccgacccgcgcctggagctgcgcccccgagtgcccatggctacaagggtgctgagcatgagcgcccgcctgggacccgtgccccagccgccggcgccgcaggacgagccggtgttcgcgcagctcaagccggtgctgggcgccgcgaatccggcccgcgacgcggcgctcttccccggcgaggagctgaagcacgcgcaccaccgcccgcaggcgcagcccgcgcccgcgcaggccccgcagccggcccagccgcccgccaccggcccgcggctgcctccagaggacctggtccaggtaggaagagccgctcccctcccaccgcagcactcccgggctcgggcgtgtcccgttgctgcgactcgcgggcgacaggggccgctccaggctggggcgtgcgtcggggcgcaccggagccggtgctgggtgggcagccccgccctgcacgcctggccggggccccgcgtttcgctgagagtaaatgggggggggggccgggggtgggaaggatggaggggaatctgccccggcgggtcggcctgggagaggtaagagggagggaactgggtgctcacgcgcaccttagttgtttttcttacacttgagggacgaaaccttgtaccttacgctcagttttacttaaattacgccttcgcctgtaccgctctccaatgccaaggcattggagccctcccccccatccccatcgtctcgggttaagtagaaacgcaaattggggtgctggggagaggttccccaaggtttcatacccggtggctcaacctgctttagaagcgattgcgggccgcgtttggaaaatgagagttaggaaagctaaggttgtgtcggagcgcttatttttccttaaaaaaaaaaaaaaaaaaaaaagaccgggggtgttgttttcttcgtgtgcacgtaaatttcctcccggagccgcgttgaaagctggcagttggcttttacacttgcccagcagccgaattagagcaaccgcctgtttctttcgcccacgcagggagtcatatagcccagaaaaaacttcccgggacttttagcctgtcccaaggaaaaaaaaattggaaacatacccacatgcaaacagctggaagagctaaaatcagaaaccactaaccgccgcgggagcgcagtgcacgaaagggtttagttcagtttatttcaagacacttcatttagtagctctttggcgtgtcgtatatttgctacccagcgcctactccgtggggtctgccagggtcttgctgtgagagggcagtggcgtttgtcagagatgtgactcacatgatgagagcgttaatttttatttttaaatcatgtctatccgggaaaccccgtccgcatccacaccaaggtccgagatgaaacgcatttgaaatgaagtagtagcagaaaatgactgtcttatttacctgttaaggtgccacagctaatatatgcgccattccatctagttggttttcttatctttcgaa

SEQ ID NO: 59771 - DNA, 1322 bp, Homo sapiens
ctgcccccctggttcaagcgattctcctccctcagcctcccgagtagctgggactacaggtgtgcgccaccatgcccagctaacttttgtatttttagtagagatggggtttcaccatgttggccaggctggtcttgaactcccgacttcaggtgatctgcccacctcagcctcccaaagtgttgggataacaggcgtgagccaccaagcccggccctcattgactctttctacagtagcatacctgtttcaagaggcatgctctatatagggaagcccatcagaatccgggaattaaggaaacaagacatgaagggaactctcagctcatctagagggctccccaggctccctttagggcgggagtctgttccaaggtgcagccagcctgagcctgccaagagtagcaggtgagccctgttaagaccatggtaagtggattcacctgcccagagagagatgcgccgatcttgactgtctcttgagggatagtggaggatcagagctgccaagataaaaccctggagcttgggaggatttcaagcaagtgctttgtccactcgaaaaagccttcatccaagccaaataagacaagtgactgtgagaaggtaataagtacatttctggtgattatacctacagagaggcaggaataaagggagagaacaatgcttccaggcctttgatctttacctgccacaggcctctcctccccttctagccgacttcctgaggcaggaaatggtgacatcaccctgcgtttgtcagcactctcctgttctgagtcatcaggattgctggcatagtgatccataagatttccaagtagattatttactccccttttaggggcttggtattgcaccttccctcagtgtactgtcagacctctcttcagttagagatttcctccttgggatgtcattcggtgtcctcataggtagtatcttctaacttttattagcattatcctttattaaccaactctaagttgggggtgggaggtcataaaaatacccagttgaatgaattacagttaattttaaccattcctccattgttggacatgaatccagtttccagttatttgctgttacagacaatgtcaaaggaaacatctttttccacaatgtgtgcatgtgttttttttttttgaaatgggctttcgttctgtccctcaggctggagtgcagtggtgtgatcatggttcactgcagcctcaaaatcctagactcaagtgatcctcctacctcagcctcctgagtagctaggactacaggtgcacaccacagtgcctgactaatttttgcatttttgtacag

SEQ ID NO: 59772 - DNA, 1116 bp, Homo sapiens
aactactccaaccttatcccactctccctaatggtgagtttatctcagtttggccaaactagaacttcaaatacaatctaccccttcctgtctctgcatctgtgctcatgtcactgcctgggcttgcttatcctctctacccatctgaccctttaaactcatcccccaaggccgagatcttctctggaggccatcatttccctccactgtagctcaacctgagcccttccttatctgaatctgtgagttcctgtctgtgcccctcccatgccatgaacatttattctcatattgcactgttttgcaatgccccactgatttgatctctctatacaaggatgaggacaaaggtcaggtatcatgctactttcatattctccagagcacctagcatagttctgtacaagataggcactcaataactatttgtcgacttgaaataataaggtacgtttttctctttcccgctggtcttatctctgcttgagtaaatgaggttgatatgtgaaggcagttgagattaaacatgtaaagtggaagaataaacaagagacagaggagattttaataaaattttatgatataaaaatcataattacctgctaaatctattttttaaagcttttaaagtattcagattgctcctctcaacctggtggcgttttggtgtgtttgactaaaaagcacacaggtgctaaaaagcagaattattattttaaaaatatttggcaacaaaaataaacttgttttaattcaaaagttcttgtgatttttgtttcctcaaatgacttcatagaaaactcctcatgaaattttagtgtatatcatctattttgactccaaattgactttggttagaaaaacctcatttcttttaaaaaatcaatgataaataaataaaatatgtagatcaagtttgttggcataataacagatttagttataaattgaagacttcaataaaataagcttggagttagaaattaccaagacatgctctaagaaaaaaataataaaaagaacaaaagcactcaaactgtgattcactatgaacattttccctgtaaccagctctgctactttcattacagaattagagaagtaaacttaaagcat

SEQ ID NO: 59773 - DNA, 1323 bp, Homo sapiens
atcttagttaaaaaagtatttcttttcaaagacgagagtaacttttaaaaaatttgtgtcattctacagattccattttcctgctgcaaactagagatcctgtctcatcttggatgtaattcctacagttagacttctatcaaagggtcattgtgccaactggaattctttccaattcgagaaataagaatttgaggaatctctaagggtagaaatgacttctatcgggagacagcacactaacgcaagagggccaatggggttctgccacctgtatttgtaaataaaatttcactggtacacagccatgcctgttcactattgtctatggttactttgtgttacaaaggccaagttgagtaattgcagcagaggttatgtggcagcaaagcctaagagatttgttatctggcctcttaccgaaaaagtttacctatccttgttgtgtatcattctgattcacaatttatcaccctcagcactattgacatgcagggctgggtgatctttcctgtgtatgttgggggagtgtcttgtgctttataggatgtttagtggcatccttggcctcctctatgcactacataccagaagaccccctaccctcaccccagtggtgaccatcaaaaaggcctccagatgttcccaaatgtcctggttgagaaccatgattccagcttgacagattctgtcttttcaactggagaggagaggagtccatacctacttcatgccttaagaatctcttccatcagaaaactttgcactagaacattcttccaaggaatacaatgtcttctgctattatatcaattcctgtctgtcctttcagtttttaaaagaggcagaacactactgatctccattgcttgaatagaagtttctctagaatctttgtacttactaagaagtcattcctcccctcaatattattcagtgctaccgtcacttcaagcccacataaatggaataatttggattttctactacagaaaaagtagcagttgtgtacatgcaagctattatcactgttacagttcttcctctgacttaacctgagaccggtatgtggagctatcttcattaagatatccattaagaaatttagtgaatgagaaagatttatggcatgtatcctaatcagagaagcatcactgtctgagaatgtgaatgattccctttctaaactctacaattacctggttctgtttcactataagaattgcctcaacaatataattatactgcaagtatttttcttttcacattttatcttcatttagttaatgacaaagctgtatatagacacatacatatatatgt

SEQ ID NO: 59774 - DNA, 490 bp, Homo sapiens
attaaaattaaagaaaacatggattcttgagaaaatgtaatttagagctcaggactacatttattatttagaagggtgagaagtgagtttaaaataaattcattaactcccagactacaacgatctgcagttatccttcctgaattttacctgatgaggtaaacatgacctaatgttccagaggcttgttccatacgtgtgacgactgtgacattgccatggatccaagcaaaatattgtttctctggcactgctcatgttatcattaccattatgcaaccttaagtttcatgtagtttaaattagagaaccagcagagtttagtcaagttcctgttcaacaatccaaagatcatttaactttctatttaaaattttttttctggggaagtatgttcctttcttatttggaaataagaaataacttttaaagtgtcaggaaaacaaacattcacataatgttttctccagcgctaattccaaagtgatca

SEQ ID NO: 59775 - DNA, 786 bp, Homo sapiens
tattaatggtgcttattcttctgccaagcgtttcacaaaaaattttcctgtaacctcaaaaaaaaagtcccctcaacctcaccaaaaatgctatggttgaataagtttgggaaacactagaaaccatagccatctaggagattcataatgatcattagcatgttaaaggctctgagaagtcctgtagcaaaggcctttgtttaactttgtttaccttagggtttcataatttatttcacaaaagtaggccgtttcatgtaacatctaatcctgaagagctaatgtttaatgaaacaaccacactttggtaaacactactcaaccagcattaaggaaagtattattcagactttgtagtagattaaacaaatatcatcttaatatctgttagaaacagcataatttgtgcaggtgtcccaaagcactatacaaatttcatttagtggtaatgttccccccttgtacaaatagaaaaacaaaggtataaagaggcattaggttgcttgccagaatacacacaagactgagacaaactggaaccaaggcccacatatcctaacaacgatttctaatctgtgtttacaaacagaaccaaattgcaaattgtagccactggccacttctaactattgaagagctaaggtaaaaagtatactccttgagctagaaatagcgaataagattggggaactctaggagaaggtaacattgacctatctatttgattgctggtgactttcatcaattattgagagcagggactctgtaaaatttccaacagctaca

SEQ ID NO: 59776 - DNA, 733 bp, Homo sapiens
aaactgtctccagacctactccctccctgccacccacacaaacctctgcttttacagctattagtttcatttctttccccagaacaatagctactttccaaagtaatgaaaaccccaaaaagatggccgaaaggaacagaaggttcagagggctaatctgtggataactggctcataggcagcaaattattcattctaatcgagagtttcgggaatgcaggcctccatagcagatgccaagctgagcaagaggaaagaaatcacacaatttccctggaggttgagttgaggcccacagctataaaatatagccttttgtgtgctgaatgctgaaccgggacacattaagacaagagatgtttatttataggcatcaataaagtgaaagcataagccatatgaacagaattgggctggtcaaggacagttaattcctgcaaataccttgttactcattgaatgtaaatgatctacttctgcattttatcatgtttacacagtgatattctgtggtggctgcttccaggtttatgtgtgtttttaatctgggaaagtccagggtttattcaactcttatgatgaatgaaaggtcattggtaaaaatcaggaaccaatctaaactgaaaagatagcaagtctggccaaaagtgtattaacttatttcaatagtttctttagaaatctatcatcttgacataagaaatggcttctcacattgcaaataaaagatcag

SEQ ID NO: 59777 - DNA, 1458 bp, Homo sapiens
cccttgccaggtacaagggtgggtaaaagttatctaaggtatggtgcctgagttcagtgagccctctttgtacctgttcccatgagggtgggcacaaagaggtgtctaagtgccctctccttcactctaccacatttaaaactctaggaagcaaacaacgttattcaaatgtgctgtgacagaatctgcaggcacagggaaggaaggaagggtgaacaggtactcctaggaggagtacattctggaagtgatgtgctacactggactttgaagaaagtaaagtcaattcaaaattttagccagataaaggagaagtgaagaatatattgctttccaagcttccaggattggacttatccactggaaacagcttaaagcttccgggaactgctgttatcttctaatcaaagcctagctagtaaacctccgcctctttgtgggtcactaaccggcaaaacaatacgccctacttccggctgccagcttcctgttatggtctgtctttagccaggatttgtgagatccaagcagtcttagcttgtattaccttcaccctttatgcttcatacattgctcttatttacaagaaaaaaaatggggatataaaactggtcttaaagtccagttagaaccaaggtttgtaagaaacccagttctctgtagttgtttaataagtgaaaatcattccaaaacagataatgcagttccagccccgcctaagggccaactgcagtctttccctaaacccagagccagactgcactttgcactcggaaggcttatttcttccaacatcccttattaacattcttttcctcacagcgcttctcaatggctgctgcagctgagctgctcagcacagattttctgctcggcatgggggagggggtgttaattatgcagaaagatggagagaggccagacagcccctctggtgaactgtctcattcaagcacggcccacttcctgctgttttgcagctacaaggatcacctgttggtctcggcgtccagccaaactggggcctagtggaaatgacagactcagctagaaatgaaagccagttcataatccagtatcctaaattggacaaagagggggaaaacgcaataatagtacataaaaattatacgaaaggcagcaagcgtaattttttcctcttttattcttttacttttttactttctgtctgcttgaaatacaatccttaaaatggatatttgagccaaaaaagttctccccagttaaagccccctgacctaagaggaagtgcaggaaattctcctgaactttccctataccctcactggggtatcagaatcctaactatttaaataaagtttaatcagccccaaatactcacagttctttaatttgttctctatcttttacacatttactttttatattgtcccctccttaaccctaggagtacaaagaaactatttcatcatgaaa

SEQ ID NO: 59778 - DNA, 467 bp, Homo sapiens
acagaatttttaaaatttttatatttaataaaattttaagatttattgacttctctcaccacttctgtcatttgatctatgtatagaattttaaaaattctataacaattatatacttatttcagaataaaattttaatatattactattagttttcaaagatctatatatctacatttaagaggtctctgcagaacattctttttgtttcattgcacacttcccagtgtttacacatgcacattcagtcttgaatgatgactcattaactattgatgggtcctggcattctagggcttcccagttgttagctcagtgtattcttaactaaatcgtttaatgaaaacactgacatgtaatgaatctggcatctcccatgatacacatgcaacttttgtaataataataaagacaggcatttgcactattacataaaatcctgtgacttgaaaaggtgtaggctgggc

SEQ ID NO: 59779 - DNA, 644 bp, Homo sapiens
aattaataaaattatcaatacaattgaataatagtttataacagcgtggtggttcctcaggcacatatagcccatctttaatacatattatgaataatttccttatgagacatctcagtaatattgagtataacaccaattgcatttaaacataaatgtcataagctggatgtgaaggttgattctgggtttcttataaaccacaaatttcagtttatttttatcatctagtatgcctcagatggaattcacagtaatcacagctacagtggagcaacttcaaacataaatgaaacaaataaccggcagatcgatacgaggtgacagactcctggctgaaatcttgccccagcgtgacccactactgcccttctgcactctaaagacttaatgaatcaccagaagcacactcaaggttgtgtgtgttttgcccgtgtgagagctggatttatatcagtaccaaaaaaggatcatcccctgccatgagaaaaatacaataaagaacacgtttctacaaggtactgggcatgatggtttcatgcagcatatgtatctatcgtataaacacttcatcattttaaactgaaacaccaagaatgacagaaatcagaaagcctaatgaggggataattttaaatgataag

SEQ ID NO: 59780 - DNA, 469 bp, Homo sapiens
tatggaggattcatggagaagggataccaaagttacctgtcttaaccaactacatcctgatggcttaagcctggctaaagctggcatgttcctgactagaaaggggaaaaagacagacaaatgaggaagtgacagataatgcttggactgttcctggatatcaaaaaggcataatttctacaaaggaactgaagcacacagcacagcagtatgccaagagggctcagctgtgattctattcaattcaacaaatatttattaggcatcttctgccaactcaaatgtaagaaggattccaaattgtatttatatcctcaggatataaaacagtgctggaacagacagtaggcacttaataagtgttgaaggaaggaataaaaggaaaggaagaaagggacaagaaggaagggaaggaaggaacgtctacagagcaggaatttactaagcactgaggatgtgaagataaaaa

SEQ ID NO: 59781 - DNA, 653 bp, Homo sapiens
cattaaagaagtagcctgcagattttcaatctctaatcattgttcatctttattttcaattttctgtaaatgatcatgtgaactgtaatttcatgtgtttttcttttgacaagcttggatacttcacctgtattatataaatgttaataatcagtaacttttataccagctacgttgaaactttttaagagtgactttctcaaggtcacagagcaaatctctggtgagacaggaatggaattcatgacctttgactgccagagttttctacccacactcggaaattccttccccataagtgtaatttatatgctcactttgagaaacaggaaagtttatccctttcaggggagggcagtgtgggggcggtggaggtatggctggagtgcttttcctatcaaatcagttgccacacaagaactttgtagttttacaaagtgacttttggccacattaccccatttaaccctcaccacagccctgtaaactacatattattttttccattgtataaactcagagaggttaagaaatttgaccaaggtcatccatagttagcaagcaagagagtaagaatcgaactgagatatttctgccactgaaattagttgtgattcaaggatgtatcatcttagaggttaccattcattgtg

SEQ ID NO: 59782 - DNA, 4536 bp, Homo sapiens
cactcctattcccatcacaagctgcttcttgctaaaagccaccaaatttatttcaaagcatttacttatctaaacaactctatcgtccagtaagaaaagggcatggaggcgtctaggtggttttgcagaatgacgtgtatttgattggcagatgtctaccgaagtcactagatgcacacgcactaaatgtaaatagagttgctcgtctctccgatgttacagggaaacagagaatcttaacgctggtgtaaaataaaatatcagagtgctcgccgagaattccattagccagtggaattatctaaaacaatccatacagaacgacactttagccatctatacagttaaattagagtgctgacaatactaactacgcaaactgtttatccagattacacattccgttgtattaatactctttaactcaacacagtcagcttttatcagctgaaataagactattactattaaagtatgcaaaactcgaagcgcagggtgaagggggttgggaagctgcagggcatataacaaaggaattggtactttttccaagcatttgcctcaaatgcactgcgaaacaaaactgttgagtgcaccccacccttttccccaaagataaaagttttcaaagttcttgcagacagctcgctacccaacaaaagcaggactgattctccccgtaggggagcatctaacgtgaacaccaactaatgtcgcggaggtcaagtctgaaccctcagagtgagcttctgaggcaagaagtggctcccaggccggctctgcgggttcccggcccgggtggacgtacaaagttgccccttgtcaactccggccaggtcccccgtaattgaaaataacagccaccggccagcccctggctacttgcatggaccaggcactgtagcaagtgacagttacacatcattacgaccagagacaataatgaatgtagcaccaggagcactattcatgccagcagtgtcatctccgccttaaccccttcccctccactctctccagcgcgcacacacagcccacacggtcccggtgcggagctattcatccaccccgctcgaggccggggggccaactacttccacgagccccccctcccccccaagttcagccctggggttttatttcacatccttggcaactgtcaggcaaacactgcaaccaacaattccactaggggtagaaaaacacttgcttaattcacgttacttgataacttcttctggaaaaaaaaaattaggggaggtggggaagaaacctccttctttcttctccacgaatccgaccgacgctacttgctttgcaacagcatcgcccttccccggccccctcccgcttcccagcactttccccctttaagaacacagaccaaccaaaatgatttaacttgagcagatgacagaaggaaaataaaacacgttaagagaatacggtctgatttgggatggcaaaaaaaaaaaaaaaagaggagggggttgtttattttgataagaaacggaatcggcacagacctgaacagaagctgcagagcaggagaaattgttttctttccctcacacagagtccccctctctctctccctttctctctctcacacgcgcgcgcgcacacacacacacacactcgcacacacacggcgtcacccgcgcacacgcacacgcagagcctctcagcggctctctgcagttctcaggaaatgaatggggggcaacccggggaactgttgtacttgcaaatgacttacccggatcacatgatgcgctaaatgtagggtgggccggtgggtggaggctgccgagttgcgagccccggtctagtgtggggagcctcgccaggcccgcatcgaattaccccggggcccagccgagggggttgcaggacgccgcttctcctccctcgcagcccgcagctcaggaaaccggagaggcgcttggggtggggtggggtggggtgctgtgagggggggggccgaaaacaagaaacccccaaacaaaagagctccgggtcctcctccccagaaacaaagccccgccgctgccggcgagccccggggtggggccgagggcgggggcggcggcggggaggggctcgctcagcaggcgctaagtcgctttattgccataaaatggggcccccgagccgctccgcccgaggattaggaggcgggctctgagtgtgatggttgaaatcccctgtgggaaactaacccctccccgctcgcagaggtagaaggcaacacccactgcccggccctcgcctccccgcccggaccgccgggctgggtccgcggcgcctccaccccgccccaccccgccccacccctgcccccgccctccggccccgggcctcggcagcgcttccctttcacctgcaccactttgctgcggcaccccaaataacccacacatggccctgggagctcggggagtcgtcggccgagggggcccgcgggggcttgcggcgggagggacccctggagagcaactcgctgggcaaggactcgcgccgagccgcgagaaagtctcctcttttgtgtcagagcgcgccagacaggcttaggagaattcggggacccaaaaagcgtgcagcccgcttgggcccccacccctcgccgcacccgcccgggtgggggcgcgcagtggagggagggggctgtcgcccgggtcgtccccgcggctcgcccgccagcgaacttggaaaggtgtgggcggagccggccgggactgtggggcagctcgcggggaccgcccctgggcgccgggcatcgcccgcgccgggcaacaatggggtcaggcaggggcagccccgcgggcggtgccccccgcgcgccggtggggcgggcggagggccgggcgcggcaggcaggggagtcattgtttgggttccggagcgacgcacgttgcgggcgaagcgggggcgccccttttccctgcgcttcaccttggcgggatgaatgggggcgaggcggagatgcgcgcctggcctcgccaccccagcgaaggggcccctgcctgcgccagttctgtgggaaagcacgcaaacttggaggactggggcagaggaagcgggatctgcagacccccgcggggcccgggggcggcggggaagggagtccagctccactgccccacgcccagagcggagccccaagaagcggacggcccggagccgagtccttgacgctctccccggcagcccctccctccccgcctccgcgccccggggagcggatccgcgggattgtggggcgggagagggaggaggcggccgggcggccctgcagttcccgcggcggctcggagggcgcggggtcagcgccgagccggagggtcggcgggggcggggagcagacggggcggaagcggccgggcgggcggggcgcgcggcggacggaggcgggaggctgtgggcccgcctcctcaccatcctaggtgagcgcggcgctccgggcacgacagtattcccctgccccgcgcccccggcccggcccgccccgcgtgggaaatcgccagggctgtgggaaggccgggaaggggaagtttgtgtgcagagagaaagctttgctgtactgtggcgtggagtggggtgggaagagaaacaagggagaggccgagaaacaggaaatgagaacgaaggcacgaatgtgagccagggccagctgggctccccatcggtgtggcggtttccagccacttcaggcgcggtgtgcgttcctaatgacaacaaaggcggcgtctgcctggtgcgttctctgcctcttgccactcctaggttctggggaaaatgggatgggtggtccaacctagaggaggggtcccacagcctaagatgcgtcttaggaaggcagcaggattcagaggaggggtctgtcctggtcttgaggtttcgaagaggaagaaatgtctgaaatttgtggagcactgctcgagtgaagtagcctcagcggcgggagcgggaaggcgcgggcgcagcgagggcgtcgggaacccagtgggactcgggggtgaggggttggtggttgctgcggtgcggtctctgttccggggaatgcagccgcaactcccactccctgatccgatcctgggcctagggtaaacagccccttacactccactacacccggatggaaacgacgtgaaaacacaagtttgaaaagcagcagaatatcaacaactgcgcaggatttcaacgagaaacttgcctctactagaatcactgtgaagtttccctctaggtggggcagggagtgaaggaagggagtttcactgtaagggtggaaggatgctgtaagaaattatgtcatcgtggcagttcttgtactaacagctctttctcgagtgagctgagtggcggatagaccataaatatattctatagcgagtgcttctgcacgtggaaaagcaaactgcactgccttcctatggcataagccacgggcttgttaggagagtgatgaaagatagaaaacaaactacaagaatccattccagagggataaggaaactaggggtaggtcaaggt

SEQ ID NO: 59783 - DNA, 452 bp, Homo sapiens
agtcttcttgacagtggcagtttttgtattccccattcaagtttactcaggaatttcttgaattcaatgaagtcaatttaaggtttcaaatccgtcagctcatgattctttctcaattttttctttgaaatcacgagttgaactaggacctgggtgagaaaagatgtcaaggagggactggcgaaaatattgtcctggcctagggatgagtcatctggtccagaggttaccgtctgtgcttgttcagtccatcaagttatagctggtccagcctggacttgaacatgtgctatatctatgctaagttcataccctttctatatcctccagctgtcatgcttttttcatcttccttgttccaaatatggggtttcttttggtccagctgttgcctcattgcaaaccctcattggcttttaccacactacactcatattaagaatctcaaagat

SEQ ID NO: 59784 - DNA, 850 bp, Homo sapiens
agttgcagcaaagttaggaccatgggaccttttttgtaaaagacgtgaatgatgggttcaaggcagctattcagctcagaaaacttgtgttctcattctccctgttctttgcctactgtcctcctcctcatcaaacatacggatgaatgacactacaaaggaagcctcttgttgaacaacacagattgatcaacattgaagagactttgaccaatgtctcttttatctcaacctttaactcagtttctgctctaccactgacttctttcaatttgattcttaaattaggccagatgcttaaaatttgggggttccctgtgccttcctccaggagtaaatcccaacaacctgaaaacttgcccattttcttttgtctgtgtgtgtgtaaaataatatggctctgaaatagtaggatttaatgctacttattttctcttctcttgtatttctctccttcgttgctctcttacctcttgggattctgcctgtttattctcttccacctcctcagcatgtacatagtttttattttccacccctggcagaggtttgtgggtcaactgtgaaatgcagaggcattggttaaagtgcccagcccaggttcttatgattattactgctctgctaactttggaaaacagccggagatatggaataaaacaataaatgagaaggtagcatgtgcacttttaaaagtgtatgcaagaaaagggattacaaatgaaaataaattacatcaaagaaaaaacaagcaaaaacaacaataaaaagaacaaatgattggtactcaagtccagtgagtttatgttaagaagagaaagtggattatttggtagaagaatggagataa

SEQ ID NO: 59785 - DNA, 934 bp, Homo sapiens
aagtggaagaatgtttagacaaattggctaaaatccttatattgttcccaactggtacatttttacaagaaatctattagaattcaaaattttccaaaattagttggagggattataacaaaaacagcgtgcatctttcatttcctatataaattgaggtaactatcattatatgaactggctttaagccaatgaattgtagcagtatttacctgatcacccatcaaggctttgaaacggtggctgtttgaattctttgcatctctggctgtgttaaatggtatctgtgagccattctttgcccgtcttctcacaggggacccaatatgcacagctttagcaaggggacacccccttcagctgctctgcagcctgctcctgtcctctgacccctaactggactctggctccatgtcttatctccctctccatattacaactttcttttggcacaggagtgcttggctgtcaatgtttacttgcgtgtgcctaacactgactctgagctttgacttctgcccagtcctcatgccaacctgggtgcaacaacttgtgaaatagtccactggtgatattcgacacagagaccatgtgcctcttggtgaaaagatcaaatcgttccccaagtctgacctagtgctggctgaaaaggctgggttatattcagcaaacacagtgactgcagtgtgtgagccttctcaaggctatcgctggcaatttaaaatgaggcatgctattagaaatggaaataacgggtggcaaagagtgagtgagttaggaggctgctgaagaatgtttgtggcttttgttcagataaatcacctataaacagtttaccagcttcaagaaggtgggttattttggcaattctaatccagaagatacttagaagataatcggatgcctttgggaagaatcaaagaagaaaagcttt

SEQ ID NO: 59786 - DNA, 991 bp, Homo sapiens
gaggtgagacgatcactcgaacccagatgattggggctgcagtgagcagtgatcatgccactgcactccagcctgggtgacagagggagaccctgtctcaaaagaaaaaaaaaaaagagaaaaaacaatcgcaggctcagtggttaactaaccttgccattcctcgctagctgtgtggccacgggcaagtgtcctcgtttgtaaccggggataaccagagtagctatcccagaaggtttctgtgaggtcgaatgagatatcatgtaaagttcttgtacaattctcggtatatagtaatcactcactaaatttttttgttgttattaggaagcttatatagagtgatttaatacccagcattccattgggaacatagtagacagtaagtaaatatttgatgaatgactgaatgaacgtatgacttaattaatttgcccaagtttgatttgccctagggatgactgggggccagagaggttgtataacattttcctgctccctgaaggataccaggatgactcagcaagccttcattctggcatttgacagtgatgtgctaagctgtttgaacactgtctgactttgacatgatccaaactctgacacatttcatggttttagacactgacaaacccaagccaggccagccccaaggtgctaagagttgctgcagataggggcatagccggaagaaaatagttatttaacattgttcactaaatgtaatgcatatgactttcaatgaccaggccttactcaattacaatgatttcttttaaaaaatgtctatataataaagacatttgttcttattatgtagaacatgcttattataaaggacatgctcttcctttgaggtattataaggccggggagtctatttagagtaataaaaataaaagaaaaaaaagtaggtttagtatagttgtggtgttttgtgtacctgattcttagataagttttgtactattaagtatccgaattagtgtat

SEQ ID NO: 59787 - DNA, 955 bp, Homo sapiens
tattttataattgcttattagacccaatttatatgacttccttttatatttaagtggagttaatatgcaatttgaagagaggcagttttatctgctaccatcacctgaggggtgcatgatcttgggaaactgaagctttagtttgggtttgttgttttagggcaatttcctaccaaagtctactctgtgtgaggaccttagaagctcacattttgggatgggcagatcatacaggcaagaagacagcacagtccatggtgcagccctctagttcataggtcatttatgtggcaatttatctttgctcaatgaactctgctggctggtttccttccctttaccctaccacacctgaaagccatttctccagtactgaatagttgagtgagaggagctagatggtaaagatgaatgtctacgtaggtatttcagttatcctcccaccacttgtcagtgttgaatttgaccctcacgttctcccttccacagccatgatcccaattcttgtagtttgagtaaataaaatagaaatgtggttagcctcttggggcactctaattttctttcagaggaatctatacttcaaccaagttctggatggcagtgaattaacatttggcattctcctcagggtgaaagcaaatgtctgtattttcagtttgaaaaatagtttatggttttgattttcagatgttttggtaagttccatgggaaggagcagagtaaacatgtgaattccacagtcttttacaaaaagcacatgagtgtgtttctgggatatttatttctatttattgatctagtcatcagggcctatatcactactatactcctttaattactaaaagtttgtgttgtcttttgttatctacagaccaactttattccccttattttacctttttaaaataggttaattaggtgccagctcttattcttccaaaaaagctttaga

SEQ ID NO: 59788 - DNA, 1179 bp, Homo sapiens
acatggctctcttcatcgcctgtgacagtgcttttgttccttctacccagaatattcttcctatctgtctattcttgtcacaatcctcttaatctcaaggatggctcaaatatcagcaatctggactcctgcagagtgttgtacccctgtcacaggattaaaccacattttgccttcaatgagtgtgtttgtggttaatatcacataaactcttggagaaaaggcctgtcttgttcatttttgtatcaccccaaattgaatcatgcagcctcttacagagtggttgtgcaataatagtagataaattttctacgtctcttcatatttttttcctctttaatattgtaaagtcacatataataacttattttcagtggtgtattcattttgattccttggccaaagttttttctatttttagtcaaaatggctccttgcttaaaggtttaactcttttacctccatacataggcttagcaaacaatacataagaatccccgtggttatagaatcagctctgcacaaacctaggcttctcattctaaagtggaaaatattaggagaaagtgggcaattcatggaaacatagagtttattgtgataacaaaaacctagttttatatttaagaaaataattcctttagaagttcccgatttctctggcaaaaagaacaaataaaaacatagtccaaccaaatgaggttttgggttgatatatcaggataacagataatataattttttaagaaatgttttcaattttctagtttttctctttggtagaagaatgtttagtcaactttcgtggaccttagacgagccaaagatcagtatgtttaagttaatcagtaacttgaaatgcctttttcttgtgtttgggagaaagaaaaggagacagattgctgtggaaatataagatgttatttctgcgaaaatacttgtatctttaccaattttaaatgtcggttttcttctcccaaagtttattttacctgtctacttggatgagcttcagaactatctatgtctgaggaatattatcttcctcttctacattttgctgtagagcaaactttctgcaccgtatgttaaaaaatctgaaactatattatatagtagaaacaattcaagacttaacttgtaaaaaagtcatgaattaaagtggaatgaaaataatat

SEQ ID NO: 59789 - DNA, 2410 bp, Homo sapiens
attgttagcactgataaaatacaagctgacatcacgtttacagggactcctaggtaatttgcatttttaaagtgagctctgatcttaatcctgagatgacttacaaaatcagcatctgtggtgttaggacatggaggctgattttgtaagcagagatcttcatcatcataataattttatgcacttgctgtggctttgcacatgtattttctcatcgtgaatggattcagtgtgccttccatgagttttatgtctctgtctggtttttggaatggggactcagtaaatggaggtagagccttggaaagaatagtccagaaatcatttaaaccaagctgtagctatcattttcatgtccctttgaaggagaaagcctcagaattatttcacatatagcctctcaaaaatattttaaagtaagctttataaatcattacatggctctttcctagccctggtcccaaaggtctggtaagctttaagtccctagtgacacctgctgggcagacctcggctcactgctgcaggctttccatcagcctacctcttccttagcatgcaaagctgcaggccactaggtaaggggctggctgccgcttccacagcttgcagcccgtctgctcattgctcatgcaggtgacctctgtcggcagaatcgtgtgccagagtctccccagtgctctctcggggaaatgatttccaacctgtccaggccccaagaaacaaacagggatctatcaaagttgagagagagagagagagagagagagagagagagagagagagagagaatccacctctatccacccccaaccccagccccaatttactaagctgcttctttgtctgaaaactcggaggtgaaagatgctacttgagccgtatgttttgttcaagcacaaaccaaattatgctatacttgcttatatctgaacatattggtttatcttacatagagtttaattgatgcaaacttgaacttcagtatgttagattttcagggaaaacaccatccctgtgatttagattgctatgtttttctttgaacaaagcaaagagaagcaaggcaattacacccctgcttcggtttatttccttcatattcaccaaccattacaaaaatagtgtttaacctcttgtagtatgacctcttgtgtcctctactgtccaattgcacaatttctttctgagccaacatctgcatccttggacagagcaacttgtgtgcaaagtccatgttagctgatcaagcatggctttgtttgcatttattcactgctcatccagcactgcgtaagtggttttgcatattaactaagtgcacagtaaccttcctttacctccttagagctccacccccctcccacccggcccagggaaatcaacactgttactcgctgaggaagctgccaaggggttgccatggcaactgttctgctttcagcagctacttttctggtttgaaggggggaaggaaaaaaaaactggggagaactaggcggctttctgatcagagttcagataaaaagggtcacagtaatttgtgggcactgactaaaataacccaatggatttgagagttaccgcaaaagaagcaaacagacaaactaaagaggtaagtctagtggaaggcaaataattaaattattcggtagtggtcttaagctgaagcatttcaactctatatcagtccagctcatctaagatgctattttatgagtcttttcatttttgtccagagccaaacacagacgatgagttttatgggattataaacggcagacaagcgaggtaacggggtaaaacagcagcagagtgggactctctaacatctgaaagtcattttccaaaacttcattcagcacaggaacaatgcggcattcaggcagaatgagctgaaaatgtggggtgctccaggtcaaatcagcaacttctgcactcctctcaacagggtggggagtggtttgccaaggtagggcaggaaacagtctgatttcaaaggaagggctaggattaggcagaaaaccgtgaagagtcaagaaatggaagcctccgcagcctagactggtgggtttcagcggcatacagagagctgtgctaaaagccgctctagacaacttgttggtgggattttggcagctacccagaaaagagctgaacagtgatccttggctgaaaactggcagggtggcggcagggccggtcatgcagcactaggggagtagagcctcacccttcctgcctctgttctgtcagtctccccagtcagcacctgctccccactggtcaacaagcttcctggcactcctctgcattcaagcttctcttgcattatttattcactttaaggaatagcagtgatgaaaacgtagtagccgaaccatcctcatctaagctactattttctgaa

SEQ ID NO: 59790 - DNA, 743 bp, Homo sapiens
tgagatcgtatgggtgggccctaatccaataggactggcatccttataagaagaggaagagacaacagagatctttctctctttgcacgcagagaaaagtcatgtaaggacatgggaaaagtgtctgtctataagccagaaaaaggcttcaccagagaccaactgctggtaccttggtcttgaacttccagcttccagaactgtgagaaaatttatgtcgtttaagccactcagtctatggcatttgttatggcagcctcagcagactaatacagtttccacatcacaaacagatttagcaaaataaggagattttcccccacatttatcccaaatcatacttgattcaagttagtaccaaatgattttagtggcagaagaggccttagagactatcttctcaattttactcatttttacaaatgagaaaagtttaaaatgaaaagattaaaacggcagatcaaattctcttcccactctcaccacccccaccataatccattcaagctgctggtttgttaccggctttattctgacctctgaccaggacaacaaaacaaataatgaattctatgaaaaattcaattgtgcaatcacttctacaataaaaatacaaccaacctaattttaaaggggtaataacagactaaaaaacatttgcattaaatacaacagattaaagtttctctttaacatatagaaaatacaaatgtataagacaaacagcaatatttcaatcatta

SEQ ID NO: 59791 - DNA, 520 bp, Homo sapiens
atttgggtgaggcacattctccgggtgctttctgagaaagggagagtgggaactaaattttttaaaaaatgtacatgtccataaatgtcattattctatgcttgtatttcactaatagttcggctggatatcgtatattgtagtagttagaaattttgcttccaaatatcttagcattgctcaaatgtcctttgtttcagaagtctaaagccattgtgattctagagcctgtgtgtctgacctgctgtttctctttggaacagaatctaagtttgccctttggcattgtgaaatttcacaacgacgtgccttagcatgacttttacacagtcactctgttgtgcactttctgagttcactaaatctggaaactcacgctctttagctctgagaaatttttaaaattatttctttaaaaatttccttgcaggcattttttcttactggaactcctactgtttggttctggactaatcctttaactttttaccttgttctcctattttccatttctttgaag

SEQ ID NO: 59792 - DNA, 997 bp, Homo sapiens
ggcccttcctcatctcattctgcctatcatcccagccttgtttcccccaccaatccccaagcacaacctcaaaaccagcacctaattccagtgcctgcatggagtaagtttgggcacactactacataactttgtgctcaatgttcttttttttttttgagacggagtctcctgtcgcctggggagtgcaatggcatgatcttggctcactgcaacctccacctcccaggttcacgtgcttctcctgcctcagcttcctgagtagctgggattacaggcacacaccaccacaccggctaattgtttttgtatttttagtagagacggggtttcactatgttggccagactctaaactcctgacctcgtgattcaccagcctcagcctcccaaagtgctgggatcacaggcgtgagccaccacacccggcccaaaaagtacagttcctcaactgttctgacagcaaagtttatctctcctaaaattccaactccctcaaaatgtccttcctcttgaatctcctcttctcttactctctactccagctccaaagcaaagacacagctacttttgtgctcactacagattcttttttaaagccacttattgactttattctatgtatctattgatctgtttgcattcccctttcaaatatttgagctattctctggagaggacatgattcattcatcaggtttttttgtcacctttttccatcacatagtttaactcatagaaggttctcaagaaatgcttgttctgtgactaaatgaaggactgtgtactaacaatatgtgatttgttctgaatatagtgaaataaagatataacctgaattagtgttatcaagagtaaatatttcacaatcccctttgatgttacggctggtggtcctgcttcttctatatgcagcagaggataaattctagaccacatgcacaaaaataccatccctcagtttgcagctagggtaccatttacatgatattactgct

SEQ ID NO: 59793 - DNA, 1065 bp, Homo sapiens
gcagagaatgggtgacatgagaaaaatattggattgatgacatttccagtacagatgagtaagtcgaatacaaaaacaagtttatcaagccatcttcacataggcattaaaccatctgagagtacttcaatctcagcattgttcactttaataatttacactctacttgggaacacatattaaataacagaccaccaaatgtgcttctcgcaagtagtgacaaactatatatcacactaatccaaactgattctgttgctttaatttatttagagtcttgtggctttttaagcatttttcttacattaactgacttttcctttataattattctgtgaggaaggccacaaaatttcttgaaatcggagacataaagggtgagctgtatttaagggaaaacttcttagatgaaagagttttgcttgatcatcttgttatattttatggttttgtacaaaaccactggtaccaaaaatgatcttaactgttaaattcatgttatttctggcaacaacataaagtactccatcacagactgaagacaacagtccacataaatatcaagtttcctccttggccattttaaagaaaagcatagctactttatgaaattcaagggtcacagaacttagcaatctgactcactaggaattgtgcaatacactttgatttgtaactgaaattaggaagcacattacttgtacaaagcaaatgcataacaaagtttagcaaattgtacaaaacctcaatctggaaatcaaaatagctattctgagacaaatattgtggcattctttcctttattattttatgctgtaagaagaataatttgtataaataaaaagcaacactggttcactagtagtgacaaatatactcaagtcatgtcaacaagaagggaaactaggcatgcagtgtatgggaactctgcagtatctttatagcctctctgtaagtctaaaattactactctgaaattaaagtttccttaaaaaagtaatctccgtacttctcaaaaatttttaatgaaaattatatttggcctaattttgcaaaccgtttatt

SEQ ID NO: 59794 - DNA, 867 bp, Homo sapiens
tcttgtacacttaatgagcataataattttgcaggactctgaggatagaacacaatcattggacaagcattttttgatatactatgtgtcaggcactggtaattaaaaagacgaataatataaatatatcaaggcagaaatcccacctttacgtaattccaaagagacacaaagtcaacaaacagaataatgcgataagtgttataactggaaaagaaaaaaaaagaagaagggtgtttcaactaggggtggattgtataaaatgaaatggctaactcttcaaagggggagcagaaccctggagaagtctgaggttaagctgggccagattatatcatgaagtgggcagtaagccaggcaaaaaactggactttatccttcaagcaaagagaaaacagaggagggttttaagcagtgaagtaattgacacagttaaattttagaaggaaaaaaaaacactgagctgtgaaggacatcaagactagactgaacatgaaggaatacatattgaagagggaaccaattgttaagggccctatgtttatatcaccatatttatttttactattttttaaaaaaaaaattatagagatagggtgtcactgcatgcccaggctggcatgcagtggtgtgataatggctcactgtaaccttgagctcctaggctcaagggatccccccagcttagccccctgagtagacagggctacaggcccgtaccagcacacccagctactttgggttttatttgtttctttttttttttttgtagagacagggtctcattatgttgtccaggctggtttcaaactcctggcctcaagtgattctcctgcctcagcctcccaaactgctgggattacaaat

SEQ ID NO: 59795 - DNA, 777 bp, Homo sapiens
tgacatgaacatatcttgataaaactatgagcgtatatataaaactgtgagcctatctttgtaaaacttgtcatattggttgacaaagctaaattaagacattaattaaaaatgtgggaatataacttgaaacctttattaatggtagcagtaaaagcaataataatgagaaaatgttttatagaaaatttatttttatttcacagttttctaagaacctgccaactaatttcgatgactaaacattaacccacattccattgcataaccattccacagaagtttttacaaattgccgtaagtgattttcaacaaagaaactggtgaaagttgaactatacggtattaaatcataaaaggcttcaatccctgatatatgagtgatacggaggagtgaagtaattatctaggtcacaggagagagataacaattttaggtgtggtgacatagacatgtcacatggaagtctttttttctctttttaaagtgtctgtttccagcttttggtgtggctgttgttgtgatgaggaagcctgaggcggccgtcaggggatagcgtctcgagggcctagggctcaataaatacaggtttaataaacccataaaattacatttataaaaatgttggcaatggtaggttttagtcttttctgccaaaaataagcaaaatttcaagaaaattattttcaaatgcattaaaattcctatcagcttctgtgaggtttattcttcatatttctaacattcctggcacaaagcagtcataatacataatt

SEQ ID NO: 59796 - DNA, 943 bp, Homo sapiens
taactatattgcatgacaaaaatcctaaacatttctacaagtataattttttaacagttttttttaaatctcatgcttttaaaaaataaaagtctactaaaactgaactactagacataggagttagctaatattgtgagaaaggcaagtcaagccagtggctatgtgctctcctgggggcctatgaaactgatactgtctctgcttggccttccctttcagacctagggccttagaaagagaaagcactaggtaaatgtaaactgggaccttgtttcacacatcctttctgccattcttttgcctcaagagtctccctccttacctcctccactactctctcttgtcgcaatctggctctactgcaattccccattctcccccttaacctaattaccagctcactcgttggcacacctgcttccgccagcaagccctgggctggtcacacgctgatccgctccagtcctggcaggaaggagagcatgttttttaccagcctagggcaagcaatgccttagcttcaaggtcgttcttttcactagttctttgtgttttgttctcaactgctcttcaaacttccctgcctttcccttccccacaacactgaccccatactgttcattctcaatttcctgttgacatattccttgcctaatacctaacctttatcttctttagctgtgtttctgattgattgtgtggcttcagtttgtatggctccctcataaatgtgtgtttttatgcttggccaccactacttattaataacaactatattttcttactgtcattctaatgacattcttctggcttgacttgcctttctcacaatattagctaactcctatgtctagcagttcagttttagtagacttttattttattttttaaaataaaacctcttttacctagctctctattaaggacctatatgctttct

SEQ ID NO: 59797 - DNA, 2357 bp, Homo sapiens
ttctttccattcaatatccaaatgtagaatccttctttgcagacaatctgacgatgtctagtaacttttccctaagccccgctcggaaattgcctcccagaccggagacctgcaggtgctgctgcgaagatgacgcgaccagccaaaccggttaaggatttgactgcgattgagaactagtgaggacctctaggaacccaaccttctgcgttcatacacgcgctcgcgcgcacacgcacgcacacacacacacacacacacacacacacggcaagcaagccatctccggtcacaccccagacaccgccgtcctcccgggacgggcgctcctccacgcgtgctccttggacgcgccagctccccctccatcccgggaccgttgtccttttccctccgggtccctgctgtagccggccggccgctcccgccgctcgcccagcccccgaacgccttctctcccactcccaaggtccagggaaggggccagccggcgcttgagcgcgccacgtggagcgcgcgcgcctgcagccaaacctcagtcggtccttaaagtggggtccccgcccctcccgccctgctccccgatcccccaaggccgagcccgcccccgcgcctccgagcccctgtcttgcctggctggggtctgtggcgcggaaaacgtggcaggccatctgcgactcggggtcgtcgggctgcgccttgatcaggtaggcaaagtaggtgaggtcgtggctgttgtggatgaagcgcgagatatgctgcgccttgtgctcgaagatgaataccgccgggttgggctgcgtggccgacggactagtgccccccgaggccccagcgcccggcgcggggacgcaacgcaggaagggcgcgctgagcaccaggatcacctctcgggccgccggcgccccgcagccgcccgcctcgggcttctggctgcgcctgcggatctcggccatgagccagggcagcataggcagcgtggtcctgtggtccaggcacgaccccccaacgtaccacagccggaaccgcttatcgcttggcttcccggggccgggctgagctgagacgcccggctcgggctccagggggtgcgggaacggctcatcctgaatgcagctgggcggctccataactctcgcctcaccagggcaccgcggaggccggccgggcgcaccgcgccccccactcccgcgcagaaggcgccgccgaaactgtgccaactgccgcaccgggctcccgcgcctgcctgggagcggcgcgaccccgaactccgcgcttcagcagccctgccccatgcagcacttccacgggcgcggctcggaggctccggcggcgggcaccgaggcaagcgcccggcaggcgagggcgggttaaatgggcatcctcctccttgggctggcgcctcgggcaggacctccccttcctccgtcgcgggtttgcagggtcagaggaccacgccgagggtccccgcggccgccggctccagcgctgcagccccgctgcggccgccgcgctcgcctggggcagacactgggtggctgggcggggaatggggctgtgggcgggagggggtgacttggggcggagctgactcctaccagggtgaccggctgtcacctggaaggtcggggctgcagggctgcggcgcggtcagtcctcaggaaaggctccggcaactactccagtggaaaataacaaaaacaaaacgtggcctcgcgggggccgctcctcctcccgccgcagctgcagcccagctcgctgctcctcctcctgccgttcccgtccctccctcgctccttccttccttccttccaggctgcttctttaatcgggctgctactccgcctcccgtccggcgggcggagagcgtcgcctgcaaaagcttatccgtgaagccgcctctccgcctcttcgcctcttccttcgacccccgcccttggggctgcagctcagagcctggcgcgggcactgcccggacccacttggcctctcttgagtcgccgcgatctccgtctcctcccgggcgtctctgctgccccctagagagggggccactcgcagtggagaactgggatttttttttaacagtatttgcttggtttcagttccttctaaagcctacacattaatttctgaattatctttcctaataatctcaaaaaacgctcgtgttttcaatcacaatattataaattccagttccaaatttcactttaaaacataatatcgacagcttgaatcttcctagttattaaagcagccaacttcttaaaatatggaaaagttatgttttatttatgttatatccccagttgagagctaatgtagagatttcttgttcttttatatatatgtgg

SEQ ID NO: 59798 - DNA, 656 bp, Homo sapiens
aaaaaaggaacattgcagagaatgaatggaatacaggactgattgctaatcaaatatacaatgcttggcacagagacagtgattaataagtgcctggtcaatgaattcatttagagctctcttgaacgtcaaataacagatcagttagtttcagaagttaaacatttctacagaggaagtgattattttttcccactataggctggtgtgattttaccaatacccatttttatcttactgcataattcagaagtctgtgtggttaacatttaagttcttgagcagtctgaaaactctattgtcacaaaacctatttgaggtgtaaagggaaacagaaagttaaaacaaacatttatttattgcatgctttcaggctagagttccacgccagccaagcctgtgagataaaccacaagttgtgaaatactgtttatttgtatgagggtactaatgtggagtgactaaacatttccctcactatacactttaccattgagtgaaacctcacatttatgctgttcagaattatgtggacttatattgatattattgactgttttctctttagcctaataaaaacctttataactaaaagcaggattaatgccacagtaaaatcttccccccataagaatacttcttgtttaattgctatt

SEQ ID NO: 59799 - DNA, 1690 bp, Homo sapiens
ctgtttcagaatatcttaaatacaaaacttaacgtaagagaatggataaaatgacttatgaaagattgactcgaaatgcactaaatcatataactaagcaaagccaggtagacggttgacagctctctgacttcccctacttcccaggaatcctcgaaagcaagatcagttagagaaaaatgacagacagcagtcaatggacacctctttcagcccctgtattctaattatttcttacctcatccctttcttacattttgtatggacttgggtaactcctggcctaaaaatactctagttttagtactcctattctgggaagtgtgttataaattatttgcctacaaatagtttattggctacaacagcacagcagcacttgaaacagaaatggggctaagatatactttaaaagtcaaattcatattcctagcattataaatgcatactctaaaaggctaaaatgctatactccatcttcaaaaataacttagagactaagaaaatgtttgcggtgctatctctgcaaattttcctaacttctttatccaacactttaaaataccgtgttcctggcttcgaataactgtcgcctaatcaaagcccaacaatccttgatctgcattcttcgggctagtgcagggtggggaagaggagctttcattacaatggcaacggctaccggctcaggtgcaaaagagaaggagcaatgcaagagggacggctgaaggtcaccggctcgcggacacaggactaggggagacctggggaaggctcagggtggcacggcctcgcggccgtgggaggcaggctggcggaggacagggcggggcggccgctcacccacctggttggtgacctgaaacggaagcagaaacacaatttagagaaacatctttcttgctccagagcctcgctgcccactctccttccaggttggaactcacatcggacttagcatccagcggcggctcgctggacgcctccatgggcagcgtctgggacttgcggcccggactcgagagaacgcccccagaccagcgcttccgcttccacgtcctgcccctagcggcctggcgcatggggcggacgtagcaggggaagctgaaaaaagcatctttatgtgactcatattttttcttaattcaacatatatcttaggagacattgagctaaaagaaaattattttatggaaaaaggccaaagatttgggagatactttgagaagagaagcgctaattaaatttaggatgccgcttcccccatctaacagtgacacgtgggctcttccagactggagcggggcggggcacagcatcccgctgcgcggctcctcaatcccaaccaaattcggaaggcgctgggcgaccgcacccccggcacatgggagtttgtcctgcaagggaaggctgtgggaaccacagttataggatgagctgcttcgctggcctagctgtgggcggggcatgctttccattatccctgctgttcctcttgaatcccagccctcagtctggctgcggaataccttcccatcttgtcttcccacctctttcctattgacctcaaatccatcctacaggaagtatccacagtgatgttttttccccgccaactttgtattttgaaaaatttatttttttcagaaaaattgcaaaaaataattcaatgaacacctgtatacccttc

SEQ ID NO: 59800 - DNA, 697 bp, Homo sapiens
aaataaaataaaatacaaaaaatttggtggtgcacgtctgtttgggaggctgaggcactagaattgcttgaacctgggaggcggaggttgccatgagccaagatcgctccattgcactccagcctgggcgaccaagcaagactctgtctccaaaaaaaaaaaaaaaacaaaaaacaagacttaagtaggtaaagtgcctggtttagagaaacacagctagatagtcatgatttctgatcaagtgtggagaatgagttcattctgaggacaaggcctaattacgtaaggcattggtatgttttcaagcactgccaaaaggccacgtttaggaatgatagtttggcaatacaacatacattcaaggcagatgatgggtacaaacccatgcagcaggaaggaagctggacatactgctattaagataagtaatataagatggtgagtagtcaaagtgaagtgccatgaatgagttacaggtatacagagagactgaccccgcccaaccccacagccctaggggcagttaggtggggcctgaacgtgaaagattccctgggctggttacaactgtgatgacaaacttaagtcaggtgttgtacaaatagcaaatttcatcaattcttagacatgtattttttcacatttacatcaggaattatagtgaccattacatcagatggtttctttttctttttct

SEQ ID NO: 59801 - DNA, 1463 bp, Homo sapiens
gtcttgtccactgcctctactctacagtgaactcaactttgtgtcaatacttagtacagtgatttctagtactcgacattttttgtcaaatggaatcggatatatagaaacacccgctgcctcccgcaagagcagacaaggccaacccatcactcctgcaccccgacaaacgaacaacagcaccgtgctgcacggcgtcctccggccttgctgcctggcaatgggtagccacctggcgtctgtctcagaataggactccgcggcacgcctcctagcgcagtcggttgacactgcaagaatgggaaggtgcgggtgaccacgcggtcccagaccggcgcaaggcgcatgcgtagaacgcgagcgctcggcaaggctcggctcggaagagtccaagcgtgaggggagagggctgtggattcagatactgtttttctcccgaaataggaaattggcttatttttttctcctcggcagcatcttaatttaaaatatgacacttgacctacggccctgcacggagcggttaagagggtgagaggcccgtcaaactctttttggtgtttaggcgctcctcctccgggcggtgtgttgggagggcccaggtcaaggcgcgcgtgggcggaagcggcggcggcggcgaaggcggcggctgtcagagctggagggccgggcaccgcggccatggagggtcaacgctggctgccgctggaggccaatcccgaggtgggcgcgcttcggggcagccctgggccgtgggcaggtgcagagggagccggcttgctgccgcgagtccacggtggtttgtctctaaagcgtgttctctgtttcgttttcaggtcaccaaccaggtgagtgaggtgtctgtcgctcgggacctcggagtcttttctgtctgctcggtccgcttccctgctggactccacctccacgcttccagggattctgggatttaatttcttgagggcccctcttgttcggctttacgcgggtccgcccctttcagaaagggccatctcgctgccacctggctcctgaagattctcccaccactcctctggtcccattctgcagtcaccacgtatcttggggactccgggtctgaggtttggagggacttttaccctgtattcctattccccttccttcttcgttttgcctcctgttagtgccgattccataattttcctaccggtgtaccttttggatgactaatttgcccacacttcctgactccaagctttgtaaactcgcccacccagtccttgtaatttcatccaccgcctgcactatgaaatcatcttccaatcatctcttgccccatgaagtcacttttcttccccgccacgccccctttatcttccagtcttttaaagctggacatttagttgctgttgtatcaaagaaagctcagtttaatagttcccacgccattctttgcaatctatagcaatttaagttccttc

SEQ ID NO: 59802 - DNA, 961 bp, Homo sapiens
ggggccgaactccgccggggggaagcggcagcacgtgccaaggccacgaccctcctctgccgccgggagggcccggccgccgcagggggcggggagcgtgggaggggacggcgctcacctggcggctgggccggatcgcggcgggagagcgggtagcgggctcagctggccggggctcaggtgagggcggcgggccgcgctccccagcgggggaggtttcttggccgggaaaggtacaattgtgtgcagctatttctggtatgtcaagcgggccgggcggccgcgagccgggaggggcgccgctctcaggggcccgggagagggcaggggccaggcgggcgggtgcgggaaggatgcgggcgcgggggcgcatcctctcggggcggagccgcgggctgtgcgggaaccccagcggggcccgggccgcggcccctggcggactgtggcatctcccgggccagacagtctgaccacagaggcggccgcggccgggagcccggggagccaagggaggggcagacggaagcggcgactcggcgggccccgggagggcggtggggtgggccggggcggggccaccgcggggaggacggcggcggcgctgcgacttttgaagtccaaactgtcgtcggggctggtgccgcgcgctgccgctgggcacccgcttcgcttcccgcgtcctgcctgactgcccgggtccccgcgggccttgggtcgctttcaggagtttagagaaagccaggtcttcacgttcgtgtaggttcgagaccttaacgaactgcagagcgcaacaaagggaactagagccccggcgccttcgcagccggagcggaagccggagttgtgggaggcccgcgtgccctccccgcccgtggggcccagacgcgcggggacaacccctcccctccacgcatcccgagtctctctctccctcccttgtcctagccatggaagggctgga

SEQ ID NO: 59803 - DNA, 3275 bp, Homo sapiens
tgtgtttgcacagcagtttacattaacgaagagcactggtttgtgaatggaggatttgggttttgaaattagatatgagggcaaccttggagggaggggataggctttcatatttttggaggcagctcttgaggcaggtgcagggagtgagtaatgtgccacacaaactatgcaatttagccaatgaacactaggtttctcctcagtcctatagtatggtttccctgcctgtcaagagccagctcaacaaccaaacccagattccaggtgtggtattccacagtcgttctgtaatttgtaatcatagaaacagaatgttcctcctcttatttcttccctgccaacagtttctgggtgggtgaatgtcagtagctggagttatttttaaagaggagaggtgaggcttgccgtgcaaagctggaaagagggcgtttgtttgcagagcagagctgacatcaaagtgtagattactgctcagtggctaggcacttgtcctgtaacaggtaatgtttaacgtgccagtcacaaagatcacagaaacagtgtatgcccgggcataagatagcacgactgtgtatgctctggaggactgaaaggctgtacaagccctatgtattttttttcaaatatacatatgcatgggtcttgctgctgcctcttttgctgactgtaattggactttgaagcttcgaagttatatcataaaaatttgtaacctttgtctgagagagagctcagctaagcaatcactttccacttcttttcacaggataatataaacgttttcttgaaagcttgtgaacagattggattgaaagaagcccagcttttccatcctggagatctacaggatttatcaaatcgagtcactgtcaagtaagtttcaacagtttgttagatatatatatatatatttaaacttagggcttgtagcttaagtgaaaagaattgctgagagttcatgattacagaaaaattcttctgttctctctgttttcctctgttctcattctaaaagagactgttttaaaaatggcttagggactgtgaaggtgaagctgtttgtaactcataacatagcatagtcttactataaatctctataccgacaaaaatggtagtgttaatattttaatgtgtgtccaacatggtagtgtttggttgctaatgttgaggatactcataaagtgaatttaggggttatattatagcttgcagagtaacaacaatctttaaatttttttatatatttggaattaagacataattattagcataaaaattagataggacagtagtaaaaaagaatctcttaatattgtgaaggcagcagcgcctgggaccaacatgtaatgccaaggaccttgtcagttgtggctgacttttaaaaatgagctgtttttcacgattttaatagtgtggatgagaaagtgaaagtgggggtgagaacacgtatgccagtatctgttagatttttggtgaaaaatggtgtttgtgtgggagtatacagtttcaggaaatctggttttaagctcttatgatatttatttatatttcctataaatctaatttgcttccaggcaatcaataatcatgttactagataaaggtgacaggaaaattatttaattttataataactatctctttgtcatcctgcctcttaaacctaattaacatttttgcaagggagaaaataaacaccttattctatctatagaaataatgaaaatggaaaaatctgtttctaccagttcaaagatttaacttatgtggttaatatccctgtgtaaaacctttaatagttatttttaaaattggatgaccaattattttttctgaagaaaaataaccagctatgtaagtatctttgatagtacacattgtcttccagcagtacacagaacagccccaaatccaggtagacttagtcttccaaagtctaacaatatatgtttttaaatgaacactgttttgaacctgcttctagttctgttgaataagcttttctaaactccatggtaattaaatgtacgtgggagggataaatctgcctgcatttctgactaatcgaaagatagtttagagattctaaatttcatcaccaaagtgaaatgtttgcttctgtagtatgtaggggtcatgtttactttccataaaaattaaatatttgggtgtatttgttttatttttccttatcaacatatttcttcataaggcctatctgatgggcaaagaaactttagactttgaaagtcttttccttaagttgttgatgcttgttaagcgttaacgtgcttccccctaaaataatatactctgttttgaaagtctgtagcctatatttgagtaggctaaagactaggtgaaacatgtttgttggctcccaagtccaagagttcttgcctggagcctgtttcatgagatgttgggcctaaaatgtttcagacaaattagtatctgggctctgccttcagtgaaattactgacaaactgaaactgcgaggtcacgtagttatagctgtagtgagaagcatgcagaacaacttgtttcagtggaaaccacaagttcgtcaaagcaaggtgtgcctaagtagtacctgtgagaatgcctgagtgggaaccttgacttcacttaagaacatttctcctgataattctatctcattggaccaaaaagcaaaggggttgaccctgggtatgctgcagtggaagcactggagcctcccagatgagacacaggaaagtggcaagcaactttttaaaaaatgttgtccaagttcttatgccctgagatagcacttttagtaaaggaagcagatttaaagaaaagcaaataattgctcactaaatagtaatgcattttagctttttaaaaatatataatgtggagactcctttgggtcaaaattcttgtcctgtcattattgtagatcaaaggacttagtgttggttagatcagtggttctcaactgggggcagttttgccaaccaggggatgtttggccacttccggagatacttccagttgtcatagctgggtgagtgtgctacaggcatctaatgggtcagggatgctgctgaatacactttaatgcacgggatagcctccacaacaaagaattttcctactccaaatattaatagtactggagttgagaaactctagctttagatttagaatttcttgtttattccctccctgccagcaaaatagtcatgtggaaatgaaggatactgactatgacacctttgacactctactaaaatataac

SEQ ID NO: 59804 - DNA, 4425 bp, Homo sapiens
caagagtagagcacacgcacacattattaaataagaacatagatttccaaggcctcacagaatgacatgccagatcctgaaggtacctgaatccttgtttgttttggtgatgaattttttttttttccccaccgaaggggcctggtccatgtcctggaggagaaataggagtagtatcattagatataggtgtttatgccaagttattaagaaatagagctttttgtccagggtagagagaagcagcccaatgttgatggggatgtgggtgggtggtgtggggagtttggctagagcctcacatactctagccttgctattgagtcctctcagttgtggaccttttgtcttgtgccttgtcaatagcatccactgaatatttcatattcactatggacagatcccaaatcttgtgtgtacataagagaaataaaacctactcctttcctaccttgatcttaaagccaaaagtagagaagcagaaaaacatgcttaagtcttaatttttgcttttgggtcttaaggaacagaagtgattgagtgtgcaactctaagggaatgctggatttggagtgatgaatagcaacgaggttaggaaatctctgtattatagcctccagagtatctcagaaatattcctgtcactatgatgcaattaagtttagacaaactggaagataagagctttcgaacactgtcaagtgatttacataaattatttctaaactaataacagcccagccaggtatttctcttttgcttcacatgcctgaattgcaatgaggcagagaagagtaagttgcttagttagatgaccttgggcagtaatgaagctaggtttttcattcctggggtatctttgcctgcatgcttgtgcttctcccagtatgttgtctaaacaaacttatacagactttaaaaatttgctgacgttctttctagggctatgtgacagaaattatcatgagttgctttttaaccaggccagctatacccagaatggatttgtgtacatgattgagaatgccttatttgatatgtggcaaatatcttcacattatgatctaaaattttttttctgagtttgtgaactaagttactttgagtggatgtattacaatgtgccatcaagtctcagatcatttatttgatttttttaagatctcctaattttaggaatgttaaataagaacatatgtaccttagaatagaagagatgtagtacaaatgtggtcctctaactggctagttgagaaataatggagtatttggattttgataagtgtatgtagatgcctttataggttttatgactttcatgcagatatttatgaatgttccactgtatttgctgtgataatggaacattcttgttaagtgctgaggattgtaaaaccttactaatctaaattgctcgggatcatactatcacactttgacctttatagcactggcctgaaacctttaaaaatagaattagtctttaaaaacagaatttttaaagactttaaaaacagaattagtaagtatattttatttataataatctcttgtttaccaatttttgatgctctattttacttaatcttgttaaaaacaaactaaactgtgtctctctcctccaaacgtccttggctgggaataagtggtctttaaaaaagaaaacataacatgggatattattttgttgtaatttagatgattacatattaaattttatacaaataattaaagattaataatgtgaagttctattccagagaccaaattgtaagcagaaacataaattacagtaaaagtatctattctattggattaaagaagaaaaattacttcagtagcaatcctgctatcagtgtagctattggagggttaaaaacaggtgataagcatagcacatcaagggtaacaataaatagtgcagtctaattccagtaagatgaaactcttctctggttgcagaaaagagagtgggtgatcaaatagtgactcagaaaagcaaatcccaagaaatgactcaagcacagaaacactttaagaatttctttaccaagatttataataaatgaacttatcatttcttaccaagcctttagaaataattatttctaactttccaaatgattgccatttattaggaggaagaaatattcattaatctttcatttcatgaataagatgctttagattgccaaagacacgtgaaactaatagtagcccaagatatgaatataccaaaagaagacaagcagggataattctcctttaaataactagtagatgggttagatgtgataaacacttgagttttaaagctattaaatgtataagtgaaggaaaaatactgcctttgagtgagtggagaatagaaagaaattgtttgaacgttttgctttcatgccttttctaatcttacaaccactttataagatagggtggttgactgagtttacaggtatggaaactgagatgcaggcttagtgacctgctcaaggtcataggcttagtaaatggtgcaaatggaaaccctcatatgactccaaacccagttctgtttctcttataaaattgtctctatgtccaaatgaaggatatgaagactaaatgaaggaattcttttttttaacaaaagaaaaacatgttaatgtgtatctgtcagacatggtaataaggaagttctggagatatgggggagtttgtaatttttagaagctatgggtaagaatgtactcagactttacagagagttagagtgctttaaacaagtgcttctcaaacttcaatgtgcatggaaaacaaccagggatcttgttcaaatgcagactgattcattaggtctggggcagggctgggattctgtatttttaatgagccttcaggtcttgccagtgaggaccacactgagtaacaagggtttagataataaaaaaaagtgatcacatgatggagtgagagtttaatgaaagtggtggggatgtaagtcttgagtgtggatctaaaggatgggtaggatttaaatgagaagttaaagaccactgcatgtccaagggcacagaggcaagaagtccaaatcaaacatttcacagagtcttctggaggtacagcattgagtaaagatgagttaagtagggtcttagctcttcgggcctacattctgatgggggaagcttaaggcatgagtctttaatggaggtgggcagattggaggcaggatgagaggtaggttgggacaagcttgagtgaggcctgtagtatcctggctaggggatttaaactttatctcacaggtaatgggattatcaccaaaaacttttgagcagataattaaaatgctaaaatcagagacttagaaagatagagtaatgaagtagcctacacaatgaattgaaggagaacaagtatggaggctgagagagaggtaaggtaattacggcagtcaatgagtgtggtgatagggaagccaactgctgaaagcagtgaacaggtagatgaagaaacagatgctaaagatgtttggagtaagacgtgatgaggattgagccaagtgaaggagaaagaagagttagcgtttgagctgtgcaaccattaaaagaaacagaaaaggtagctgatttggaggcaagagatggaaattaattttttgacacattgtgttggatgtgacagtagaacattcaaatggaaatataggcattgtcaatatatttaagtagaaataaacactggctttgtagatttgggaggcatctatgaagcaataatagtcatttgtaggaaaacaaagtccagctctgaggaagtgaaggtggaaagagaagtattcctcattccgtttttaaaaatgagcacttcctggtgttgctttttttttgttttgttttgttttttgcctatgctttcttgctggtgtaaaatgatcactgctgactccaaaaccaagccatactttttctatgctgttttcttctctaggagacacttcttacccatctttgccttttgttttacttttttttccagctttattgtggtatcatttacctataacaaaatttattctattttgtttacagcttgagtttttgtaatgaacagttgagtaaccatcaccataatcaagctatagaaccctagaagttttctcatgtccctaagatcaacctcttacctgaactctagccacagtatagttcattatagtgttgctttttctagaatatcatataagaggagcatacagtatgtagtctgttgtgttttatccctttcaatttgcctacttttttgaaattgattcatgttgagtaattccttattactaagcagtatttccaaatgtagatttgccacagtttgtttatctgttcaccagttgatggacatttgtgtatccaagttttggctattgtggataatactgttaca

SEQ ID NO: 59805 - DNA, 1224 bp, Homo sapiens
ccaaatgaacacagtgagacccagatctgactccaaagcgcaggcacttaaacatggtatcagaccatgtcaactttggacatatttgttgtggaaaaattatccaactttggagctaaggctgtcttatatttcattctgaggtgtcgtgcagtaagtaggctggttcatggagtgtgtgtgtgttacctgtgttactgtgagcttccccttcaccattgcagtagttctattttaaaggactttgggttatgccctgtggccacatgacaggcaaaggagctgcttggttaccgacttccatgcagtggaatgcatttgtatgtgagagagtgaactctgtttactccagcaaatcattgactacttgaattcctggcattgcatttcagagataggacactaatttggctggcctatgtatcatgtccaagagcatgttataaatgctcatatttagaagggaatgtaaagtgagtaaaaggtaataatgcgaaggtcactgcttatggtgtttatcacagaataggacatcccttgtatttccaatgattgttttatcatgataaaaagtgaaaacaaatgagtatgttggattagaaacctttttgaggactgtggaaatgaggtcaggggttcaagagagctctgtttttccttctgccttgagtgtgcttatgatcaaagtgggaggatgttcagcccagtgcattctttgtcctgtgcattgatgattcttttgtgctttggctaatttaatgtttgacatgtgtatgttggttattagtccaaaaaaggggctatatgtttgcaactctgctgttttttgttgtcagtttctagtgacttttcccacttaccacttctaagttaaagtgctgggtttttgtttgtttgtttgttttttgagacggagtcttgctcttgtcgcccagactggaatgcagtggcgcaatctcagctcactgcaacctccgcctcccgggttcaagctgttctcctgcctcagcctcctgagtagctgggattacaggcgcccaccaccacgcctggctaatttttgtcctttcagtagagacggggtttccccgtgttggccaggctggtcttgaactcctgaccttaggggatgcaccctcctcagcctcccaaagtgctgggattacaggcatgagccattgcacccggccattgctgtggatttttataagataattttctttt

SEQ ID NO: 59806 - DNA, 525 bp, Homo sapiens
ggccaattagaagctttcttaatcaggcttctacaagtctctgaattcacaccgatcctgcttaagtgtctctaatgaggggaagtgctttctttttaggatgacccatccctttgtgaagtagcatattgttgcttcttcaacactgtggtgccatctgcctctttttaacttctcccataagtatcatgccctttcatatgtgagcaaaaaacccatgattcttataatacagtgaagtttcttcaggcagaggttcatggctgttttttaaactgccacttttcaacatttgcagggtcaaagtctctgagcagtttgctctggggaacttggatgaaaaaccttatggatgatgaaaaaaaaaccccatcagtgcaaaaaacccctcgcttttatttttcattgtgtttttaaggtttttttccccccatttcccagttcttttttcatgaacacactgatcccccctcattgggtttaaaccttgtttaagaaggaaatacaaaaaatgcacataatgta

SEQ ID NO: 59807 - DNA, 885 bp, Homo sapiens
tattgtataagaaatgtttaagtgtttgagaatcctatatgactgttttgtgtactcataaatataagccaaatggactaatgattatctagctgattttatttcttggaaaattaatgatcgattaaacttaaactcatccatgcctgcagctggtcattaattctgccacaaatattgaagtataatgaaaaaacttaagtttctactacatgtaaaaggctgtaaggaatgcatcaatatcccgagaaactcatcttgttaaaatatatatttcactaatgcgaaatgcattatttaaggccaaagtccaactggagagaatattaactagcatttttaccctttccagaatattgaatccaaagaaatcaatggaattcatgatgaaagcaatgcttttgaatcaaaaggtaaatatcacctttataacttacatttataatacaggaaaagacatagcactcaagttctgctgttataaaaattaatatctgtgagtgaaagaaaaagtgatccactgcaagttgaaactaaaaggttaacacgcagatccaattgcagccaggtggaagggcgttcagttccagtgctgaatagttcaggcactgcaaacaaagctttggcagcatgttccggagctttgagtgcctgagtgcctaagtcaaataagaaagactggttcttcctgaggccgtcagctttcttgctagggtatgctggcaatgggaatcttagttaagcatgaaactatgaatgaagtttcctttcttctttattgtgaaagggacaagcttggaggcagttagctgtaagagggaaatgccagtggcaataaagtcattagcagatgtacccatttgtaatgacaaagaaggcaaaata

SEQ ID NO: 59808 - DNA, 1975 bp, Homo sapiens
caaagcatgccacaagaggctcctcaaaagccgggtaattgatgccattgttttcttgacctagttgaagagtcaaagaagagaaggtgatgcagaaacttctttccagtgaagtgacagatccaagcaaggaacacctgcctgtgaggggagcggtaggggagggggtagattcggcagcactcgggtagtggcagggaccacatattgtcggtgttaaccactgttatcactggcccaggtcgagtgaggacgagtcatttccccactaagcacttggggagtggcagggaccacatattgtcagtgttaaccactgttatgactggcccaggtcgggtgacgacgagccatttccgcactattgtcccttcttcctcactgcacccccagccctgcaccctcagctccaaatacacattctcgttcactcaacgtttgttgacacctagcgtgggccctgtgggatggggtaaaagttcggtgttgggaggagccccggtgacagatttttggttttggtggtggcttttgggcaaggacaggtcaattcataaaagatgacgccccaggtctggatcgaattctcctgggagccagaccaaagcaccttcctggactgcaaagtgtggaagccgccgcgggccgggcgcggggaggtgtcatgcgccggaacctgcgcttggggccaagctctggagctgacgcgcaggggcaaggcgccccgcgtcccggactggcggctccgcgcatgctcctcccaccggcgtcgcaggcctcgagaggctccggaagtactgggtgcagcctgatggcgcaggaggtagacacggcacagggcgccgagatgcggcggggcgcgggcgcggctcggggacgcgcttcctggtgctgggccctggcgctgctttggctcgcggtggttccgggctggtcccgggtctcgggcatcccctcccggcgccactggccggtgccctacaagtgagtgcggcggcgcgcgcactgtcggggttggggtcggcgttgacgatgggggatggggtgctggggcggggacccctgctcaccgtggtttgtgtcgggtcacgagatggtgcggggacagcgccgggtgacgctcggagcgcacttgagagcaaagttgaggactggggagtcgcagccgctcgttacgtgcagccctgggacctttcgtcccctctggtcacttgcggcagactcaggacagtcctgaatcgtggaagaagaaaaggagagtaatgttatttaatggagggacttctgggtacaagtagctgatttcttgagtagtttaaaaacactgtctatcgcatttatttatatcatgcactgtcgttagttattaccgcggaacatttggtacaatttactgggcgaccaactcgctctggtttgaacctgatcagaacctgatccgaagtccttattgggacttcccagttttgccctcaaaagtcgcgcatcccgggaatccccgtctcctgcagtcctggttagaccgggaagattgtcaccgcttttgtccagtcttcagcctggaggtaggacgccggtcctaagtcggggacagagcccgcacacctgggaggtcgattccagcctttgacagagaagacacagcctccggcggtcagagatagctaaacacagagaaagaaaacatggtgtcaacatcaggcaggagaaagaccagcagtttttgaaaacagctatttttctttaaaccaaaagcatcattggacataattttaacttactagcataagtaatcaacagctaaaactgcacacaacaaacctgaaaaaaacagctattttgtatgacagtatgagtgggaaggagttctgcctgctgcgggtcaaatctggctctgtcatcaccagggatcttgggaaagttactcagaatctctgtgcccacatgccctgagtcaaaaaataggaatagtggt

SEQ ID NO: 59809 - DNA, 2025 bp, Homo sapiens
acagaaactaagttacttttttttcaagttagaaaaggaggattctaattaaaaaatctgggtcactcaactggatatcattagcaacgacaaaataaaaatgatctctctcacctctcagcttggagatacagaccatttactgggctgcttcctgacccctgtctgcaaccccacctaaaggactgcccacgccaaaggcagacgcgaatccgctcaacacaagttgaccaagtttttcgcctggctaagcggcaggggcgtcccctcctccctgcgccacctccccaccgactggcttcccctgacatttctcatgcgccccaccctgggcagtttgctttgacatttcagtgcctcattgctcaagctaccagcacgggcgtagccgacgccgggagagcccacagagtgcgagctccatggtgcctgtcaccagcccccgccaagggtcataaagcctggcaggagccgcggcgaacccgggagcggcggcgtcgcgggcaggctgcaggcggccgccgcacacgcaccacgccttgttgacatgtttggaagcaggcacggcggggaaacgcccccaagcaagctccaaggtctgggtgccgcgccccgcgccccgcccggcactcctgaggagcggcccgcgcgcgccccggcccccgcgcccccccccaccccaccccaccccggcccgcccacagacggtccgcggtccctccccggctccgccgtcgcagcggggctcggccctgcccctccgccgttacctgctgccgggggcggcttcccccacacaccaccccgtgctccggggacggcggcggctgcaggtcccgcggctctcacatgaggcgcccctggccccccgcttcgcgctcccgcagccgcggccccccgcgctccgcccgcatccgaggcgctggtcccgcggagggcgccaacgcggctccacctttgcggctctggctgcccagaaagaagctttccttctcagtcccgcgctgtctgtgttcagggatccccggcgccgcgagagactacctcagcgagcggctgccaccgcgtaagcttcctgcacctgggccacaaacagcgagtctaaaatggcgcccagggctcgcggccgcgcgcttccctggcgcgtccccgcccaagggggcgggaagggggcggggggggggcggagcccggcgggagtagggccgcgcccaagcgggagcgcgcgctgcggccgccccagtctccttgctgtgggacgagcctctgccttcctgccagagatgtgactcccgcttgaaggggattttttttgttgttttgagatggaatgtgggagggctgaagctagctatatgtggaagagactatctgtggctgaaactggaaggtttagggaggtggagcagaaaaaagaaaggaaggagtctcgccggagcctgctggggaccgcggcccgcgggtggccgccccggatgcctgaaaccgaggagttaaatacagtctccgaagacccgcgcatcgatgtgcataagtggtgcttaaaagatgccaaggaaatgtaccagaatagtgagagtattaacgctgggattgcacatggtttttgtttttcaaatatttgtatttcccaatatttctaaagtggcttttatcattagagttattacattttaaaaacgacatttgctttatgaaatagagtcctgaaatttgtaaatagcttttgaaacgcaatggggaaagtaaaggattacaaagctgctgaaaagaaaacctctggtgaatccttttgtaaatcaaggcatctttgtaactgctacctagttgacttgttttaaagtttggattttttgatactgcgttttcttacagttagaaacattcttaggtgcaatatcattaagttgaatcatgcgccattcctctctacacctccaaaaaaaaagagagaaagtagttttccattcaaagatgtcttagaacactcagacccatgtataagacactgaaaagcagtggtgc

SEQ ID NO: 59810 - DNA, 755 bp, Homo sapiens
gcattacttttgcgtctgtgagggtgtttccagacaagactggcgtgtgagtgtgagtggagtaggtggagaagatctgctttcaatgtggacaggcgctgtccaatcagctggggacacagagcaaacaaaaacagaggagaggtgaatgtatttctattttttggagcttggataaacacttcctctactgtcccttgacatttgaactccagggtccccagcatttagactccaggacttattattagtggccctcctggattctcagacctttggcctcagactgagagttacatcatctgcttccctggttctgaggctacctgcatctcaggatctccagcttgcaggtgtggcccataatgggacttttcagactccataattgtgcgagccaatttccctaataaatcctctcatatatctaatatagacatgcattgcttaaggatggggaaatgttctgagaaatgaatcaccaggcaatttcatcattgtgcaaacatcagagtggacttaagcaaacctagatggtacagattacctgggttatatggtacagcctattggtcttaggctacaatcctgtacagcatgttaccctactgaatactgcaggtaactgtaacacaatggtaaggatttgcatatctaaacatatctaagcatagaaaaggtacaggaaaatcttataggaccaccattatatacgctgttcgtcactgaccaaaatgctatgaggtacatgactg

SEQ ID NO: 59811 - DNA, 2070 bp, Homo sapiens
tcagcaaaaaaaagcacccacattttaagaaaaagaaaatgaaaccaactgaacatctacatcaaggaagctgaaggtgtagccaacccaagtaaaagagacaaatctacgcgctattcagattttctagctagtggcagttgaacgctgtaccagctgtcatattctgaagttctgcagttttccccttttccctacaaaaccctctctactctaaagcctgtaagtaacagaggaaatcgaacagaggatgaagagaaatggccgatgggacatcagatcacaagagtaactgcaacctcatttctagaagaccaaaaggcccggttatcaaagtacagctctaaaaatctctatcagacacctttcgcatccacacagatctccatctgcgtcccttattcataaatctttttaaagcaaacctcacgcctatccctcgggcctgcttatccaaaactcaaccaatctataccatgactcctcttggtgaaaggcagattgaagggaggtggaaagggctggaaggaatgtcatgggagaggcggcacgtgcaaataacattgcggcagagacactgaaaacgccacttcccttgccactgttgcaattctcttcgtgtatcatcctcttaccctctctacccatgccacctcctacctcaacgatacacacacgtgtcacagccgaccagcaccatcgccttttccagcatcacaggttcccctaccacccctcactatccccccacataggcaggcagacacacacacacacacacacacacacacacacacacacacacacgagaaactgcagccaccgcaccctcctatctcgataagtgctcctgccaacagacatccagagcggactgaaagctcaataaatgcgcaggtacacacacgcaagcacacacacacgcgggtgcacgcgcggcatggggcgcaaggaagggcggcatggggcgcaaggaagggcaccctggggacgcacctggaggctgggtgtccagcgctgccgcccccctggtccctgtcattgagcgcagcggtataaatcctccggtagcggtcggccagggcccggcctgacagcagcagctggtagtgaccccgggagtccgcggcgggtagccccagccccagccccgcagcagccacggagccgtcgggaaccggcatgaacagcgcccccggcgccggggaggaagagaaggtggcggctgggtagaatccgtccccgccgagccccgaggaggcggcggcgggggaggcagtcgctgcgcacatcatcatcctcgccgccgccgccgccgccgccgcctcgtccccgcgggccgggcgggcagacacgcgcgcgcacacacagcccttttccaacgacgacggctccggcggcggcctctggctcccgcagcagggagactacaaagacagcgacctccttctcctcctccttcttctcctcctcccccccgcgccgccctcgccgctactggggccgctcatctaaccccgccaccccgggaatgtgaggaggaggcggtgccgccactgccgccgccaccaccgctaccaccgccaccaccgccggggctacccgcaatgggaagctgccggcctcacagagcatgcgccactcctcgcacatgctcagtaactgccgccccttttcctccccaccccctctccgccaccactccctccgcctcggggctttgggtttggggctgttgggttgtgcggaatctgaagtagtccacttctccgggttttactggcagcttgaagaagagtaaggaaagtgctggggaggctgtcagctactgacgttcgacttcaggttccctccaggtggaagaacgaggaccagaaagcaagggggaacgtgcccatcgccagaggaggagtggcacgctcttctgctacctcttctccaaggctctgctgccaacaggaagatttactgtgaattgtgctggttaattcagagtttaaggcagagaaaaccatcccaattagaagtgcctttagcgatcttattttatatggtttttgtcattaggat

SEQ ID NO: 59812 - DNA, 1739 bp, Homo sapiens
acagccctggaattggatcctgactctgctacttaatacttgtctggctttgggcaaattatctcctctgaataatgctcaaaagaatacccactacatgagattgagggaggacttaaaggatctaggatgtccaacttggcacatgaattttcacaaatggtagcacatactaaacaaaacactaggttttccgtagggtagcaatggtgtctgttcaaccatcacaggctcctagcacagggtctagccctgaacaggagggaaatagatgttggctgaatgaatgaatgttgcttgcacagaaaacatttacagcgcaggctcaggtggtggaatgtgcagtcactgcccatttagagtttctagtggacattgacccgcgtggctgccctggtctccgggctcttcccaccattcattaatttcgcttcaatctttactgctgttcagtcccagacaggcccctacggagcctgatgggtacactcaaaacccggaaactggataacttgctaagaagcccgatgtcattgagctgcgcaactaggcgtgcgcagagtcgcacacatgctcacttaggtatccgagagtggcatttctgttgcggttggcagcgtttccttccacggcagcggcagcggtcgctctcctcaaaattgatagccagtgcagcgttttttctcctcctcctcctcttcctgcctccgcacggcgcgctccccggtccctgcaactgccacagctaccgccttggcagctgggcaacttggaaggctcccctgggatggcgggggagtggggcgcatgccagaaagaaaaaggcatttggagtcacccttacttctactgtcaaggggacgtgaaggagagtgtggtcacaagtcgcgagggtcgcctgaaccgtcgctgcagatcggagacgtgggtttctggcagtatgcaaagcaagcgtcccctcccgccgctcctgcgagctctactaccgaatgccttacgcagcccttgtgtttggggaaagagggggacctatacagaatgaaaaaacacagagggctttgcttttctttccccaccccaccgagctcggcccccgtgctttctgcgctgccatcttagttcctccagcggccgggctgggcgtgtgtgcatttgtgtgtacagggagggctgcagccggggggcgtgggggccgcctgggcggcttgggtgtcggaatgggctagacagcagttcacccacgacacattcgccctcaaagaatagcattgaactacggcaaatcctgcctgtgcccattttattacgggcgtagtatgttttattctttgtggttggtatgctcatttcgcaaaagagatctctctgtcctgtgcccatgtaataagactatggcttcatctttccccttgtgatcacagatttagtcgttcttttccacttaacattgcaaacctggaccacagttttttgaactcttatcacatttacatttttcctactctcatctttaacgattttgtttttaaaggaagctacccgtgctgatgtagtaaataacagggcaggaaccataacgtgtatataagaggacagattagtgttgtttcatttaaagggttaatattgtactaaagctacaagactacaaacacaggaagtatgtatattattaggtacatcgagactgctgaaaatgctgtggtaaagtctgcgtttgtttcctggatttgtacaac

SEQ ID NO: 59813 - DNA, 639 bp, Homo sapiens
tatcctgactgtttcccatggtgttgttcaacctgtttgtctatcccctttattttgtgtatttaggtctagacttgattaaattcaggtttaacctatttgtcaagaatgtttaattttgttctcaagataggtaatattgtgacttcatatgttatcaggtgacacacgtcaggttgtcctattactggtgatactaagtttggatggcaactaccagatcaccaggttgcaaaggtacattttactctttggaattaataaataatctcagaggtgatcctagggcactgcaggaatatcctgttctcccaacagtatgttccacactatggtttcagcaaacatttactaggtgttacaaaatcatgattttctaatcctgtcgtaccaaatagagatttttcagtacttttttgtttttaaaagtattacagtagagtgctagagctttaacacatgagttaaactcagtgtggtttttatttattagtattattatatagttaagttgacatagaaactttattttttaaatatagcactatggactgaattgtttccttctcaaattcatatgttgaagccctaacctccaatgccatgatatttggagatggggcctttgggagagaatca

SEQ ID NO: 59814 - DNA, 985 bp, Homo sapiens
gtgagactccgtctcaaaaaaaaaaaaaaaaagaaaagaaagaaagagagagacattatcaagggaacaggattgacctgatattatccaaggaaagctacctaacctgggttcagagcagaactgaatgaacagacaaagttagaaatgagtaggcatctgaggttaggatggcttctattccagacagatgtggtcagaaataggttcacagaaagtaactcttggttcctttctgctctacggcacggctattaacacagattggacttttttccttcctccaaaagtgacccatgggtaagactcttagttcttaagttgccaagtccttgggctgttctagcccgatgccaggacctagtcattatcactaccagtgtttaagggagggtgatgttcttggtctattggggaacactggctcaatccatcttagagtgtgttggttcttggtgtctgattgtctaggctgtttcacagaatagttttctgctcctgcgaccagtcatccttggggtagggttggaggtattggactctggaccttaagaaatcactctggacaaatttttaaaaagtcaagttgatagtggcgtaaatagtaacaaatttctaaatgatgtgtcattcagttttctcagcacaaacagttacagttcccctaggaatttggaactgttggccatgctctttctaaagggggaagtggttaaaatagcagcagtttgtccaagctggcaagctaatgcagtggtggctacctctttgtactcataaatagacttataaaaatgaatatgccacaaaacgcaatggctatggtgtaatcacatgaaagtttatagagaaaactctccaactatttcagcctcttaattttgacttgatttatagtgttcttctaaatgattggtcaactattccatcaacgttattggtgggatttgtcagaaatattttttaatgactcttaggggaatat

SEQ ID NO: 59815 - DNA, 1105 bp, Homo sapiens
aatggctaaaagcaaaattataggctggaaatatggaaaatattgtatgatgcagaggaccttaaaatgctttctagctttaaggtctaagattctgcagagtgcttagaattaattcttgattgtaccctccctacctccagcccaattctctttttgcaaggatttttaaagaatcagagctgaatgtttcaatgtctgtcaccattttatctgcattttcacaagcattttagcgatcatgtgagtcatttctttctcacctcccacaaatagcgtgggttaaatggagctgtgggaatttttttttaaagtaataattctgacttcacaatcttttaaaaagacattgcttgcattaaacagacacacacacacacacacacacacacacacacacactcagcaaacaacctaccaatactgttgcttttgaatgttctgtaaggtcgaatgccaatgatttgtgttttgttgtgttacggttgcccagcctccttgatctattgtaggcagggttaaattacagagtgaattgggggactgacctcattacatcatctgtgctgaatcactgtcctacaactgtcgtcctgaaggctcgggccagacgtggtagtgctgtctttcattaatgttacattaatatgatcaagaagatactttcttctcttgcttctacccccacccccacccctcaggtctctcatttgctaaacaatcaaatgctttcaaaatcctgcaaaacagctttcattttaaggttctgatcaaaggacttgcattgcaacatccccagtattttcactgccctctagtggctgttttcaattacattttgttttacaaagaggattgtatccttgtttctttaccgtgttgggtctcaaataaaaagctctgtatggcaagtcatcttctaagaacgtgatgttattgtgtttgaaaagaacaagagaagaatgagcaattttaatctcgatttggcctcatctttgcggctgtctgaaaactccaaacctctgaagtgttaagtaaattaacccacatcttcatagcccccattggtgaatgcaatggtttaagaatactcgctctttgaaga

SEQ ID NO: 59816 - DNA, 691 bp, Homo sapiens
gattttgaaaaaagtctctgatggtttatttttattttcttattttacatttttgaactttaaaacatttccaaaaccagtattggatctgtttgggtttgatataggtcgtgacattgtttcttttgagtattcttaagagtggtattgacatttgaagaatccaaatggctagaaatgcaaaataggacagtgataatttatgctgttttagtcatctgctcagaaatgcacactgaatgaatagccattgtactgtcaaaaatgttgtactagcactgggaactttgttgatcttggaagcttactgttttctaatctgtgcttggtgacctttaaagttccagtaatatttgcctgttaatgaatcagactttgttcaaggcattccattgactgattttgcattaatcaatagtttttacttaaaagccacaaagaccagagcagagtactctgcttggtgctgcttaagacctaaaaagagataatacagtttaggagcttggactctgaaatcagactgcttagcttcaaatcctggctctgccacttatggctgggtaactgtgggcaaattgacctctctgtgcctcagttttctcgtttatacaataagaataattatctcaaggagttgtttgacaatttaataacttaataaatgtaaagggcttacagcaattcttgg

SEQ ID NO: 59817 - DNA, 1935 bp, Homo sapiens
aataacgatccccagcctttaagttttctataggattcgttagccagtggctattaagtgctgtcacggagcctaacagagagctgggaagggagcaaaccagcgggccggtggtgcactactcgagggccagcacctgcagctgcttctttgggaaccccctggtccccgcaaccgcctcagagacccgcgcagttcactgtcccaccaagcggcaggaggaggtgcttgtggcgggaaagttcaggccaggtccaatcaggcccctgggattaggtagcgagggtgggtgcggctccccggccccaacccgggctgccggccccgccccctgggtgggcttccccacggttctccgcccccccccccccacccgccccctcggcgctcttgccccgccccgctccggggccgcggctaaaacccggagccgccgcgacgcccaggggactggagggacgcactgagcatgtgcagatcagctcggtggtggctgccgcggccggaggcgagggcccggtgctgatgcgaaccgccggctcggcctcagcccgcgcgtggtcggccccccaggccggggcgacagggaaggagccgtagcctccccgtggcccgaggagccggcgcggcggcgcgcactccccggcggccgcggcgccctcggggcccacgatgatggcggagcaggtgaaatgcgcctcggcaggggtcagctctggagcgggctccgggccggtggtgaacgcggagctggaggtgaagaagctgcaggagctggtgcgcaagctggagaagcagaacgagcagctgcggagtcgagcggccagcgcggccgccgccccgcacctgctgctgctgccgccgccgccgcccgccgcgccgccccccgctggcctgcagcctttgggtcctcggagccccccggccgccacggccaccgccgcggcctcagggggcctggggctcgggctggcgctgggcgcggggggcggtggcggcagcggtagtggcagcggcggtggctccagccccgcgttcccgggcaccttctgcctgcctagccccgcgccctccctgctttgcagcctggcgcagccacccgaggcgcccttcgtctacttcaagccggcagcaggcttcttcggcgcgggcggtggcgggccggagccggggggcgcggggacgccgccaggggcagctgcagcgccgccctcgccgccccccacgctgctggacgaggtggaattgctggatctggagagcgtagccgcctggcgggacgaggacgactacacctggtactgcctggctccgctccttccccgagaccctggcctcgggggcttcgggcaccggggagcgggggcggggggcggacgggggtcccctcgcggcagccggggtgactccccgcggctcccggaggggccgacccagcaggtgttgagccaggcggtgacacttcccacgatgaggcttctcatgaaggcagaaacctgttttctaatcgctccgactgcggatgaaccggcccccccttccccccatctgccatgggttctgctatttgctgattgttgggtcccaagctcctcgttagcattaagtgcaaaatccatgtcatcttgtctttttgctcagtgctgctcttttccccagtgttttcggagggatgacgggggatggtaggggttggcctctgtctgcgactgttactgttctttcgttttaaacgaacgctggacaggatttgcgtgctcttcctcctcgggtggcatcggaagccgcgcagtgatggatctctctttatagagaggttcgttcttgctgtttgaattttgcagtcgtgtgcccttttgcgttgcattttcattgaaatcttattttcagagactgacttgctttttaaaatggggtgacctcactggctttccc

SEQ ID NO: 59818 - DNA, 737 bp, Homo sapiens
ctaatattatgaaacacatctgtattttaaacataatatattaaatatatctcataaaaattcttccaatatttcattaacatgttttttcatgaagtgttaattacactgaagaggagcaaaaatggagggagcaataataaagcaattctaccatattagaattgattaaaaatcaataatgcaatagattaaacacctcttaaatggtaatatgggaatagaaaaatgcaacgtggtttgctaaacttccggttatacatatttttccagagaggtggcaggatatattggaaagggcactctcccactacctgggtttggtgatgtttcttgtacccacaagaatggcatgattgtggcagtagctttgccaacctctcagggtaatatctgaagtccaagctttgccgacctctcaggctaatatctgaagtccagtcaacttgtaaaacaaatatttatgtttgtcagtgtcaggttgttgaaccccagacaagtcaattaataagctctctgcactttgtaggtgtagcagtagagccatgacctacaatagctctttttcataactgaaaataattattatcaccatttcacagattaaaaatctgagctttacagaggtgcagtaacttgcccaaggccaccatcactagagctgtgattctgaactcaggcctgattcccagcaacatatattaatactttccctttctgactttcgattttcttga

SEQ ID NO: 59819 - DNA, 1230 bp, Homo sapiens
cttctttatctattcggtaaagaaatgctctttaaaacaccgaaagtgaggcacaaatggaaatgaaagaggagaggaatgcattagaatattcaaagctccgtttctaattcagaaccactttccctaccttgtttcacaaacacactaggcacctcttgcatcacaaagagagagtattctatctcctgactgacccattcttggagttaaaagccacacctcttattctaataccctccaggagcacttactatttacttttcaaattaggaattcagagcaaaggtcatcctcaaggccaggataaaggcaaaaggtcttggaaatggaaaagactcaatacacagcaccgtaggccccagaggatgaacactagttacagaggactaagaagcccgaggtgaggctcccaggaaatgtgttttaatgggcttcactacacgccacgcgaggctgcagagggaagttaaatatccctgcgatgcgtttctgatggggcctccttcgaggccggtgtcttgccagtgtgaggccgcgggcggtggcagggccgtctcgccgccctcccggcagaccacgggccgctgtcaccctcctccgaaaggcgcccagatgaatccattaatcacggtgcgctacccccatctcccaggacgcggcctcccatcaagaacgcgggttagcgttttctcccatctccgcgcctcacgccccttccccgcccccgcacgagacggccctcggccccggcgagcgacttatccaaccccgttttgtagctgtgcccacaatcacccattaccttccccaagcaaatgtggcacgtgatgggcagagtgagcgacaatgtaacattctgcacggtctgagccatggcagcgttcagaatcccgccaacacggaagtcccgccgacctaccgctactcttcgccaagactgggcacgcgcgggccggctacggcgccccggtagggccataacccgcccaggagagaaaacgaaaacgcgctttcgaaacgcgcgatctccaaggcgttttcctttcattaaaaaaaaaaaaaaaaaaaagaaagaaagaaagaaagaaagaaaattcactgattagggagctgcaagattcctgcgaatgtgtaggaaggtagtttactacaagtatcgaggatcttggaaaatctaaaggaaagcggaatagtggagacagaagaggaagatacggaaaggcgatt

SEQ ID NO: 59820 - DNA, 1039 bp, Homo sapiens
gctaacctagaaatttgtcagtggggctttgatgatgaagcaaatcacttacttcttcagaacaacttgcctgcggtttgctaggtaggaggacctgaaattgaactgattgccatcacaacaggagggcagatcatcaccaagttctcagagctcatggccaggaagctgggctttgctggtcttgtacaggagatctcattttggacaactaaggataaaatgctggtcatcgagcagtgtaagaactccagagctataaccatttttatgagaagaagaaataagatgattattgaggaggcaaaacaatcccttcacggtgctttgtgtgtcatctggaacctcatccgtgataatcatgtggtgtatggaggaggggctgctgagatatcctgtgctctgccagttagccaagaggtggataagtgccccaccttagaacagtatgccatgagagcgcttgccaacacgttggaggtcatccccaaggccctttctgaaaacggtggcatgaatcctatccagagtatgaccaaagtctgagccagccaagtgaaggagatgaaccttgctcttggcatcgactgtttgcacaaggggacaaattatatgaagcaataacgtgtcacagaaacctcgattggcaaaaaagcaacagatatctcttgcaacacaaatggttagaatgattttgaagaatgacaacattcataagactggagaatctgaagaatgaagacaatgagaatactatgtagtaagatccactactgtgattaaataaatggatgtcttgtgatgcgtctacggttatttattacatcctttttcagaccctgtagatgctataataaaaattgctgtttggtaaccgtagtttcacttgttcaaagttgtttaattgtgggcacactatcaaattgctaggttagcacctgtctctttaatttgttgaatcatctcttaaaatttctccttttcatatttctgaagggctttataatcttctgcagaggtcacgtttttatattcatta

SEQ ID NO: 59821 - DNA, 1099 bp, Homo sapiens
ccaatatgaaaaattgaggaaagattattttaaaaaaaaaaatcaaattcagcagaaggaagcaaagaatctcagttgtttacaatggtttgaagatgggaatgaaaaaatatttgcaggaaatatttggagaaaagaacaggagtaggaatatagtaacgattaaaatagtcaataaactactatatatgaagtgcctgataccagccaagatttcacagaccatataccacggtaaccatgtgacgttggtatggttgttttcattccaaagataaataatcaaagttcacggaatctacctgaagttacaccactgataagtgatagcattgggatttaaacaggcatctgaaccaaaagcctccattcttagaactagaatacacagtgtcctaatagaataaaatagaaatagtaggcttagtagatgacagttcatatactagtttaactaataaaaacttataagttgatttaaaaaaagtacgtaattcagaagaacgcttctaacactgtcatgacataaacaatggttgagaagaactattgccatgtgaaatgaataagaaagggagtgctagacatagacacagtattacaagaaaagaccatggcagtaggttacagagtgctcagtctgggctttgactttgagctgagggagacacaagacaggaaatgctagcaagatcactggtgagggcagaggttgcagctgatattatgaaacggttcagtctttttgggatgatgattttgcaatatgactcaaaaccaataaaatgattacgccatatgaaacgggaatctcacctctgcagacttaactcagaagagtaataaaaaaagcagggaggggggtgcagggaggtaaaggagcatgactgaacaaagatactgatagctgcatgtatttataaaagaaaacaaaaactagtaataatatggatggttgtggaaatatttggtaaactacagaatattatataaagctatgaaaatgctaaatgtgattgcttagaaacctcagaaactatttaaaattggtcaaagggaaaagtaaagcattaatattgaatgcactataatactagct

SEQ ID NO: 59822 - DNA, 2458 bp, Homo sapiens
aattttccccattgcattattgtaaatcaaccaattctgattaagcactttggtccatgtcatattttgtattaacaagtcgtcaaaacactccttaaattttccaatctaagactatttcagcactctaaccgcagcccccaacacaaaatctatctatagcatcccacttaaaactgctaaatattccatatggatgaagattcaattttcttcctcctctccaagctaacgaacgcgtaggcgggaaaggggaattttactggccacctcagcacctgttacatcttcaatcagtgaagagaggtgcagatgagccagacagcacatgggagacgtggccttgctttcaggaattatatttaggtgaaacgtgagtgatttaagctagaactgcccgaatccccaataaaggccgtctacttcatttagaaaaacaaggtaaaataatctgtaggaagtaaaatacagtcggtttcactaaaataaaccgattttgaggcccccggaaaatattgcgggtgggggttggagacggtctatatataacgggaaaacgagagcagctcagcaataaaataaagctcgactcaggctctcgggggtatcctgaatctggaagcgaggtggacgaggaggagaagccacagaaccctgggacctccgttcaccgcttcggcctccaccgcaggcacttggggaaactgcacagatctctgggtccgcctatctcccactgccatccctgcaaagagatatcccccggatactcacatgggctcgagagtcttgctgagccaggacttgagtgcctcgaagttttcaatgatcattttagaaaccatccacagcggccctaaggcccgtcacactcctccgcccgcccaggtcgcggccgctacagccgccgctgcccccgccccctcctccgcgcgccgcccgcgtgggccgcggtgggaggcgccggtggcaggttcccgcgggccccggtcggcgaacagctctgcaaggaccgccgcaggccacaagtgcacggggtgccaggagctccccgtccccggcccccagcccgggctgaaacagcaacggtttgcccgggccctcccccttccctcttccccagcaaatctacccagaccggaagcgcgacacgcgcttagacccgagccttctctcagcctcgggaccaggtgcttgttggctacgtcgaaaaggcaaaagtaaagaaagcgaaggcgaagggcagctcaatgggaacgattcagggggtcttcccggctcccagcacccccaagaagatggctgccggtaaatctcgcgagaattgatgaagtctcgcggtggctcccggagcctgctgggagagacgtaaggtcggcggagaatgcgcgggtcgagtgctgtagttcgatttttgcgtgtgtgcgttgcttgcggcctttgtgcctttttattctttgcttacctttatgatataaagaccttatttcttacaaggaggaaaagaccgctgacttcagaaacagcgggaaccccagctcgtccccggtaagacggccgtggcctgtcagctggaacggtcctgccggatggatcgctctttgagagcgtacactcccgcgtgcgcgacaccaggcggcccgtaggttccaggtgccgagcacactacctcctcagtttacctaagtgccctaccagtatcatattctgtgtatgctgtgatgtgaacgaggtttgtaaacacaggctggtctaatggagcccaatgagaccgccagaggattagtgtcttgtccaacagtacttgacttgctggtagagccctaatgactgagggctgcccacaagggaaaggtgagagaaccttcacgtctctcaggtagtttccagcctgcactttcccccagctaaagataagttttgttatttttaaaattctctttatttagagcaaattcagccctatctcagatcgggaaattatatagtatcaaaagagagagtcttcatattagcaacccaaataaataaactattttcctgggtgatcaaataagtttgattcctgcttgagttctatttagatactaggtggaattttacaaagggtctacgttccatgaactgtaatggaatgaaaatattcacaatctaaagacattttcagtaagtagatcaataaaagctctttatgagagacaccgataggctaaattgttcttaggaactcttgagtttataatttgctagagtgaagtgtctttaaggattaggtggaaagattatgaactacaaagcaagacatttgttttaaaatacagcatatagagtagaatacaaattagaatccagctactgaataaccagggtgttgattaaagtgatttagctgagtgaaataaaccagacatgaaaggacaaatattatgattccacttacattaagtacctagagtag

SEQ ID NO: 59823 - DNA, 1941 bp, Homo sapiens
acaaacaaaaacaaaaattaccccacagaagaatttcagggcagtggaaatactctgtaggatactataatgatggatacctgccattacacatttgttctaactcgaggagtatacaacaacctgagtgaaccctgaggtaactatggactttgagtgatgatgaggtgtcaatgcaggttcatcagtcgtaacacatgtaccactctgaggggggatgttgataatggtggggggttatacatgcgtaggagccaagtgtatatgggatatctctgtaacttctcaatttttctgtaaactctaactactctatattagtctttaaaaaatcgcttatcttacgaatgattttgaataagcgttttgggaatgttctagagatgaatctcctccccatgtcctacgctgggtgaggaagtgtcgggtacccgggcgacctgtcctcaggtgttctaggaacgcggccccatcccttgtcagcctctgtctctgtgtggtgagaaggcgcactggctcgtgcctgcgcgaaactcgcgcacacagaaaagaccaatcaaggacgggtcattcccgccccccgcgcgccttttgcgaccgcccactcgacaggttgacaacctagacagctcccccggacttgccttacttttccatctcctcccacccagctataccctcccactggcggcgcggatggcacgccggcggagccagcgagtctgcgcgagcggtccgagcatgctcaatagcgcgcgcggcgccccggagcttctccgcggaaccgcgaccaacgcggaggtctcggcggccgctgcgggagccacaggaagtgaagagcttccgccgggagaccgcggctgcaggaacggaggcggaaggggccctgcggcgacgacgtcgtcgacgggggtggccgtgggagctgagcacggagaagactccctctctcggaagccggatcccgagccgggcaggatggatcaccaccagccggggactgggcgctaccaggtggtgagttcccggcctcctgtgcctcccgggactgcctcccgccgcggcgtcccgagagtccctttcctcaggttattcccggaggaaaagctgtggcttttttttgttgtgttttgttttgtttttttggatcttctggctggagctgcttcactcgcctcacctgcgcactcctgcctaggactccttcgaaacccttctctctcgccccaagtctgcttagctcctcacccgcacccttagccccgctgtgagacgccctccctccacacaccttacaacttgtatccgttttaatttctcactttatcattttcttattctctgactcagtcactcctgagacattctagtcgattgtctactggaaatggggctgacttcacatacctgcccggaaggtgatcgccgtcataaatggggtgggtgagtaggtgggtggaggtgtaagtactgcgtggggtgggatgtggatttggcaaaaatgtgggttaggaattgtggaactgtagagaaagactagccataatgctgatcttgtctctctgctcgttaaccttgtcattttgtccttttccattatgttagtattaaaaatgactgtattttttggtaatccccactttttctttctttctttctttcttttttttttttttttttttttttttggttagaggggaaacagaggtagttttagtagaacaaattctaatcttgtttgaaaaattatttttcgttaaatacaaggttttccagcttaactgtgtaaactttggtaactatgttgaaaaaagtgaaatgtgttcctctatattttcagtgtcaatttttaaatatatttttctttgtgtattctggtggtgacgttggagattcctgttgtaaaccttagttaaagatggactgagcaatagttgactc

SEQ ID NO: 59824 - DNA, 840 bp, Homo sapiens
tacatgtgtaaaacatgtaaagactggtacatgataaataagtaccctttttacaagctaataagttagtgtgttaatgtttcacggtttctggcaaaaaagaggtgacctccaggttaaagactgatcattactcatgacatagcaagcagcacgaacatcagcatatttgtgtaggttttcctagctaccaaattccacagaggggctgggtgtccatatggattcgtgcagtgggtttgcatcacagctgaggaactcagaaactcagaaccaagggtgcagctcttttttttttaaagcaagcagcaaatatcttagcaaacaacaaacaaactagttcaccttctcctgggatggcagttacacactgtggttgcctgatctttgttccctgtgtaacttattagaagaaacagctcagtatgaggaaatggaaagctttacacacactcagcaagaatgtgcagggacattcaggcccatggctgactgccttactgaatagtacatgttctggatgagataatgtataatgagttttagttatactcatttcattttccactggaaagaagtgttgcaggctcttacctttccttactctctagttgtcaccttttcttgccagccttattcctttgatcgtctcttgtttgtttcttttgaatttatcagtatactttatctggcttatattcttaccacacctcttttacataatcaaggttacccaactgcatagtctgatagctacttttcagttctcatgttgcttgatttctctgttatactgacagtatgaatgttctttgaaactccgtccttattcctgataca

SEQ ID NO: 59825 - DNA, 519 bp, Homo sapiens
tctcctagttaaattcaccttctttatcccttgacttcctcttttctattgctcttccccgcttatcccttcctaaattttgatttcaggcccctcatgtgttagccttcacttcgcatcctaactcactcactctggttaccaccacttggaaagttcttctctttgcctggacctcaagtccactgacctctttgctgtccatgtacttatttatcttcttacatagtttgaattccatggcctatcattttaattgtgaatcatctttttttctatttatgtttctatattagcatagccagtttagtgactgtgaaagaactcaaggtagccaaaaaacacagagaaatgttacaaggccttcaaattatttttgtcagctgtttttttttttttttttttttttgataacattctactctagaattttggaatgatgatcaagcattctgtcttcctcatctacatgttttagtaatggagttaatgagatacatgtgtattactctttgctct

SEQ ID NO: 59826 - DNA, 886 bp, Homo sapiens
gtcttccaataacattaacatagaaaacaaaaaaatgcaattagagacttcagttctcatttctagagctgatcagaactgtatttatgacttttccctttcctcattgattccagtttccctttgcctcttatcaggacctcagtgggtcaaagcactttattggtgcaatgacccttctctcagttcttcatgggcctgaatcttcagtgatcctgcctgcctgggtgccagtggtcttccatttgccttcatcactaggcctggaagtgtagttaagtccaccagtcttctaggtagtttttggctgttttcatagtggcttgaacaatttgaaatgaccaagtgttttgtctcagctttcaattcagtgaagccattgatttttctttggtgggagactctctctggatgactaaaacctcaaaatagcagcacaagttgaaaacctgagataagaatattgagagtgagtcactgtaagatagaggtaaaattcccagattgaccaatggttcccctacccgtgtattttgcttaagagagagagaaaaaaagcagcagctattcagctttggtccagagtagacaataaacctcacaaaacaaaacccaatttgacaaaaattgtctcttaactggtaccatttaactcttgtctatgacaattaggaaattcctctgaacagtaaaaaagctaagaatgcagttaactaagaatgtagttagctgtgagtgactgtggcttgaatgataaaaaggtttatgtgactcattcaacaggagtctgatgacagatggctttcgtgatgacatcaggaacatttccatgtttatgggccaccatccttagcaattatgccttcatcctcatgactgtggcctc

SEQ ID NO: 59827 - DNA, 772 bp, Homo sapiens
tttctttctgaaaccccaacctgggagacaaggaaggagatggagggaggacacttcacctcagaactccaaggctatctctgttcaatttgcttcctactatttatcctgtctcccttcccacccaaatgaattgttttctagactgtggcaggggagtggtcaactgtctaatgattttcctttcatttgttttgtctttgcacagagtcctcactgtggctcatgcactgggtttttcagcttcatcactattgacattttgggctggatatgctgttgttgtgggctgtcctgtgtactgtacgatgttaagcagcattcctggcctctgcccactaggtgccagtcacaaccccatagaccataaaaaattgtttccagatcttgccaaatgcccctgggggcaaagttgcctttggggaagaactgctgccttaaaggtatacgcttttggaaaccaatgctggtcagattctctggagaccagaaactactagtaaacaggagagctggcagaagggatggccaaacgagaagtcagagtttctattttaaatttttgtttacctcctgcttgtcatgctggaaaaggggatagaaatgttaggatagctacacacaaacacttctatactacacatagatagttgaatgttagcagagttctggcattgtattttttatgaagtaattgttttcttcttattaggcacaggtttcacctttctaagggaaatattataccactgatacaaacaaaatagataca

SEQ ID NO: 59828 - DNA, 1347 bp, Homo sapiens
ttacatttgcataaccaaagggccaaggcaaatgttatttttcttaaaataaaggagtcgtttgctctccaaagtaaaaaaaaaaagcatccacctctaagaagcttttcccatttctagtcatgtgcacattttcaacattttgggggtttaatctcagctaaaatatttgcacaactgatatgggagtgctgggaagggaagagtgtggtccctttaaatgatagggaaaggggaaggaaagttctgggcagaggagggcgtggtccctggctagggctccacccccacggacctgggtgaggacaggcactcctgccttctagcccaaatgctgcatttttcaagacaaccctggcccgccatgcccccatcctgggcctataaaaacgggagaccttaatgggccaaagtgagagaagcacttacgcggaagaagagacaagcggctggtagtcagagggcttccagaggagcacactggcaggaaagcacaccgacaggcactggcaggccagcaggccattgacccagcaggccatcgaccagcaggatgaagcagagtttggccggggcagttggagaagagccagggcttctgagcaccgcaaggccaggggaaaaccatctcccttctggctcctccattggcggagagctgcttccactggataaaacttcgcactcattctcccatgtgtgatctgattcttccggtacaccaaggcaagaacccaggatacagaaagccatctgtctttgcgaccaggtagagggtctaattgagctggttaacacaagctgcctatagacagcaaactaacagagcaccctgtagcacactcccagtggggcttcaggagctgtaaacattcacccctagacaatgccagggggtcagagccccacaactggcccgtctgtatgctcccatagaggtttgagcagcagggcactgaacaatcggagccacacccctatctcacacactgtgaggaggacaagggaacctttcctgtttcataaccacacaacaggatatcgtgttaaaatcaatttttgatctctgaattggtattttttgttctctgtattccccaaggtagcaaggccctttgcattctttacctctggatacctacaatgtggaagtcagagactttggtaaaaatctaaactcattgactatttaaggattctgggcatgtgagaagagagacagataaatattttttgtgttttgtttgtttggttggttttcggtgaattgttttttgttttttttctttgagacagaatctttctctgtcacccaggctggagtacagtggtgcgatttcagctcat

SEQ ID NO: 59829 - DNA, 935 bp, Homo sapiens
aatttactctaatcttaccaggattttttttttttttacttcttcttaatctcaatgagaattttactttgaaagaaggagctctaactttttttttcctactctaaaacagtgtttgtacttttttctggactccaagttggatgccttcaccaaagtggtttcaaagactggaacaaaaaagcctccatcgaggccctggctagcacagtccctgttactttaagagtagcattccacctccccctcacacccacatacttgtcctctctttgcacagcaagtgccaagcagtgacatctactatagtttctaggacacgatggtctctgctctacagggaaaaagagcgagcgggacagaaagaaggcgggtggtgagggagaaggagcacaagcccagctatgttcccagaggaggagtcacttcctcgcaataatcctgagatgctgtttatggctgttctgctgatatgaagcctggagccgcaggatgcagcctccccctggctgtccattaatcacgaggggctgttacagagtgtacagagtgggagttctgcctacaagtggcctctaactgtctccagctcaatgaaatgaacctgtgtgaaaacttgttttatgagagattggtttatttgtaactaaactacttcctctgttatttgataagatcaaatatttgctactgataatctgagagtgtcacatttattatcctgtttcagccgttgcctaactcctttggaactgactccgttaactctttgagggacagcagtaggttttagaggaccggtttctattttctttcagcaaagccaatgctatctttcagacactgagtcagcattattttagaacagctatgacatgtgaatcaaaaagaagcctttctcttccaaaacagaaagcagacaaccatagtaacag

SEQ ID NO: 59830 - DNA, 611 bp, Homo sapiens
atttttaaaaaggaataaatgaataagtgagcaaattaatgttgatgactgtgttaagaaataaaatttaatcgaatctttcctgctgttgaaattgcattatggccaaacagaattttctcaaatgattgcataacaaaggaaatttatatttctcatctggttagaatggcaaaccaatgtttgtttcaggttgcattctcagaaaaagtattcttagatggaaatttgcatacaagaggttggttggaaagtataagagagaacagcacctgttacagagtaagggaagcagtgttgggcaaaaggagactttgtactgtgagacagttgtgccagaggcctcagccactcctacctggagttccagagctggagggcacttcagttgttcccaatcaagaaaagggaaccaggactttggatccctttcacagagcagtaattacttgtggactgccccgaatctctcctccaagagcaatgcctggagagaggatgaactgtgagccatctgcagccaagctacaatgtctactataatcaccattttcatatccagtagaggaaatttcacccaaaaaagtattctataattattttcttctttg

SEQ ID NO: 59831 - DNA, 378 bp, Homo sapiens
gtctgtgccatgtagtatggcacaacttgtttttcacagttgcaaatattattgtatatacaaaaatatagcacattctctctggagaaaacaatggaaaaaagtcatctgctaatttacaagttttgcaagtactattcacaaacaaaaactttgcctaggagtgtctgtgttgctttagcttatgcaatacatgggtcaccaagttctgtatctcatactttgagctccattagctgagttctaacaagcatatcagttaaaacggcacatggacaaaaagcatttcaccgcaaacagcaaagactatcccacctttctattaacagtgccaagattataactgtttagttggttgcatatgtgtattaaaaaaag

SEQ ID NO: 59832 - DNA, 5497 bp, Homo sapiens
aacactgctaccaatgttttcaaaagttgaaaatcctttcaaaatttgaaataggtttccatttgtcatagtcatttttgccttaagcgttaataatgcaacctagaagattctttcttggttcttaatttttacttttacatcaaacactttaactgtgacgtatacggcattctgtaactttttcaaaccaggtagaatgaatatggcatgcaaaaaagtaaatacccaaattctacaacaatcatgccattttttattaattgtatagtagcacaaagttatagaactaaaagcaaatcaaatcctattaggtgccagaaacacattaaagcaaacttaacaagaagaagacatgaatttattttcaacttctcaacaacttaagaattaactattttacagtctgatagcctagaacaccaccttagattctgcagctaaaaggttgttctccctgctaattgagaacacaaacgaagtgataataaccagaaaagcgttttaaaaattcaaatgtcacatttcgtatctagcattctgtcaaggaattccttaaactgcagtccttcttcaatttcaaaacgatcaccccctttcccaagcctatatgacaataaaaagtataaaacaggcaaaagtggacctttatccgatctccgctctttagaatagaggccacagcgaacaaggcaggtgacaaacgtctcccaattcggagcaaggcagtgctggaaaccggatctcctcacctccaaaagaatggcagaagacaacgctgctctttgctttcacttagtttatcgcctctctgtgccccaacaccgtccccagcaggtgggacacagccgatccccaggggagtttctccaggcggactgacgctgtccatgggccaggctgcccccctgcttacgatccccagactcagacaggcgggggccgcgggcgcctccgaagggtacgtgtcacgaaatgcaggagcacacttcccccgcctccctctccccagctaagatctcccccaactcaagagaactgccttccagccccaaggagccactccgcccccaggcagaggtcacgccgcccactgccaggctttctgcaaagcccctcggacatccggcacaggtttcccaccccgacactgcgagcacgaaagccctgcctgagacacgcagccaggacgcacaagtccaacccacgcacacacggcgactccacgctgcactgaccgaagggggcattgcctgtaatctgcacacgcctatctccttttgggtcgagagaaaaaaaaaagatatcatatttcttaaagtgaaagaaaaatggctttttaaaaaaagggcattttccagggtcccactgctcactccgggcgcgcaggacccagctcccggagctgtaaactttcggtgcagatttgcttgcagtcaaagtagcatctttgaaataaaagggggcttttttgtttttattttttaagtgatttctgccgatccgatccctggcctccttcttcaaagctggactccctacctccgcccctcttctctttcccagtcccccctcccctttgaaagtgctttgaaacccccattaagaacagtgtgtgatcagactgaggattaggggaaaagaacttcagctctagggtggggcaaacggacacagaaactgctttgtaaaaaacacacaagaatccaaattaaaacacagcaacaacaacaacaaaaggaaataaaaaattgcctattttgccacctactttcaggtaatggaaaatgatcgcgaccgcttgatgactttcttcctgcgctgggtcagcccgagcttccaaaaataaaataagtgtgacccaggctgaccacgaagaacggaagagagagagctgcacttccgaaccgcagagacccggcgccaggcagggcgacgctcccacccgctccgggctagactgtccacacggagcagaggcgggcactccctccacccggcaccctgcctttttctcaccctggaagtctcctgcccccgaggcgggcaacctgtgtcccccagccccaccagcgccccgcctagggacagcctctccctggactttgccttccaccaagaggaagaacaggttagaaatgcgggcgcctgcaaaggcaacctggaaaatacaaagtgtttttctctccctctcccgctctcagcgccgaattcgcggccagtgcacggctgggagcagacttcaggctagctgtcctccgtcccaaccccctagagcgcgggcgcgcggggtcgcctgtcggggacactgcacggggtgcatacagaagtccccgcagaggcaggccgagcccaagccccgggcgaggcaggtccgcggggagcgccccggatcctcgcgaagaccctgcgggatttgagaaagggaggctcggggagagacggacccaactcctggtccggctgcacctactccatgttgcccacaacgcgccggccgcggcgccaggaggggaagagccaaacgtgcctcaccgtgatcgcggctttgcaccaacccctctcccttggattctcttctttctgcgatgtgcaaataaatccagtctcgatgcaaacttttttcctttctttccaacctctgctttagaccaacttccgagcaatcggcgggagaaaaaaagagaattcggagccagattccccgctgatgaacactccggggttcggagctggagacgactccccttctacaagcgcacgcggagtatttcctcttttttctcaatgaacaagaggccgaagcgccaacggcaagtcccttttcctggcagatgagcgaatgggaaaagaaaacggccttacggagaacctaaagccagatcgccaagtggtgcggccggggccgcgtcgtagcggaggcggcgcgggggcgcgggccgggccgggccgggcgggcgcgggggcctgggcgctgcgcgctccgccggcccctctcctccgctagcgctgcggcgcgcagctctcggcggtgcagactgggcgttgtggaggcgaggcagcgaggccgaggcgggggcggtgggtgcggaggaggaggaagaggaggaggaggaggaggaggagggtctggggcccgcccggggggggctcgccgttggcctgcgccctcgcctttccggaggaggcagggagctctgcggcggccgcggcagcagtaaatggcgtcatgtggatccgaggcggaacagagcagttgttgtcccagaggatatatcgcatccggtcccagctcattggctccgcggggctacattcactcacactccagcgcccgccagcgctccgagccgcaggaggcattcaaaagggcaaccgcgccgccccgcgcgtccccaggccggtcctgccgcccgagcgccgtcacgcggggcgcccgcggggccgggctgggcactgcagggtcagtttatctagtttcaaggaaacactgaccttaaggtttgcccagaggcaatgaggacgagccagaggctcgagctgacttagggaactttctccttgccaccaggaaaggggaatgaacatttaagactaatctgggccacgcagtgttagcatgaaaaacaagttgcaggttttaagactttatccagaatccatttcaagtctacctctccccttttctgttcccctttgcggagcgggtgacgggggctggggcggggggagaagaagggggaggggaaggggagcgggaagtgaggtgggagggctattggtttattctttgtctactggattaacccgattatacaccaggcaccagcacaaaccgcctcccccacctccgagccttgtacgggaggaacggaatgcagattcgagtttcaagtaccttctgctcttgctgggatttgcttttgattgtgtcgacttgtagtttttccgtttattagaatttcatttttaaggggggttatctatgaatggaggctttttgaagagcttccttactattttgcttcatgcagtagctaaagtctacagtctaagccttttaacttaattcattaatagacaggaacaagattactcagggcgacagcatgggcttccgaaatgggggggcgggggggagggaagggttggctcactgcagatttccttcttcccttaactaaaagtcatccttcatttcccacttttcttgccacctagaacatttctcaagattctgttgtccatgttgaaggtgcactattctttcccatttacaaaaaaaaaataaagatagaaaatgcatacatatgcactgtcctagctgccgttcatttactaagaaatgtgccttcacgtgggagcaccagtggaaaattaaaacttgcgcatacacacgcctaatattgcattctgtcgagcgacttacagaatgcttttactttacagggaagtacctgcttgtacggtcaaaattcccgaatagcacctgcgatcttgccccatgcggggtgttcttgaaagcagtgttaggaaaacatggtgcttcactcgtccagctttaacccaatccatttgcagctaccctggaactagctgccttcttctgagctcctgctctagaatgtccccagcgcgctctctgcctcgctgcggtctcaccctgacttctccatgtttctctagggctctcctctttctctagggatttggaaccagagatggcaagggaagtggcatgcgttatttccgggcgctggcctacgtcccccgacccctaaggtgagggtggacgaggctacaacggcctgctcccgagcgtcccgggactgcgggcgcaaaacagctgggcctctctggccacagccgctcgccggacgcccgaatccattgagccgacggtgaacgcaggcgccgctgcgctcgcggcccctctggccaccagggggcgcccgcccggcgcggggctaaggctgctttcttctccgggacacgacgcggacaggctgggttaccttccaaaacgtgtgtgcattaggccggctggtttaaaatgaatacaaagatattaatataaacgacacagaagatagcttgccctcctgtctgcttgggagggtcaaagcctgggtgtgcaaggctaggcaggaacgtgctgccggtgtgcggccagcaagtctctcgagcagagcaggtgaaagcaacgccgtcgcttcgcctcttcaaactcctgcactcgatggcggctttttaggagacatctgtgccttgctggtctcccagcgctgcaggaactttgcgaagatacatcgttagggatcaaagcatgcaatggaatttagatcagaaacttccagctgtttagagaaccttatatttttatggagttaataggggaaaatctagaaatttatatcttatcttccatgagctataaagaatctcatgtcatctagctcttcctcccaccccctttcctcacaatctccagtttgct

SEQ ID NO: 59833 - DNA, 610 bp, Homo sapiens
ccagactagggtgtccgagaaggccaagcattaggcatcgatgctggaatgccagccttagatatgttcaaggccttgcagtcagaaagactttatgagaacggcagcctgatgagcaatttggagcccatgttgctatgtgggatgagggtgggatttatggcactggaaagatttgttgattttgggggcagagaaggtgaattcatatagtgaccaactgggaatgacccagctacacaatctttctaatctatgccaaagctgtacagagaaaacttatttgtgaataggattgccaaatttgttcccagtgacagaaaatctatacttggtaagtagggaaattccaataggtaacagagaaaacgggcaggttctgtcctaatttcctgctcctacttgttctgggatttagttgcagttcatagcatctggttcctgtgcattcacagaaataggcccaagtacctgtcagaaggaaatgaattgagagaatcttcaagtcactcagaacagtgaaagtaactgaaaattaaattaaaccattgaagtcggttgcctataaacatgatggtgatgataagctaacatttattagacttttggg

SEQ ID NO: 59834 - DNA, 934 bp, Homo sapiens
cctccaagagagggttctcatgcttgtttgcttgataacaaaaaagactatgcaaaaaccacaaccttgcacaaaggctatcacaaacttacacaaaaaaatacttctgaaagaacttatgcccagcaactgcctgtccagtttcggactgttgtcatccttgttattgatctttgtagccaagaataaatatttcaaaacaattatataatctttgtattttttttgaagacctttgtcttcctttaccttcctgaatatgcacatagtttactaaggcatgagtattcccattacagtgttttattctcaggtaagtatctttccctctagggaggatctctctgttatttaggttggcgcttactattgtggacttataacacaggatattttaaataatacaaatgagcagccagatgaagcagtaccttggacaaggtctggaaggatttcaagcacaggagcttctgtccccgtgaagttggggttagtcaccctcctaacatgggaatgtgttcatcaaactggaagctctccaaaacccttactcttggaatttttacggaggccacatcatgtaggcatgactgattattaactacatttctagcccttctcccttctccagagaataggggatggggctaaaagttctaagcttttaatcatggcttggtctttctggtgatcagccccatccaggagatgaacaagagacgcctcagtaaaacgaaagacactcctatcacccaggaaattccaaagtgtttaagagctctgtgtcagatattcctatcactaaagaaatttcaaaggtcttaggagctgtatgtcagaagctgcatcaaagtttaactattagaacaaaagattctcctagaaccgctatttacaaggtttctaggagctctgtgttaggaaccagggacag

SEQ ID NO: 59835 - DNA, 1028 bp, Homo sapiens
ctcatgtgctagaaaatggtaaagtaacgtagaagcatgctcttctagagcagcaggatgattcttatttgaaggatatcaccccatcctttagtcattgtttgttgtgttttctgttgtttgcaaccacaccgaaccctaacttagtagtcttactctcacctcttcctgttttctctgagattgtgctgtaatttcttcacctcctacatctgaggagctgccagccagtatgactgatgccttcctatcctcacatctcacttaatggacacaatgcccataaaacagtggagtgacaggggttatgatagggcaaatgtgaccttatttcaccatcatctgatgtctttcatgtgtctatttttaaatgtcttgtctagagggtaatttcctctttccattgcctctgtcactttgtctctctgtagtaatattaacatgtagttttacttgtttcacccagaagtatgctgaaataactattttaatatttattacagaactgtaataagtatctcctcatgtaataatggaggaggaaattggctgtttgatgccatagtttagggagcaaggataatattgaattaggtttgtttgaattatgcaaaagtaggtcaaatttcgaaaacaggctaaagagtaaacaacatggggattatacagaaggggtggacaaagaagagaatggaatgaggaaggaaaggccagagaggaggcgtaaggtggagtttaaaattggataaaatggttcacagggaaaaaaaaatcacagctattagggtcaccaaaggacttttaaaataagtggatgcagcatttagctcgcatagatgctttgcttaaatgtgaagtttgctctgtgtcttccccatcttcagttaaatcttctacattcctaaatgatttttggatagaaatcataggagaagactttcatctttggttcaacactataccaaatagatactgtaagtgcagaatgactccacaaattcaactgaaatcactgcttacagtgttct

SEQ ID NO: 59836 - DNA, 664 bp, Homo sapiens
gaaaacctattatatacaacattttctggcaggggtgaccccacttaattcagcactcttcactctcaattcacctcttttttgtcttgagctccagcaatgtcagccatgttactgtcattgataatacagcatggtcagtgtggagcccctgacactgagtaggcattggagctaagactaatggaatatcggaaatattctagttcaggagaaaataaaatgcactttgttgccaagagtaaaaggctacctttaacaagccagaactttgtcatggcatattgccaaatttttttagcaggtgccctgccaagaagggagtgggaggacaaaaactatcaacaatgcagggtcatgtttgagtcttcctggaatgtccacctctgtggtaatgcttgcaggattatcaggctaggctggactcatggtaaatgagcatatcctgctcattggtggatctttttattataagaaaagagaatcatgtgaggaatatgtgggaattggagcctggaattatgtacttttggttttcttcactttgtcttgtggcagcattaagtctcctcctttcattgctgttcctgtgttgcctttggctagcatcctttctgaggtcgtgtgtcttctggattctgacagttggtgcaaggggccggtt

SEQ ID NO: 59837 - DNA, 3847 bp, Homo sapiens
aagagggaactgagagttggaagactagttaaagttacgttagttaagctataagcatatgtgtgatactgagaggaagatttaaaaaaaaattcactgaggtgggttcacagagaccccctttcacttccatttgatttttttcctttcatccagctccatcttatacatgcatgaaacaagtcttattgataaggctttctcagtttatcacagccttttttacatttcctttcccccatagccattatcttggatccagatattggagaacctctatattgcccagacattttctttttcctttctcctccacaaattctttttataaaagctagttatctttaaaaatgcacatgtaactgtctctctctctcagcttccagtgatttgtaattacccttttgagaaagtcgagcgctctcagcatggcttagaatatcttcccagtttgaccgctgccttccccagcctcatctcccatgtctctctttctttgtgctccagttacattcctatgtcagtttctcagaaactccattctctttccagcctcagggccttgccgtaacctttcctttactttgaaatattcttgccaatgccttctcattctccaatttctggagtctcagctgaatttcagatcttcaggtcttcatcatacatgcctcttctaagcccaaacaagcaaggtggccatgtctgctgctctttataccacttattgtcatgggcatgacttctattgctattaggttggcgcgaaagcagtcactgcttttgccattgaaagtaatggcaaaaaccgcaatcacttttgcaacaacctaatatttgctaagtgcctgtcttgctccattgctccaaaaggaaatgggcagtgtcagcctgtgcactgctgcctcctcagtgcctgggatacctgtgacctgacacaagggaggcacccagcaagtaattgctgaacaaatgagtatgggaagaggttctgccttggtcattatcaggccaggcattatgttttcaggtttccattttctcatgataaaacttcttcataagaggaaatcatcctctgatttctcaggtaattgaggtttgaaggtacgaatgggaaggtatgaattctgtttgcattaaggaatgaagctcattttgctgtggagaggtagaatcgttttgcaagaggccaaaatatcatttgtttcccagcactaaactttggcaagaatagttctctgctaattcaagtgaccaagaatttatgcaatttcctctgaagaaaattatccttttgagagcaggaagaaatattttaccccccttactgaaagttaatcgttttaccaggatctgtttcttcttgcacctgattttcttctttcttacacaatcaactgtatctgctttgtataaatctcttgaatttaaaaatttgcctttcagatgcctggtgtcctaggatgtgtatattgaatcaccagaaataattcagtgacatattatgctagcttatttcatacatatttccaacttatgactcattggtttgaagaggacaaatgtgaactaagagaaaacagaggacttgatgtacttgtgcctgagaggatgaatcactgtgctgctggcgaaggatcctgggtcagagttgtctgtctcatgggtttgaatgaccctcagtgttctctgtcctggccccactcatgaactcacatgcaacctcacacaaacacacatccaaaacaccactcgcttcttactttggaagccccacaaaactatttcaggctggaaggcatgcatataataaagaaagtggttgtcttggaggctacaacttgataaaggaacacgtcagagagacccaaaatgttcacagtggcattttcattctcagtgttcaaggagttgtattttccactctctctccaccatctgtttttcttactatagcaaatgtcatttcctatggcgtttagcagaatatgaaatgggattgttttctagtgaattttgatgcagttttatgattttccttagagcctgcctgcctgctttctttctctccttccttccttccttctttccttccttccttctgtccgtccgtccatccatctttccttcctcccttccttccttctttccatccttcctttcattttactaaaaaaagtagaagtagctttaacagtacattgatcagaccaactttaaaataactcctgtagatttgcctctaaacctggtttgaaatttgtgataagacaaagttcttaaatatgttaatttttaatctgtttataacaagcacaaattcccaaagcggtgtaaagctgttaagcagtaaattcccattaaagtgacaagctaaggatttaacttaattgaagggggaatgtgtatgtggttttgtgtatggaggtagagaggtgtgtgcctgtgtgtctgtaaaagtagtaaaggaggatacaaggtagaggaaagagcaaaagaggagaattcaggaaacaataacagcatgtacttacatagcattttctatgtgtcagacattgtatgaactctacatttttaatttaattctcaacatagccacacattggaggtattgttgctttctccattttacatatgagaaatgtaaaggttaaatcctacaaaagctaaggtcacacagctattaagtgacagaggtaaatggttcacatcctaagcattatattatgctgttttctctcaactacgactcaagcatacatttgtagcataatgaaagagaggatcctttgtgaaacattagcaccagatttattgtctctttgggcagagaaaagccaaagggttttggaaatctttcaccaatagcaagactgtggtctaccggagaaggtggctgtgtagcttaagggaatatggcaaagagaagccaagagagaactcagaatgtctggagtatgagatgtaatcactggggcagtattgatggtggactctgcccatgaggcgcaacgctgtgatgtctgttctggaaatatgtcaccacttcaactcttctctttccatgactgattagatgatgatttactctcacagaaagaatggagattaggatgggaagaaaaggctccctctgttgaggatggctcaactctgtgaagctgctagagaggtgccacaggaagatgagagttgaaattaaccttagggaaggcagagatagaaataaattgattcatattttagagatatgtttttagggtcaactattctgcttttctccaacttaaaaaagaaaaactcttattacaataggtttcctcttcctaacaagggcttcagtacttaaatagggttcaatgatggagttaatttcttggatttaggatcccactgctctccattccttctttcctatttattcataaaatctaattttggttccagactccatgtatgtcactttcattaaacaggaaataatattaaattttgcagccaccacaggagtagcagttttgggaattctcattcactctgagtttataagaaggctcagaaaaattgacaagtatgttcttcaaattgtcattagggtaaatttgttgagctttacacaattttgggtaggattttaaccttcagagttttttggcacacaaatgtattgacttggcaaccattgtgtgttccatacaggcaaaaccttgttggcatttggagtatctgggagaggaaaagaaagataatcttttcttctcttggcttcagatccaatatagacagaaaaaaaatcagacaaaatattatttcttggccgggcgcagtggctcacacctgt

SEQ ID NO: 59838 - DNA, 1447 bp, Homo sapiens
tcaattcttcaattctgtgttgatgtaaagaaatagtccttgacatactgcaacttatatttaatgaaagaggtaagtaaaatatgtcagtataatactgcatgacatatagaaggtacagtcacttactataagggtttaaggatgctaagaatacaaatgaactgagcttgccttgttggaggttatcaccattttcttggctttaactaccagccagcaaactggaaaataaaatctattgggcctagcaagccatgcttgtaattctacatttcaaggtttttgtttgcttccttgtttttgattttgttttgaggcagagtctcactctgtcacccaggctggagtgcagtggcacatcttagttcactgcaaccttaacctcccgggttcaggtgattctgatgcgtcagcctctcgagtagctgggactacaggcacacgccaccaggcctggctaatttttgtatttctcgtagagtcggggattcaccatgttggccaggctggtcttgaatgcgtgacctcagatgatctgcccgcctcggcctcccaaagtgctaggattacagccataagtcaccacacccggctttgtttttgtttttaaagatagtggctatgtagaatgttttgtgaagtttgcaaatcagggcccctttaagacagactgaggaccacaaatattggcaaaatggccagtcttccaaaggaacccccattagtacctaccggatgttgatgatgccactccaggcactcaaaatcatgccccagttgctttgacttatttctctattaaatgccacagctctgtctctgccactggagctctgctttgctactttgcttgctcacttttgctctgacttggctttttttctgttgacctttgttcatggcttctgggcgatgacacactccattcccctgtttctaacattgatttacacggagttttggcatccctgttcctctcttttcagggcttgagtctcaaattgcaatttgcaattcacttgtctcttactttaaaaaaacgtaaattcatttttagaaatttaaatgtattttatttaaatttgtttacattcctttcaggaatctatagctggtttacagattataaggaataatttgagagttttcaatagattggggagggtcatggtaagaatattgacaatgtcaaggatagaatagaaggctagggaaagtttgagagagaaaccacttgaaagtaaggttataatatttcacatttgcctgtctgtttttcccaatatagacactttttaaagagttcataactgttcagttagcaaatatctgacaaataactgatggcaaaaaattatttccataaatagaaaagaaacaaaacagtgaaagtttttttgttttttttttttggtgtttttttttttttttttttttttttgag

SEQ ID NO: 59839 - DNA, 675 bp, Homo sapiens
tcataagaaaaatgctttaaaatgttttattaccagattttaaccagggcaaacaggtgatatttctggattttgaattttttttttctaaccaaaggtaacctcccatgtcaaattaataagccttaaataaggttatgacttcaccactggtgcatgaggtatttttagaggtggcaaacagtttttacaagatttagaatctccctaaaggtagctcagagaaggaaaattaaagtcaggaagtcagaattagttcatggagaggaaaagaatcaataaatgacaaaggtcgtgcaaatatcaaaccagaaagcacccaccacttaagccacggattgaacccaaacctcggtaatgaaaggggaaagccctagccactgaatcacagcatagggcagttgtcactagattttccagaagcaatttagagcaggcagttttgagcttccaatagactttgactgcttaagagaatttttaaggctagccatgacattatcatgtgtcctttcagactgactgcctgacatgaaccccaaaattcccatgctctggattgtggagaccaagagacagtacttccacatggccaccaagtcaagttctcaagcacataaaacaagacgagaaggaaacttcatccagtttttctttcagggacctgcagcaaag

SEQ ID NO: 59840 - DNA, 3606 bp, Homo sapiens
ggtggggtggaggtagtggacatttcagtaaggtggccccctttggccaaaggtaattgccagatattggaattctacaagctgtgagctgtcaaggcacatagcgactgggagaaatgtccaattcagtcttgaagagattgctgacctgggcagtgccccattacataccttattttatgtctattttctttcaatatactggaaactcagtgtatcagtttagttctgaaactcatgtcttcacctgagaaaaatatttttaattgacttatctgaatgatatattactctgaattttctgttctctattttggaaactttctgaataaattctccacttttcttttgtatacccttctagcttttttgatattttggtctagtttctaggagaaagaaattttctggacttccttttgaccctcattttaatcattttttttccatcatccaaatggcattctagcattgctttaaaaaaataacaaaaataggcatatgctcttgttttgtaaatgaaccttctttcatatctctggtatactgataaaattgttaaaggtgtttttggattgtttgttttgttggcttcctgaatggtctatgtttatgccaaatttctgtttcatttattttggtctctttttcatgtgttaatctttactctaacattcggtgtttctctgctgccagcagacattcaaggaaattcattaaaaagaaactggagtgtattgcataatattgagaattacagagtggtgtgactcagcaaaatgactgggcagaaagttgctttcgttaaggaaattaccaaatgacaatagatataggtcttttttcatgggcaattctgattctctgagggaggtgagtgaggggaatgccaatttgtttattcccaaatatgtgtacatgcataaatgctcatgtaaactcaactgccagaattccagattgcagtggaatacagaatgagatggaggatttccatgaagcaacatgctttctctgctgcatacactgtatgtaggtggaaggctcttgtttaagttgctcatgatacatactcttttatctccagcataaggttggagaaggaacatgaggatccaagctgctcatcgtacagcattaactctattcccttccaaactttaaaatcatgatttatgcttctttcggcttcctagccatgaaacttatagggttctagattttgtggggtgatttgcttcccttccttattttcatccttcaaaaagtggtcagtatcactagtcaatcattgttttttcttcactgtgtctctatatgtccttgtacatattttttcctatcccttaatacaactttagtgggtttccagaaggtatgaaaatacacacatgggttcagatgtttaacatgaaactttattactattttacaaagctctactggtaatttttatgcacctctataccattattagtgttttctctaaatctcacatacacacatttttaatatgttgactgatgaagatcctgtgtagcagtgttagtttctcttgaaggtgaggaactaagtatcatcagattatcaggatttggaaagggtgatatctggagaattatttatgtgaaacttgaacaaaatttgaaagtgtgttacattgctattgatatgatttggatgtgtgttcctgcccaaatctcatgttgaattgtaatccccagtgttggaggaggggcctggtgaggggtgatttgatcatgggggtggactttgcccttgctgctctcatgatagtaaatgagttttcaggagatctggttgtttaaaaatgtgtaacatctccgccttctctctctgtcctgctgtggccatgtgaagatgtgactgcttccccttcaccttccaccatgattgtaagtttcctgaggtctctccacccatgcttcctgtaactgtggcacaaagagtcaattacacctcttttctttataaattacttagtttcaggtatttatttatagcagtatgagaatggattaatatagctatggtttaaatacttaaaactagaattttattttttaatacgttagtattacaattcattattcttcttgaggtgagaatcatatgggaaattataatagaaatactcttctgaatgactctataagtggaatttattcagtagagccaatttccatttaaagacttctatttgcttgctctattataaaggtacatttgctgacattgtgaattgaaatatatatacacacatatagatatatatatatataccatttgaaatgtcaatggtataatatttgaaatgttatcaaattgtaaaattttgttataaaattggatgctgatggtattaagcatgatcaacaaagttcaattattaaaaagtattttctccataaataaaaaatataattacttacaatgtttttcattcctgtgtgcttgtcattttattcagtctatataaacagtgacagaatcacataaaatatatttaatatatgtaataatatacttaatataatctgaaatattttagaagcaaaattattaaaatatttataaatgatgagatgactgaattatctgccattttatgtctttaaaatgatattgtcatttgtaccctgattaatgtgaccaggaaaaatgcatttcaattttttgtcatgtgtcttctgtcgcaacttaggtaaatttagccaaagagtcgcaatgactaacctgtatacgtaatccaaatagtacattttctggttttataaatacaaaaacacagcttaacacagttaaaaaaaatcaatgtgcatattttttgttctgtaaatatttagaaaaactaagtaaataataagatgaaaggaaaaggtttgtaagatataattgaaactccctggtgctacttggagcattttttaaaaacagttattaaataaatgaatcctggaagaggaataatcttaacctggatcagagtgcatgaatttgttcttgttgcctcattccaacattaatcaatgcctaaaggtttgctggtacagcttttaacaaactaatttctgacaaaaaaaaagatctagaaagtataaaaacatgtttaaaaatatgtatatctatttgagggtttagagatatgttaagatagtcagaacattagaggccaagattatgtagagaaaagacacaggagagagcatctcagttgggttttcactcaggacatttagtttttcttggtgtaaataaaagtagtgagctgttatcaagggtcaaagcagtcaataaagctttagtacatgtcatgaggttggggagacaaacaattagaaatgagggtaatcaaagaagacagaggggccaaaaatatggagagaaggaaagtatttagatatcgatattttctgagccacatacaaaacaccaaaaatcaaaatatggtaaaatttcttaacatcacaagctagaagataactcaaatgtactaaaattattggtgaaaatgatttttatgttagtaatctatgctaagtataaagagtagtagcctttatccacagtttccatttctgcggt

SEQ ID NO: 59841 - DNA, 3266 bp, Homo sapiens
gggtttttaagcccaggatggccagggtctgaggagctctctgagggcacaaggctgtcagtatgtgaggagtccccatcaagaactgatctgccctattattattcttggaattacagatacattaaaaattatgagaagggaaatatcgaaacaacaaaggcttcctaaagctaattagaatttgaaattaaggaagtgcaattaagcattaagggaattcccacccctcggactgcaacttcctagctctgctagcttttctgttaggagtgaagctagttttcagttgaagccaatttggtatttcaagactgaaacctttctgcaacacacagttttctaagtattatgctaggatgagaaaaaagtgtttgttttcagatagcttaaagaattgtaaggaagagaaatataaaaataagaaagcattgggatgatgggaatagagtagaattcaaaatgcaattgagagttcagagaggaaagcccaattcacctgggaagttacaaggttgtacaaagcaggttaaacatctgctaaatgttgaatcatgaggagaaagcttgcggatggatacaatgaaggaaaatggctacaataaaaggtatgttttcaaggtaaacaaaaaaataagtcagcatcaggtattttgagagacaataagaggccaattattataagatggtaaatactttcctaggagtttattactcaatggcaacttattgaaaagtattcaacagtggaataatgaaatcaggtttatattcaactatggcatgtaactaattttccctttgtaactaatatgtattgactgacaaataaatatattcaaagcattatgaaactctatattcaagcaaagaaaaaagcacaaaaaagaatatgacaaatgctgatataatgatcgtaaaccttttgggaacttttgtgatttaattcatatctaacatctgcataaatctgctacttaggttttattaaagcttttgacattgcaagaaatgcattatcattttcgaccagtgctaggtcatatttgcgaaagaatatatttattaaatccaaataggaaaggagaaatgtgtttatttgcttttcatttttgtctgattttgtttctctgcctctagagctctgccctatattccaaatattttaaaattgtttcttttctaatagctcatctttctttttacatgaaagagacatatattttctagtataaaatatactgtaaagtgcaaagaaaatatttaacattcctccactcttatttatccagcataatttaatcattagactccctgttccacattttgagtaacacaatgagcaggatactcaagattcttgccagagtcaaattacactctcatgcaggaaacataaaaaaaaaaaaagactctaaataaatatggggtatttaagtgctgtgagggaaatgctgtgactctgatacagaataaccaaaaggatggtcttccaggagggatgatgtttcatctgaaacttgcaggatgctaggggccagccatgccaggtggcagtggaaaaatgtttggcagagagtgaataataaatgcaaaggctttgaaatgtgaagaatgtggcatgtttgttctaggaactgccaaaggtcattgtgattacaaaagagtgaatgagtgtggatgatctaagcaatgaaatcactgaattgggttagatcctgcaattatttataggtcatggtaaaaatatattagtcagggttcttcagagaaacggaacaaaaaggatatctacagatatatataagaggaggcttattatagtaactggcacacacgattaagaggccgagagttccacaatcataatctgccttctgccagctggagaaccagaaaagccagtggtgtaattcactggaacccaaaggcctgagagaagaggcatgtttcagctcaggcagagggtggatttgcttctccttcactttttgtcctatttgggcctcagtggattggatagtgcactcacattggtggaaataatcctctttgctctttccacctattcaaacgctaatctcttccagaaataccctcacagacacacacagaaataatgtattaccatccatatggttatcccttggcccagtcaagctgacacctaaaggtaaccattatgaaaaggttttaatttctttctaagtgtaatgaaaaaccgttaatttaagctgaaaaatcgcataatttcatttttaaataagatttctctatctgctcagtggagagggtggagaagaaagcggagaagctagcccaatgtattcacctaaacaagaatgattgtgacttttctaaaatggttaaaactgaaaggtagcgattcccccagagctataatttggaggtgacatgaacaagatttaaagattgatagtgtgtatgaatttaagagtgaattcttggtctgaatatattgattttgtagagagaatcttctttttcctaaattatataagcaattttataaaatctatggagtctattatttttttcctggaaaggacaacaacaacatgaggaaaagatatcacatccactttagtgaaattattaccacatagcttatcaaatattttattatataaaatatgtcattgccttggcattttaataatactttcaaatctaatggtaatactttcaaataagattaaattcacaagtatacaatttttagactaataccagtattgggattcaatgatttttggccaaggtgagaaaagatttccttaaacctcatactgctaatcaggaaaaataaataaataaaataagttatttaagcatttatttaaataactagaaaaagtagtaatggtttattttaattattttaaataattaaattatttaagtaaattaaatgattaaattatttaactaaattaagtgattgaattatttaattttaataactttgttaaaaaattttcaggttattatcacattttaatcccttaagggaatttcagtccaccttaaatacgtctccatttaagatgtgttttgaagttacagttaatgtaaaatactaaaatgcctccagcattcttctgttatattgcttggaatcctttcaatggtcatgtcttgttttcattaatttgttaacagatgatggggggtatttggtatactcacatcaaatcctgtattaattagaccaggtgaggtggctaacaccataatcccagtac

SEQ ID NO: 59842 - DNA, 2564 bp, Homo sapiens
gagagcagggctcccaggaagccccgggaagcgtgcgcttccaggagggtgtgcggcgcgcgggggtctgcacgcgcgcagagcttgttaacggagggcgtgccggaggcgtggcgcgaggtgttcgggcgaggcgctccgcgaggctggcggcggtgggcgggccacgggggagcgcggcccggggaaggctgcgcggcgccgccagcggctcccggctcccgctctcccggccgccaagaacgagccgccgtgggcggggcctgcggtgattggcgggcgggcggggaggtcggaagtactttgttttttatgctaatgagggagtggggcttgtccgtatttacgttgaggcgggagccgccgcccttcattcacccacatggtccttcgaggtgccgccgccgccgcccgacctgcgccttcgcgccacttcgcgccctcgggcgaggccgagggggtggggacgactaccgcagcgccgccggggctcgcgctcctccgcgaagctctcctcgcggggcgggccggccggccgcacccccggcctggggcctccggtcgtagtaaagcgcaggcgggcggggaggcgggagcaggagcccgcggccggccagccgaagatggtggcggctactcctcctggtgagtctgcccgcccctccggcgacggagggaaacctgttgtgtgcggcccgggtctggcgggcggggcggagcggcccggggcggactggcccggggcagcgtggcggcggcggcgtggccggggcgggtctcggccgttggccgccccggcgtgtggcagccgcatctggctgccccctcgctcgcccgcgggccggcggaggggggcagggccggggcgggagggtgggagggggcggcgtgcgcgtggcggccgcgcccgggacccgcgcagaccctgcctgggccgacccgaaggcgggtgggcggacggcgaacacaatggcccctcggggagaggacgtgcgaggcccgtgccttctccggggcccggggcgcgcgcggggcgtggggtctctgggtaggaaagtttctcccgagggcgagagttaaagcgcctccagaacaaagcggcggcggcggcggcacatggggcaggccgcgggccgggagggggcgcgcccacgaggtacctgcgcgccagcgggcggcgtggcgtgggcgggagcccgcggttccccaaactttgtacgcgcgagggtgggcggaggggcgccgagatcggcgcggcctgggcgccacccccgctccgcgtgggctttgttagcccgcgtgggcagcctcggggcggggcccgcaacttccccgccgtggccctcggaggaggccgcagtcggcctcagccgcggcgtggagccgcctgcgcccggccgcttgctgggagtgtggcgcgggagggccagcccggctcggcgggagcggcgtccccgccgccatgttcctgcggggcgggctgcacgggggtgagggcgggggacatggcggcgactgcgcgccgccgccgattgttcccggcttaggcctcgggccgcgtgcgacgggcaccgcggccgcggagcccccgcccctctgggccgggctcgggggggctgggggacacaaaggaggggcggcgcgcccgcgtccccgccgcactcgggcctcggcgccgccggtcgccgcgcggctgccgccgggaaacgggttgggggggttgccgcgtccggcggggcctgactctgacccgccgccccctggcggctacgcggagaatcgcagggccgcgctcccccttgtgcgacatgtgctgccggcccgggctccatgagcgtggcgggcactttgcagtctcgggtgttcctgcccggtcttctgttcctaaactgcagcaaagggaaaaggaactgaaaaaggcaggctcgtcgttgcaatatcaccaaaagagaaaattaacggcatgccatcaggaccacagcagttggagaaacaactctttatcccggcttgcagccacgaggtcttgattgggggaggggtggtgaagaatagtctgtgggctgctttttttttttccttttactggagctgtacagtggagtcggtgattgctgctgatcataatcaagtattttaggagcttatttagacatgtatctgatagctaaggatttttcaactttattctcttacgtatttttcaactgtaaattattgggcttttaaatcctgctagtattgctcgactcttactctcacaaatggatggaattaattgctgttaggaggttggaaaatagcaaatatagatttggacggtggtagtaattttgagcaaataatgttttatcttttttttccttatttttccctattccagtcatacacgtggacctaactgcaccagtagcttttctgagaatacttgctgaaaaggaagttttctggaatgggtaagtgtattctgattttcttgaacttttcttaaaaacaaatttttcttgctattaaagttgaataaataggattggtttcttagagagtaaaagtaggtgtttctt

SEQ ID NO: 59843 - DNA, 1074 bp, Homo sapiens
tggaatatcaaagaccctaaacacattttattcattttaaagacatgtaatcctgctgatatttaaagtctaatattttaatcataggtctgtctccaaaaggatgtcatctaaaagcaattttcatattttgtatagggttattgctttgtattgatttggtttataaaaaagggacaacaatccatttagcagtcatgtaattcaattttaaattataggtttcttaaaacacatctgattctggataatgataggatctaggatatggaagtagtgatgagccttaaaatgaaaaaagactactaataaagtgttaaagtttgataattcaatgaggttacattgcagcaattaagcaggcatgttatataatgcctattgttgagaatgagttagccatgacctttgcccacttttaaaaaaatacaatgctaagcacagagcacatgctacaaagatgctaaagaaaattatgagattaatgattggtttttacacattaaccatgttgtaacagcctaagtgctactgacgctgttctgtcttagactcatcaaataattggaccaagtttgaggaaatcaatttctactaaatagttaaccataaggtatatttgtattagcaaacaaaatgctttcaaaatgttccacttttgaaactgtttgagtcttttatgttgactcaatgactttgtttacaaagggaaactgaagtggagttaagcaattatctggcaaatttgatcactgtacacaatcacagggaatacaacaaataatattttagaaaagttgtttgatgacatcacagcttcactccatagatctttagtagttttggggtttttattttttgaggaattgttggaattgcaataatgcatgtttgcttgcttccattttttcccctcccccccatatttgtatctctaaataatatgtacatggttaagaatttagtaattattaaccctatctattcttacaacactttaagaatttgtagacctatctaggtagtcagaatacattttgagtttcagttgaatgttttacattcatatggaaa

SEQ ID NO: 59844 - DNA, 1159 bp, Homo sapiens
tttacttataccctccatttccttttcccccctctctggttctcctgctgcagggtcattatacattgcttactcacaaaatgtccttgtttttttcccttactcctgtcattgatcttctgaatctttccagtgaacttaacatggatgttttgatagaaagctctgacattaactctggagttgttttgcaaggcaggttgtttgctttttcacaaatttttttcaggtccttgaagtgttttcatatagatgtttcacaagagccatttcagaattgagaacatttggcgtgtactcttcctcttttggtcccacgatttttctgagtcctacttgaggttatgttttctcccctgtttcaattgtaatatttcacttactcgttagtttttagtttgaactctcctgggaggtctaatgtagagtttggacaacgacacaaattcataataaacctacccagtcaattttggtatgagggcttagaaggtggaactggccacattttgaaccggaggtaaggatcaggaatggtaatggagagacatacaggattttcttatgggaaaaagaacaaataacctctgggcagtattagagccaagagagtgataagccttttctaacttcaatattctgtgtacaaattcacaagacttttataaattgccagactgcattgcataaaccaaatgccaacagagcagtgacctttcaaattactggcacaacaggagccgagatcagaaagttcaaactttaaaagcaaacactgacaagaaatccgacagaaatgacttcggtgtctggtcaacttaacataacatgacacattgtaaagcgcgttcggctttttaggtagaattgtctataaaggtttaactgctttagaaaatataaatgtgaagatttgtggtatttgggtttatgtacacggtatttctacatttgaaagagacagtagaaaagtttggtataagatttgtaaaatatgtttgtaatcatgctaatggaagaggtgagagttgggtggagtggcgtgtagatggaaacatagtttggggattggggaaagggaattatgctctaaatagtgagtcatgttatataaagtctgttttgtgtctcaattgaaatatgttgtagagataaattt

SEQ ID NO: 59845 - DNA, 2060 bp, Homo sapiens
catagtgcattaggattttgtctagactggtcaaaatagagagaaagcaatatagattttcaaatgtaccctgtgggagttaaacctaaatacagtactctctgtagtattatattccctgtgacctggagattcagagctaattctgagaacaatcagttgtaagtactcccatgttctaaaactaagaagcaaaggtgtctacctgggacttgcaaggattcaaacaaaaatagttttgccaacttaattccattccccactgataagtttggatatttgtccctgcccaaatttcatgttgaattataatccccattgctggaggtggggcctggtgggaggtgattgggtgatgggggcggatccctcatggcttggtgctatctttgggataatgagttctcctgagatctagttgtttgaaagtgtgtggcacctccctgctactcctctgtcttgctccagctcccaccatgaaatgtgcaagctcctgctttcccttctacaataagtaaaactccctgaggcctccccagaagtcaagcgcatgtcagtgccatgcgtcctgtaaagcctgcagaacgatgagccaattaaaccttttttctttacaaattatccagtctcaggtatttctttatagcaatacaagaaagacaacacacccatctccaggctaagagaagacttagggaggaagagaggtcagtaattgaggggactttagaaggtgtatttatgagtgtggaattactcacctctgatccaacaaagagaattcttcgtattaagaaaacaaggaaaagtgggaatggagctatctctaaaatagccaccaaaaagcccgtaaaagagaaccaaaatttaggatctatcacttaaaggaagcactaatgccagattccagcccaaccagtcaacagacactacttatctctctgttccagttacaattgctttgtaatgtattcccccaaacacagaggtttaaacaactatttcatcatgtttgcagattctgaaggtgagaaattcagaaaagaaacagtcctgatgacttatctctgtctcctgatatctgggaactcatcaggaaatactggaaggctgcagttgattcatcagctagggactggattcaactaaaggctcattcacccacatgtctagagctttggttgaagtgactcaatgcctaggatgactaacagggcttgcagacctgcacctggcctcttctgtggtttgactttctcacaacctgggaacctcatgggaggtagatatcatccatggcagctcagagttccaagcatgagtattccgggaacaggtagaagttgcatggccttttatgacccagtctcagagtcacacagcatgacttcttccagacttgactggttgaacttagaattcacttctttgtgggaaaatgttaaaatcacttgaaatacatcttgtataattgaatataaagttgtgaccacctttggaaaatatattctgccagatctcccttctttcctaagtctgaaggagtcaaaaaagctgtgaataggggaagaagagaaatattcatcatgcccttttttccttcccatttcagctttctcagcctggagaggtgatgggagtaggaaagaagatttaaagtcaatgaaatctgaagttcagacatcacacatattagattggatgtatagaaacttgaaaagagatagttcattaactgatggtgatcagacaaattttaagaatgcctgaaattttatccaaggcatgagtgtttgctgtggagtgaacaaatagaattattttctacctacaccctaccatgcccaattctctccacatgggtgtaggtggtctgtgtgcatttgcaatatgccgtaagtgtgcatgacaaataagtcactttatggggtttgccagaatattgccctggtagggaatcaattttagccacttaaattcaatcaggaagagctcagaaattagttctgagagaaaataaacaaaatataatcttaaacatgggttttttatttgctttt

SEQ ID NO: 59846 - DNA, 6870 bp, Homo sapiens
tttctttcttgttgcccagtctggagtgcaatggcacgatctcgcctcaccgcaacctctgcctcccaggttcaagtgattctcctgcctcaacctcccgaggagctgagattacaggcacgtgccagcacgcccagctaattttgtatcttcagtagagacggggtttctccatgttggtcaagctcgtctcaaactcccgacctcaggtgatctgcctgcctcggccttccaaagtgctgggattataggcatgagccaccgtgcctggcctcgtttgcttcctcttgtatggcatttatccatattcttttttcctactacacacaagatgaatactacagctaggattccagccattagctgacctttttgtctaaaccagatgcctgctcctccatatgacctctctcctgtctggtcaggcctcttccaggaacttccataacattccattctcattccaatcccttgtctaggctcctgctgtggctctcagtgttaactggaatgtttgactttgtctcttacaccactgcaaacagtgtgacattactcaacaaatggaccaggcagggttaaggtcaccagtaaagcaagttatctaattctttggtctgacttgagttcacaaacctaccctaaactatttgactctcctgatggaattaaactaatctatttagtcattcgtctcatgtaatatctttgccacaaatcctaagatcattttataagtatagggacggtgtgcaatagtctagtgctataaagttgtattgagtgctcattcaatacttaacaattagctgatcttcaaataatttaaaaccacatatactatgcttttacccattcttcctttacctccatttaaaataatgaattatctgctatactgagtcagggtaaattacaatgagtcccaggataaggtggtaggacaggaagtgtgtgtttttaccctcttcctctggagtgcataatgctttactatgatacaaagagaagtttgaaggaagtcacgttgtcaaatatgacagaagtaataacttgactgcaattcctgagcctatcaacctcaccgtttgtccacaaacataaccagaatatattttatcttgatttccgacttgagggaaaataagttcagtgatttaagatctgccagttagcataaatattgtgaaagcaaaaaactgtgctaaaattttaagagaaaaaaagttaagtgtgttgcgttttcagaaagatttagctatggagtttttttttttgttttgttttgttttttttttttttggttttgttttgtcttgacctatgagtttgaagaagacaaagtggctctgtaaataagtcgacttcatttttaaagcgtttggaaaggttaaatgaggttgaatcttgagagtctttttggtggttaggagagggggaatttattaaagagaggaagacaatgtacctaatatgttgtgatgataatgacaaactcaaagatttaaacttcatgagtcattctggtcattcatatcatcatcaggaaaacatcttcatgtgtagcttcataggtgagctccacaaaactgtgcattaccttgtagtagtttgtgaataatgtgctgacctatgacacatagccacgtaagtgaataaacactattattattattattttgtcttggttttcattaaactatcttagtagtttcaggagctctgggtttcaacacacacttctgccagctgactttagtgcgtccattagcataacaaagtcaattaggcaaacctgaattttcacttttatcccgttcacagaacatcagtgtaaatggagacaggaagaagaaattggattgattctccacttgagaattatgttaacttggaagaaaatgttaagtctactatgtgagggcatctagtgagagggaaggaatcacctcccttcccccattatgtccctttatgcacctctgacccttgtgctctccttttcttgttgcttctgtggtctggttgttagctttcccgatcctccacacattagaaacctaagcataatgatttctgatcgaaggctatgagatatttgaaataaaaaaaggggaaattgttgagtctagaaccaaacctttaaaaattaagaactaccagtctgtaatgtgtgcctttagaaaaaaacaaagtcaaacagaaattaggcaactagttagagccgtgattgtgctctgccacccatgaactcccgtctatgactatttccactctggctttgtgtttcagtaggtcagggacacatattaagagcaacaattggaactgcgttatcctttacctccataaaaatacagcttaataacatgttaatgacttaaaattaccttgtctttctagattgtttattgatgtcatttcagatcggtataaaggatgtgaagtgaataagaaaataggtacgtttctttttctttttttcccctttctaccgactaggaagagatccagtccaggttttgcctttgactcggcctgtgaatttcggctgtgcaatgtgtagcacgtttctttctcccccctcctttctccttccctcttgcctccagtgactgtctccaggatttctctcttcctatttcaggaggactctcacaggctcccacagcctgtgttaagctgaggtttcccctagatctcgtatatccccaacacatacctccacgcacacacatccccaagaacctcgagctcacaccaacagacacacgcgcgcatacacactcgctctcgcttgtccatctccctcccgggggagccggcgcgcgctcccacctttgccgcacactccggcgagccgagcccgcagcgctccaggattctgcggctcggaactcggattgcagctctgaacccccatggtggttttttaaacacttcttttccttctcttcctcgttttgattgcaccgtttccatctgggggctagaggagcaaggcagcagccttcccagccagcccttgttggcttgccatcgtccatctggcttataaaagtttgctgagcgcagtccagagggctgcgctgctcgtcccctcggctggcagaagggggtgacgctgggcagcggcgaggagcgcgccgctgcctctggcgggctttcggcttgaggggcaaggtgaagagcgcaccggccgtggggtttaccgagctggatttgtatgttgcaccatgccttcttggatcggggctgtgattcttcccctcttggggctgctgctctccctccccgccggggcggatgtgaaggctcggagctgcggagaggtccgccaggcgtacggtgccaagggattcagcctggcggacatcccctaccaggagatcgcaggtaagcgcgggcgcgctgcaggggcaggctgcagccctcggctgccgcacgtcccactggccgcccggcgtccccttccttccccctgttgctgagttggtgctcactttctgccaccgctatgggactccgcgtctccgtgttgggcggcggatgctcctgcggcttcttcggcgggggaaggtgtgcgtctccgccgcctcattgtgtgcacacgcgggagcaccctggctcccgcctcccgctgctctcgcgcccttctaccccttagttgatggctcaggcccggctggccagggagcccgggtcactccggggcggctgcaaggcgcagacggagagccgagccgggcgctcactccgcgttctggttcgggcaaacttggaagaactgcgaccgcagtttgcccagcgccacagtctgagtggcgccttctccactcccgcccttgcgccggcaggggcggtggagagacgcggagggctcccccagcccctctctcccctatccgtccttcgggcgacagagcgcccggcgctcgggccgggggcgggcaaggctgggagggaccctcgccggggacctggcctctggacgccggcgtttcaaggctggtttggggacttcacgggctgcctgtttcagatgtggggcgggctttcccgttagggttcctcagtgcttccccagttgctgttggccactcagggcccggggacaccctgccacccggtctggagccggcctcgtctgccagcgaacagccaactttagcgggtggctcagctggggattcgggtccgggttcgggggccccgtgtcccccgcatgcccggccactggcattgctccaccaagagcttgagagcgcccaccctttctctcggcgccagtgtgtgtagcacttggtctccgacaacttgcgcggcagtctgggtgcttgttttccggctcttagctccaaccgaatccgagcttctctggggctctgtgaatgaaacgtgtcggggagagataatcctttggctgctaaagaacagaactgagagaggccgagggaggccaggagatgctgcgagggcgcgggctgctcaaaccgggcagctgaagtccttagtgacctcagatcgtcaagtcaaaacgctgaatttccaccagcctctgtctgctttttgccaaataactggtggatggatgaaaagcattttgcagatatcttagaacatcacagtttcgatacgttgaggaattactattttcttatgattttcaagctgtagaagtgagggtttttacttacactgaaatgaacacatttaaataaatttgagcattggcaaagggggaaaaaaagaggcgcaaattaccacgctcattatatagaaggagctttttcagttcagagccagacattccctttgctgagtctaagttagaatctgtggtgaattataagcctacttttctatccttgttacttcttccttcttttccagaactccttaatttgttaatcaatgaatagagagcgactgtccccacagctccttaagtttcttaactctccttctcctttgtctactgttatttcattctttttaattaattgataaggatcagcttcgcttttttttttccctccccaaatctcagggaattcaactttttaaaaggtttatagtatggatcacttcttctaggaactttttctcctttaatctgggctttttcaaacggtatcttttaagcacacaagatatttcccaacatgatttcagataagatgtctcaaagaagaaaatagttaggtatttttaaattgcttcggtattctttagaggataatgggactctcaggagactagagttcatcctcagcatcaggcacatctctttaatatcaaagtgaagattttcagtgtaaaacaatttctgtagtcaccatgaatgtttgttgagaacattcccaggggttcatgtaaattcttcggtggatatttaactaaagaggtttttgtttttgtttttggtttcctccccacctttttacaattacagtgtttgcttattagctatgaatttctaaaatgtgtgcacttttttttttttaaactcacctactttccatgagtaagggcatactgttaactttgctttaagccttgtgtcctttgatgctggtagacataatcaagatgcaggtcaccacagggtcagaggcacatttaataggaaaataatgaattgaaagataattgtgttttttaaggatatacttgttttttcaaaatcaactttacttaatgctacctattgctgttttaataatcacttaggaaatataccctgttgttacaggaacacactctatctctcctccctagttcttgatactgtttacatttaattatctagtgtaagtggttatcttttcttaaactcttttttatcctttgccttgattgggcatctaatggtttgcttgaagaatttcatgtgtcttcaatctgccagggcacataaatttaaaagaattgctgttcagacttcagattcatgacagctgtttctaattgaaagctatttgcaggtagcttgcttagtgaaataacttgagaagtaataaggacattatgtttcatcatgacattatcaaagttttactcagaactcacaattgtgaaatagtgttgcccttttctattctaggatagaatggaaacccaacagatgaggaagtatcacaggtaatatataaagttatgctttcagagaatgcttgggaaggaggaggccttcaaggggcagtttgcaccatcagttttcactcagcactgattttaaaccatggcaaggagatcagatagactatttatccttgtttgaaaaacttccaaaggagtagactcttgatcccctttcagcaatccattctaatatttagcaattcttgtggtatagaaatgtttccagatatctagccaaaagccttcacaatatgcttgcttattttttcttgttctatcctctgggaagatactgagcagtgaatcatcaggttctttgttaggagagttactctcatcaaaggtcagtgtgaaacattctagtctttcctcattcatcagaattatgacctaagtttccaatcctcctcatgttggtggctctaaacttctaaaggaactctaccactgaaaatagcacctgcttaaaactctgggaaattcagagaatgttgtttcaggcttactctgccactgttttatgccttgagtcttgctaggatcattaattataacactttgtagttaacagtgacttattggcctacatgatcatgttttcattacttatgtaatgtgacattatttaacaatctcttatatagaatttactatgtgcccatcacctacttaaaaattattacctttataatatcaccttactgaattcttccaataacttagtag

SEQ ID NO: 59847 - DNA, 1353 bp, Homo sapiens
tcactttgactttggattttgtattctcaggaattggccatgctaccaccattaaatggttcatgcgtttatgcctttttctgaacgttttctggcaagatatagttacataaaacacagaaactaaagtacatgtcttggtttctttcagtatactaggcctattgaaatattgggttagtccaacaaagctcatgctggaaagttattcatggggctagagggagtaagaacatttatctccacagattagaaaaaaaaatgtaactagctctgttttcagtatttattttgcaactttttctgtcccaggtattttgagagttgggttacagctggatattaaaaaagcactaaagtcttcatctatttgatattaatttatcaagtatttatctaaaaatctacagtttaaaaagattatttgcttgtttcaaaatacataatgtttccttttcactgatctttgcccagtgggcgtttcctttctctggaaacctgtctttctgtctgctcccccggcaaaccaactaatttaatacatttacaatttacacaacttttttttttttttccagtttccatggagatatcacattaacttaaatggaaaacagtgtttggtaactcttactctttaaagccacagtaaatatcgtagtttgagataaattgtttaatttctgtttatctgcctggttcaaagatttcttatttctttgccccctgtttagttagctgatttctttaaaagtttttggaaggacagtgtaagtcacaaatgagtgaggtgaacttcaatttttgtttttgtaatgattctacaagtcactagatttctaaaagaatcacattaattccaggtatcaaagcaatctaaaagttgggctattagaagcgtcacttgttaaactcttgatttgggcattaattttagagcgattgtgagttatcttagctgatttaattagaggataatatgtcatcattgggaacaagagttcatttgagttgactgatatacttttttacataaaatatctctcaactgcattgtatcttaataatagcttgtgagtagaaatataggccactgtcaaaattgatttaaaatgtacagcattatgttctttaagtattatggcataaagattgtgccataaattatgtaagaaagtgactagtgttcttttaaaattatggatgaaatttacgaacacttataaaacacaaaattattgagtagttctaacctaaaatgacctaacttcaatcactagttttgtatagaaatctgagtttagggtaaacattataataaattaattgctttaaaaatgattttaatctttt

SEQ ID NO: 59848 - DNA, 1004 bp, Homo sapiens
atgggttctgaagcatgggcgcccttcagtaaggaagcaggagtgtggaaggggcacaaatttcctgtgtggtgagaataccctgcaaacatgaggagggttccagtccctggggagactggtcagtgagtggggagaggggtgtgggagactggagaagggggcccaaaggtcaggttaatgacttacatagacggaaagaatccaaaggtaacccctgcttcttgaccgtaagttgttccctttttcacagcagacctgaacctttagttaaaaagcccagtagtgctaaagtcaagtttctacacatccagttgtttcaaatatagcacaaagaagcagatttttaaccatttagagcatgtttgccttgtgcactctgtaaaactgtacctgtctgctagccatatgtaagacaaccctggggtgatcaaagactcctagctgctgcagcccttagcagctctctggccctgaggctgtctaccctgttgctgatgacattgcctgggtcataatgcccttctcccctgggagttccttgaccttctgcccttttgggtggtggcccgtttgttagccctgcaaggtctcatgctgtgagggactttccttcacgtgcaaccaaagtgtcttccaaattaagctcactgtgtgctactgccacctgggggtcatgtcgtcctcccccacccccatcagtcctgacatccctcaaactcactacagtgactttggcctttagcctgagtcccttaacaagctgttgaataagtgttttaatcaggattggatacagttttgaaatattacattggttgctctatagagaaaggattgaggggaaaaaacagatacaggaaaaggaggagaggctagctaggactagagtggtgaccatggaaataggaaggattcaagaaatacttagtaggtgaaatggatcaaagttacttacttagcatctactatgtgactgacaatgaataaggactgggttgtgt

SEQ ID NO: 59849 - DNA, 2507 bp, Homo sapiens
gaataacaatttcctagaacagaaaaacctgtagcatatttaaaaatgagttttaacctttctagccatgattttaaaaagcacagtcttgacaaaactgcttagtcccctaaaggatatattttcaaaagtatgatcttatgtttgaaaaaaaaaaagtctaaaaatgttctgtactttaaaaggcccacaaaaagtgttttttttttttttcttttttaagtgagcctctgtcacaattactataatcaggaaaaatggaatacaaataagcaagagcaggctttttcccagtacgacacttcctacagctatcttcattcagggtgacaatttctattttaacctaattaagtataagagaggaccagtgtcctaagccataagcctgaaggttcctggaagtactgagctgctcattacctcccgggcactgctgggagccgctgcctgaaacttctggaaggtgccacggatgcccagaaggaggctctgctgcacagcgccagcctgtaggtgcaccaccttcaaccgcatttcagcctggttactgtggaattgattttcacggctcatgacagaagctgttttcagcccatgaaaaggaagtggctggagctgatacgcctaacacaaacagcaaattgctccatggctttcatagcattcgaggcctgttaccttaaggttctaatggccttttaacagtgtttccagctgagcagcagatgtaaaggatactgaacattgaaagcactgttcttttttcccctccctgaaagaatcattgtttacagacattgtaccaacaccatatcctaggacctattcactggcatgttagatttgaaaaactgaaacaaatttcagataaatagaaagtattatcagtgccataaacctaccaccttactgagctgtctgtcctatattaccacccatcaggaactgagatcactgaggacgtattttcaccattaataggggcccccatttggtaatatcgcatcagggaaaataattaatggaaccctgtgaaacctctgaaactccttatactttaaattgattgattttaatcctaaaaattgctgtgtatttctgaaaataacacatttaacatttagaattgtatcctttctgcctttggcttccctttctgttgttctgagtgtttagtttcgtcctctgttggtaagggttgtgaaatgtttgccttataggcagctatgggcttcctgcatagggaacatgaaggcctttaaaaggtttggtctgttgaaagaggttggcatttcagtcttgtggacttttgggaaaaaaatgttaaacataactgaagagcccttgtcaaattggaggtttttccattttaaaaactagagaaatagtatgtcttttgatttcactttggtccaagcagcgcctcatatttccactttccagtggtaactagcagaggtaagagaaaaacagccatgcgggtgagtcatcattcctcactccaggaaatggctcattttacaagcttttggaaggacctttgggaagttgtgagctgccaccatttttgaattgaaaatatacatatgttgcaactctgatgtaaaaggcatatagttcctttttcctccacctcttggtttctccttctccttctcttcttgctcatataacctgtgtagttttccgcaggagctcccacttgatgggtaacaggagaaaacattttagtctgatctagttgaaaatgtagtctgatcagttttgcctttctagctgacagtcaatcaagtgggatacttgctgtggtgcagtggctttgactcctggctcctctacttagccttttctgaacctctctgtgccttgatttttccatctgtaaacaggggtaatagcaattcctatctctcatcactgggattgtgctacacgaatgaacacttctaaagctcttagaatagtatctgacaagtacgaaaggctgtacacatgcttgtcaattaacacagagtagaggaggaaataaatctcttagattgcggagtgataaaggagtgactctttctcacgaaagaaaactgagggtcctagggctctgcccatttccagggccctgctggcctgcatatctgggggtggtatactttgtgatctgctcttattcaagttgggaaggaccgggtaactagtccccttcctttggtattcaccctcacattggcctttctgggcatgaagacctcctgagtcactggtttgtcactcaactggcctctggcccacctccagccttgatcacttggcatggggggaccatgacaagcctctggtttgcaactccgctgctttctgagttcttcccaggagggctctagggattgctgagccagaccagtgctacccaggtgaggggtgtagctctccctctgagtactctgtgccccaaagttgaccctaaagttggtccaggtagcccaccaggcaatctcttcacagaatcc

SEQ ID NO: 59850 - DNA, 894 bp, Homo sapiens
atctcagtgtcaaactccataggaatttaagaataggaaactttgaaataaatatctttggctaacagacgctcctaggacttgttatcaccgcctcttaggtgaatgtctgttttaattgttcagattaaaaaactactcatgtcctcaatttataatattattgatcagtacctagaacattgttgtatttaaatcacattacaggacacactgccgaagcattatcctagatgggaaaatcaaaggcaagatttacaatttattttattatagacttggccaaactttggcttttgagtccttagtaccatttttcatagtgctactgggagaaattatgcaaactggtatcagattacccaacataccaggaatgtgcttagcaaacaggggcatcaaaaagcatttggaaaataataactctagcaatgtagtagtcatcatgataaaaattagaatttgattgtattttcttccttttttggtagttcagtattggtttaatactgaattataaaatgttatggtgggtgggaatacatgattatgtttttcatgcttagggtcagacacctttcctaaaactcttgatatgcaaattccttcactaataccagataatttttccaaaaggaaagtagtttcttattcctctagacccaaggacctagagatattaccatgtctttgctttcctttctgaagcctgtattgattattgaccatggtttgtttctcctacaaagccaattctatgagatatgggcagttagggagaagggagcttgaggggcacaggttttaagagggagagagaagtcaacaattgcagactggtcttttatggtaggaaacattgggatttttaaatcagttattccaaattcagta

SEQ ID NO: 59851 - DNA, 801 bp, Homo sapiens
ctatgaactattatggcaaaaatgagatgtttatttgccatgtatttattaattgctgaattagtattatagaaggactgtgtaatattggaaaacttaggaatcttccctcaaaagttgaccaaatacctctacagtttctgttgatagccttgaaatgccaggaggtagactcctgtcagttcaagtcgtcagtttagaactcagggctgcagattctgataccctatataggtcaaagaccagggtgaggttgttggatctgtgtgtttttaaacatcagagaaaatcattatgaattatcttgagtaaaatcatctgtaaaatttcctctcttggtaacctagattaaactttggaccttgagaaatcctagctaaaaatagctattgaagagtttgtttattgcacttaatacattggccccagagaaactcaggcactcagattccctaggtttcgtggcaaacctaactgcccacagataaaattttctttctttcccttctgattctgatcctaactacaaacaaaataatttatggcatttaggcaacagcttgtaaaagccagtgaacccgtcactattggcaacttttataaatcactaatgaattaaaatgttcataactatgtaaaagcttagtttttttcctttacaattcaattaaaaacagttggttactatgtaaacactatctccctacttctggctctgttgatcagctacaatgtaaaaagttgtgttgcttatttaaaaaggttttgatagctaatagggatttatgttatctcctaaag

SEQ ID NO: 59852 - DNA, 1041 bp, Homo sapiens
ctcatttgttttcgtcacgtatatcacgtgatgtataattattttctgaatatttactcattttttaacagtcttctcagctgttatgtaagctctctgaaacatagaaaattttgctaacctgttaaagagttacatttctagcacttaacactatccttgatatgtggtaatggtcagtaaatatttattgaatgagtcgaggaattgtgatcatctgtattgtttaggttacagaagagttaatttaaaaaaatagtatattttggctttccagtggttttagttgagtgtgattgtttaacaaaaatgtattgagcaactagctggctgccatgggggatttttaaagtgatggacagggtccttgtttctcaaagaatacgcattctagtatataatttggcatgtgtatggaagagtcaatgaaagattacgaaagacaaatggtggaggctcaaagctatgcttttattctcatgtgctggtggagtactactatggatctgataacagtaaatttgctgtctcatcagttacaatctgttcttcactattaattgagttataattctgggacactcactcagtccaaatctgacctgtgatattatcctcaaaataaatgcttgagaacaagtattatcctaaatttactgacaaagaaaggggagtctatgaggtaaaatacttttcttaatgatacatagttgtcaagatgcagtcaggggttcagccccatgttttctaaatccaagtcttaaatatttttctgtatacaacgttgcctttcttctttctaccccctttataagcaaaatgttaacaaaatgttttttctttctgcataataatttgacctttagttaactccctgcctctgatctgataaccttataaaagtggtacaccaaccaagttactaagcaaggttgctatgtcatgacccctgattggtaatttgcatatatactgggaagaattataaatgaattacacataccagatggtgctgccgtaatgttgtgattcctgagtatg

SEQ ID NO: 59853 - DNA, 581 bp, Homo sapiens
attattagtggtcctgggagtgtctggctccttttcagttgagctaagtgttgtgtctaattatatattagacatattatgaagaacctttggcaatttgagaaaggaatatgagtgggaaactcttaaaaggattgcactttctccttcttcaaaagttataactttggaataatttcattgttatatcaaatacttgtaggtgtcagaaggtagttctgctgagaataggaattcttgctgtttggagaaattgaaacagaaagggatggagttggattcttcatacagcaaagtagctgccatgatttcaccaagtaaatatttgaggcactgctggtcacatggtctctgccataactgctctgctgttgtaatgccaaagtagtcatagacaatccatgaatgaataagtgtggctgtgtcattatcaaactttacacctaaatttgaattgcattaaactctcacatggtcaaaagagtcttacgatatgttttccccaaccatggctcacagctcccagaaaaataggtgatggactgtgtatcagccaccatttgcagatacttttttaggaa

SEQ ID NO: 59854 - DNA, 1355 bp, Homo sapiens
tttcattattttattttaaaaacactatttaaatgctataacttagtactttctcttttactgacaaagtcacaaagaataattgttaagtacacactacatgtcaagaaatgaaagaaaatatacattttcggtttctagtagatctgatactaaaatttagaaatatacctaacaccagctaagtccatgcaaacatttaactctttgttggtaacattttccactggcattacacaggcctgagtgtcagtattatttcctttttcttttttcttttttctttttctttctttctttttttgtttttgagacaagttctccatatgttacccaggctggagtgcagtggcaccatcacagctcactgtagcctcaacctcctgggctcaagcaatcttcccacattggcatcctgagtagctgggaccacaggcacacaccaccacacccagctaattttttattatttgtaaagacatgatctcactctgttggtatgctggtctcaaactcctaaattcaagcgatctgcccacttcagcctcccaaatactgggattgcaggcatgagcaaccacgcccagcctctgagtcagtattatttcttgttagccatattgcatcactaaagcagaaaactttcagacatgcatgtatatattttagtatttcaattagttgttttaagtatttggtgctctatttaatacatttggtacatattatataccagtcacttttctaacagctttccatgtgttaactcttcataatatttaactacataggtattattgtccccactttgcaggtgaggaaactgagacatggagaagttaaataatttttctgaggtcacacatcaaggctccagggcctgtgctcataagcatctcactgctctatctctcaattggataaaactaattgtgaagtaagattaatattttatcccattaatttcatgactgactttcaaacctaagcatgcatacatgcatacaggcaaattaaaactcaggtgctgccaacagatggatagtcattctacaagggggacactaatatctctatatctagatacgagaaacagatacttttttaaatgtcttctcaaaagcaggtgaagtgagaagaagaatgcaatagacatttatctatgtactctgattagaacatacttaaaccaaagtgataacaaaaatcattacttgtatttctttgcaaaaaatctggaatagaaaaatggcaggagaatacagacaaaattcttgattttcaaatagggaaatgggagtacactctgtatagacaaacaaatttaatgccaatcccttccaagaacctcaaat

SEQ ID NO: 59855 - DNA, 1686 bp, Homo sapiens
ctattctaaattacatccagtcactgttcctgtaagcagtcatttcatattttcccattttttcctcacttctaggcactaattccctgatctcacataatgtcaaataacaggtttgtggatatggaagtgcaaccacattaactgaatttggtcctggaattgccaatctgctcacattgcattgttttagttcagtaggcagagcttcacatcagctaactttgaaatgactttgattttcagggctcaaaaataaacaaaaagaggcaacagggcagctgtctgaggtgcaacagttcacagtagagggagaggaagttagaaaagttccctgagaaggaagtgtcggcaagtgttatgactgaggtattgagggagaaagtctccaccaatgtatccaggtttatttctttctccaattcaacttcagatttgagtacagtctttcctctctctccctgtctctctgtctctgggatatctatgtatctatggagatacagatttgatttatatacatatcaatctataaaatatacatattgtcctgagtgttttgataataatctctgtagataatttatatagtttatgaatatatatataaacttttgttagtagaaaattcccacatcaataggtatatttatctacacatataggccttttttttttccttcttaagaatgccaagggttatgttttcttccttttctttttgagcatgaaagggtcaccctggatacctgccctttctcttcaaacaccatagaagttgaacactgaatcagctgtctctgcagtgctaatgttgacttcacttccttttgacctactggcatttcctaaatgtgtcatcattttctaatttcctgtgttcttgttcgcaggtttaatttttaatgtggggctctctatgatctatctgactcctgcatttcttttgaatcccagaccccacttcttttctcctgcctctgagccttaagttctaacctacagtttttccgttctctttttgcattttctttctcttttgtttctcctgtctagagtaaccactcctctgaatttaacaggcccccttccattaagctgcaagatacagcccaaggatctcctctggcagataagtctgtcttacctcccagagaggcaatgtcatccttttttgtgctaatgtggtctgttgtatatttgctgattataacacttctctggctacatcataatatgttttcaagcttgcctccctttccagacttaccatcctgaggacaatatactttattcagtagtgtccccatatgtatcccccacttgggttatgtgtggcacagagtagctgtgttttgaagcaaagtgactagagaagagaccagcacctcacactgattcctatgtcagcattgaaggatacattattttacctttatgggagacctcattaatggctgttactctcagtcgatatgacaagaatacctaaagtttacatcaggcattttgagctattctgtgggtttataaggaagattttatatacatgctacaaaatcaatatagcttcttgttttcctattgccataactcaccttacatcggatttcagatttagtaagtatggccttgatctttagtttcagtggtaggatctaagaagaaaatcctgatttgatgtga

SEQ ID NO: 59856 - DNA, 2059 bp, Homo sapiens
attaccaaaaaaattctctttttgggcatcttgttgaaacagtcccgtaaaatagtatttcatgtgactggcttcattctcatgaaactaaaccacatatatttaactatctccttaagcttagcttaaaaccaaatatatataattgttactggtggccaaagaaatcagttcattttgggtcactcattttagctgagtggacattcctaatggattaaaaaacaaaacacagtgctttaaaatgcacttaatttttttttttcccccgcggtggtggtgactctgggcttcttctgcagtgctttaagctaagctccccagaactagtgttgatattgtttctttaacattaatcttcagtgacataattatttctttttaaataatcagtatgctaagcattataggactgggaagctactgactgaaaagagatgtgccgtaatgaaggtactcctttttttagataatttcggctgcttatcagaacagaagcagctgtattttggacttacttagagttgctatttaatgcaccatgaaaaagcaacaagtgctccaccagaaaaatcatgttttgttgaaagaagtaaagcaaaatgagtttcagctctataccacggaaactcacaaaagtaggggaaagatcaacttgagagtatatttttcggtgttcgaagtcagttaaaaaagcaaatttgtactttgaacttagtgtctattgcctcagagtaaaaatatttttagaatccttatcagtcagaaaattctcttcttcaaacaaaatgaactggaatgtagagctaaaataaccccattttagtttgtggaatggctgttgagcctttatttttacaagcaaatggcaaacgcttgctccaatgtatagctgatgcaaattaagcacatactctgtttcataaatgaagggggaattattggaaacactcttgcactgatcagtaaaaaccgattaccatcaaagaagggcctgattactaaccaccatcttagtgtttagctgtaccgtctggccggctcagaggggaaaatttgctgagcttaaaaaatgtttattctgactttcaactcatgcatgtatagaacacagatgaggaaacatctgatgtcctttggattcttgttgttaaacaaacgttaactcatcttcaagcaaaaatttagtcgtttttcttttttccccctcactgatttggtttcttaagctattgagttacaagcactatggaaataagcactaaaaaaaaacctaagggtgattagagcccttaaaaatatctgaaggataatgctgacctcatgttttttcacatacactttgatctaggtggaattttattattgtaatttaactcatgtggcgtggaggccacattcaaggcacagacctgagtgcttactggagacagatgaactcaggacttgcctgtgcctggctgcagcacttttgctctaactcatgccttgtctatggatggcactgcttttcccaccgtttagtgttggttaattattgccaacctgtagagcaaatgactctgcttaacagtcattttccctgaaaacccttccttgattattcaagattaagtccttagtgtcacaagtttacccattccatagcacgtacagttgtcatcatgatttcttattcgattaccaatcttacctccccaagcctgtaaacataattcagtgactgcatttttattcaccactgtattccaggtcctaaaactaaccctgacacataccggccactcggtaaatatgggttgaatgaatgaatgaacaaatggacagagaaatgaatgagacaccttctctgtcctcatttcagtttaaatttaggaacaaggcatgagtaaaagtgtgaggagacaaagcagaggaaggcaagtgctgaaagttatgatcgcgtgcagtgatggccattaagatgatcttcgtacaggaattcatacaggaatttttttaaagataaatgctggcttatgcaggctctgaagacttattttttatatccattcttaat

SEQ ID NO: 59857 - DNA, 2501 bp, Homo sapiens
gccaaggcccctgggaggagatgccatctcagtggagaaacaaagggtgagaaaaggacatccatgcaaagccagagcattccaagagaaaaaggagcaaacacagatgcccagagatcttaaagtgctgcatatataatagaacagtgataacaacacgttctgtacttattgctaatgtttattctgcttactgcatgctaggcactgtgtgctaagtagttaatcctcattatctcattttgtttttctttttattgcttcaagagacagagtcttgctatgttgcccaggctgaacttgaactcctaggctcaagtgatcctcctgcctcagcctcccgagtagctgggaccataggcgcacactgcctcctggcattctcattcattttccaaactatgtaaaagactttacagatgaggaaactgaggccaaaagaagttcaattacaggcttagagtcatctaggttttaggtttcgtatctgagatttgagcccaggctcaaagcctagagtctaaagcattcccctcaagctaaacctggagttttctagaagaaaattgtcattgccaccttcaggcctggtgagcttctgaaaactaagtgaagctacaaaagagatgaggctgagagtgatcgtggagaaataataagcacgtatatttggtcaagcaaatattactttgcagtctgttagctacagttaaatatttaacacctttgaaagctcagggttgatgacattttcaaattgtcaatttctgtttacattcgggcagtctgcagcattactgtgttcaaaaacagttggactagtcttactttgccttaattgaaaggttcattcttaacacccaaagcagaagttggcgaatgtcgtctaaacaaaccaatttcaacagagttttaaagttacttagagatatagtgctgtcagaaaataattctctgaaaagtcacaaaattctgcagcatgactcattatttgcagaccgtttttgtaagaaaatgattggctttttaaaaatgtagtgctgtagccagcaacaataaaccccctttggaaaacacatgattcggtttcatttacttttaaagccttttttttccgtctttttttctttgtttctttctttttttggggggtgggggggtggtgtacatttttactaagcactagcctggagagaaacacccaagtatcctgttcactgaaaactacataaaaatagtacaatctaggtaatctctcaatgttgtactttacaaatatagggagtagaatttcattatgttaatagtgttattataatatagcagtagtaatgatagcttacatgtattcaacccttactatgtgctggcgcagttctaaacactttaacaacagctctgaaatagacactaagaacatcctcatcttacagatgaaactgctgagactgaaagtacttaaataacttccgccaaacagatggggacaaattgccaagtggcagagctgggatttgaacccacactctctttttccacctcactaaattatctccagaagagtgtccatagcatcttcttttgaaacccagtatcatactgggataatgaactgatatgatccggatccatcaatacgtttctcttaactatcttttcaaggtatgttcagaaaaaaaaagaaagaaagaaggaaagaaagaaagaatatattttcttttaaagccagcacaaatgtatgcttctgcccttggcttcactagaagaagtttggaaacctccatatactaggcaattactaaatcaattattatgcttgggtctgtatcaactttgtaaatgacataaaacatttcatcaggacataccttgtccctgttaaaccatcagatccatcccattccctgctgactggtttgcaggcttacagaaacatcagatggctgtggcaatgagtaggatttggaccatccttccaccaaataatgacaaactatacggaacagttgtgctaatgttatgattaagcacccttgcccatcgaccaacccctgtcagatttccttatccatagagatatctctaataataaaggatggaacttaaatccacatctggttgagttcaaatccagcaaattccaaaaaggacatacttcccattcctcaatcttctgacctcagtcctgttatgtaattgagtgtggcttcctggttgctaaccatgctgtcataattgcctagccataggtaaaaggatctcacacagcggttgaaacaggcgatcaagcaagttttaatttaatttcccaagccccgtctcctgttttcttacgttctccacttttctgtgttcttatctcttctattccttcacttccttgtttttcctaactcttgtgcttactagcaacattaactaaacccagctaagcctttccatttgcccagataactctcctaaacagagcaaatcacatctacccttttgctcaggcattc

SEQ ID NO: 59858 - DNA, 990 bp, Homo sapiens
taaagtacaaaaaaattagccaggcatgatggtgagcacctgtaatcccagctactcgggagactgaggcagaagaatcacttgaaccggggagacggaggttgcagtgagctgagattgcgccattgcactccagcctcaaattttggtgtgtattttgtgcttatagcacatttggggttggactagccacatttcacatactgaagaagagcttgtggctatagctaaggaattagtatggagataatgttttaatacattattctcatatttaagataagaaaatttaaaatatctccctaggaagcctaaactcttgtggatgattattcatacactttctgtttatttcacgattattcatacacaaggaaaatggagaaatattctgtcttttcataatgcatttttgtctgtaattggaactctaacataagtaacatagacactttattgagggatttgttcttgccattgcctcaaaggccctacaaggagtgctacttctgtcccttaagtgtaatggccatgaggaaggttgcaagtcatcatggatgaactactctgtgattttcattcggctctggggaagtggaggagacgcattaatacaggaggtggcacgtgtctgtggatgttagtatcagcagtaaacgaaataaataaatgcccaattatgatcatgagaaggggccgtctgagatgtttagctctttaaaaatagccataatactcataaagctggcccgtcactgggttaaatgactcaaaaccacatgactcatttgtgttcacgtagatttgagggtgtttcacaatctttgggtaaagaaggttcttttcaggtaacagccatgaagcattggttctatttgatttgtcattaaacattttagaatataactttttaaaaaatatgaaattacaattttagtgaattattacttgggtgcatacggtgttacactaagtaagttaaccaaattg

SEQ ID NO: 59859 - DNA, 1312 bp, Homo sapiens
ccttgtgtgtgtcttttctgccttcatctaccccagtgaatttgttcagcattttggctcactcatttcttcagctaactacagcttactactacagccaccactactagagccactcctgtctcatcctggatggttgacagagatgaaaacatcttgctaaagcaaatatacagctcccctttcactggctctccagtcctcctgctgtctttgcttgacctcctgcaactgctataataccccaccctttttcttctctcactctctccactgtggccctgatagcttctttcaaacttgcaaacacagttgtcagactcttgtgacaattctgcaagcaaggtacatagtacataatacataatacttaatgattatcttttatcttggtggattactgattgaaaagattgggcttgagaaccctggcttcctacttccaaatatgattctttttctttcctgttgcttacaaaatggtgatatttatcatgtcaaagttaaaactactcagactgtgttaccacagaaattcacattaaatacaaaccatgactacttgtttccctgggccaaaagtcaggaaggattttctccaaaacaaaattgtggaatatttgaggattagtatgtgcaggcacagcctgctctttccactttcgccccaatcctaaatggagatgacaccatcaattaatcaaacaacacatatttattcagcacataccctgcactaaatggaattaaagccaaaagagccacatttttcaaatgatgtgaagggcaaaaatatctctgtgttcaaccgggcatgtttgttttaaacagatggctaggcacccacttctatttatctgcatttcattgactttctttccaaatgcatactctgcagccacagcctcctttggaaattttccttattttaaaatggttacagaaaatccttacaccactttgttcttttcagaatgactcgtctagaatctagataaaaacagccgcgaacaggagataacttgaaaactattgtacaaattactgtcttttctttcaaggaatatctattgatatggtattcccaaattagcccaggatctaaacccatttgcaggcagcctgtgaaggacaaaatgtctgggccctcaagcattaagtattgtaaatgggatgagaacagtgtgtcctcagtgttattgccctagtacataactatttagctagcttattatatgatctgtaatagtaaatagtcataaactatttactatttaaatattaatagaaataaactacttttatgctgccc

SEQ ID NO: 59860 - DNA, 1736 bp, Homo sapiens
tttataattgaataattggctattttttcttgtagatttgttcccaatcctctagattttccaagatcactatgagtattattaagtaaacaaaatcatgaaccatggagaaaagtgcttttagaaaagggttttcatggtcttgatgagctttattttttttttctgcaatggccacacatattttagctactgaacaaaatctgcaaataaactcttttactcatttgtgattactgaataaaatagaagtgtacaatgatataggctctgatgggaaaattttgtaaacaccaggtggagaggacacagaggtgatgcaaacatcttccacattttcaaatgtcagctgttctcaagagaggaagcttaaataaacatcatttatagtcttagcagatgttatcgatacgtaacactttaattgtagttttccaatatcagtgctgttaataacagttcagaaaagatctgaagtgctttgattttaatcagtggtcatttaaaaaatagctgtgctaaatggcgtatgtttgtctttaaatcatctccgttagacagatggtatctttggaattgttgtgacatttcattgttgctggtgactgatgactcattgtaggaaaatccttgtgtacacaatacgtgaaaataagattgtttggtgttctttcctacagctaattttcaaacagaatttcaacagatgtgacaattttaccaagatgttgtcaaaataagagcaacccactgacaaatgaaatctggctcatgttcagccctttggtaccattctggtttgttccaagtatcaggagactttgtatcaatgtcagccctgataacttgatcatttcagatggcacactgtcaattttttcatcctttctaatgactcactttgcaatcgagatgcaacacttcctggtttttcttttcctccacctccccccactcatgtattaccaaagaaacaatgcttgtaactgatctttagttgtttggaaataaaatgagatcatctactagaaagacttttagaggtcatggagaaagatgatccatgatgaaggaactcacagggtcctaaggaatttcaggtttagctgtgaatgttagattgataaccttgcatagtgaaaaaggtaactcctatgacaattcagtcattgcttccttgactaacgtggtggtactaaccctgggaaaatgaggtccacacataatgatatcatgcattagtttaagtgtaaaaaaaggccgtaaaaggagcccattattatcaatggcaactggatgagcaatactgttaaaatactgggttttattacagtgagctgacacaacagaatattcagaatcacttaaagtagcccagcacaaaaccctttaatgatgtatcatcccctaggagggctaatcaaaaacagataaaagaggggagacaataatatttgtgcacagtaaatcctattttaaaagaataatgggatcaaggtgtaactttgtttttaagaagtgggtagtgcgtatagtaaaatgtaactgtgttttctctgaatagcgtattttattcctgaccagtcttccagaagtatccagagggcaaaagtgtgactgaaagcaatacagtgaaaattctgttgtttctcctatttctgaagtgactggcgttgttatcatactgcattattcacctactagaaagagaaaatagcccaaagttttccatttcc

SEQ ID NO: 59861 - DNA, 586 bp, Homo sapiens
tttggtattgccatgttttttaatgaagatgattaaaataactttggtaaataactccaaagtaatttagtaagtttctactcaaaatgtatttgagattcaaatatatgcctagagggctaccaattcacaaaaatatattgttatttcatttgctaaagtacagttcttcaaattcttaacaatctaccgccttccttgtaatgtgctagggtgacctaatttgttggcagcctccgctaggatgtggtagtgaggttgatctctggaattcgcacacacactcattaaccagatgcagatggtcaaataacagctatcagattgactcactttgaactccttaaaacttatgttacacactttgggtccaagttccctttccacagcatcatcttaatacctaaaggacagtgacagcctggaaaattgcatattcttttcttttagaatttgcttccaagctttcttatctttgctttgctgcatatttttaaggtgttatttttttgttaagcatcagtgctatcttaagtatgactggcacatcttttatgtggctctgtagcatcacggatgatacttt

SEQ ID NO: 59862 - DNA, 863 bp, Homo sapiens
aaagcctgagctgtgttggagcttacattctggagaaaaaaaagggacaacaatgaagtaaaaagtaaaagatgcagtatgtcagttggtgataagtgctctgaagaaaaataaagcagagaagggagcctaggagagccaaaggaggggtaggggatgtttgctcctttaaatggcgtggtcagggaaagcttcactgacaaggtgacctttgagcagacaactgaaggcggtgaaggagcaatagggcaggggttgtgggggaatagcattacaggcaggagaaacagcaggtgcaaagcctggagacaggactgtatttggctttgtccagacccaggtaagaatcgtttctccaaattacacaacttggctgagggcagtgggcaggagaagcaccatacacagaaaacactgtgaccagtgccccctggagttgtgcaatgagtctgcccttgcaaggacaccagtgtggcttgagtagagggaagcgagccagatctcagagtgccttgtagacctgtgtaaggactttgttttactcagcagtatgctagtaaatgtttaacaatcagctcttgggggaatgaaggggaagagatttgactttgatttgtagcatttgtcaattgctatagtggaaacagtcacaccagggctgagactaagcaggacgttgctgaatgtggagctgggaagggaagtgcagcggtaccaacgctcatatagtatttcttacatatagataaaatagatgtaaatagctgcaagagcatagatgatatagtaaagcgtaataggaagggatgagttttgagaatgagttacctatgttttaaatataatgtatataattatatgtt

SEQ ID NO: 59863 - DNA, 1828 bp, Homo sapiens
tcaaggtgtctagaaagccaaattaggaattagaaggtgcttaataaggaaaggcttaagcaaagggagttagattgccttgtagacaatgttatacagtccacagtcatgattatttctgctcccctacagggaatagtaatctattttatatcatgatgtattctttccaacacttattaatcagcacttaattctcaaatattagaatttatcttctcttagattttaaaatcagtgtgtttatttagaaggaaacactttagacttttgatgaaaatttaggaaagatttattttaccagtaacactcatcatcttttgggtgggtcattaactaacttagatgatggtctgtaaagtaggaaaatttttataatgactccacagacagctaagtaaataatgatcacttgcaagctgatttggttgtagttgtgtactttttaatagagagcacaatagatcactgtatctgtcaggataagctagttgtattgtgataatagacaacttcaaaatctcagtggcttgaaacaatgcagtttcttttctttctagcattacatgcctaatatgagtcaggtggggacgctacacttgtgtcctcactttggatcctaggtgacatagcagttgctgtgtggaattttaccagtcattctgactgcaggaaagacagagctctggctggtcttaacgggcaattaaatgctctggcttggaagtgacagagtgttacaactcgctggccaggacaatttacttggccctatctaaccacaagagagccagaaattgcaatgctgccatgtgaccagaaatgaagagaactggaaagatctggcaaacagcattgtgagcctcctaatcatttgtgtgcatttgccatcaccccttatgttagcatatctttattcagaaggtcggagaatcacaaatgtgtcaaacaatgtcagttactaccatgatcatttattttagatcccattcttcctccataactacttttttccacacccacgttactcaaatacaaaaaccagtatctctaagcatttttctgaaattcaccttaacttctttgaacctcaatttgtttcagtaacaacaacaaaaaaggctcagactacagtgtctctgataaattttaaaattttatgattacattgtgaagttattaaattgtggcatttatagtattcagttatgtaggtatttataatgtgtgtttagcacattttaaaaacatgctgtagttactcagtatttagaacaaacaatataaattgaaataatgagaaatctcagggttatcctaaaccaccacttgaatggaaacagtaatggacaaaccataagctgtgctggacaactactgcctgctctcagatcccttcctctcctttcctctactcgcctctctataagcagggaattacatttcccagggtcccttgttctttagcttctgggtcagttaagccaatcaaagggacttatggaagacctgtcccaagcaggagagaagctggaatattttttcctcctcactccatttcctttccaagtctccagcagtaacagcagcagtagcagcagtaacaactgtgtctaccctgtggttctgcctcccactcttctgtgacccaatcccccaccagagactttggcttgtgtttttgggtaatagctcctcctgttatcccataagccctagcagagcgagtggcttcctttggtaatgtctgggtcatcgttctaacttctgtttggtttctcaactcttctgtcccctgtgtaactatttccctgtattaaatactttc

SEQ ID NO: 59864 - DNA, 465 bp, Homo sapiens
ttcacatttacatggcaaaaggtttatatcttcaagatctaaaacaaaaagacatggaagttaacaagagcagtgtgaagcctgaagcctggagtgctgacctctcattcagtgctccttcctcccctccactggggctaaaaactttgccaacatgtaccatgtgactgcaactgaatctgcaatggcatgcattggtattttcacagagagcaaggctatcagccttggaatcaaaagaccttggccgaagtcccagctttgctcattttaaacttgagtctcacagatcttttgcccttcccacctcaatttcacaacccaaaaaaaagggcaccagaagcaatggtatttaagaaataaaagggaaattttaaactctgccttttaagacgttctgtaaagacctttggttttctcctgaggttttaacacattatgcctatactgatcatcaaacccaaa

SEQ ID NO: 59865 - DNA, 852 bp, Homo sapiens
aatggcccagggagtgttctcacaacagtgggcagtggagactggcaggagcatagaggtataaaggaaaccaggaaataactacggctggaaaaccaagtcaaagccccattgcagaatctttggtgccttgctaagtattcccaacaatagagggcattgaaggacttggaggaggagactggtttgactcctgctgtgacttgggaagttccccctaacagcagtgtgcacactacactggaggaatgaaaactggaaggcaggaagacagtaggcagtaggtatcacgtcagccatgtgagacataagtgagctttgactggtacagtgatagttgaaagaggtgtgaaagaagttgcagaattgggccatgattgaatgtgcacacagcaggaaagggggagtcaaggataactgagagctcaacatggggaggctgggaagatggaaattaccatggactaagagaaagaacacagagtacccataatatgtaattctaacacccattccccactaacctgccaatattgagttcactgccaaatcttaaaggcagacagccatttggctaatggtcagtaagcccaatttcctgccagatattagggcttgcttaagagtttgcctcatagtgtttgagaaatgatacgcaacctctccatggaacatgcattttgtaatagcaaaattatcaagagccttttcagtgctacaattgagatactagctgtgaatcaatgttcaaaaaaatcttaataaattgtttcagatgttactaggaaggatatttctggagtgtcaattagacacaattatagtttgagttgaataattaccctttcttgt

SEQ ID NO: 59866 - DNA, 629 bp, Homo sapiens
ttttcacagtttaaaaagctgtttagattaatcatttcatctaaccatcacaaaacccctctgaaaagaggagaatgttattatccaaattttatggaggaaaaaacaaaagctaatgatccagcttgtgagtaatggaattagaatttgactcctcataccaaccccatcatggaaaccaggctttgaccacaatacaggtcccctggagtgaatgaacagactaaaacaaacaggagtagtgaaagtgacctgcagaacacttaaaacagaacagcgtttgacaagcttgatggcccaatgatttgaatctcttctctaaacaatgttagagcacagataggaggtaagttgcaatttgcacctcaaggatgctgaggctgcatcccaagttagtagaaaagagtgcagtgataaattcgagatgtctgccatgcggacaggaaatgtctagtggcaacacatatttgctcttcctatattaaagaatctgtcattttataaaacatacttgggttttatgatgagaagcaacatagatcaataagtcgacaagcctttgttaagcattaataaatgccaagcactatattaagcactgtggatgaacaccatggagattaagagaa

SEQ ID NO: 59867 - DNA, 2830 bp, Homo sapiens
tgtggaatttttccaactacattattatagtattgctgttaataaagaatgtactttaatatgatacatatctttgtaagaaatgttaaaatcaagagtagaaataatatagggagaccgggcatggtggttcacacctataatccctgcactttgggaggcccaggtgggcagatcaccggaggtcaggagttcgagaccagcctagccaatatggcgaaaccccgtctctactaaaactacaaaaattagctaagcatggtggtgcatgcctgttaatcccagctactcaggaggctgaggcaggagaatctcttgaacctaggaagcaaaggttgcagtgagccaagattgcaccactccactctagcctgggcgagagagcaagactccatctcaaaacaaaaaagaaaagaaagaaaaaaaaaagggataatatagggcatgtaagagtccactcacatgagaggacacaggaccaagggtcaaaaaaatgacagaaacaaaatagtgtgtctggtacggctggtacagagaaaagaggacgcaaggaattaaggaagaggagagaacagccaaacttttcaggaaagagggaaaggaagccaggagcctaatgtggaagacggagttaaggaagaactaaagccagctttaaatatcatggagaggtaaagtggttggaatttagacaaattccatgggaaacaccaacaggatttgctggtggaacagatgtattctgaaaagagattttatttcatcaagggaatggaattttcttttaaatttagaaatctgtagtttcattttccatataagccacatccatgaaattataatacacatgaactagagtctaaaatctatattctagctaagaactgggtgattgaatttatcttttttttttttttttcaaagaaaccctgggacactcttgataaacagtctcatcacatttgaagttctggatttccagactgaggctgagaaattacataaccagaaatatggttaacttctgagaggcaagctccaggtgaggccagaagctaactcctaattagggccagatatcctgagagttgtaaagtttagaaattaaaataactttttcctctaggatatgattggcaacttctcctttggaaatcatttattttattaaagcagttactattagaagtcattcccagagcctctttcagaaaagcaacaatatttataactgccaactcgtatttattgagtgcttactgccagggacaatactaagtgttttacatggtttctattgtgtaatatttataatagtgcttgtgatgagatagagctccctatttcgcaaagacagaaaagttattttccaagatagagaagttaggtgacttaccaaggtctcacggtgcaaagggtagaagagcatctgattccaaagcccatctcgctaatcgatgcataaccctaaccctaaccctaatgatgtcagtgcccactgagtcaatctcacacaagggcaaggttcagtaaatatttgctgaatagattaagtattaggagaaagttcaacagccttcagcaaaacctgcaatgagaaggtaaggaaaaggtagcaaagccaggacgacccaagctccctcctgcctgattccctttacaactatgcctagtacttccatatgataaattctaattaaatatttctcttatccagccctgtcattcattgcttccaacctctcctagagttttgatagtacacaatataaaattcttctttctctcttatgtatctcttatgtatcttttttctctcttatgtatctcttatgtatctctcttatgtatatgaaggccaaaggtgaacacaacacagtttcagatgggatatctctttccccaaactctcacatcatatctaggagaaggaatagctaatcttttcctgcctaataattgagatcatgaataagtgggacttagagactaaagaaaagatttattctcaccaagtatgttcatgcttcagtcttgtctcagatctgtttttatagggactgtcagatccattttctctcctatttggcccacaaggaagctattagggatgaggcgcattgagattatttccaaaaaatatattggctatgcctagttgtataaccaagttagaatattttggtaataacatgacgctcatttcaaactgcatttgtatactttttgtacaatattatatgtatgtatacatttttaaagaccaggggcaagagcatattaaaactttcccaatttccttttgaggaaagaatctcccagtaacagtgacaaccatggttacccttggttgaacacctgctgtatcctttcaacaaatactctaccaagtaccaggcacaaggaatacaatacagaatgctttgatttggctctgtgtccccacccaaatgtcatctctgaattgtaatccccataatccccacatgtcaagggagggaactggtaggaggtgattggattacgggggcagttttccccatgctgttctcgtaatagtgagtgagttttcacaagatccaatggttacataagtgtttgacagttcctccttcacacactctctctcacccaccaccatataagacacgcctgcttctcctgccatgattttaagtttcctgaggcctccccagccatggggaactgtgagtcaattaaacctcttttctttgtaaattacccagtcttgggcagttcttgatagcaatatgaaaatggactaatacagaggacaagacagagtccttgctctggtgacatcttggtc

SEQ ID NO: 59868 - DNA, 3157 bp, Homo sapiens
ctaattagcattttaagctctctttactacctgatcgggtgtgagctaagttgcaagcctcgtgtttaaaggtggatccggtcaccttcccagctaggcttcaggattcttaatcggcctaggaaatccagctagtcctgtctctcacttccacactaaagggtttcttttatggcacttctgtttttctaagggtatgataggatctctgtttaggggctttcaagatgtgaggttgttgtgacagattgttatgtaggtctccacctgattatgtggccaggtgttgtttccaaagtaattagaagtcagtgttttcctcagttttggtcacagacccagtgatttctgcatggaagctatcttcaacatccaaacctgacctaaataacagaaagctactaggctatattgactaacctatgttctgtaataattaactccctccaaaaaaaaaaaaaaaaaaaattccagcaaacgtgaggtttttccattatgatgaaatatctccctagaacactaatattctttcagggcattcgtgtttctttgatttaacttaacccagtgagccacatttttcccaaagggtgaattaaaaagtccattaactctttcagtacatggcttcatgaaatctcagcaaggccgttagtattgtttcgccttaggctttacattttttaaaagtcagctgtcactttcaaagcaatccagaatagcacactcaacagatccctggagctttggaaatgttaatgccctccatcagcagcgaccttgccagagggaagtgatttaggcactacggagaaaagggcccactatctttatcacatcggtttacaccatcagcttcagaaattgtgtgagagaagaataatcaatagtgtgttaagaccaatctcgaggaatgccaagacaaagtaccgccgctctgcaaaatgctgagttgaaggagaacttttgaatacaacaaaagaaaaattagctgtagtggtaaaacaaaatgaattgtgtctcaagacggaatttgtcattgtgaatggcactcaggagctctctgcgtacttcagtggaatcacatcatatgcgtgatgaaaaatggttgttttagagttagacaacacagaatgaaataacaaaactggaacgaatgcgttgcaagtatactacatgcaagttaaggatcagcccatgtaaataaccccaaaaagtttactgaaggaaaaatatctagaaaaatcatctgctatggagaaatggaagaaatagaataaagttaaacttcatcaaagtttcctgaaaatgttactgcatttcctgtagttctagtaaaggtattatctctcgataaccagcacagagtgtaaagcttctaaaaacagcaaaggaagtgtctccacaccaccctgagtgaaatcactgtggaaaagaactggcagctcagtctctaagatcattacaatacaatgtttgatttcccatagcaatcttaattgtgacatgaacagctgtcaacaacaaaattagaggaagctgttattatatggatttcatccacatttgcttgtcctatttctataccactgctcaagagagtgtttttaaagaattcttccagtagagattttcattactcaaaggggagttactgaaattatttggctttatgtgctatacaatgaaataatttgtcatgataacaggaatcccaaacggatgtttatagaatgccaaattcaagtatgtaaaagtgagatacaattcatttaatcctgaaatcatcctgtggagtaactattgcaatccctatttttagtacagttgattctctttattgtagttatgttctataaagtcactgcaaacattgacttagcaaatactgaaccgttgcagcaatgagaaatacaaggttaggctcctgcaagccactgggcacaacagtttcatcaaccaatcaatatgtagccttgtgttatgtgtgtttctgtgaaaagacaccttatttaatatatattgttgattcattaacattgaactcatagcactataactcaggcttgaagtttgtctaacatacatatttttgctataagacacattacacatcttgtggttaggaaagcttgacagtacttcagcccgatgcttggggaccattttaaacattgaaatcaacaagaaaaagcacaaaaatgtgaaaaacattgtactacatagaccacaaagagaacacttgtttacagtctgagagctgaaataaggagagtgtcttctccaacctcagctgggaacatgactcagattttttggcactgtgtctctatgtccatgagagtgctgtgagtattaattctggggttacaaataaattttaatgagtaagcaaatttgcaaatatgtatctaccaataataagattgactgtgtatgctgaaactatgagtcagggattatagttggtcactgtgtatctgtctgggtaattctttctgttatattagtggttatacttgtttacatttcaaaattagagtttattggaggtaaaagtttcataagaaatgtggacaccattgcattgcacatttctgcttcatgaatttaggagaaaactcattgtatagctgtttttacttttcaatggttcttccaggtctttcagggatgtggtcagcccaaacctgctccagccctcagatctgcccgctcagctcctgaaaattttaatacacgtttcaggccctacaatcctgaggaaagaccaacaactgctgcaggcacaagcttggaccggctggtgagtattcacagattgataaccatggcggatgctttgttttaccaaggtcattctttgaaactcccaggagattctggaaaagtttgttataagagtcatctcatgcttatatctgcctctgttcttaattagaatattgaaaagtaatgggatctttcttttgggtcatgtattggattatttaagaaatctattaatccattaagaaactattaatgcatgtatgcagtgaccacattttcaacttcttatttctcatgaaatattaatttgaaaactaagttgccagttcttccagagatataattgcaatagcacatttcttactcatctgcttcagttcttttc

SEQ ID NO: 59869 - DNA, 1474 bp, Homo sapiens
aaatgtgtactctgcaaattctcttacataatttgatgtgaaactataattttttaaaagacggttccaattcactggaaatgtcaagtataaaaataaatcagcacaaaatagctcgatttttaagatctgagcatcaaaaggtatttcaaattagcctctgtaaaaggcaattagttgtacagctcagaaaattagagcacaacatgttctacagctcacagacgcacttggacagggagtgtcagttactttattccagctgattcattagagtaaaaatggactgtgcatggtgtatcttagaggaatatattttataaaagtaaatttaaaaaaaaagccaggtttggaaattaactcaacaagttggtgatgacttagagccataaatctccagtaagtattcaacactgtactgtggatgtggatttctcaaatatcctactggtcattctgagggaatttggggtggggatgggtggaatgccaaccaacaaagctcaactttgtgcctgttctgtgctattatgtatagaataatctctttttctttttcctttaaatttgttttcctcttgcttcccagaggactgtgtggcggactatgcagcatagtgtaagcattggtcttattcttcctctcattcccatttgtctttgtacagtcattccggagagtccctgagaaattcctcctccactatccctttccaaattatctggagtggattgaatactgcacatagccaacttgtttagtcatttcctctctgcttgtgatttatggttaacaaccattttcatattcttttccaatggccaagttttcaatctaatcttggtggaagaccagctcatcgaatggctgatttaaattctgtcccaatgttcagacgatgcgtagtccgcctggaaaactagctcttccctgttagaatatattggcctttttcttcttgtgctaataagaacaaaccaacatcagccctcatgcataaggtgctaatgtttccattagctgagacatagaaaattcaagggattaaaaaataggttgtttgcttttcgttttctacttgaatttcctgatatctttcagagcattcagagcatttggagagggaacattggatattttttacttgaaagattacccccaatatggggctgaggacaagaacactcaggctatcttacttgactatatcaaccaaaataatcagttatctaatctggtttccacaataccattgcatgctaataacacttttttttttttttgagatggaatcttacttcttccacctcccaggttcaagtgattcacctgccttggcctcccgagtagctgggattacaggtgcacaccaccacacccagataatttttgtattcttagtagagacggagtttcaccatgttttccaggctggtcttgaacttctggcatcaagtgatccatccgtctggg

SEQ ID NO: 59870 - DNA, 1847 bp, Homo sapiens
gtgacccctctgaacattgaccaatgggtccccatcaactctggagctcctgaggaagaaccccggggggggctgaaatggagttggtgagatacttcccactgacactggagttctcagctttatttcccttttgaaagagctggttagtatcttttagagtaagatttgtatttctttcttgcccaaaatggagccagagagggacaaaataaagaaactaaaatgtcctcaagaatatccaaaaagaacagaagtgcaggaaaatgatgcttaaaatttaagctcctgaaaacatttggcaaaacgctgggttctccctgcatgttcaacgttaggaattttcacatgagttcacagtgttcccagggcccaccgcaccctgggcccctcacatcttccacctcgaaggatgtcgttcccagcagcagatctgtgcctcgcagtaccgtctgcagctgccatttgcttagtctgggagatgtccaattcctccctcagaagagaatcacgctttcattttccctttgaggtagcatgtcccaaattacacagccaaggtcttcatcccaggggggaggtttattctccacaggatctgcagacagtgagaaaatgcatctgatcttgaaaactgtggttgaacaattgtgtaaatgtaattgaaattcatgtttttccagatgaaaatggacctccattcacaacatgggattgaatgggtttaggagattcagaaaatcttgggttgtctgataatttcccaatattgctttacttctcctcctcctcttcctcctcctccttcctcctactcctcctcctcctcttctcttaccttggtcctatttgggacaaaaaaaaaatccctgggtcagaaattttaccctttcccataaacatgactttttgaacctcccaagaggcagaaacgaagccaaatgtgattactcagcctctaaagtttcatcatgtagtgattcatcaaaggagctgaaggtactgcgcattgctgaacttgaatatgccttctgagaggctcctaccatgttgctttcatgaagaaatagtgatccttgaaagggaatttcacactggaacagagcaactgtgctgcctgctttctctgtgttccctcgatcaggactgataactccctgcataagtttaatcccacctttcctcttcttctctctctcacattagcaattcttatggaaacgatgcaacccttgcctatgttatgcctgcctagtaataatttttaggatcattttcaaagatcctggggccagcaaaatttttaccgtttaaagtctgtttggccactggccaagtgaccttgggcgagtcagttaatttctctgagcctctaactcaggaactctcagtcttgactgtacatgaaaattacctgggaaacattaaatactgatgcctgggcctcgtatttagagatgttgatctgtttggcttgggactgacccagcatctgtatttggaaagcttcctaaagcatgtccttggggtgcagccaaggttgctagccacttccccaagtccttgtttatcaaaatgtgattcctaaactggcagcatcagtatcacctgttaaaaaaatgaagaatcacaggtcctaccccaggcctgcagcatcagaacctgcatttcaacaagatcccaggtgattcgtaggtacatcatgctaagagaagcacagctcaaatccttgtctgttaaaggtggatgataatagtcaatatgcaatgagctctgtgctccatgtttttccctgtgtaatctcaaaaaggtacagaggagaaactgcatattcacctatatatctc

SEQ ID NO: 59871 - DNA, 1235 bp, Homo sapiens
cagaggcagagatggcagtgatgcagccgtcggtcaaaggatgcccaggagccaccagatgttaggagagagcagtgcacagatcctccctctgaacctccagaaagaaccaacctggtcaataccttcagactccgggcatccagaagtgtgagagaatacatttctgttgttttaagtcaccccgttgtgggactttcctggcagccccgggaaactacacgtgcgcaaagctaagaactggaatcccacggggaaattctttctccatccgtcactccctggtgcactttcttctctggccctcagtgttgggaactttatcaggaggttgcctcctgcacctcggggtcccttgtgcttctccctcctgtctctctcgtaagcccatcctcagtcctagactgtctcgccagctccccgttcaatacttcaaagagcagctgtccagggttgcagctgattttgcctgacactctcccaaaagagatttgagggatttcctgattcactggatggccaatgtcaccctgaagtatgaggtttttcacaaattaaactggaaaacatatctgaaaatctcatgccctgccagaactgattaaaagtgagaaaggcagagaataaagtaacacagaagtgatccttgtcatttttgccagattacatttcccccatgtagcaacgaggtgtctatcactccgggatcatccacttcgagggcaggctgagtgaaggtcattttggtttttattgattctatggctctggcattactcataaggatttacggtatttaacccaccaggagaagccctgaactataaatgactctccttttgccaggagagcctgctgcatcataagtgacaccggctacatggattccttcacagccatctctaatgaagcccgcagcctttgcctccgcacaaaagcacacggcctctcatttcatggggctgatccctcctttggctctgaatcagcacgaggttgtttagcttactaagtagggtaatccagatacagggacagaaaaagaactgagtgcataagactcatgctgttcctttcacgtcagcatcctccaggaccaaaactgggaataagaaaatgaaagtcgaagagcatgaaatagggaaaatagaaaattaaggctaggattattaaggcttatgaagtggtctcgcatgtgttacaaggggctcaggacacaacagaggcacaggaaa

SEQ ID NO: 59872 - DNA, 2100 bp, Homo sapiens
ttattattttaactaaaaacttttcctcctcagaaaagaattaaggatgttttaaacacagggctaatgtttattgacggtgttctcacaaccaataatttgtgaacccaggactaaaatgggctcagaggcaaaaagaaaaaaatcaacaatattgatcttatctttatggaaaattttgatattttatttatcacataagcaaatgcctcccatgcctcctaggccctgccctgtgtgaacctttagaaatgtaaagaatgttttgttaaggggagaatgtgaacattcaggtttgaattaacaatgaattaggaaggaaaagccccttggaaccaaggaaggagtcttccacatgagcttgaaatgaaacaacaatctccacgaagcagtcttagtctcacaggagggatgattttcaattcacagacttttctttccccagaatctggaaatttgagtttgccgcactcataaatgcttttttgcacatatgtgcatgcaaaagcatcctgaagcttcatgactgataattttactcttcgtgactggtcattgccccgaaatgagtcaaggacatgtctgcagagaatatcagagcaacagaccgaatcccttcccaggagtatctccagcccccgctaacaccgagcatttattgtttgcacactatttttagtatttggacactgacactatctgcaactatttaaccctttctttgtcgatatgctttgtcactaataggcaactctgtctctataaggataaaaattacacttgaaaagattctactagtggaagcccatggtacttattcaatatattctggattaatccatgaattaactgtaaattcctctgctttggcttttctctttgttgaattaaagttgttcctgttttatcctaagctctcagaacattccaagaaatttccttttttggaaaaatatgggctcctagcagtcaagtgggactgggatatgaaaataaaatattcttaaattaccactactattattacatttataaaacaagtctattaactggtctatatttatagaatctcaaacgtttgaagcagataataaaattcaccctgtttctcaatttaaaatctgctagcaaaaagcacttagtcgaattatttcaaatttgtcagactataatgtctcagaagacacctgcaggtcaatatttttctgtctttcttaacctgacaccaagttttatatatatatcttgccctgtaatagtatctaatacagggctgtgctccctactttaagaaaactgagatccaaaaatctgattttgggggggaaaagaaaaagtcatacttactttgcaaaagaatttaaatagcaagctccctctgagtacttaaaatatgattcaatttaccaaatcgttactagtgcatggcagagaatgtcctgttcatctacttttatttagggctcctcagatctaagaacatgaacatgaaagaacatgcccattgcagagttacgatccttctctaaaaggggcatagtgccatctacatgcttaatgaaaaacacgtgggtctaagtttgctagaggctcaggcagacccagctctgggaatcaagaggtacagtgtaggaaagctgttcagctctcttgagaacatccacctgtcagggctggctcctggacatatgcgacaggttgttgttattgttggtatcattattatttttgctaaagagcactgtagcttcctaggattgctacaacaaagtaccacaaacggagtggcttaatacaagagaaatgtattgtctcagttctgaagcctagacgtctgaaattaaggtagcagcagaagcatgcgccccctgaaggatctaggggagagtctatttcaggccttctctaagcttctagtgaaacttctagaactagaagcttctctaagcttctagtggatttcccaacaaccctggaaaatccttggcttgcagctgtagcacttgagcctctgccttcctcatcacatggcatttccctgcatgtctgtgtctgtggtcttgtcttataaggacaccagtcatattgggttaagatccc

SEQ ID NO: 59873 - DNA, 2095 bp, Homo sapiens
ctcaaaacagcagaaccagaaaacaagcaagacctaagcatacatctcacaatggtccttcatctgctgtccagcaacccgccacctcactaaactgactattctattttcctacgacacaaatagatagatatttcttatttttaaaatttagatctacatccctgcaacttctccccttgggtcctggctcagttcccaccagccatacaagataacatcaggtgcctgggcctccattttctttctaggacacccagtttggccttggggtgggctcccacaggtagctgggaagctgatgcccctgagtacccacgtccacccacacgtgaaaacaaaaaaaaatctcagaaagtaatttcgagcacgggtcaaagttctatttcacacttgcaggggcaagacagcaaaaggaaaaagctggttcacagcaactgtcttaggaaagcaaggcctcttttagaaacagaaaggaacgtctagacccgtggcttgtttaaacacccgctgctaggccccactgccagagctgcctatccagggccgagaatgtgcatttctaagtagttctcaggcggtgctgatgctgcggatctggggactgtactttgagaaccaccggtgcagaccctggccaacgttctttagtctgatgcgtcggggagctgtaaagctgccatccttcaccggtgggcaagtaacctggtggcgccaccccagggccagacccagggccggcctcggtgcgcctctagccagaaataaccagcactgggttccgctcaccggcaacgccaggtgggggccatctgaccactcaacagttttgctttttcttcaaattcggatacttagaaggaatgcgatgaaattgggatgaaggtgttttgctggccccgtggacagaccagacctcctcccatcggagcctcgggtctcacaccagccccccaggcggcgcgcggccccgtctcgccaccgcggcccgggtcgttcgcgtcttccggcgccgagggtgcctctgggtcccagcaccaggctccgtggcgcgcacgcgcggcagcttcttctagccccgccaggagacggcccagaagggctatgcggcgcggcctcgctcctgggggtggttaggaacgactgtttcatttcctccttcacccttcaaatctcagtttttgcttgggcttgaaggaatgggccagggtatcgtggacggagagtcttacaaaatttgagtttttgaggtcagaatttaaaagtagctgccgaaacccgggatcgaaccagggacctttagatcttcagtctaacgctctcccaactgagctatttcggcacgttctgggttgtctcctgagtaaactatcactgagcgctttgcgtccaactggcttgcttgtcttttcctggtgatcatgtacagcatttcttccttgtcctgttaaacggtgtcgtcggaattcttccacctccctccttctacgctgccactgggcgctgcacacgcgccttactttcttagattgctctcggcgcgcgcagcccgcacggtccaggagctgggtccaggcccccgatggcggctcctcgggatgctggttccgtcctcccagggccggtccccgcgagatccgaagcagcggggtcgcctcggggagctcctgcccaggcctggtagccccttcccttcgatctgcccctgcctgtgactatccacattcgtcaccttgctccccgaaaagttccaggccccaggtgaggagccgtgtaggcccaatacgattggatgaaggagtgtacggggcaggaatcgtcagactggcctctggagaggagtttgcagcctctccgtgctccgggcccgggaaatgtccaccttaatcatcacctctttgcatggagcctgactggcaaataaatgctgggtgagctcactaacgatgattattcagtcaatgctatttcccacacgagtcaacaaatgtttccgaagcacccactacgtgccaggctcattctttacttcccaaacgtcttactttttccattttttaatttttgtcgccaattaaattgtaatctgtcaagg

SEQ ID NO: 59874 - DNA, 534 bp, Homo sapiens
acttggtaggctgaagcacgagaactgcttgaacctgggaggcagaggttgcagtaagccgagatcacaacactgcactctggcctaggtgacagaacaagactctgtctcaaaaaaaaaaaaaaaaaaatccagataaaaactgagttaaaaatagctaaaaatggagttggaaattaaataggaagagggcaaaggttttgatgaactttacactttgataagctaattacacatctgtaatttgtagagtaaccactccaagagtacaaacagaacatataatttccaaactagtagagggagaaaaagagaataagaaaaattcctcagtcaaatccttaaaaaaagcaagcaagcagttttttaaaataaacaattttttacaaaggaataattcttttttttaaaaaaagtaagcagcaaccaaggaaacagaacaggtgggaaaagaaagcgtacagtaagatggtagaaataaatccaaatacagcaacaaactaaacactgagggcaaatgccgaggagggtcag

SEQ ID NO: 59875 - DNA, 1850 bp, Homo sapiens
agcctgatgctctcccccaaatgacttgtcggattagaaggggtgatttaatgtgcaaatggccataaacaggaatcctcacattcccacttcttccactagccactgagttccttgaggggaggataggagagtttcctgtttattactcttgcattcatccattccacaattactaaagacttatatagaatgggccaggcattcttccaggtgctgaatgaacagtagtctctgtccttaccgagtttgcattttagagtggggatacaagcaataaacaagcagacacaaatccgcaatataatttcaggtagaggttaagtgtgctagttgggagaggggctattttagatatggtggtcaggtaagaactctctgaggtgctatctgaataaaaaccagaattgagtggtgcaaacagcctaaggaaaggggaagcaagtgcaaaggcctcaagacagaagtgtgtatcttggtgtgttccaagaactaagaggggaagcatggcaggtacagaaaagcagatcaggttgcaaaagtagggcttgggcacttgagttttctagatatggtagagtttgggctttattcttaagtgtggcaggaaccactgaagtaaaatcctgcttctaccatgatctgattgacttaagaaacactgacttgtatgtgagcaacaggctttaaaggaacatgagtggacgcagttatggccaaccaagaggctacagcagcagtcgaggcaaaagatgacagtaaacatgggctagggtggaaacgggaaactggtgagaagtggtcgccgtaaggatatactttggaagtagagaggacttgctgctcgaatgtgggtctgaggaagaaaagggtgtcaacagtggatttgtaaaagtttgctgattacatagatgtcctattatagtccttaaatcgttttgggggtgcctatatgtacagggcccatcgtggggtgtgggtgctctaggctggaggtgggaagcagtcggtgagcagcttagggtaacttgcacgcactcaaggagtgacatggtgagcacctccggccacagaagggcggagagtaacgcagctttggaagaggcgttttaaagaagtcagtttcaaaggaaccacttctttgcaggccagagagagaaaagctggtccaggtcgtgcattaggaccctccccatatcagaataaggacccctcaaagctggacccaaattacctagggcaagcagagctgcgggaaaaggtaggggtttctggggagccactgcttggctagcggcgccattacctacatgaaaccagcaccgccggtcaccaggacccgcttcgcaaagccgccgggaagaccccacggttcctcccaacacgccgccgacatctcccagctcagcagtgcctagtaccgtaaagagtatggtctgaaaagcgcagggaagttccgccgcgaccttttgcgacgcgcctcgctcgcgggacacgttaacagagcagccagaggcagcttccggagactgctctgtggccagtttctgcccgcccactagcgggctgggcggggccgcgctcaccacgcgcaggcgctgctcctttccgcccttgcctggtccgccaggtgcaattggggtcgcccggatggtaggggtatggaacgtttttcccggaaatgccaccactatggatcagatttatgaatgagtaccttttttcattcttgtactacagccatctctagaggttacctatcagttgagctgagaacggggagttgttgcagatggagatgggaggttgcaatttaaaaatgatttttttttttagtggggcggggacag

SEQ ID NO: 59876 - DNA, 653 bp, Homo sapiens
ctctgctaaaaatccaaaattagccaggtgtggtggtgtgcacctgtaattccagctggaagctgaggcaggagaatcacttgaacctgggaggcggaggttgcagtgagccgagattgtgccactgcactccagcctgagtgacagagtgatactctgtctcaaaaaaagaaaatgcaactacacagcgcagaagggcctggacacataatcatcttgggtccaaatactccctagaagtttcccattggccacttggagctcacctcatataaatgaagtggtggcccccaataggtctgattcttggggaaagcaatgaatcagaggctgaagtggagttacaaaggtcacactcctgtgcaaacatctgattggttgcaaaaagcaatgttacagagttacaaagttgcacttctatgcaaacgaagactcagctggcaatcagtctgactgggtagggacagccaatttcttatctgcctcacagaaaaggtggggatttgcaaagggcatagcctctggtccttttgttacttagggtggaaagttagggttttcctttaatagttctagaaagtcggtgtaaaaacgccttaggttccctcaccccaggccctattctcctgcctcactttcattaagacaggtat

SEQ ID NO: 59877 - DNA, 1174 bp, Homo sapiens
aaatctgcataagaacacagttttttctttgcgggagtttaactctctcggccagaaacagtcctgtcctgcatttcttaagttttttccgaatcccacaagcccttcgaaggccccgcggactcgtgccagcgcgcccgcgcatgctcagtagcaagacgtgctaggcaatgaggagggagatgagttttccgtaacctgaagcaacatcctcctgattcctcattaaagaaaaaggcgggaactagtcaaaagccggggactgatgggacgctaggatctgcgcgtcccgcccatttcggcctctgactggtgaatgtcttcggcttatggcagaggagcccgcctcattggctctcaggctccagagcagcaggtctccggcgcccaccccgcctcccccagctgccgacgtggggcgggcagccgccggcggctgggagccgaggcgtcggtgcagacctggagacgggcatgggggggctgcggctgctggctgtggccctcacgtgctgctggtggccgcagggcagccagggtaagaccctgcggggcagcttcagcagcaccgcggcccaggacgcccagggccagcgcatcggccacttcgagttccatggtaggtctgggggcggggagggggatgaaggcgcgctggcccatcccgccggctgagtccgccggccgctcctcccggcccctccctgccacgttgggcgaggccggcgacttccccagcctcacctggacctccagcgttgcagcagctgccgcgaatggtgggatgcgttccttgccaaccccgctggtgcggctttccagccccaggcagcggcctctcgccactagtgatcgtgttccgcacctgaaagctggtttccatttccccaaccctccccttggaagccaatgtgcaaaagactggtcggccgcatctttccagatccttcccgcaaagaagcatatttgctccttcctgtctcggccacactgtgacgggagaatttaaccctagaaacttaaatttccttttttttttttttttttttaaagaccaatttcctgagacctacttgcaacagagtggttttggaaaccaagtaaaacacttgataatgtagttgttatattgagcagtttggttacttggctactagggcagtagatttactat

SEQ ID NO: 59878 - DNA, 623 bp, Homo sapiens
ggggttcaagcaattctcgtgcctcagcctcccaagtagctgggactatgggactacaggcacaggccaccatgcctagctagtttttttgtatttttagtaaagacagggtgttaccatgttgcccaggctggtctcctgagctcaggccatctgcccaccttggcctcctcccaaagtgctaggattgcaggcacgagccaccgcgcccaacctaaaatgaactctgacacatgccacagataagaagaaattggaggaatcaatgtgaccaggtcaatgtcctttggcttcttgttttttttttcccatctaattttcatccttatgtaaatttttcccatatcaagccacaatctccttgatccaaatcttgcatgaaagtctttggctctccccattggtggcccaaaaggatcttgaaccctgggcaaatggcaatgacctgctcttggccacctggatcaggtcaagttgggcttagactttggatgaggtacaagcagtggggcctgctcatacctccaacacatccaaagttgctgtgggtcttctggtcagcccatatctggctacatctgtcatgttcaattttgtactattctaagttttcattaaggtac

SEQ ID NO: 59879 - DNA, 1214 bp, Homo sapiens
gctctggagtgttttttgtttttttgcgggggacgaagtctcactctgttgcccaggctgaagcacactagcacgatctcggctcaccgcaacctccacttcccagatccaagcaattctcccgctcagcctctcaagtagctgggaatacagacgtgcaccgccacacccagcaaatttttgtatttttagtagagacggggtttcaccatgttggctgggctggtctcaaactcctgacctcaggtgacctgcccacctcagcctccaaagtgctgggattacaggcatgagccaccacacccagccctctctgagtgtcttatgatcacactggtagcaggttaatagatacatgtaagtgagcacagcatgtagagtgacacaacccgacatgagcacacacgcaggtggcagaaataagaaagcacggaccatgcccaaggcaggcggcaatgaggaaggcacaacagcaggggggcatcaccagctggtgcgggttaccagggtgaggcggggtcagccctcatgggaacagggcctgagaatttggaaagagggaagagaatgtattgatgaagaatgtggactttgatcaggtggaaggaatgacatccatcaggactgagaggcaggaaagggtgacgggatgacaaatatttgcctagttgatgggaagagcatgacctaaggtgtgctgataggagaggacttgggtgtggaatgggagtggaaaaggatcaggtgttgagggcctctgctaaaaattccttgtacttatggctcttcaaagccatatttgtaaagaggaagcatttaggaggggcacaagtgcagtttggagagatggacgttttacacatttgactttggctggagaaagtagtccacagaagatagccaagagattgactcggcttctgcctgtgtgtgcacagacagagcccacactaactcatcccggtgccttcctcactgagagcaggcaactggacaagattttttcctgagggtcatcttggttcattcactcatgattggagatgtcatcccactgctgccaggcatggtggctcaagcctgcaatcccagcacttggagaaaccaaggggagaggactgtttgagcccaggagtttgatgatgcagtgagctatgatcacgctaatgcactccagactgggcaagggagcaagaaatgccccctttcttaaa

SEQ ID NO: 59880 - DNA, 740 bp, Homo sapiens
aaaaagaaaatataaaattaaacatttgatgcattgactgagggcctcacacacccttcctctctaagccatcccctgccctcagccacttgtgtttgcttctatagtcatgtcatcagctctctagggcaggtctccagagagtctgtctggtcaccagtggcagtttccacagcagcacaggctttgcaagatgacacttcacccactgagatatggccagcaacaggggagcaaggatttaaccactttctgtgggccagatgcatctggagatccctctcaatgcccatatttagggaaaagtccttcgttgttagcctccaccctgctgctgaccccagatcacctctggatcaggtgtgggcagaggaatgcaaagtgcctgccgggcaccagggggcagcaggacaattcctaggagagtctcagggattgacccatcttgtgcccagctggccacagttcataggctatgccacttatttccactaacgggaaagaggaggaattattcaataaatgataatggggaaaacgagctgtttggggaaaaaatggggactatctcatatcaaataccaaaagaaattctagctgcctttattgttagaaatgaaacaatagctaaaagaaaatggaaggccaggcacagtggctcacacctgtaatcccagcactttgggaggccgatgcaggtgtatcacctgaggtcaggagttcgagaccagcctggccaa

SEQ ID NO: 59881 - DNA, 802 bp, Homo sapiens
tttagactccaagtccaaattatgctataaatacaccaaaatcccgggaaaatactttgaataaaagtcagtaagccagttattggcatcatttaggtaggcagctgccagttcacaagttcagaaagcagatgatatttgagaagaaaagcaaacactcaacaagaaggtgaaaaagcagtttttccctacaaggtgggccctgtctccaggcagccacttcctggatgggctcatttcagctttccactggcagtgggaagggtacacaaatactgacctaaaagcaggaggctaaggcacaaaatataactcaagaatttactacagacccagtgtggtggttcatgcctgtaatcccagcactttgggaggccgaggcaggcagatcgctggagctcaaactcctgagctgtggattacagtgtccttggggcactgttaggttaatctgtagctatgtggcaatatgaagtactttcgagtgataagtaaatagctcaagggggtgggaactacgaggtgactgctgtgtcattttaatgtctctctgggcctgataatttaaaaggactccgcattcctcagatgatgattattattattttctcactatgaggcctcagactttaaaatccctcaaactggcccaggcacagtggctcatgcctgtaatcccagcatttttggaggccaaggcgggcagatcacctgaggtcaggagttcaagaccagcctggccaacatggtgcaaccccatctctaccaaaaatacaaaaattagctgggtgtgagggtgcac

SEQ ID NO: 59882 - DNA, 1447 bp, Homo sapiens
gagacaaaagatacagagacaccgggacacagagaggtacaacgggacgtggagttggatcgagctgtctcgtaaggaatatcggaaggggtggggacactactgggagatggcataggtccaggacactaattaggctttggctgagatcagataaaggaaactgttcgtaagctgcttacttaaaaagaaaggaaaaggtgcgtttgagttcaggagactgcgagtcccagagcaggaggcgggagccagcgaagggtgggcgtgtaaggggtgcagtcgcttctcccgctgggcaagagactccccctttcggcagcctgggttccccgcctccccacctcctgctcctcctcccccgagccctaagggcccgcagggcctccagtagcaaagccactggccccgcgtccccgcgtccccctgcgccgcgccccggggcgcaggcagggaccacgcggccggcgtgggggcggcgccacccgcagcagaaagccccggcgtggaccgcgtggcgtaggaaagcgctcccctcgcccccagccgcagagggcttgggcagcatcgggcgcggccccgggagagtgcgtccgcggcgccagcggctgcagggtgacctgtttcgggcggggacactcaccagaagaacacgcgtgagcagaggttcgcgtcctgcagcgggttgggcttcacctcctggtacacgggcagcatcttgccgggcggggcgggcgcgggccggggtcgcgctgatcaggcggcggtggccgcgggctccgctcctggacctcaagcagggatgctggggctccggccgccacgcctgtccgctcggctggagcctgtgaagcagccgcttccgggagccgggcgccggcggcacgccccgtccccgcctctcaggcccgccgcctcgggggcgcccgctacgcgccgccgcctggagcccgggagctgcgcaccgcgtgcgagcgcggccgggaccgacgggtgacgcggcgggaggagacgcggcgggaggaggcgaagctggcgacgccaaagggagcccagagctacgcccaggggtgaggcgagggccgcctgcgccgctggatggagagggtagcagagcgcgcggcaaggaggccgggtccggaggtgcccacgtgcacgaacccgagtgaaactttccgaaattcactatccgagtctaggcgccgacacagaaggtggagcagggaggcgtcggctgtgcccgcccctgcgccgcagaaacgccccctcggctacgggtttgggaagactgggagacagctgcctcgtgctctagcagcccgccccctgggcgcctttcccttctcaggaccaaacgacggtgccatgggaggctcttcaacctgtgagccaaacatttgaccttggacgacagcaaagtttagccacagattatccttgtagagctgca

SEQ ID NO: 59883 - DNA, 691 bp, Homo sapiens
ctatacttcactgaatgagtaattgtacctttttactgtttcactaaatccttacaatactactctgaggaatgtattattgtctttttacagataataaagcccagagaaaggtgaagtacattctccaaaatggaaaaaaaaataagatttgccaatgcccatgaacattgtaccactttggtctgcctctctctccacttcagatgtcatgttagagtcagcagcagatcaaggaacagtcactgagtaaacatttctgatgtggttgatgtaatctagcaccacgaggctggacgtgtatgaagccagattgcaaaagcaaacaggtgccttagggcaactagaaatggggacaccacagctatgttgggtagaatgacaggcaggaaagccatggcccttcaaaacctacaatatagacattataatcagaacagtagaaaaaatcaacttgtctagcagagacatccattttttaaaactgccaaggctctgataattgtaattttaaagtatatctgaccttggccaggcacgctggctcacacctgtaatcccagcagtttggcaggctgaggcaggtggatcacctgaagtcaggagttggagaccagattggccaacatggtgaaaccccgtctctactaaaaatacaaaaattagcctggcgtggtggcatatgcctgta

SEQ ID NO: 59884 - DNA, 362 bp, Homo sapiens
gtgccctaaattgccttgcattctagaaattgttgatattcagcctcataactgccatgctgtaatctttcctttaccactgaggctgaaagtatgcaaactatatgtctcagactcacctgaccggtgaattctgatggatgccatgagaggcatccatccagattagaaagtggaggaaggttgtgcaattctgtttctggcagaggtgttggcaggagttctgggccatgggttgctgttgggtatcagtaacagggagcaatcccaggctccaagtgtcctgccctgtaaatataaagggcagctctagcctggctgtaggcttggggctctggataacacaactgtccctgtaagct

SEQ ID NO: 59885 - DNA, 1261 bp, Homo sapiens
tgcgcagtaaatgcaacaatggaagcacgccaccaagaatgagagagtgactctcaggcctggtctattgggggaggaaagagtttttttaaaaagtaattaaaaggaattctccaggctaattaagcaaaaaaggcatcctgggtggaagaacactgccatgcatgcttgctatgatccagcagagtattccaaggtgcagcatggcaggtgatgggctgaagatcctaggataccttttgtgtcatgataagatacacagatttcattctgcaagtaatgaggagcccgtgaagggttttaaaggggtaaagaaacaatcaggcttatcttttaggaaaatcagctggggagtcatattagaaggggtgagccctggggcaggaagaccagtcaggctagtggatggaagaggtgatgagggtctaaactgggaagagtagtgtgggcctggagaggtgagaatgactcatggcagttcagaaagagtgtcaacaagattgagtgatgaggagtacagagggaagagcgccatccaagatgactcaggaacactcataacttgcttggcagactgagtgggtagacaaacaaatatggttcatggttcagtggagaaaatacagaagggagctgcgggggaggtgggggtgagaggtttagttgtagacataattgaggtctccatacctgcgagccaccaggagaaaggagaagatgtcccataggcacatgggacatcagaagaactgattctgggtcagggaatcccattatggagccaccagttggttcagggaaagactgtgatgtgaaaaggggtaagtgccaagtacagaatgctggagataccagcccatgaggagacatggagacgaatcgtggaacaggcagagaaatctaggcaagaatggggctatggaagccgaaagaataaagtatttcacaaagaaggaactgagcaactatgaaaaaggtgcagagaaaacaaacaagataaagaatggggactgttcactaagtcaggtagcacaaaaccacttgtcacttttgcctatggtgtttcagtggaaagggaaaggtaggaaagatggcagtggatggagaagtagatgggtggtggacagagagactgtgatactgtaatagacaagtctattgagatggtcagttaaagaagaaaaatgaagaatatgttttaaatgtctctcaagatatctttaaatacatttgtgtattttcctaaatttgaaaaaaaaaa

SEQ ID NO: 59886 - DNA, 1232 bp, Homo sapiens
ggcaacctaagcaattggtgtatgggtcagtttaacagcaacaaagtatactttattttctgggcatcctaataccaccatttagtcactactccatgagcaaagagcaaagtggtctccagtggtgaaaatactacaaaaatttatttgaggtttgtccagaaaaaaaatgcatactggggatgggaatcaagcatgattgtttatcttctccagaacccgtgtttcatcctatcaactgccttaggatcagaacctactgcctgtaccgtttagcttgtgtagcagagttgaaagcagggagccatcagggttcccattttacctagatcctcccaggacaaacgtgctggcaatgttggctcctagcagctcacagtggagtcccttccaggctgctttagctcaccctctctttggggcagcccccatcagatgacaaatcagtgcaaggggcaatggcccacccctgcctcagtggaggacaagccagagcactcatcccagctctgcagctctgaagcagggctggctgaggcctccactgtggctgcgtctaggttcaacgttcccttcgcccaaccctgcttctctcacaggtgctgtccaagggcacccccacctcccacctgtaaacttccgcatcagtctgtttcccaggggacccgacctacaatggtaagaaattgtgagatttttcatggtaaagaacctcatcaagcttcgagatggaacaaaggacagagagtgaacaggcgaataaacattacgcaatccatgactaacctgccctgcccctgccgccctggggaagctggcctgacggggtgggggacgttggcgggccctggccaagtctcttcctagctcctgcccactgagatgctcacaaataagctttgatccccatccaagggctgtaggccctgtgccaggtctggctggcatttaaaactagcatttcaatcccagcagatgccaggaagggggcatgactgattcatgcagctctgggctagtgagggtagggtccccatgaacacatgctttagaaatgatcgatttgtccggacccttgaatcaaccccagacagctttaatgtacctaccagggtgtcctttagttagcaacaaaaatatatgacaaagaaactaggaaccttgtgtgatgtcatacagaaagctaacaataacaaagtggaggggtggggaagtaaaagaaactaaaatac

SEQ ID NO: 59887 - DNA, 2888 bp, Homo sapiens
gccttgggtacagtacctcaattgaatgtctacacctgcatatttgtggacattgaaatcatctaccatttttcagagacactaccttgtgatataaaaaaacagaagccaaaaaaaaaaaaatcccaaggaatttctgaaggagcctctcttcactactctgctcttgttagaataatgagtaacactggtataacattctacaatttacaagaatatttatctgcttcatgaaacctcaaaacaaacctttgagactatcaggatcctaaccactttacagatgaagataacttacataatagttatggggtttcctggatctgactcctttattcttcacattacattatgttgccttccccacaactaatcaaggactccgttttttcttttttctttctcgaaaccatttcctccatattagttccctttggaatagaagcctttttaaaagtccaccttagtatatcttcagggaatcacaaattcactatgctatttataattcatgagtttctctaatggtatcaaggcagcaaatacaggtgaagtaataattatccacctgatagtacttaacacacataccccgtgtaaaaatactgctggtgtacagtgtgtgtgttggtgacgccggaggaagtggccgtgaacaggcttaatgccgcattgagtaacttcaacctcatcttgctcaggttcatatctctcctgaatttcccctggtaagcgcaagattcaggatccgttctcacagttttttgtttaccagttgatgttggctgcattcaggaacgccttgctctcttaagccacagtgccttcctggtctcttcttcacagggtcttccacaatcgctctttttcctgggcacggtggtttgctgaaagtcggggtggggggcggggcgttcccaagtttccaggccaattacctacctgccttagagcaattacgcacttctctctggtagtccctgaaatgttctaatcatcagatcgccccagcttctcctgaccgtttcttgcttacggctcagttcagacagtatttgttccgggacgctcagcgggaggcggtttttaccggctcactcgagaccccaattccaggcgccctgcagcttccctcagactccccgggaccgtgtttggccttcccattcgtacgctgcggctgcgctttcctctcgtaacaccacgctggcgaacctggaaaggatcaaatagtcccactcgccaacctagcgcggcgggaccggcccaaaagggcctttgcagcctgcgcatgcggactcggcggccgccaccgactccccgtctgcttccctccgggcggcagccgcggtttggagcttgctgacagctctgcgaccggcgggcgcagcctcgtctcgtgcttccacgttatcctatcagggacggggcggggcggcggcctccgcagcctatcagcgcgaaccacgaccccggcgagcccgggaggaaagccgccagaaagaaggcgattggatggcggcggcgctctggggcgtagcgtcgcccgggccccgcccaccgctgccttcctctgctgggctccagagccactgaggcctgagcgagagccgacggcgggcgggcgcagctgctgccggagcgccggcgcgtgctggtgggccacacacctttcctcctcttcactcgcgagccctcggacatggtggcccccggctccgtgaccagccggctgggctcggtattccccttcctgctagtcctggtggatctgcagtacgaaggtgagtcctgccctgccccggccaggaagtgggctcccggaccaggccccccgcgctttcccgtctgcgcccgggcgcctgtcccggagcggctcgggaggtggggcgagcgctgggggagcccgcggcctggcttgggcctgagcccgcgcccggttccgggtttgtctggggaagaatcgaggggactggcgggccgcggggccgggacagcgggtttggactaaggaaccgggccgcaggagtcggaggaggcggggtgcgggggcaccgggctacgacttcaggaagtcctgggacgcggagacttgggcagcctttgggtcctggcctcgcttgggaccctcgctgggcgcctggggacactgtcagtcattggtgctggctgggaggaggcactaaggtggccaaaagacttccttcgctctggagttcttgggtggggaaggagtgtcatgtccggctgggagttggaggggacagtgttgactatttaaaaagtgtgtaaccatccccattaagatgcactgtcgtgtagagaaattgttagtttggtgcaatgaggagccgctgttggaattccatctcccggacggccaggcactgagtttgtggttttacaactcccaacatggtgtcattcaacgtatggctggcattacttttccaagttcgctgtaaaaaggttcccttaaaaagatacgaacgattaaatttcacttcagtcctgcagactggaatgttggctactccagaatagcgaaaatagagggctgtcctatcttagatggcagcggggaggagtaagaattaaagttgatagtgccgatttaacgaatgcttctggcgcggttactgtgcgaaatattcgagtgtaatgacacatcacatgcactgatctattttcatccccataaaaagggctagttgtcaaggaggtcaaattaaacctttgagtattccattcaaagggagcgaggaactaaaaattgggaattgtttatagtgaattcttctgaaagttctcaacttttttttttaaagtagtactccccagtttttaggtgtcacccatagcaatgggcttttgcttttgcttcccct

SEQ ID NO: 59888 - DNA, 1347 bp, Homo sapiens
gttcccagcagtttttgctgtgtcacccatgggaatttttgtgaagatcagatggtaataatgaatataaatatttctttgaaaatagtatataatcactcaggaggctgaggcgggaggactgcttgagctcaggtgcagtgagctatgattgtgtcaccacactccagcctgggcaatggagtgagactctgtctgtctccttctctgtcttgctttttttcttaaaaaaaaaaaaaaaaaggtgcagtaggatatgtaaagaatgtagaaatataatttttgtgtctctgaaaattaaggcttttctaaaaacaggtttgctataataacaggggtttcttaactatgtgacatttctgttgggaagtttgcatttcgatgactaactcaccttaagaaatagtggttactttgcacaataatttgcacaagatttttcattaagggctgtttactgtgtgaccacatcgttactaagtccactatttttctggtgattcaaactgtcttcagtgcttcagcatggcaatttaaattcttttcagttactgtcttagaaaaagtgtgtcttaaagtatttattcttacctactaccattagaatgtttgcagaaatgtatataccttctacctattttatactttattgtttgttttcttagtctcacatttattagaaacatcaagggctatggcatataattaaagtcggtttaaatgactgctccttttttttttagctttatcactgcaatacaagactttttgagacagctctttcccaaaattcccagtaaaatgttactgtgttcaccaagaggtgtaaatcagtgatgctgaaacatggcaatttattggtgtgatttagtaaagggagaatgtaaataattgctagtgcattctgaatctgaataacaggcagtgtggtggcttacaactgtaattctagcactttgagcactttcgaaggctgaggcaggaggattgtttgaggccaggagtttgagaccaacctgggcaacatagcaagagctcgtctctacaaaagtaaaataaaaacaaaattagccaggcatggcagtgcccacctgtagtcctagctacttgggaggctgaggtggaaggattgcctgagcccaggagtttgaggaggcagtgagctgatggtgccagtgtgctctggcctggacaacagagtgaaaccctgtctccaaaataaagtgtcattttgttcaatgtgatctggcaagtagcagtgactctcaaatgggatacacatcatagtttctttttctttttttttttttttttgagacggagtctcgctctgtcaccaggctggag

SEQ ID NO: 59889 - DNA, 1373 bp, Homo sapiens
aaatgcaatagctacaagttttgttctgcagagtaaatgacaggtcatgaactaattccgttggaagagatacaggaaaaatattaccttgcaggaagctgccctccccatagtaagcctaggagctgatggtatgatgtcatcattacgaaactaggtactttaagcactgtctgaacagaactgcctaccccagtagaagctcttgcgttaagtgccacgcgtaaatgctaatacatcccaacgtattaaagcagggcagggaagctttaaaaatcgtaggtaaagtaagactgagggggaaaggaactgcaagtgagtgctgcacgggaaccgagaagccgccccgggtcgggaaggaaggaggtggtgatgctcagggccagagcgggggcgtctggagaacccgggtgggagccagacacccgctgcgagcacgaagaaagcgcggctgagggtggcagcgcgcccacacccgcccggacgagggcccggcccgcacccaccttgcctccagcagcagcggggtctcgggccacttcgcggccaagtgggcagtcaccgacttggacgcggcgaccgtcccggagccgagctgcgaaagccacagcgctgtggagcctagtagcagccgcaccacgttcgtggctttcgctggcgccatggcacggagagaaaagcgcgagtccctcggacccggtacccacagtctgtggccgccacgcttcggccggctcttcccgctgcgcggctgcccacttccggtgggaggagctcgagtccgttactgggtgccgggtccagaccggcgcatgcgtgtcccgctccggcgcggtttagtgggtgcggcctggagagcccacgccagccggacactgggccacgtcggagccgccggggcggcgccgggttgctgagcggcgtcacagatgctcccgcgggtccgctcccgcgggtccattcccaggactttgggttctcggacagaggccttaggacacggggcgggaagctggctctccagaccgaactagggctctggagttgccaaaatctggaagcaaagtcaggaccacttgcatattgtccaccttttacataggaggaaaataagtccagttaaagttgaagtccccacctcacgcagttctcaagtgttactacaggttggaatcacctgggagagcttttataaggccgccgccaaggccacgccccgtacctgagaatctcgggagggggggtgagatgcggcatcagtagtattagttaaaatccgcaggccgggcgcggtggctcacgcctgtaatcccagcactttgggaggccgaggcgggcggatcacgaggtcaggagatcgagaccatcctggc

SEQ ID NO: 59890 - DNA, 871 bp, Homo sapiens
aaacaaagaacaccaggaccccacacggctaagtgggtgggtcccgctcccatagctaattaacggcagactcaggtatagaaacctggtatctgtaatcaaaatggccctaattcaaaacctggtcgggccactcagtaagccatgttcccctcggtaatttatccagtcccccctgagcctcactttgctccgccacaaaacaagaatgaccctccttgctttttagggctcctctgcagattaaattcattagcacctcgaacgttggaaagacacaatattttcttgccctcccctcctcttatcagcttgaatcgatgcgtcatgaactcagtgatttcctcttcgcaagcctgctctggatgcagtctggtgttacataaccggctggctgaggacgcaggtcccctgggcgctgccggcgcgctgtgaccagacacgcgggcgcgggtggggggttccgtccagcagagggcggcaaaggacgcccggcgcggtcccacggccctgcgggcgagcagcaagctactgcgttcccttcgggaaggcctaatgagctcttcctgcaccgtgttcttttcggtagaagcatttttcctgcctcacttaagtgagtacacagtgttttggcaactgccatgtgtccatatttttttttagtttttgctttgtttggttctggtttacttgaggggcgctcatgacatttgctaagcatttccacgcttatggtcttctcgcagtttgatgtctccagtgccccaaaaggagtcatttttattcccaatttacagatgatgacggcgatattcagataagtttagtgacgtggcagaagcagatgccctttctaaaccaaggaaggggc

SEQ ID NO: 59891 - DNA, 841 bp, Homo sapiens
ctcatgagagcgtgcctaggatggcaggaaggatggcatttcttaagatgggtctgactacatgatgtatgttcagtaatttacaaaaaaaaatctgaaatgcaaatcaaatataaaccatcttcataagagtaggaaaatgctccccgctcccagccaactgtgccagctcttttgaggaaatagtatttattgagaggagataatacatgtttgaatttttccaattgttctttatgctgaatattcttcatttaaaagtagctcacatattttttctgcagtctttaattgcagatgagttaggtctacaacttctttggtgcctctgtgcacactacagtttgcacacacacaccctgtcactactctcttttattctataggatcgttttatggagttcaaagtcctcaaagcttgcagggaagggaggagggctagggaaaaggacgattgtgctaagcctgagtgtaaactcccctggagcagagaatgactcacattctctgtgacatgagtcactcccatgcaaaactggagttgcgagctactactttgcctgtagctgtttgtttgttcagaggcagatggaaggcagaggctgcgcagagaatggagagctgtgtctgaggagccttggaacattcacccaggtagaggaaggccaccgtgtgatcaccttttctccttggctatagctcagaatattcagttccctaaagtaaggcactgctagtattttttacctaaggaactgaaccagagagaaggttaatttgcaaaacaaaaaagaaaaaaaattgactagcaaccgatagaaattgatagagagggaaaagg

SEQ ID NO: 59892 - DNA, 707 bp, Homo sapiens
tgagacgatagattcacctctgatttctcaattataaatagaatcatcaaatgctgaaggcaaggaccttgtctaaacaatctccactaggttatgtatttgaaagtgtttggaactactgtgaaaactcgatagttcttaggtcttagttcatcaaaacctaaagtgaaacatacctccacacatagtgtgggtgttcatccctacatattccacctccccacactggcctcctcgaaggaggcttggaagagtctatggctggctctgcattggtcatgcacgcctccacggctgctttgctctgtgccccggctttcctaggtatctcctctcagcctgacctccgcttccgcttcctgtcccacgtctctaaccaacaacttaaagggaccctacccaaggaattgtaacctgtggaatttccctaaagggaaatctcagatatagctaggggctcagggaatgcaactaacatgcaactttgggaagatgggttttgcttttttatcttagacttttttttagtttgccttgagaaaaatcagagctgttctttagaaaaaaacaaaaaaatgagaaggtagcaggtcttgtcttcagtctttcccatttcccaagaagcaccggatcagatcctcttaggaccatgaactcttcacttcctacctagctacctagcccagatttatcatgtcagttacctc

SEQ ID NO: 59893 - DNA, 3817 bp, Homo sapiens
atatgctttgtcagatagtccaaggacttcagtttcatgtacaacctggatttctttggaatctgcggagtttcacattttcccaagtgttcacggtgaagctcctggcttcgagctggctgtcttcaagggtgttttcttgagctacccctctctctgctctgccaattatgtgccactttgtcttggtgctatgattgctttcttctgagagggaaattcctctttcatcagtatggatgcactgtttttacacactgcaagtgctgtgttactgtgtcagtcatcctattagggccagtttcagacgagtagggctgacgagctggctggggattggctggccccggctgggagggatttgtcggaaggaagggctgcagcttacagcaacagagtttagactgtctttgcttcatcatctgaaggtaaaattttccagatacggcagacggctttcagagtacaataaacagggaatgagaactatttacatggaagtttctttctcatgatgcggtggagaagcctcggccacttggttctgccagatgttcctggggttactgtaaatgggaaggacaggcagagctaaacaaggtaggagaatcgccccccttttttgaatgtttaaagagtttgctgcagtatgctgcattccatgtgtgctgcttacgggagccagggaaactggattccactaattcaattgtaatacttgcgggggaccctggagttttacgtaacattttgatttgagaaaaagaaatggcaaagcttgaatctatgccgcctgtttggggtgaggcaagaaatcgagtttttatgcaaagaatcgattcatttattatattattttttaaaaaccatttgaattctttggagcaatcttattttcttgctgtgaaaaattgttatattgccatagctagttcccaaatagataaagtttacatggatcctattatttgaaaacagacttgcaattaaggattaaaaaaaaattcatggtaaataatcatcggttgaatgtttggccaaacgtatgtgtctatttattaaaaattagggacctacctagctctacaatgctacagctttaattgagtttcaaaagcacattttaaacaacctagcaagaggtagctttctggcaagttttcgatactgtagttcaatgtttacatttcttttcctggcatgtctgagcctttgtttccagcttaaaagtggaaccattatattcaaaagtaaagctgggttaataatgcttactgcaattatctgatctttatgcatttttaatgagaacacacagccagcagaataatttaatgagggcaggctagcttttaaagctgtgttttcactatgccgaaccatatcaactttctcgctgagaagcagcagtgagaaatgatggagaagatttatttttaacacacttggcccaggagaaggaaaggatatatttgctaaagaattctttctgcccttttccgttttaaatttctgccaggcatgaggaaactgtgcttttttgttaggcctcggaagcatgtgtttacaataaatgtgtaacatttttagaatagttagcaagcactgaagcgaagaaaaaaatctgacttgcctaaccaccaccaccttgaatgttctacaagaaacattactgtccctttaaaagacaaaggttaagtggaaagctatttgttaattgggtaatgtgtgtgttttggggacaataaggtttttaaaaaaggcagggggaacattcttataatctttaaataagaggaagtttcttcagctatcctacttgttttgcaaggagcagtagaactactcatttaaataagggcaatgccacgtagattcttctagacccactgtttttactttcaaggagaagtgcaggacactagcccagaacttctgacgtcatcccccaactatttctgctgtgtgttcctttattcgagcttgtggagaggaatatttctttatgtcctggccaggaacattctaactccccactggcaggacttaagttatgtctttatattttcgcctgtcttttgtaaattgtaaacctgtcccctcataaatagggcatcttcttgtacctgccacatgtcgggccggtcagcacaggttttctgcagggcttctggctgggctggcaaaaagcagcagggagcagggcaaagctttttttctggcctgactcccccttggtgcagcccagcgctgccacctgggtggatggtccccggggccctattcccagttgctccagagccactatttaggatccaggttgtgccaccaagttcaaggctggttgtgatggtgagaacagctgctttcatagaaaaatcatcatgtcctagcacagatggccccaagcaggggaagtacaatactgcaggctgcaaatccatgtcacaggtggcaaccttggtcacagagatcgggggaagggtaatgtttacaaaggaaccttttaaaaaagattttgactggagcacattggagttctcgggagttcccaaagctaatttgtgtctcctctctgactactcacgtagttttgagcaagtgcctaccttgatttttctgtcttttaatagaattgaatcatacttgctacactttccctcatcatttagcattttgagaccttgaccttttaccaaaaaaaaaaaaaaaaaaaaaaaagttgtttgtctcttggcacattgagctatttaaagtacaaagggataaaacctcggtattaagaaactgttggcaaacaccttagagtattaagatacatagtcatatacacaaaacccttcactctactttgtgctcatgtaaattttttagggatactttttcttagttcaacaaatgaaatttccaaggaaatcaaagcgttgttgtttgcattttttccatcgatctaatctaatatactagaagctctgcaaagcacactattctggccacaggccttgtagtgcccaaaacatttaatgctgtttttcctttgacttttgtgttaaatttgtgaaagtggagtaaataagagaaaaaacaagagggaaggagaaaaatatgcttgtgaaatatactggttaggtagctttactggttaacagcctgccttctctctgctagttgtttcaatttgctgttgctatggtgaaaacaaatcaatatcacatggctaccagccagtcccgcgctcagggagtgccatagaaattcaagatcaggtactcaagattccaagcaagaattgggaaaagaggatttagatgctgagcttaagagaattccttatagtagaataagtaggttcaatctctcatgcattttctcttccttttttcctgtactttcctaccgataacaagaaaaagatgaaaaggaaggtatactgatttgtttacatttccaaaatgacaaaacagattatcaacatagaaataggttggcaacattgcaaggggtgaaggattctgattcgggaaaaggtggataactacaagacatgttggttgttgaaaacatagttttgggggcctttaccatcttcaggtacagctacatgtcagagctggctgggttgtgccaagcagagaaacctggcaactctagggggcaggtgggcagtggagataaagggggttataaaaaggtagggaggtgtgggcataaaaatcaacaagcaagaaagcccagagagagctgcaggtcaagagtcaggccaggcaagcacagatccctggggcatggcagaacaggagaggacagttcgccctgt

SEQ ID NO: 59894 - DNA, 1959 bp, Homo sapiens
acttccatcttatatattatttagctcatcctttaaaaatgtcagttttcatggatgtttgataatgtgtgtaacatattagcagggttatgcaagaataatatttataaagtaaccatccttagtggttgtttctgatctaaaaaaaaacattctgataagaatgtatgatcaaaaatgtttggagaggccagtggtcaaaatctcaggaaggaggaatagcatgatgtggtatagtggccaggaaggaaccttgaccttggagatggagatgaagtgttagggtgcagtggggaataaagttagatggagggggtggagtcaggatatgaatgagctgaagggccctgtggaagagtttaatttcattacctataacatcacatctaatgctttataaagattcaattgggacttgtaagatagggttagaggtcagaacatttgtaactagtgatgtcaccggctagaaaactttcacaatattccaggtacaaagtggaaaagggttgcattagcatgacaaatgaaggagaaagggcaaatccaaaaggcatcttgaaggaaaaataatagaacgcagtgagagcttagaagagtgaaactgggccaggcacagtggctcacgcctgtaatcccagcactttggtaggccaaggtgggtggatcacctgaggttgggagtttgagagcagcctgaccaacatggtgaaaccccatctgtactaaaaatagaaaaattagccggatgtggtggcacatgcctgtgatcccagctactcgggaggctgagtcaaggtaatcccttgaacccaggaggcagaggttgcggtgagctgaggtcacgccattgcagaaattctaggaggagtgatatcaatggtaccctgacagaaatgggagtggtctgaaaaagggaccaataaatgggaatagggttgaaggagggtgggcgatgatgagtttttagacttgagaatggtgtttttagctaatgatgaaacatctaagtggagatgtctcataaacatttgacaatgtgggaatgaagaacagcctggacaacaggctacaaatacaagctcagacacacctgtgttgaagccgtagttgaagccattggtgctcacacctcgtgaaagaaggcagcgtgaacagagataggcaatgacaaaggatgaatcttggggaacatggcaagggcccaaaagagaataagagctagcaaagaatcagaaaaataaatacccacaaaggagcaaaattgtttttaaaaaatgaacaaccaatactattaagcaccatagcctaatctccaggattccataagaaaacagtgtagtctcctgggttgaactactctcctgcacatagcttttcctctctggcaagggtttctggctgtggtccttttggggcaaatattggttcagaatcttgtttagagccacagaatattagatagttaagggaacctttgtagctgtatctctcgtatatacagttgactttttaaaagtcgatcttcactaataagcagagagagtatttaaaaaccaataattatcaatacttctgcatccatctctcaaaatgtatatattttggggatgttactggttagaacagtaattccagagtgattggagatatcacttgacacttgtcatcctgttctcaaagaccctggggattcatttatttctgattctagcagttctcaattgaacccagccataaggacttctctgaagaaaatagcctttcatgatgagaaagtacttgaagtatgcaaatagattgatgccgtcacaccagacacctaccataagtaaccagacagcacttctcaaactctcatgtgcctgcgaatcacctggggatctcattaaaaatgtagactctgattcagtagggctgggctgaggtcaagattctacatttgtaacaggctccagg

SEQ ID NO: 59895 - DNA, 662 bp, Homo sapiens
ggccacccccaaccccactcattgtgagttgaaattattcaaattaatgtcaagttgtttatatattaaactatattttaccttgatacttagtttttaaaaacacataatttctgctacacaatttggacagcagactgtgatatatgatatgcctactatatcgtcgtaatgggcaaggttcattataacaaaaatgtgtccagacttagtgagataatgtgaattccctatttctcaacttgcttgcattttaagatgttcagtctggaaagtgtttccactgtttgtgaatgattgtccctagatggtggtgacatttgacctattgttcagttttgaagatggaaatgacatgttcgcaagcataaaagcccagggggcatttttagaatttttgtcttagaatgtttttagttttattttattttctgatgataaaatacttgcttcctcaaggaaaaatatataacatttaatatcttctggtaaacactggagcctgacagtctccattgctagaacacatggtttttaagagctgcttaatgtctgatgaaatgaagatatcattatttattttagcatttcctgttgcttaacatttacattggttctaattgcttattttcataaattgtgctgtgattaacatgctgata

SEQ ID NO: 59896 - DNA, 8094 bp, Homo sapiens
tctgaaaatagctcatgaaaattttgactgtgaaagtttcaatttaaacaaaatccagtgttattaacttcctctgtctctaaaatgtccactgaaaggcatttgcctctattcagaaatttttagaaatctaaacatctgattttaacttctgcgttgacttcttttgaccctaaacctacccacccctccactgttccccccgcctctcttttatatgggatcatagggatcgtagggatatgagaccctctaaacttccaaatttgctttttaattactgtagtattttcagctatagcataaatttttaacaaaaacggtcaatgtgatggatttctcaaggcaagattgagtcttgtcaaatatgagcaaacacgactgaaacccaatagatgctacttttcagcagcaggaacagcccaggtactcttgggtggccctgatttcaagcaaataaatcagtatttccagccgcaaaggtgacactaaagccagagcatacatcatgaccatttcaggcatttagatgtggagaagtattattttcttctccaacaagggtgagtgattcagatgaaatcatcaaccttaatgaacctgtgcttctgctgcagggttaacaaaccaaaccccaatgagtcacaagcagctccctaaggatccctccaactgcgaggcaggaaacatgattcttggcatgtccaaggtagaaagcaccttggagaccctgctgttcactatctcaagtttttccactgaagcacccttagagcagagcagagttagaagaactgacagaagaaatctgcttaattatctaaaaaagtcttctaaatctttccttctactctattgtatatctttgctctaatataaaaaacacattttaaattgcataccacttcaattatttgacttttctgtttaaccctcatcaagtttttaagtaaaatgaatgctttcctagactgcactatgttttccttgggccacgtagccactcacgtctgagtatgaagactgcagcttggtccagagtcgtcttttaggattgggtagactgaggactggacaggaattgtgacttactctaaatctcccagctagcatgtgactgtgcaggaactaacactcaatccttctaactcccagacttacccattttcaaataaacaattaggcaatgaggctacccgtagatggcagccaaatgtatttcagagagccttcactttttacattttcccactttgcaaataggaaagctggttgatcttttattcaagaaactgtttaggacctcatgtgctgtgtttagatataacacaggaaggggagggctgagccaattatccgtgaagcatccataatctacctactgacttgcacatccactcactcttggtaactaaagtgcttccctttctaaagaaaaccactggggaagccaaaagcatcagctaagatagataactgtgagcatgatcgtttaggaatggatatggtttgaacttattcatgtttagagagagtgtcaaattgagaactaggcagattcacctactctacaaatgactctgaagcaaattggttgaagaaattagatctgaaagattcttggtggagaattttgaacttttatcagtatatccatatttaaaaggagataaaagaagacaaaataaaaaaaattattgcaaggctgacagaacagttggattaaacatcagttcaattaaaaaggactaacagataaatcttttgaagataaattttgactccagttctttagagaaactaaggtgaccttgatgggcagtggaaagaatcatgacatgtgaaattccttgaataaaaatttattgactttaagtaaaaaaaaaaactgccagcttgggacatggattttttttaatcaatttttttttttaaatattggaactactatttgtgaagctgggtggaaccttggaatgcctgttagtaggcttgctgggaaattggttatagcaaccagcatagtaaagaactcatagtcagacgtaataaatatttgctgctgatgagtcattcgtactggaaaaagtgaagcagacaggaatatctccgccaaatgctgcaggttatcagagtggccttaaccaaaatttccatgagtaatgttgcaatcttcttaccatggcttggtaagacctccaggaatgataatgccttatacgagtgttctgttttaagtcctccaaatcttccatagacagtatgtagatagaatctcaggacaacctggtagagaggaggaaactgaagttttgagttcattggcttgcccgagggtatagggttgtataagctgtttcttttgattcttagcagtgtggattcaagtaagcaatcatttctcatttagaggcacactttcgttaaatgctaagtaagtcattttgattaccaccaacaagacacatttcagtaagcagaacatcattcacatctgcacatacagagggtttcattgtaatcataaaaattgttttgcatttatttcatcgttagttaaaaagagactgtattggcaaaataatactttaaatcggaaagcattactgcatggccaatttgctttttcatgcatgccttttggtgattggaatatgcagagagcatgaataggtaaccctgtgataatctgcataccagtaaaaggtattattcagaccctaccttttttttttttttcttcctcattttatcttgtcaggttgggtttgattcaaagtcattggttctcttagagaaggaggtcagaccagtttaaggaacaaggagcaggagaagagcaattgaagcctgcacgtaggaactcagatgataaaatcgttttggaaaataatgaacaagtaacttgagagcttgtcttgagggtggtatcacaggttaggccaggttattaattttcctactcagcagtatgcctcttaaaaaacacttacagggaaatggatatgtttttgaaagaaatgcaattggcagaagggaatgacggaactgcatggagtccacaggccagtggacctgggagagcaaaactacttccatgtaaataagaattgcataactgagaaaatacccaaaagatacagctaacaggacagtgtttagtacaccaaagtcgatgtctcaagatttcttggttcatctttatgatgccaaagcacacaccctctacctcgtttgtttcagtcaccctgggttcttgttggaatggcccagggagctccatgtaaatcatgagcacaggcgcctgtgcagggtgtgctcctcagattttacatttcactcctccattcacaggatttaggggggcactggcccattcctcagcttccccttccataaaatgtgaagaaccacgtgtgcatctcagaagttgctcgcgcccaagggcagatcagtgactgtgatttcgcctttctccccatttctctgttgcactcctcaaagtggtggcctgttgttaccatggagacacagcacagggtgaccttgcttagaaatgatgacaactggtgacggcagggaagcagagcccaatagtgacgagcctctgaggagcgccccccgtctgggaggagaggaaacagaaggatctgttcccaagtaaaggaaggggcggtaggatgcaggatttcatgagtcctgcctgatgcatttagcaataacattacctaataactcgtggtgtcacatttttacagaagatatgctttgttgccagggttttttttttttaattcctctgaactggaggctttaaacacagtaaatatttgttgttgatttcaatacctagcagttagcttaatttcctgaaagataagaggaattgttgactcattcatttctgtaggctacttcatacttgtggtttgagtcattgctcatcgatggcgatttttagaagtatggcagtactttctttctttctttcttttttacttctaggatgaaagtaataacaacaaaacaaaatcttgttttaataaattaccctcttcctgttcctagattactgggttctgctttttctgctgaagtcaaatagtggaaattatattttgttaaatattaataaaaccccatcacctgtgtgtgagatcctgctgctatctttcccacagtgttcaagtaagtgactagcattctgtgtccttctgaggtcttctgaacccttggatcctccaagccacatatcccatatcaggttctgtgctagaataattggtttctgcaaaaatagtgggatggggctggatgtggaaagagtttggacaactggatggctctttctggtagattatctccggcataggatcaatagccagatcacagatcttaggaaggagacctgtggccactgcctcaagggctcaggccagaggaaggcctgctctctgtgacctgagttcagacatatgttaaccccccaggccagaggaaggcctgctctctctggcctgacttcgagatatgttaacccccagagtatgcaatgctgaaggttcatgtgactcaaaaatgcagtctttccttgtgagagaataccagagccaaggaatggggcctcttggagcttagccttaatgagaatcatgttcacatcttctcagactctgagcaatcttttctgctgatggccttcaggacccagcactgcccccattcaagttagagacccttttctaggtccaggaccgcagtatctcccaccaccacatcatgaagactgggcttgggtgtgctggtgaagtcttggtgcacagtggcattctctatatattctgtgctaggagaagagaacatgtaaagaagaagaataaaacctctggggcaccaagtcccccagcttttgtccttttcacagtccggggcataagcattccaaatctacctccccagtcctcttcacccctgcaccgactcctcaaggcgctgagtgctacaggcagaacctgccaccttttcaccctccctgaatccccttttgtgctccctccttggttctggacttgggagcaggaagaaaatgggctccatgcatgtcccccttcccccgattcagatgctccttttagatcccacggctcaaaaggcctgctgacaaatctaggccaaactcagccgagctggtaagatttccagaagagttcctaaaaatacacttctccttaaatcagccttgccaatcactgtacaatcacagaactttaaggacagaagtggctctagaaattgttggggcctctctgttttaaagctaagaaactggagtcctagcgtgctgaaataatagcaacaacagcggttgagaaagatttcaaatcccatcgagaagatggaacagagcaaaccatgaaggcgggcacagactgtaagctctgtggcgtattcattcatttatttgctcattcattcacttgctcactcagcaaatatctattcactgctcactgtgttctaaagttaaatgttgccctagatgttaaggatacagacagaccatccccttacagacattacagtctggttgagagagaaaatgcacagataaacaagtatgcatgtgagtgttaaataatgataaggactttggagggaaataaagcacggtgagtcagagtaaggaggtaagactgatgcaatattacatcaggaaagactgccccataggctgacctccaagctatgtgactatctgggacaaaagtattcccagcagagggaacagcgaggtcaaagctctaaggcaggatgtccctggctactgaaggagcagtcaaaggccaggatggttggggggagtcagaaagtatggggccagtcaccgaggtcagtgtaggccgtcagaagactcttgacagtcccgctctgtgaggtggggagccattggaggttcctgggcagaaatgtgacatgatctgattacattttcaaagagtccctcaggatgatttattgagatgtggctgcagtgcggcaagggtagaggcatcagtagactggtgaggaggctttgcactcatgttgtgagagagaatgctggctccaaggcaggggccaagtgcagctggtgagaagtggtcagactctggcgccgttaggaatgtggatccagaggcatctgccattggatcagatgtagggtatcggagagagggaggaggggagaaagaaagaacacaaatgtcactgtctagtgggttttaaagccataaaactgtacaaaagagtgcatttgaagccataaaaccacacaagagagtggttaaacagaggcctggtggattttgcagccaaactgcctgtgttccagccattccttctcctctccaccttccccatccacagatatgctaacctccttattttttttttaaattagcacaggccaccaggcataaacccttggatcactctcatctttattttctttccctttaaaaacattatctcaaacacttctcagtaagtgtttgttctgagctcttcgagggtgttgtcttgccaatgaagatgctaaccccatcccagtaatctatcagttggctccccacactgcttcctccaacactgtccagcacctgcctttttcttctccttgatacctgtgtgcattcttactgcaccttctctgcagctattcattccgatagaaaggaagcccccggctcttccctcctgtgcacagcacatgtgattatgatgtgctgagcccatgatggatacaaaccctcttggtggggagtatcagcgatgcccacttctgacatcattcactgctgccacttggcatgttcacactcacacacatgcacacacatcaagaaatttaacgatacactcagaaacaaattgcaagatcacagataaaatttccacccaggagagaacagcccttttatccacctcctcaactgccgtcacctccatgtgtactagcctcatacctcaggcctttttgttcttttaaattgtcccatctccaagaccttgacctttgaaatttggcagcaccctttttctgcctctgctttccactggccaagggtagatggagacagcataaccattcatctcagaataaattaacgctctttcgctgaagttgtgcctcctgggccacttgagattccctgcctttctctttccctgccatcttctgtaactgcccaccaaagatttcccacacttcaggcactggctggaaggccccagcaccacttttgcagcaggtaaaacagctctgatttgactgagacgataaaggctgcaggactgaagctgccctggtttcatttcctgctgtctagccaggctgcatccctcacttcccaccttctgtgggtcctgtgagtgtgaaatgagtgtctcgtttcctcgctgaggctgggcctccatgacagccagccaccctgtccttcccccttcttgaggccagtggccgcacgctggcccatacctctaccttgccatctccccaagctcttgtcctgtttttctccttccattaaaatgaaagaaacgtgggaagggtcaggggagaagcaggtggtctcccaccctcccaggggcttcagagagtgcacccttaaaactctctttacaaacctgaggttccaaaagggtagctgctcaggatcccgcaggcaccaaagcatctctgacttcagagcagagagtgcaatccctgccttgccgccacactgttcttgcagcagcaagtgctccaaattctccaggcactgagtgcctccttccccagctccaacagcgtcatgtcacagaaaccacccccttgaaagccagcagggacttccccttcgtgacacctagccaccacaaattgtccacatgccttgatctctccgtggcagtggcagtggacgcttttcgctactccctcctcttgaaactctgaacctttctccctcactgttgcattattggaaggatcttttgtcgctttctttttctgtggtttgccttactcctcttccttctttcacctccaaatcactaaagaaactgttcttg

SEQ ID NO: 59897 - DNA, 3420 bp, Homo sapiens
tcaaaaaaaagaaaaaaaattaaaaaacttaaaaagccctaatgcaaggaagctcgtctggcttgatttacccagagttaaataaacttaattgatttggggtcatactttttaagggaacacttgtgaaccacttaaaaattattgggccgggcacggtggctcacgcctgtaatcccagcactttggaaggttgaggtgggcagatcacctgaggtcaagagttcgaaaccagcctggtcaacatggtgaaaccatgaaaccctgtctctactaaaaatacaaaaattagccaggcgtggtgtcagacacctgtagtctcagctactcaggaggctgaggcacaagaactgcttgaacccaggaggcagaggttgcagtgagccgagttcatgctactgcactctagcctgggtgacagggtccagtgtgggtgacagagaaagactccatttcaaaaaaaaaaaaattattgctctctgaacttatttgttacctgccaatttaaaataatctacttccagtcttcattaagttcttcttaggtataaattttttagaaagacatcaaggctcagcaggtatgtaaggtcatttgtggcatatcctatttatgaaaataatcaacttctggactttagtcctttattcatgcttgtcccagtaactggaatttaatgtttaatgatttcataacccttgaaaaagttaaaagaaactgaaggtgcttattttagacatctgaacttactgactatatttttgttgtagccatgtgttttaactccagcattccatactacagagcgtttttagattatgactcagttaaaaactaaactgaactcaactaaaactaatttacattcctgcacttagtcatcagttaaattggtcaataaatatttcttgagggtctaatatacgccgtagactaaggcactgggaatacagaaatgaaaactacaaagaatagtctttgccctgtgaatgttgcagtgtaaataggaagataaacattaggtaagtcatggtggagaggaagtattaagatacctgagaaaaaatatcaagaggatcctacctacccatctccaagtccacatctctgtaaactaggaagaacataaagaagaaagagcccacacttcattcaaaatgacaatatctttattacataggagggacacatcccaaataattgtttatagcattcccaacaataaaatcaatggcctaaatgtgaaattaattggaagccacagtcctaatacactgttttggcgattaagcacattagatgggattgtttcagaaggcctaattattgtgtctgccacactcatctgtttgagtcattcctaacttttggactgctgcctagacaattctgcaatacggtttccgttgcatattcttttttttatttaatgcataacttttctcactatactcaaagctcaaagctctaaactgtgcttttgcaaattctagataagagttcaatagttcgttgaagtggtgattccattgagtttgtgtaaaggttaatatttcatttctgttttgcaggtttatcatttaaaagtgcctgtgtgaagtcacttttgctggaaaactgcagcttgggagctttctttgtattcacatcccactcttctgtcaagtacactttaccctgaccttatgagtggatgaagatacctcagttgtctgactttgccaattgcttaatttcagaatttaaaaaggggaaagaaaaacatcctgctaaaatatgaacatctgagtgtcttattttccaacatcgtcaatagctgtgagcgtcagcattaaatattctcccaaggagtgccatgatattgaagtcactttattaataacagctgtatctgcaaaacagtcaagagactcggacgttgaaagccagagatgacactgagcatgcttttattgcggcctaccatctttaagtgggacatattgattgatgagtgattgcctgtccatacactctctcatcatcctgttccttggattggacttcactaagcaatttatcactcaccttcagacttacatgtgggagttttcacaacagtagttttggaatcattagaacttggattgatttcatcatttaacagaaacaaacagcccaaattactttatcaccatggctttgaacgttgccccagtcagagatacaaaatggctgacattagaagtctgcagacagtttcaaagaggaacatgctcacgctctgatgaagaatgcaaatttgctcatccccccaaaagttgtcaggttgaaaatggaagagtaattgcctgctttgattccctaaaggtaagagaatgcgttttatgtgtcatttcaataccacattggaattgcaaacagaaggcttttcattgcatttttacagaagtttaaaaattgcttttagattctattttcttgtttgtggtgactgttgggagatttttcactcaaattttttcatatcaggcatatataaattttttacatacccatgtttaaattaaaaatacatgatgatgtatttctggtctggcatgacattcatgtacccaagagttttaaatcaaagtctggcttgtgacaactgaagataaatattttatcaacatttgatcttctggaggttatataaaggtgaagaaattgaatgtgtcacttttaagtgccagttattctggcttagctcttgaagagttttctattcttatggcttttttttttttcctttgaccgagtacttcctaaaacgcttttctgaaaatgtgtcatggctaacagaaattattaagtacacgctcaatactcaatacttgagaatctacttcatgtgagttatatgacaaaagaaactaaagtgattcagatggcacctttgatgagcttactgtctggcagggacaattcagcatatcagcaagtatctacaatgcaagaaggggacacatgccttgtgggaggaacagacagcaaaaacatttctatggagtccatagaagaaagctggtttccaacagactgtttcaagaaatgtttttggagattcaaggcatctgagtcatatactgagttgggtggagttaggaggatggagagaatttaatgaaagatctagaagtggcatgagttaaccgctaatgctggggggtgtattcagccctaacattatgaatctgagattgtctagggcgttcctacaggcataataatattgttttcaggagcaataagtaaggcacataggttaaaagagctcagtgtttacatctctgcaagacttcagcaaggttaccaaacagttaagaaaattgtttatcaatgctcttgacatatgacttgagaaattatagagctgttagtttacaaaatagtgaccc

SEQ ID NO: 59898 - DNA, 1060 bp, Homo sapiens
tcggcctcccaaagtgctgggattacagccatgagccaccatgcccggcctatgtttatttcttttataaaatgattgtcttagtaggtgagtcttgttctttttccataatgcctttacttggcaaaaagaaaaaataaacgggcaactctgtcagtttctctctcttttttattatatattactgcttcataaaattcaaaggcagggatctatctgtccatactacttggactgaaatccacaccagcaaactcactcatttgagtcatacacactggaagagttttgtcataagaaagtcactgtgaaatccacatgttacctgagaggacccaagaaattccttaagccattttctgttagcaaatgaggacagcttgatccatcaaataagctaatatccatttgagggtggggaaggaaagagcccaaccagaaacctcaaaacctagaatggctttgtttcagtgcacataatcaagtccccaagaaactgagagaagccagcggaaaatgccaaggtctaaacaaaggccagcgggcatgcccctgggactggggagaccaggtttgttctgcaggagttagatcaatgatgaacttcacccatttcacaatttttccattaactgaccctgctaatactaaatagcacattctttccacttggtttgattcaatttcctctggctcaaagattatagtccagtgtatattagtctttctcagcaccatcatgaccaagaagaataaaactgatactcctaggacaaatcctcccctgagcactgacctttgggattcagggaatgagtagatattgacatatttatttgtgatcaaacttacctaagccatcctgcctgaccaaacagcattttggggctaagactgatgagaccattttcttatgcctgaggttgtacccacacaatattaagctctgtagaacatgatatattgccaggggaaggagaaaaagaaaatgacttagaggccttaacctagttaaagcaaaacagaatggctagattcaacttcagggatgattatattt

SEQ ID NO: 59899 - DNA, 595 bp, Homo sapiens
cactatttagtgccaagcactatgtttggtgaccaaaggagaggcgaggaccttgctttcgtggaccttgcagcccaatggggtaatcaacagtattccaacacagtggtaaagtaaattaaaatggagaccaggcctgaagaaactataagcagacatagccagcaagacctcagatgtgacctgaacctagcttgatttgcaaacataagcaaaacttaacttgagcaatttcttgtaaatgcctatattaaagaagaatacaacttaaactccaactaatcagaagtaacaaacaaatgtgtaattatgtaactagggaatttccaacaggatagatgaaataaggtaactgtataactgcaatcagtcaaatattttctctgcattacttccatgtttctcctataaaagtctccccattgcaatccctcatggagttcccaaaccagttctggtttggagccacccaattcttgaatcactatttgctcaaataagcccattaaatttttattgtacctcggtttactctttagcaaaagtaaacaaactaataaaataatcacaatttctgaaaagtgtgatttattta

SEQ ID NO: 59900 - DNA, 1788 bp, Homo sapiens
aactttgcatttacagtctcctaggaaaccaacaaaatatatctggatagtttaaaagtatgatctcatctataaagagctgctttatatcataagaaccaaagaactgttatttgtcaaacttccacattaaatatctgccaagatatcttattaggttttcttagtaataatgactcagtacataaaataaaccatggaactctgtcagattctatccacgctaaataattgagacactcatttcctctcctttgtttgatttctccaacccaaatcataatgttacaaagtgattgattttgattcatttctctttctctctgaaagatttagaactgctttaggtaactttttattagccagtccaagacatttgtacaacaatataattaatagcatttttaatgaaaatgatggcatattaattggtaatttttggatgagtgttcttcctaattacttattaacctttaaatcagatatacacaagggaacagaacaagattcatgtctttgagtatctgaaagctttatcaaggtgctttttttataaaaagaatccagagaaactgtttttccccccagagggaacttaaaattatatcaggagctaagtgtggtatgatgctcagcacattaatatgctacagaatttttcagtgtagctattcatggcccttcagtgaatcatcattaatagaagtacggtttaatagatagtaaagaggatgctgtcgatttttctttaccatttaaatttgagctagttgcaaaaaggtgcttaaaagagaaaaatactattaccagttgagatagtctatttgaagattttgacatacatactagaaaatgagggaggctagaccaacagaagatttctagatctttggccccaaacattaagtctgacttcatggagctgaagaaagttctatagacaaggtgtgatcaagctgactcattgccatttaaataatagtcctatctaaatggttgaacatcaactagatgaagagacagatgtggattttagaggacaaaagtccaatttcattttctcagataggaaagggcatcccagtcaaggctcttgtctgtggccctgtcctgatctgagtttctgtctggcctttttgtccatgtggtaccattgaaagagagttactatttgaaggtcaaagttgcttttccactccttctgcacattcattttctacttatgccttacctcaatgcctttgttctgttaacttttctgctttcttcctccatctctgccttcattcatttatgtcatgggcatttattgagggcctaacatacatgaggttctgtctttgacatagagggttcagcagtgaagacaacactactgccttcaaattgctgatagtcaggagaggcatcaagatgagtatcagccaactgccgtacagtatgataagtaccaggaagggtctccatgtgtcctggagtatggtaagatctatggcatgagctctggaaacaccttgtgggcttaaccccagtccaggggttgcggaggtcagaaaaaacatctcatcagacttgactgggagaattggggtgggaatgggtaagagtgggtaccatggccatctctgactctgctttctctaactccatgaagctgcctattctctcagccatcccctccctgtcccttcatgtctcctgcttccatgtttccctgctagatcattatctgccaaaaaagtatccccagccaagacgacccatcagaccactctgcaacaatagaga

SEQ ID NO: 59901 - DNA, 3010 bp, Homo sapiens
accccttggtggtcctcatttcactttctccatctaagcaaggaacaaagaagcaaatacttccagaaaaacttgaagggcttcccagcaccagaaagagatgaggagaataggtgtcctacttatgagctcatttttcatgtggaggaaacctgcatgggaagtagacagcctttggacattggtctcctggggctcagtagagtctggtgttgttgccaggcaacaagaacaaggctcaaggactataagttcttgtctagttgggaagaaaatttggatggattctcaaaaggatttcaggaatgtgtggaggctctgccttggttggatcactcagtgttcatgaagtctcctgcatgcccagccctgtagacttttgatttttatcaatatagcatcttattccttattgttcaaggcatgttcctgttatctccctggttaaattgaaaacttttctgaaggagagaaagaaagtctaaatctcgtgggttccatctcccagcatccaacataaataaaaacgtcttcaataaaaccatgttgattgattggttgatgattgattatttgacctgccatcctagttggttgtcagaaatcctctccttatttttcttggtggacacaagtttagtgatacttgtagaggccaactttgcctttcaactttgaacttccattgatttttccactgtgtgtgccaaagccttaaattggttccagttgcttaaaagagatgtatatttttcttctacacattttatggaaaaaaaaaaacctggagcgtattttccctagactccaccaaaaccagatagtttttccagaaatgtatgaatgaacaacaaagtggttactttggaagccgacataccgttatattggatttcagaaaagtcaagtaatcccatatttcatgtgattccaggtaaaagaaaaaatatttagtccacaacaggaagggaaaaataaattcaaaagctcccttgtgcagatttgtgatataaacactgaaaaatttaatgtagcagcagtatgacaaattatattagtaaatatgaattgctttttagacaaaaggatattcatgacatttttgctgtttaaagataaaatgatctctttcttcttcattgaatcataaaatcttggacctggaaaagactttagagaattaaattattttccacccaagtgccaagatagtgactcctcgagggcacggatcgtattttctgctccctcttcaaaatgtccacagtgctgagtcaaacgctgtgcactcagttcccttaaataacagtcaatgatgagaatgctgttcacagatacaggggataaaaacaaaaatcttatcctcactttctggaattgtgtttctctttgataacaacccattttgagccatagagctattataataaaagggattacatctttgggattttccttgtatcactcattaaaatgtcatgcaaagaaccacactggtccttttgttgctggacgaacactggctggctgccacatgcctgcaggccccagttcacagaggccccacacattgacctgctcattcaaaactgttgcgagggctttacctttatatcaccacagtacagtgacttacaatgattccagatcaatactcctctcagagtttgtctaggaagtcctaccagctgtcatgtaagggtaattaacacatctctctcaattatgcatgctggtggaagaatttcaaacatttggctggataacaaatccatcccctctgttagagaaaggtcatccctctggccatctgggtatttacttttctttagaaatgagcttcatggaattttctgttggaaggggaaaatgatgaggacaaagggaatttcctagtaaaaatgatgatggcccatttaacactgctcatacccacacaccaacaatcttaaatcttacacctaatgcttattttatttattccactatctactaacctacatcatgtgtggcctgcccactattatgacaagagctgctttagaggcccctgaagttttatgatgatcgatctgtataacagaatatttctttttcctctgatttgttcacaaaagatacaagccttcactttgggggagttgagaaagaaaaggcactgagaggcatgcaaggatgagtaagttcctgctcttaaggaaggtacagtctagcatcagggaacacacaagtgactgtgactatgacaatggtcataacccttcatttctagcaagataagcaaaagaagccctgggaaggaggagacgtttctgagcgggactgaggagtcatcatggagaaagggcatcagagatgggcctgtgggggtgaagtaagagggcagtctgtgcagaaagagcccatgagcataggcgcagaggcagaaaagtgtgggtgtgtttggaatctgagagtagcatggttggactgcagcataaaaaaccatggggtatgtagggagataaataacaacaacacataggaacagggctgtggggagcttgcacgcccaagtgaggaatttggactttatttggtaagtggggacaatggaagactttgagcacggaaatgaaaaatgtcaaaatgacctttgcattcaagggcagttgcatcacatctcccccaaaattcataccttgaagttcaaaccactgttgttgactgtaacttacttggagacaggccctttacaggggtggtcaatttaaaatgaggtcatcagggtgtcttaatccaatatgactggtgtccttattgcaagtagaaatttggacacggagataagcatagatggaagacagtgtgaagagacaggaagaagatggccatccacagtcaacaagagggtgctgggacggatcttttcctcagggccctcagaaggaaccaacccagcacacaccttgatcttggacttctgcccctagaactgtgagggaataaggttctgttgtttgagccaccc

SEQ ID NO: 59902 - DNA, 496 bp, Homo sapiens
agatatggcagctggaagccacaaggtcccacttgcccaaggtgcccaagaacagcagcgctgcattttaaatccaattagtccagttctgagacggtttccttaacccttttttttttttttttttttttacactgcttctccaggagaggttgcaagacaaaacaggcttctgaaatgtaactccagagcaagagcctttgtcttgacctcgggatttcaccaagctggcctcagccatgtggaatgcgaggaatttcagaggctcttccatgattttccctggccagctttggggtctaaagcaggctccaggactcaaagtgtccctgaaggctgcgtctaaagcacatgccatctgcccttaaaccttagggccagcacttgccgttccgcggcctggcctgcttgcttgaaaatatcatcatgcacctacagcagcaagtgctgccaaggtggcactgaaagaggcaaaattcagaaaatcaggttggga

SEQ ID NO: 59903 - DNA, 1042 bp, Homo sapiens
atgaagaagagaaatcctttagcagctcttgatgcaggtctgcttgcagataaaaaccatggaaaaataaataatagtgaacacaaatttccagatatgatattctttatgtattttcaataagtttcaaagagcaaagcatcagcaaaagaccttggcaattattttagcatccagtcataggaaacccagggcttggtaatgactgaaataacaagttatcatcttgttaagatttcactctttaaactcaaatagaatcatacccacgtggattatgtaagtcatttaaacataatgaatctcagtttcctcatttgtgaaaggaggagtagaactagatgcccctggagtccctctcagctctgagattcagtgaaccaaaggttcagtgactattattttaggcccaaagcatgagattacaaagataaacacaaacagaatgaaagtgaaactaatgattccagagttcgatgaccgataagcaccctgccttcttttctgtctttaacacaaaatatagtgggattttgacagattttttgttaatttgatcaattcagactgtcagttcaaatatttaaaatctcacaggcatttgtaattagatacaagtcattgattgaagaaagaggatagatgaaaacatcccatgacagcttcttaggtctagtgctatttacacattaccccacggggagccaagctgaacaagccactctatcctcaggctgaatcaaggtgccaccaataaaagttttcactgaatttagactggtggtttgagattaaataaagacagaatccaaatatgtttgggaaatataaaatgttttttgattatttagctttgggagcagataaggaaacaaaaatacaacaaacagatttactaagcactattttctgtttcagttaaggtatttgggccttaatagacaaattatacctaatagtaataatattattattataaacctcttattatgtgccaggtatgattctaaatggtctctctcatgtaatatattacatatca

SEQ ID NO: 59904 - DNA, 1997 bp, Homo sapiens
gaacgctaagttttaaaactcaatagtgaaagaaaaaaaataatgttttgggaggaacgcctggaagacccatgcaactgctgcacgatgtttccttaaggaccggaacatttctcaccctgaagacaaaagtccctgtgttctcgattcagcccacatccctcagcaccatttccatgcccatcatttaggcagaatgccacggaggcgacgtgaaaagtggaattcatcattctggcttgcaacgcatcttgttcttttgccagaacagggcacagcaactggctcctcaatctctgcccctcccaaaccccagcagccggtccctgtctccatcccgccggcctcggtggcaaggggctcgcgagctctggttggcttggccgaagcttccgtcactcgccagctcacctacgattggttggcagagcgtgcgcgaagagccccgcctggcaaggcactgggaggtgggcttgcggatcctacgactagcgtttttctcgattggttgaaggagtaaaggcacgtggtatgggggcgctctcttattggtcgtgaatggtaccttgtggtacagagacgtgatgtggttggctagaatgaatcccagcttcccactagatgcccctagctggctgttgctatgaggagtccagggccttccggctgccgttcgggattccgctctccaggttttcaactcacccgtggctgacagggcgtgggaagagctcgacttcagttcggcaccgaaaggggcgggtctagaagaaatgtgggcgggtccagagggttggtgggcgggaccccggcgacgtcagcgggcttggacccgacttccgtggtgtgtggccgcctctgactcgcccctctggcgcgctgctagaggggggcgtcaccctcccatcaatgtcctaacgctccaaagcttcattttgttgcgtttacacaacttcagtcagaagcctgtaggtgccccccccttaaagcttcacatgctaatacaagataaaaccaaagctctaggagtgctgacagactgggtggcatcggacaaaggccctcgcggcccctcttgggccttgggcatctctccttcactccccgcctcaggataaagcttggaggtagctctagcccctctaccatctcatcccttccgaattcttaatgtctcgggagtctcaggttgacgctgctcctggcttgggcgggaactgcgcatgctcggtacacaggccctggggtctgactgggcgcgctgggttcggcgctgctcggcggtcgcggtgcttgtttatctccgcgcgggcagaagcttccgagccccgcaaagcctctcgggagcgctcgcggcccgtcgcctagggggcgggggcggggctgcgccgcgggctccgccccggccgccggaccccgcccctggccgcgctgcggctggggctcgggcgcgcgctcgagcgctgggggtagcggcggcggcggcggcggcggcgggcggggatctgggcgtggaggcgcgaggggcggggcgggcggcactgcgggcccgcggctcgggcggcaccagcggctcccggtctctctctctgctcgccctcagtcccacccggtgcctacggggccgcatcgccgcccggctcggcccggcccatgcccagggccgctgctccctcagttgccgccgccgccgccggcgcccagggggccgccgcggctgtgaggtgggggcggcagcgggaggcggcggggcgggccgccggggccggggctgggggcgcagcgcggccggcgtaggtctatgtcgcgggcggcggcggcggcggcggccgcggagggacgatgcgcgagtacaaagtggtggtgctgggctcgggcggggtaggcaaatccgccctgaccgtgcagttcgtgaccggcaccttcatcgagaaatacgaccccaccatcgaggacttctaccgcaaggagatcgaggtggattcgtcgccgtcggt

SEQ ID NO: 59905 - DNA, 2686 bp, Homo sapiens
attgtttttgtagctgggcgcagtggctcatgcctgtaatcctagcactttgggaggccgaggcggggggagggcggggggggctggtatcgcctgaggtcaggagttcgagaccaactgggccaacttggtgaaaccccgtttctactaaaaatacaaaaaagttagctgggcatggtggaacatgcctgtaatcccaggtatttgggaggctgaggcatgagaattgtttgaacccgggaggcagaggttgcactaaaccgagatcgcgccactgcactccagcctaggcgacagagcaaggcttccactgacacccttagcccaatgtattggatacaacagggtctcaacaaaagtaccctctgatttgtacactgctctctgcctttggcagccccaggagttaaagaacatcgcgtgtattatctgcgcattagaatgctgaaattgaaattacgcctctaggttcctagactgagattgagataatcagccctgtaaaccagggctcctttaggaagaaaggtgtctctcttgacgttccccaatcattgcgagaacagaatccctaaacaagggattcaagggaacagtcacagatcctggggtgggggcatgtttgctacgtgtacatccgaagacgaccgcgggctggggacgggcggcctggcgggacagccccgggctgagtaacccctcttccgggcaagccccaggcgtgagtcactggagagcgcgacgggaggaaggggcgccctgagtccacagccctgggggaggtcggagggtctgaaagcgagaagtccgtgagtagaaggtacgtaggaagtgggtctaaagggactgccttcctgggggtgggtgaagggctggatcccagggagcgagggaccaaaggggtggggcctgctccagcggccacggggaggggccgggggtcgctagaaggaggccgaccagcccgcggcgccgaaatctcccgcgctcagcagctggcccctcctccccggccaggcctcaggccccttgccgcggccgggcccgccggccggctcctcccgctgtccccgcgacgcagccctggccccagcccaggcctcgacctcgacctcaaccccgaccccgaccccgatcccagccctggcccggctgcgaagccgccagcctacccaaccggcgtacagccggcggcccccgatgcgcggccactgacggcaccgcagggtgcgtggccaatcagcgcggcccccgaggaggcgtcctcggccccgcccccctgcgcccaaggccagtgaggcgccggcgccggcggccgcggcggggtgagaggccgcgaggccccgccccgtcctcccctttcccctttgccccgcccttcccgcgcggccccccgcaagccccgcgccgccgctggtgccggtccccgcgctgggcccgcccccgcccctcccgcggcccgcgagcgcgcctcacggctcctgtctcccctccctccttctctctcacgcctagcgcaatggcggcggccgcggcggagcagcaacagttctacctgctcctgggaaacctgctcagccccgacaatgtggtccggaaacaggcagaggtaaccgagttcgccgccccagtcttcgcgccctggccggcgcgccgaccctttaccgacgccagccgcaccgggcctcggccggtccgcggcggccgcgcaggctgggcccggcgggcggcggccgcgcagcccacgtgtgaggcggcccgcggctcccggtcgtgcccccgggcttttccggccattgctgccgcggcgcctggcaccagttacctccccgccgccgctcgcacccacgtgcggccgctcccgacgcgcccccgtccaggtgtggggtgccgggcgggcccggggccccaacttcgctggccaccccgcttcccagctccccgcttgcccctttcccgctttctcccagtgggagcccccactgcccttccagccgctgtctccacccagcctagcgctgtgggtctcccaaaccctggctgctacctgacccgtcacgcctgcttctacccctgctcatctcccacaccgtctgtccctctctttttaaatatgtgccctgccttgtccctactgcctttttccatttagttctttctcattctagttcctaacatcagaagccagatttccctaccccctcccacctccagttttgtgaagttgcctttagggtttctttctatgcagtttccaccttactctgggcttataatacacttactctgctcttcagacaaattttctttgctctctagagaatcgtgggataaatgggatgtagtgggacttccgttgtttaactgggccagtaccatatgtttaagtcttcaacttcattaaatctaaccgtaatctctttttttcaaaccacctcttgttcctggcctccaaaatgtggagagactttcaagtgacagtattttaaatatatctgtaagctcatttaccaagttcactagaagactgatgttacattttcagcgttgagaccacgattcttgtgggatacttccaggggagggagaaactttccagtttcttagctgaccgccaaacttggttatatatggggtttttgcaaccatgcgattgtagagtttcataagattaagtgaaggatgt

SEQ ID NO: 59906 - DNA, 1252 bp, Homo sapiens
tagtagagacagggtttcaccatgttggtgaggatggtctcttgacctcgtgatctgcctgcctcggcctcccaaagtgatgggattacaggtgtgagccacggtgcccagctgcaaactttttttttttttcaagttctctaatcagccttggcattaggaggaagcctagaaagttgtggaaaatattgggaaactttgcaaagtcagtgaagttgtgccataaacgtggtgtatgtggactattttactttcttgacactgtgattctggtgtttgaagatgcctgatctgcataagacatggccctaaatgcacccattgcctcatctggagctccaccctaaaaagcagcagtctgtccctgtttggagaagacattcagtttgctgcaagagctggtttgttcggtacactgaactgtaggtcaccagggacttttgcccccatgctcacatgaatctggcatctatgtaggatgagatcactgtcaaggccattgtacaggagtggacagctggaaagctttgccccctggggtcacacttcctgcctggctgtggccccttgcgggagctccttaatctcttacataaagttaacggctaccacacagggttgttgtaaggcttaatatatgtataaagcacctagagcagtgcctagcattgtagatttgatattatgagtacacatgctgaagagatggaagtacatttggatagcatttctttttgttagtgtcaacctaaaagaggatctcaaaaagaaaacgtttatttgggagtagagcattgcaatgggaatgtacatgccatcatagatgatgagtatattgagggaaaaaaaggtttttgtgggtttttttggttttgtttaattttgtgatgacagagtctccctatgttacccagactgctcttgaactcctgggctcaagtagtcctgcttcagcttcccaaagtgctgagattacaggcgaaaagagaaaggtttataaaggaagaaatgaggattacatcgttgttttgagataattatccctgactgcacaggtcagtaacaagggtgatgccagtccaaggttgacaagcagttggatgtgtgcttgcagaagtattttttgtgtgaggttgcaaaggcctttgtgcaaagttgtgatttttgtggtctttgtcatcatgcgtacaaacatgagaaccctctatgacctttctagctgtttgtccgggtgttcttaacattagtgact

SEQ ID NO: 59907 - DNA, 3774 bp, Homo sapiens
acagtcctttatccctgcaggcgattcagatgcttgctaaggtttcattaggtaggtcggggatgcggcccaagaatgttcatttcttgacgtttccaggggctgctggtggtggtcgtggtctgagaaccacacttagagaatcacgagcagaaaaaaatctgatctgtgacacacagctggttgggctgacagagcaaagcctcaaacccaccatttcttctcttcaaccacagaccaccaaatctgcaagtattacatctctgctcctccccaggagctgcccacaagcaccccctacttccaagacccctgttcttgtctcaacccgcccttctatcagggtccctacactccacttctgcccagctcctgtccagctgtgagttcacttgaggcctctcccgtgaaatctgccctctcggtctgaggtcagggaactcctgtaagacgcaaaaggcccacggttctgagccagtggcctccgaaggccggaatccgctagccccgggtctggcagaacgtcacttgctgcgccctaggcctcttcccgccacgcttagagagagggactggaggctcagaagggggaagagaaggtaacgcggcagctgctgggtggggacggtgactgtgcccctagatcgctgcctcctgggtcctgaatcttgctccccgctccgtagagttcccgaaaccccgaaggctctcaagcaccgcaagccactcctaacctcccccacgccattccccaagggcactgtcccccgaggctgggcgggcgggaactgtcatgggattcgctcgggcggagggcgctgggccaggacgtgggcgggcgcggggtggccgccgctcccccaagcttaagtcccgcgcagcccggggtggtgccggaagcccgtgcctgtggctccgggggaggggagggctcggtgggtccctgaagactgtcctccccgcgcgacgtcgcaggcgaagcagccccaggcaggacctcaaaaagcgacctgcagagtccgagcccctgaccgcccgcctgccgctcccggcttcgccgtgcacacgtctcccgctctccccggttcgtttttcgccacagctgctggattcgcgtctcgccagtggcgctccccgcgctgcattaggtagcgccgcgcggagcccggccctggccggaagcccaagagaggcgcagatccccggcggcgcgctgggctcgggaggcccctgggcgcacctgcccgggcggagcggagcggggcggggcgggcgcagggcgcgggcccggacgctggagggggctgtggctctcccgcgtccccgctgctcgggctgcgcggcgcccgcctccccccgccgaggggccggcccagacccggggaggggcggtggccactgcacttcccgctcgccggcctcagaggcggcgggtccggcgcgggcgcagcggtgcgggcgctcggctggggcgcggggcggggacgcggccgctgcccgctttgcgccgctcctccctgcgcgagtagcgctggccccggcgtcgaggcggccatggcgacccggagcccgctccccacccaccccgcctgctccgccctcccctccgccccgcgccacctttgatggctcggacctcagccggccaccgccagccctgctcgcgcgcccgcgccgccgccgcccgcgggtattaatagccggcgccgccgcgccctcggccgccgggggcttgggagccgccgatcccggagcccgagccgggagagggagccgccgcagccgccggcgctgtggaggtaggaggcgcgcggtgaacaatgaccgcggcgggagggcgggggccggcggggtccgggccgcgggcggcaacttgtgcgagtccaggctcccgcagcgcacggccgcggctgcgggcgaaggtgggcgcgtggtccccgaggtcctgccctgcgcagtcgggcggcgggtcgggcccgggcagccccggccaccatcgcaggagctcgggggcctcggggctccgggctgccccctgcgcccctctcccctcacctccgccgacgtcgggctgcggggctccgcgccggtccccgctcgcctcccccgaccccggcgcccttcccccgtttccttccgtcctacccgcccgctgacagcgctggacgccgcttccggacctcgggccgcaatctcggcccctgaggccggttgcgggccggggaggtggccgctggcgcggatgccgccgggtgcccgccgctcgcccacgcgcggcgcgagggttcccggcgggtgacaaagaggaacacaccctctgcccaagttagatttgtgtctctctttactgtctgcctttatgcagggcaaagttttttttattttttattttttaaagcaaaggacagattgctttgcggcgagtatttccaaacaacttctgattgtggttttacgattcaagttccggaaactttagctgtgtgatccggctggaccccggagactctgtgtgtgtgtgtgtgtgtgtgtgttttatttgagggggggaaatacgaattccctgtaatgagtctggatctcgtttgtggcagctggaggccagcggctgttggggatcgagtagggttccccagaaaggagggagctgaggctcacaaagaagcgaggccctggtatctgatcagttcgtggagacgtgggagagcctgcttgtcatctggaacagtttagcagcctcggcctccctgtctctcccagccctggggagtaccggtggcctctggccgtttcattatattgttgttaaggctcttctccttgtcagtttaccaggtttgaccgcccagccctggtctctgcgtggaaacccccgggggcccctctccttccagtaggcaacatcttcagagccaaaccctggcctagcactggcttctgtttaatgtgctttgcacgtggtgacttgcggagcccatttcagaacatcctccagcattgtcttgcttttcttattcagtctgaacaaggagaggagaaagaaacatctttctggtcctgaaagctttagggagagttgccttaaaaattggcttcgttgttccggagactttaggagggccctgcttcatcctatctttggctttctccctccttccacagtgttctcgtagggggtttattctcagtctttcggatgggttggtctccaggatgtgacagtttctgacagtgtgcttcataagtgggtacagctagcacatggctcactttatattcctgcagcatcgttctgcagcaaggcatcaatattggagttactccaagcacaacgaagcgtttgtgtttttagaatgtctggctaatagatctgcttctgggtaaaataaatagaagcattattgggcaatggctgctttactgagggaattgttggtggagacagtgagtagatgccttcctagcccagcgcctcccagaatctcttacttgtttcttttatgtgaatgggaaactggaaaccctcggtgtggaggtggctgtgcctcctaggggcagattctatggtgcaccaccccgcccccgttacttggggtgtggtgtttcattgagaagttctgtcactgtgggaatccttttgaagcgtggtttctaatgccccctttcacattgatattctcttcctttaattgatacagggatggatttattccttgcttcataatagaatgttaactttactctgtagccagacttatcaaagaagatcttaaa

SEQ ID NO: 59908 - DNA, 686 bp, Homo sapiens
aagccagagtgcaatggtgtgatctcagctcactgcaacctccatctcctgggttcaagcgattctcctgcctcagcctcccgagtagctgggattacaggcgcgcaccaccatgcccggctaattttttgtatttttagtagagacggggtttcaccatgttagcaaggctggtctcgatctcctgacctcaaaagatccgcccgcctcggccttccaaagtgctgggattacaggcatgagccaccatgctcggcagcttcagtagtctttaagtcaacatgattgaggtcaaaggtctcttgaggtcatttcctgttgacctttctctgaggaatgtggctgagttcacatgatgggaagggggttcccagatgtctttcaagcccttgactatattgtgtggcgatttcccagaatgtgtatagaaggctttggggactatgaagtccctaccttcttgtctctctttttctctctttctttccttccctccctccctccatcgttccttccttctttctttctccctttctttcgaggcagggtctcattctgtcaccaggactggagtgcagtggtgtgatcttagctcactgcagcctcaacctcctaggcccaagtgatccacccacctcagcctcttaagtagctgggactacagatgtggtctgccacttctggct

SEQ ID NO: 59909 - DNA, 3707 bp, Homo sapiens
ttacacacaccctcttcgtcattgtgcctggcgtatgtgagtttctaattttcctggttcaatgtccttgggtaataaacttctttggggtttgggtaggtgggagagggtccctgggtgcaaaggtctagcctcttcgtatagtgacttacaccctcttgtttcccacgcccttccccctcccattcagcatgagcctcctgggctttggactattttgttggaattctctgagcatcacttatgatacaaatcatcacagacctctctcttgctttctgtcacccaaaagtcagtagaatgttttatctgctcttgttcctgctgctatagtcctcttaaagtatatttactggcatttttgtaggatttttggtgttgatacaggcatgtggttaatctgccatgttcaactggaagtccattttattttaccaaggtataacataacatgatttaaaaatttactgtaatagcagtaatcataccagagctacattgttaaaaaatatgcaaaatttttattttctaagggtgcagattcagtcagatattcacagattagtctaatttatatgatttgcttaaagtcctcctccccaccaatgaggtagcctctgaactcgtctgagagtgtgaatgacatttttgagttgaccattcagacttgtgcccctgaacgtatctgcacacgcgctcggtcacatttctctatctcattttcttccctatcacacagaaaatcacattcagcctgaggtttggttttgttttgcattaggtctctggctgcaggtgttgtggcgctctgggggtgtctgcctgcctcctgtcagtgcagcagttctcttctggatggtaacaaagagaagatgtcaccgataatgcagggccatggaaatccggccgttctttatctgtgctctgctgtttgttgggcggggtggggaaaagtatgagaattctagttctgattagccgtgaatgagacttttctcagtgggagtcctgcggacaccagggtgtggtgactgatttcatttctgctgctcagggatgtctcggtggctgtcggcccagagtgcttggaaggcaggagaaactggcaggatcagcaaggctctgaaaatagggcgtcatgggggttggcacgggggctggggctggtctccggcagtgccactgagcagttatgtgaccagctaggtttctggtctccttgacccccttggaatttcctcatgacctcacctccccaggggttgtagccaaagaatgaaaatcacagagctgcctctagcatagcacccttaaaatgctcggctatgaaacgaacagttccttaacattcaacagacagaagcagagaaaagttacctgttagcccttaacctgcccgcttcctggtttcttttagaccttgggcaagtgttatagttttcatatttattttttggaagtggagaagctggagagagaaggaagtgagctaataaccagcttttcaagagtgctgacttctgcatttcttagtacaggattttgccaggcccttgacattcgtttaaaggaagaaagaattctttctccttgaacatctgtgcaaatcagtgggggtgggagtctagagcccaaggagagtatgagataactttacacgtttctgaaagctaggatgagagacagcagatccacgttattgtactgcactggcaacaacccagtagcaaaggcagaccaatgaaatgtgccaaaaagatgcatttgtagtgtggtataatcacattttgaaaaatgtgcagtagataagtggggaaatacgcattctggttgcttcataaataatagtagttaaggatatctatcaatctcgtgttttttagctccagcactgggtatgtagaataaaaaaggcaaaccgaatcagtttggcatagagctcttttcaaattcagcatcatttcagtgcatttcagctttatacatagctctcagccaggaaatctcaggtttaattaggtcatttgttcttgagagttctgtccttgcaaaacaggagaggaatttttatgggcagttggcacacagaaaaagtcaacagcaaaatgtccctgttttcttcaattttaggtggtacttataaaaactccttagaaggaattttgtgtatttcaggatattaatcaatctgggtacagtgttttcaggttttgattttcatgtgctctaggtttttgcctctcctggagtctttggaatcctaggggtttgtgaccttggaatgcaggcctgtgaggcattttcaggatttcagaaggcctaaccagaaactggcagtcatggggagagggaatggagctgcctccataagtccatgcaaattaatgaaaacatcaaagcattgtttggttttgccagatttttctcatgttgctcatgttgattccgaaggacttattgaccattacgtgtgccttcagtgaacagaaaaaaggtcaagtcagttgttgcttaactgcagcctggctgatgtgttcttttgaccggaaagataggggttggggtgtgatgtggtgggacctggtccagacaggataaagtgccggtaaccacggtgctaactttgaaagccagctggccccacactgctcttcacttccccagcagggtgctgtgtaaggtggtgcagtgctgatgggggactgtcctcatccctgttctgagctgtttcagcaaaagtctgaggggtcgctccagcgttgtgaccttagagcgtggtgatgggaaggactcagctcccaaggaatgtgtgcactccctgcagtcctgcttgcttcttccttccaactccagaatgtttatttcatacattaatatgaaaaatacacagaaaaaagactggaaggaaatcggccaaaatgctagcagattttgtttacccactctatgttagtaaaccaaattgccaaattcggcaacgcttactagtgatcgcctttctgcttaattttgcaaatgattgattatgaaccttattctgtcattttaaaaatggaataagaactatatatcttagtgcatatttggaatgttttcaaaaggttggtgacttggagcacttgttgacaaggttcacgagcgtagctgagtccagtgtctaggaagggacatacatgaagcattgtaaagaaactcgagtgagccttgggagaaaaatcctggagccagagcttagagtttctgcttcggagtgcctgaaagtttcatatttcttcttttgtgcagattccaaatgtttttggaaggcttgaaagtgaataaaatagccctttgacagaactgacaaaaacggacggacttaggggtagggcccagtaagtcattgtacacaagctttgtgttgttagctttggcaaggacaattcttagagaaagctctatgtgaaatgccagaataaatggctcacttttatggggcacttgaactgtctgccttgtcgactatcaagctgccattttccctgcttgaattacaataatcgatatgttgatagcacatactgtatgtcaggcactgttctaaatatgttaatttttgcttcaaaacaaccctgtgagatactactatgtatgaggaaactgaggcacagagaggtaaagtaacatacccaaggtcacgcagctgtaactggtagaaccatgacttg

SEQ ID NO: 59910 - DNA, 1787 bp, Homo sapiens
tgaggcataatgtaataaatctgttttgcatttttattttcagtttcccaggaaagatttcagttatagatggtgtattatcacaatttcaggagcaacagttgagatttgtgatttctattaaccaaagccttttgggttggctattcttgttgaaaaacttaattaaaaattattttttactgcttatttaaaacatttttacctttttcatgcaagttctctgtcttcaaattataccgtgtttcctttactagaaatgtctgtatttagtgaccgaagattgcccttgtcttctgttcttggccagttgccactgtccctccccctcatccctgcaccgttggttctcttgaccctgtctgtaatggctttatattaacttttctctttttgagttgatccgctgaaaaattttaatggtggtgggattaaagagatccccacttctttgtcatttcctttaaaaatattttacaattttctccttttctacaaggtttttttgcatcaatataggaacaattatggtgcaaaccttttacaacaaactctattcctgcattgtacctccacaccaccagggtaaatggtaaaactctgagaacttccctttttctcaggctgttgtttctagagatacattcattataaatcagtgttgaaaaagctcctacctcaaagtctttaactctgtatatgtttattttgtgctctctcttatcttccaaacttattagaagcaaaatcaaggttgactgataggaaattagcaggatccctttccttcccagctgggaaatgggtaataagcatcagatgacatttcatttacttatttattattatttttagaaacagggtctcgctctgttactgaggctggagtgcagtggcacaatcatagctcactgcagtctcagctcctggtctcaagccatcctcccatctcagcatcctgagaagctaggactataggtgcatgccaccatgcccagctttttaagtttttttttttttttttggagagacagggtcttgaacttctggcctcaagtgattctccccgcttggcctcccaaagtgcttagattacaggcatgagccaacatgcccagcctcatatgatatttcaagtagatctatgagtgatcattccatgattttcttttttaaaataaaaacagtgacataggtagtccttgactccagaataccaattacaagtgttctggatatatggacactgcatcttatcatctcccccggtcctgcctctggcactgtgcccacccatgcccaatccttcctaaaagcagagctgacacgcaacgtggccaggacctttcctctccggcccgacactgctggaggcattaagggaactcccgggcctaccccagctgtcgtggtgacctctgatgctgctaggttcctcataatggtgcctgtttttcctatttccaggagcttcaacctgtagaacccttgaccgtactaacctttgagaacactgcctgtgttctcaacatcaaagagcaaccttgggagtctcggactgggtgaaacgagcactggggatgttgaactgggcttcagaatatacttgtcaacagaaatgaaactaaatagcagttaggtcttgttcatagtgttgttaagcttcatcgtggtgaaatgggctttccagggttgacttgagaactcttccaccatgtaatagtggaaaatgctttggggtatgaagtattcatcaatatgagagtaaatatttggaatataaacct

SEQ ID NO: 59911 - DNA, 722 bp, Homo sapiens
cagagtttttattcagaatgtgcttggacttcccagccccttctcagctttcttgtttttggcagatgcttcaagtaaagctttcttcttcaggtacctacgccatagggtcgttgtgtagaatcgggagtgttaaatgatgcaaataagtgcttcaagactggcccttcttattatgtaaaatcactttgtgggaaagtgaaatgatttgagtgaaaaacttgtatttctcaacagttacaggaatagagacactgtgcttggatgttgcatttcagaccatggcctgtccttttggctggaaagtgacttgggacttagccctcaattccactccactgtcctttttcccttttgtggtatgcacctaaggttgctcctcgatctgcctatttaaaccaagctgtgatttacatgggaactgagcatttgctttggggaatatatgtattcccccgggctgtttgtttgtttgtttggttggtttttgcccactagtgtctactgcgtgtgtgtctcagtattacgggaagctctgcagttttaaactatatttatttaagggcagtgagtttgcatgtgccctgggtgtgtttagttctaacccagacttcaggcggggcatccagagcgttgttggagcgcctttctgattgcacaaggaagggagggcagtgggtgccatagtgcctttcttttgtgggtactcagtgtattctctg

SEQ ID NO: 59912 - DNA, 992 bp, Homo sapiens
aatatggttgccaagaaggaacagtgaagcgagaatcttgagctctgcagttaattctcatttccttgctttgttgttgaaataggggtaccctgctcgtagacagttaatagcctggtctcctttttccaaatgatcaaacaggccgaacagttcctcctctgtttgaagtgtctggttgatgtaaaacagttgatctgcagttgtttcttttgctcacagactttttggaaataagcaaatccatccacacagatagctgtttttgaactttctcaaaaccccttacctaaccccttgtgagaagtcaaactgagctgctttgcttttgaggagggccgggctggcagcttttctagtttatctccaccccagcctcccctggggccagctcctggcgtgtggctcccccgggacagaggcacaaggtggctttgtggcagcttccggctcataagagcagagccagatgcacggagctgttggagattgatcacacgccctttgccctttgctctttgctctcctgggtgtctgacacttgattttttgccctcactcaatggcacatccacacttctttgctttcaacatggggcacagaagtggttggaggacccagaacccagccctttggcttcctgcagctctgccacttggacttcttctttgaataacacgtttctgtgagtttttcttaacctggaatttttcagttgcttgtatttaaaactggaagaggggaaacaaactcttgcaaaaagtttctcttcatctacccggcttgattgaaagtagttcctcttcactgtgatttcatctcactcgatttatgctctcagtggggcaggagtagttggtaggagtgtgtgcttttagtagattaaattaaaaattgtttaattacttcttaatgaaacatagtcttcttaattacttttttttttcttttttaagagatagggtcttgctttgttgcccggattggagtg

SEQ ID NO: 59913 - DNA, 1870 bp, Homo sapiens
tattcccttatttgctgaaactttggtagtcaaccttggtggtatgtctaatgcagtctgtctttttcatcttgcctcagcgacagactgcttcctacaaatatggcttgcctgtatggtttctcatttcatatcaatctcactatgtccagggaagctgttactgtgaatctgcacacctgtccctgttattccaagaaagttatgactggtttgctgcttatttgaagctccgccatttttatctgagatctgtagccatgagcagcctctccaagcattttccttcccttctttctgaccttcactgcagcttggcacatttttgttacattttctggtttggggctacagatgtctcccagtttcctcagggatggaatttgtgttttttagtttactgcttattgcttttggatgaattgcaagaggaagtccttataagtcaggatactaagacaagacaactctagttttttaccttttctctggcggttaaaaatcttgttacttctttgttgttacttttttaaagtaatttctcaaatagagctaactaataaagtagttttgcaagcagcttttaactttaaggtctggaataatcactttagtaataaggtatcacaaggaaagaaatagtctatattttgactattcctcaagaatttcagaagtcaggaagttaatggagataaattcagaatagagcataggttaatatttatacactagaggcctttcggtttgttggatttgtttatctggaagacggcattttattactgggcttaccagttttgctatcaagcatcaactgtggttacccatttatgacttgccagcgttcctgagatgttcccttagcgttcttaggatgctcaactcaaaactcttggctggatttatgattgaattaaacagacttttccatgtacagcaacagtctgcatgcaagtatgataacagagagaaagtatgacatactttgttcaagcatcagtatccagaagtagaaataacctagacatgagatcatttgagaactaaagagaaaggaagttaagctaccaagtatctgttaatgactaactcaattaaatttttaaatgccaaggtgctaaaaattagaatatatatttatctggggattttgggcaagagggagagaaaggattcagttcagaggatgaggagtcttgctttttgcttaggtaggacaaggagaagatatctgcagggagggtctgagcacctttaggctggggtgaggtgggagagtagagcccttccttcctgccgtcatcggctccctggatgggcatcaacaccatagccaggtccatgcctgcttgactcagagtgacaagcccagctatagcccagtgtgaattaccgtgcacagggcctgtccctgctgagcaagtgcagggcagaaggggtggggtgggggaggggccacaccaaagtacgaaaagtgcatggaggggctgggaatggggaaggccaacttgactgatggcatagttttctctggagattgcatttatttttaaccatgagacagtgaacagaaaacatatatggaatagaagtaattttgcctggcttgtgaagattattttggacacaactgacttcataatgaatatactgctccccgaccaccacctccacacacacacacacacacacacacacacacacacacacacacacacacacacacacacactttgattcattggcccagtattgaggatctctcttccacttcggtgaagggcactaggctgggattctagattaaccaggctggtctcatctctcaaggctaatgagtgaatgaaccaaagcagagatcacacaa

SEQ ID NO: 59914 - DNA, 991 bp, Homo sapiens
aatgtgatttggaaactagttaaattagccccagctgattgaagtttaaaattcaagtttccctaccattcatcgcatcatttggcggttatctattgtttgtatagtatatcgttagttaccattttatggatctcgccttacagatccatcagaccctttaaggctgtgactggcttctctgggatttccccggttgccagagtgtttcttgcacataccaggagtaaaaagttaatggaactttttttttctgttcattgatccacttacgggatcttctgcagattacctaattctaaggattggttcacctcttcttgcatgatttgcttggtttctaggctatccgatgattgaaaacacattgcaaagatatagaatgttaaaatgatactgaagttactaaagggattagatgttctttattttctagtagttgctatatgcactgaccagttgagtaataagattctcataacctcagaaataggaatttgttattctttttaacaaatacaagattacagaatcttttaatatttgtataaaacttatctttgagcaagcaagccaagtagcatctccctgctgctctagacatgcagatcctgcaattaaatattgttttttgaataacatatgacattccaagcagagagctgccaagacatagcatgtggaccttgctctagttaattcctcgctagtgacacattttctatttacccttctacccacatttccccacatttctttgcaaagattcagctagcagtgaagatgaagatagaacacatcaagaatggtgtttgtgctgttgtgttgtagcatttggaaacttgcagtgtgggatttttttgcaagaaatttaaaagttatgttttaataaaagggtagcatttgggtaaatttccccattatgaaaccttttctatttatattttatttacaacatgaggcctctgagtaacaatgtaaaatattatta

SEQ ID NO: 59915 - DNA, 589 bp, Homo sapiens
atgactgcgtagaattccaaaggttggagagaaccttggtggcacccatactcaaagtagggagtgtggtgcattaatagctgtatgttgatttagtctgcgacgaaagcaatgttcaagccaagtttgtccagcaaggaaaaatgttaagtttctgatctttaaaaagggtgttgagggagatgaaaattaatctgaagcattaaggaatgctgttaaatgcttgttggcaagtagtcctgagtttagccttttatttctcttaacccactgctggggctgcagaagatgacgccagtgattggtaataaaagtctcagtagctgccgttgactgagtgctgttgcagaggattttcctgatgctctcgcaggaaatgcccatagcaaccgcatgagtcagatatcccaatctggcttatcagtgaagaaactgagactcagatcaaagactttgatgtgagacaaaaactggatttggaccctgcctgcctctgccacttttaaactatggcctgggtttcaccatttgtgaaatgaggatgatggtctccacctcaaaaggtggttgtgaggattaagcgagatga

SEQ ID NO: 59916 - DNA, 797 bp, Homo sapiens
aagcttgcagtgagccgagattgcgccactgcactcaagcccgggcaacagagtgagacttcatctcaaaaaaaaaacaaaaacaaaaactagtggttgctgtgttgtgaaatacagtgttttgccgataccttaaaatattatgaaacaatgctctttttaattgtatttgccttcatgggttggttttgaaagatgttagtaatatgcataagatggaaaatatattttgtttgtcttttttatagttcccctacctagcagatttaaaagttagcaaaggctaagatcataccttcaactttcttaataaaacagagacccttttggaaatctgattcctagctcatgactgtgcttgacctttgtggatttcttgtactgtatgtcaggcagagctcatgtgggaagttctcttatgactgcaagaaaaggaagcgtagtagaaacatgtagctggaactgtaggccattgtgtgcgcagtcagcctcccttcccagcccccaaatccagaacaatctgtctgaacattagaaacaccagtaaacgttaaagcaacaacccttctggtgggccatttggcaactggtcaaaaatcttaagaatgtgcacagctttgttccagcaggttcgcttctaggaggtgctcttacagagccggtagaaatgaaatgcccatccaaagatgttcgtgaaagtgtggttaatgatcaaagaaaatcataggtccacctaagttacggttcatcattctatacaggtattaaaatgttgataaacatttgttaggaatgaa

SEQ ID NO: 59917 - DNA, 840 bp, Homo sapiens
tggtacgctgggactagttgattctctgtgacttgccgcaaaagttccttgccacagtaatcccttgtttcccaagggtgatgtagatcatcctatgtgacagtaacaataggctaaaaacagccaaaggacttgaaagcgcttttttttcccatttttttttcctagagtgactgaataatgagggcaaaatgggtgtcagtgggcatgaaatgaatgaatgccatttgcaccaacctgttttagatgaggagggtgggacctggtgaggagtgaccactgggtgagcattctgtgtcaatggatttccagctcacattggcagcgatttgtacattatttcatcccattcctgtgtgatccatctgaaaagccgcgagacagagggacacacattcattttggtgtcaaagatctgggcttcagtcccagttcggccacatactagctgtgtggtcttgggcaggtttgctctctgggcctctgtcctgctctgtaaagcaggattcacaatagtgaccttgtcctttggaggaagtaggaggtgaagtccctgggcccagctcagcgtccacagcaaactcctatcaggcctgatcaccctggtgtgaacattaacccagaactagcttacttacttgctctgccaagaagcaagagttctgggttggtctgaactactctttggaaaaactacttttggcagatttcaaaccagttcctaaaatttccatgtattacatttagattaaagaggaaaaaacaaccccaagatgttctttaattatcaataagacacacattgaaaattctacacggatggcatgaggccgggcgtgg

SEQ ID NO: 59918 - DNA, 961 bp, Homo sapiens
atgtcagagatttgcttccacatagaataggtggcagtgaatgtgggtaaggagagagagagagagagagagagagagagataatatttatatatttttatatatattcatatatatatatgtaggtgaaacaggattggccatgagttgatgattgttgaagttaggtaatgatttggtaaatattttaaaatattttatgaatttttaataggtttaattgtgttttcctaaaggcaaaatctgacaagcttctagggaggagattggcagaatagagtaattcctaacattgttagagtttgaaaggaaatggtccccccacttcttttctctttctctcttttttttttttttttttgcatctctgaaagactgagctgaacgattgtgacaattagttagtatataaaatgtcccactttcctggtgagtggttgacattggtggctaagcaatttcaggcatgagaagagaataaacctttactgattaatggttgacttgtgacctcctggtcactttctgggctggcagcagcatgatttgtgtaacatttaaacatagttgagaatcataaaatattcttttcatgcattgatttcttaatgcatttttgaagtgttttcattaagactggaaaaattatgatctgtgtgtgaaactgacaaaggtcggcgggggtatgatggatgtcattatggaaagtcctaagtgatcatggaaatcccttcttcctttttctgaggcatacaggcagatggaattctgccttgtttcatgttgacatctctgcatgttcattctgagaggctcacaggatggctggcctggctatccctgagggctcatggcctgtccccagaggaattaagcatagctgaaggctagccttccctctattgatgtaattgatgaaatgaggaagcaagatgctaagaacaagacccatttctcaatt

SEQ ID NO: 59919 - DNA, 1198 bp, Homo sapiens
aaagggggaagcagaggtggagtgaattttgaaagtcccccgtttgtgtcggtgggtatgtgatctgactttgaataaaagagaatcagatggacgaatcttttcttaactcaatggtggatgactgacattgccctattttccagttacatttaaatggaatcaattgttttctcttctagcataaagagcaggcaaaggatggttatcatgctttggctgagaccaggcatgctggataaatatttaccaagctaaggaggtctgtgagaacagggctgggtcagggatgcccaggagtaagtgacattgttctcatagcagagccatgttgtgctactgctgccagatgacccagcaggctcagagtcatacttcagaggaggggaacacaggtcacctgaggaaaggtagcgtgacttcaaacactgggccactaagaaaggtggaccccatctctgaggtaccaggctacatgctgtggttgacaccagaatccatggagaaacctctgggtgtcctgcaccccacagagaggtttggaagcaggctgcaaatggcacagggatactgtcaacaatatgtaaaatgtagtcagtcagtgtaaggaatcgaaatttccatgatcacaacttatcctgaatgtgtgtggaagtaaagccaggggctattgtactgacaaataggaataggagaaggtgacctccctgagcctagagaaaggcagggcagggatttatcgggttaacatgggccagtggagagggtgcggcctcctgcccactgggaagaaagggccaggcatcctgtctttaaactaagatggccattttgcttacccacatttttttgctcagctcactattgagtcaacaaatcttttgatcatggcagggttcccagatgtttttgggattgtaaggcaaatgtgaggatgcctcaagagatgctggtctacttgggctttactctttaccaagtaggtatatttatgtgtgtcgaagtccatctatgaatggtctgtggacttgagctatttccctggtatttgatcatctctaaccaagctgatcagtcatttttcattcctgaaaggaggaaaaagaacaaacagcattttggccccactgtggcttcccttactctcatttgacccttggccctccttctcactgaggcctgtggaaagcacagctcc

SEQ ID NO: 59920 - DNA, 601 bp, Homo sapiens
ctgcccctggcctggactgcctgcccccctccgcccgcccccactctctctcttttttttttttttttttttttttttttttttgctaaatgcagctccaagggtttcttggactgtgaaacccacggaatttatcctagccttttttcctcctgtggctccacagcacatgcattccttgaatatagcacgtatcacatttgactttgtttacgtggtttttcccaaaggattgtgttgagaccttgaggatgataactgtcctatctgtgttaatcaggtagtaggtgttcagcaaatattcagtgaatcgatttcaaggtcaccgctcttctcgtgctccctcaggggcacgtggggcctgagtgccagggttatgaagggcgttctttgtaggtcccgtagctgagactgacaaacgtggtacccccttaggtggtgcagcgaatgcatcacctgaggaaggggaatggacgaagatagaagatgaggtcagaggctggagccgctgtccaggacagcctgacgagccacatgcactggacggcacctgagacatggctcctccagactagagtgtgctggatttgcctgagacaca

SEQ ID NO: 59921 - DNA, 519 bp, Homo sapiens
taatatattaaatgcactaggaaaatttcctcgtaaagtttcattaaagagttaagatagtcctttatttcatgcgtacattgaagttatgtataatggtggctgtgaaatgttttctaaatttcaggtggctcttgattttctttgtgttttcatttgtggcttggaaagaaaaacaaaggtcaagttactctcatcctttatcacccagtgtttcatgaaggaagcctcattttcatgaggaaatcttggcgtgtctactccagcttgtgtattttggcagtatggaaaagcgaaacacggttcctgctgcgcccactgctttttgtgtaagatctattttgtattgggtaaccttggcattcagtgttttcacatttaattcgtaactgtctgcaagttgttatgaagctgaaattgatgatccatcagttcagtctaaagagcgtgttggaatcatgatttgatattttctggaaagagtttactttttgaaaggatgcccttagctctttttct

SEQ ID NO: 59922 - DNA, 990 bp, Homo sapiens
tgggtaatttctgtgtcttccaaaaattctacaagattgtcttcagaagacaacaaagggtgagaacggggtcccctcatgaccacaattccctcaaccattttacaacagactccaaatcacaggtccaggagagatggctgaggatgtctttgaccaggcttatctcaaacgttccaatctagagctcctcttttcaggcatttgaaatacttggcatctctcccagagaacaaatggttacataaggtcctcccaaaagcacacattagccacggagcctaagactcaactatcaagaaatacaaatgactaaatcacgggatgagttgatgtcacacaaaagaatccaaacattaattccagctgagacagaaaggctctgaaaatgcttcagaggagaggcggctctcatttttcctacagccatccactgaaacaacatgtttggagcaaaactggcaggaagtctaagccatggccaccgtggttttggcagccatcggggtgaacgctcagtgggagcttcaggagcagggaaggaagaagtgggtaccacagccaagcctgcagagagatgataagcacctcaagaggcagctcatctgaggacagaggaggaaagagggcactcctcatcacagacaaaggaaagagagcaccaacttggcttcccccatgcatcactgcaaagtaaagttttaaacacaacacagacatcaggtagctacagacccgcccgagggtaaatagggtcaaccccagccacgatgcccagtgagcacgtaaaatgtgctgcgtctgaatggagatgtgctaagtgtaaaacacacaccaactccaaagacggtccctccaaaaatgtaaaataccttattgatgattgttgttattaatgttgaaataatactttggatctggcaggttaaaaaatgtattgttgaaactaatttcacttctttttgctttttaaaaatatggctactagaa

SEQ ID NO: 59923 - DNA, 1637 bp, Homo sapiens
gctcggaatgaggtggttcccctcttgcaagttcaatagctgttatgcccagggaccagatgtctgcctgcaacaagaaaagcatctttacaaacaccaagcaggaatctattccaatacacagtatttagggggaaaatggtaacatgtctcaatacttctgaggttttgaaaaaggtatttttaactgatatttaaaaacataagccctcgctgtaatttcaaaagagacaacaggagaaactgtaatatgccaaatgttttctgcctctacatggagatggcttatcaattcactcctactacgcctcctgctggatgcattcggcattccccgtggagtcccgggggccagcaggaccagtaagagaggtgagcagagaggaggagtccggagtgggtgtacgctcgcgagtcaccccctccagcagtgcttagaacttagggcacagctctgaggtcgagagtgggcaccttggtctcaagatacctgggttgaaatgccagttctacagtcaaagtcctgtgacgttagatgaaagagctaacctctgagccctgtttctctcatctgtagaatggaggtggaagaggaggaggtggccatgtaaggtgccttaccaggggcccagaacttaaaaaagtttattatgaaaatgttcaaacatacaaagaactgagaaatattaatataatgcatcctcatctacctattgcatgaatttactaattaacattttgccatacgagctttgtccatgtgttccccgagtatattttaaaatcaatcagtcatcatgacattttcccccgagtatttccgtgtgccaatatacagactttttactacctatcagtgcctgaaattaacacgaattccttaatgtcatgtataattaaatgttctcagctgttcaaaaactgtcattccatggttggtttatctgaatcaggatccaaagtccacggggtacaactgactgccaggtcgctaaggctctttcaacctacaacagtcctgtccccagtctccccagggacatcaacttaaagaaacaggtcccaaattcgggatttgtctggtggtttcttgctgatgtcatttactgtgtctctctagtgtctgcattttctgccgaatgtcccagaggagacatctgcagaagccgtgtggccccactaggacatctcaggtccagctgccccacctccttctgcccagcacaggcctgtggcacaaccaagcagttaggcaaaggaatgaattccttgaatgtgtcatgtcaatgagaagagccaggccatcctaagaggaacttgacagctgatgagacattgacagcatgtgacaccaatccccaaacaggacagaggccgacaatgaggcaggacatagtcctatatgggctggcgaaagacgaatggggactggggtagagaacacgcctgagtctggtacagctttcctgctgttctcactgtgcactggaatccatcattattccaagaacttcagtgagaatcgaatacatctctcacactcactctacagcaaggaaatgcataggcggaagcatcgttgtggctgcagggtgctttaactatccagaggatacacttaccatgttcctgcagcc

SEQ ID NO: 59924 - DNA, 1408 bp, Homo sapiens
ttgctcctaaagtgctgttaattcttcctgtttactgtcagtctcccccatatgaatttaagacatacaggagaagagacttttgttcttgtctactccagtattactggaatccagaaaaatgtgcctacacagaatgggttaaatgaaagaatcaatatgaaataaatacaataatgaaagagagagaaagagagaaggaaggggaggaaggaaaggggaaaggaaggagggagagagggaaatctaaaatcagagtcctcagtcacatggtagatcagctaatttactacaaagaatgagaagagaataatcgaggtggtgtcatccaatgagttaagaaacatgggttctagtctcagccttgccaaaatctacacagatgaactttgataaatggggtcagcttaaaataaagagaatggactaaacatgtaagttcctggtcgagtcccaaaattacatgaccccaggaaaagggtcaacagccaaagtgactgcagatgagaagcagccaaggcagtgtccctcccacgtggggtagagacactcccaggcaagggcacacacccaagaccagccaggtctgctgtgtgggtatgtggggggtgggggaacccatcagtcactcaccagccagaggctgtcaaggccatcatagtgctcagaaaagtcacagccaccgctaccactcaacagtgagacgggctcactcctcccaaggtggaaccaggtacgcctgcaacttgagctacaacctggacgctttctaacagtctatagcttgcaacggtgacctgggtctgcagggaaagtcacctggtgcttcctgtactatgtttaacaaggtgggaagtttactgggtactgggaagatttctgtttaaaagcagcagcaaggttcggcctatatgcatatctgagttaggtatttgtttgctcagaaacttggagcccaggaaagccaattctccgtggatcatgtggccttttaactgtgtacagggtcctaagaagagcagactgtgcgaactgaagttaaaccagagccctaggaggcaaagtcccgggattttttgtcccatctaacagagttcacaaaagtggagggcaacagagaaaaagaatatgagaaaaattaggagagtgtccctaacacaggacaagtaaaaaacagtgggaagaaagggttagggtttcatcacatgttgacaaggacaggctgggaacgagaatcctcagaactaaaaataataggaagaccctgcagcagtcactcaaagcactgttcttcctccattctcacgcttccgtggactccctttctcttgtgggagcccctttctctacaggccccttcaaggttgccgattccacgcacttgcacttcgacccccagctgtgccca

SEQ ID NO: 59925 - DNA, 1797 bp, Homo sapiens
cctggtacccaaaaacacccaggaaagaaggcctaggagccaggcgcctctgaggatatccttgtattagaattttttaaatctgcagttaaagctccccaacttgggggaatgcagctgaaagagcttaaatcctaatagtttgggatttgttatataatagatattatataataataataactattatattatccctaagataataattacctctgaaagcttttattctcagaaactcaaaataattgttcctattgactcctttatatccacaactatatcagatgaaaggaagaaatgtcaggtatccacatctccatttaaaaggaaaggaaaaccaggctaacaaaggctcacttcaaaccagacgggaagcccccccccgccccctgcagagtggggcagtcagtcacaaacagtaattccacagatgacagcagcaaagccaccagtgctccccggaaccacagaaacggagccagacagagggcagatgtctaatcgatgcaggtagggttcccccaaatcatggtcccccattcttggttttcagacttgacagtgaatgtcttcacagcccacacccacacattttagccaacaggaagatacaatctggggcctttcacttagttttaaaaagataagaaatgtgctttaagccaaaggggatgaaaactagggcgctcctccacaggaagcatccgactcaggcgtgcacatctctgggacagagcccgacagtccttgcgtgcctcagctccttcacatcctgttccacatccggaagtacttgtggggtgcagtgtgggggcaaccgagacagcccttgtcaccgaaaccacagcctgactcatacctggccctgctttccggcccatgggtgagctgtgctgccttggctcgcaggcctgccctggtctacacagcaatcccagggtcagggccactctcagaggtggcctctcctcacacactggcctcgctgggactctggcctgcctggcagcagacacacctggaatccagccacccctggccttctccacccaggacccaggtgcagagaatgcacttgtcgcttttagtttgaccgcacacatatgctcagagaaggtcaaaatgcccatctccatcgcctgccagaaattgtcccaaattccaattaagatattgtccaaaagttacctcagactaaggcattacgccacagactctgttccccagaaagtagttttttcccagttacctgaacaaaagtcttatttataagaaatgcatatcaaaactactattctaaagaacacaatcaggaaaactatgccttaagtcagctttctccacatctatttttcagtgttcatagaatgtagaaattttaattttcaaaatgaggaacacagacttttctcatcacctgggtggacagtggggaggaggatagagatgccggagtgtttgcttttgttcataatgctggagtgcaggagaatccagtcgaccaaagatcaaagtcatgttagaggccaggcgcggtggctcatgcctgtaatcccagcactttgggaggccgaggcgggtggatcaccttgaggtcgggagttcgagaccagcctggccaacatggtgaaaccccatctctactaaaaacacagaaaaattagccgggcatgatggcacatgcttgtaatcccagctacttgggaggctgaggcaggagaatcgcttgaacccaggaggcagaggttgcaatgagccaagatcgcaccattgcactccagcctgggtgacaga

SEQ ID NO: 59926 - DNA, 3000 bp, Homo sapiens
ttaataatcaaagggtatttttcacaattatattggaactagaaagttttacaaacatgtaccagcacgggaagtgtgtcaaagtgagagctgtgcagggacctccagagtgcagggacacccccatcatgctctgggagggagctgtggggtgtgctcgggggcccgcacctgactccccagggctccagggcatgcgttccaccgactgccccaggatctcagaaagcagactgggtgtttccatttttaggccacttcactgggggatcctcaggcacagtgagagctgagaacttgcagccacttgaggcagtggtgtcacacacatcgggagagcagtgccaaggcaagaccctctcctcttcctccctcctgcagcactgagcctcccctgcgccccccaccccctaccgtgtgtctccaggtccctgtgagtggaggggccgcctagcgtggcctccgactcacttgcctgtttggcagaagggcagccaattctagcacctcccaaagctgccacagtctcccctcagggagctttccagaaaagcaggtctgtcctaacatgcatgtctgtgtcctctcaaggccccggctctcacagtccccagctctgcgcctgccttccctgtggtctctcttcaagctactcagccctcatgacttgcagagttctctttttaaaaccacaaatcccaaagtgctactccctggaaaacaagcccgcaaacctgtccgccctccttggggagccaggcagtgcagggcacggggcagcctgggcagggtctggatcccgactcccacttcacgacctaggggcccgggcagctgtctcctgagcttctgcacgaggccttggccaagagcctggccacggcgagcagccaagaacccatggctggcacgggacgccaccgccagagtttgggttcacagtgggttcacggggttcagacgtcagcctgctccgctgctgactcaggactcggtggtggcttttgcacacatggaggaaaaaaaaagaagaaaccttttttaaggctctttggtccctttgggagagcactgagtccggctcttagaacacccaaggaagacccctcagttcgcccctgactccaggtctcactgcgctgactccaagtgagctcaccctttgagaacacgccccaacttcccaggcctttttgcttttggaggttccgcaagtcaggaaaatgcttcacttgtcttccctccccacgccctgggcaaactttacttttattatctattgctctgattttcatttcaggtttacttctctgcattttccacttaacagcaaactcaagtgctcagggacagcgctggtgtgctcgagctcagtaaatgttaactgtggaccctgtgaccaaggaagagtaactcgtgttgactctagggaggcgctaacggtaagatgcactgcatttataaaatacattcctctcacaattcaaactaaatcctgccatctggagttgattctaagacagtccaaataaacagcccaagttttaatgtatgttgaatgcttttcaagcgtttaaatgcccttgactgctaagataataaagacaacttcagtcttgaccggacaagtgcggaaacctcgaatgatgtgtctgacacccaactcagagggacaggcatgtcgctcattcaataaccatccagtcacgggcacctgccttgaggaggcttggtgatcccaggttctgatttcagggaagcttccatcatcaagagtgtccttcagcacaccttcatctcacacacacgctcgcctgcaggcttccacaatgcttgctcctggggaatgggtatgccacagtaagctcttccaggaaaacaccagtatctttctagatggcaaaggaaatctaaatcgcttttccctaagagagctgggaactctgacgtttctactcccactccctttttaacagctgctgtttaactggtttcactggctcccatcccttctattttctgggcattaagtctgctcacagcaaggggagctcccagcagggaggtaatctccccgcctcttctcccactgtagccagctgtgcaatatgacaccctgggaaacaatcttttgctgacttaggggactgagggtcaccaggcagcttcctggagcagcaaggcacaagtgaccaccccctcgtccttctgcacttccaaagctccgccctcctcagttcgctgctctctcaatctgaccacgaaggtacgtcaccacttgccaagcaaacaagataagtttcacctggctaccttctccttttaaggagccctagcaagacacctcaaccaagttttctgtgtcgccctgatccttctggggacgtgcaagcaacaacagaacatccagagctctctacccagagcaaaccccgcctcaggaccaaggccgcctccttcctggagaggaagatggagaaataacacagccttcccgcttccctccaactcattcctggtagcagacgcgctgggtggcaaggctacccagacacaaggctcaccagagggcactcaggaaaccagctcaagtccttattgaggtcactgcgtctcaaatacccgggctgggcctgtgactcacacaccagcaccaacaaccagggggtgggatattgcatcaggaaaagctccactctgggtggaacctgcttttcaacctcattgggtgtgtcaccgcccagtgggttcaccttgcccgctgcctagacagagccgactcatcaagacaggggaactgcagttgagaaagagtaattcacgcagagccagctgtgcaggagaccagagttttattattactgaaatcagtctctccgagcattcggggagaatttttaaggataagctggtggggtaggggaagccagtgagccagaagtgctgattggtaagagatgaaatcacggggaatcaaagctgtcttcttgtgctcagtca

SEQ ID NO: 59927 - DNA, 1465 bp, Homo sapiens
aaagacaattcagattttcaggtaattaagggctcacacatcccataatgaatatattagaaatactttccatgtgtttttttttttttttttcagtatggtacaactgaccaccaaccagttaaatgtgctctaggggctccaggcataaactcaactgccaaacaaatacagttttcaacaggagatcccaatttaccaagagagtgttttttaaaaaaaacaagttaaagatgaacacaactccgcacacttgtagcacattcagtagactgttacccaacacttatatgcactcaaagatggctgcagaaagtcagagactaagaatgtgcctgccgctcagtcaccagccatgccaacagaccagttttaatttcccaaatagaagatgagggcagaaacctgattaaaacaaacaaaaagtaataccaaacttggtacattactaaaccaagagctgaagctagaattcatttggtgaccttgagtttatgacctcctggcagcaagtgaaagttcattgtttatatggctgcctcacattaaagtggctgctgctcattcacacagtctccaaaagaaagggcaagggcaaggactgcggacagcttcacgttccccttggaaagtcagcacgccagtgggagacgtggaaaggagaagcacatgtaagaaccaggaatgacctttctaatacagccacactaggcagagccttacaagggcactgcttccaagtgtgactgtgagcttaaaatatccttagaagtcataaagataatcttaaagggtagaaataagagacagaaaaaaggttaacattgaagatttttccttttttaaaactgcactaactgtcataaaggaaatgttcagagatgtgactgcccccaggaacatgccacgactcccactgaccacagcaaccagccagaaccactgcagctgccctgcacagtccagcgtctgttgacagaagccacccacgcagaatctgcctccacctcctacacctgcgatggccaaacactctctcctcattactgtcccagagggagatgtgaagtctatggagaagacagaaagatcacatttgggttaaaatcgacttctcccagcagccattcctcagcttccaaagatatttttacttttaaacagtaaaagtgaaagttcattcctagttgattttcccaagcacacaaatgaaaatttctcttctctcaaccctgcagcctaacttaactgaagacaaaaaaaaaacaaactttaaaacaacaaacacacacttgttctgatatatccatccctttaataataagagaacagagcaggagaaagtagagcttctgtcaacaacagtcaagcctgtgcaaggttgcaatccattttccagtctgtagctttgctctgggaaaatgcagatttctggtccaccatgcctcttccctgggtcaggatc

SEQ ID NO: 59928 - DNA, 1631 bp, Homo sapiens
aactgccacagacaaaaggactcgccaaaacaccaattaagttttacgtctagtagcttttcaaaaggcaaaaatctaaaccagtcaccactccagaaacgactaggaactaactccaaacacatcagtcaattctctagagcccgacgggtctgaactgtcagacaaaaagagcaacgttctcacggaccctgtgctaggatgcaaaggtgacaaggaaataaaatacaggtcgtcaggaaggatacagcttttcagacagctggattcctaataactggaacggctgcaatgagaacaaatggaatcaccgcccagattcataggcaaccgtgaacatccacaggtgaggaacacagcagtgctaacgaaggaaggtgcaggaccacaaaaccaaaacgaggctcctggcagcagctgatgcgagcacaggaggggaggacaaggactgccctgccgagctcacagggcaatgtctcccgtagccgaagcagctcctccgttatcaatcacacagtgcaatttcccactcaaacacaaaggacagacttgtggaccctggctaagcttccggatctatgtcaaagtggggcacagctaccggcaccaattcaaattcaatcatttaatacatatgagtacagaggtgagcatcggcgaagcactaaaaatgcactaaaaccacggacacgtgttaggcaagaatttctcctgctgaactacccaataaatacggtggccgtgagtaagaattcaatgctaggacaaatacagtcttttgaagatgtgacctaatactctcagattccaggcaagtgtgaaacggtgaccctgggccaggagcccgcaggcccgtcttgctaatttgctcaggctttcaggggaacctcactggacacatgcaaagggcgtgctgacctgtgagcagaggcctgagtgcaaaggacggtgctggccgacactaggcctctgtaaatgtgcagctgggcgggagagccagcgaggatgcctccagcaaggcagtgccactgtgtctgctccacccgattctccctcctcaactttgtaaaatggctgaactattgaataaatatctgaaataccctctgtagaaggagaacacaccactggagagagggaatccggtaagaaaatgggggagaagtacttaagaggacaaccgtcaggtgcagggaagctaacggtagaccaggaatgaggaaactctggccctaaatcccagctcaacagccaaagggctgcaaaagctttgaaagcctgagcaaattagcaagacaggcctgcgggctcctggcacagggccaacgcttcacacttgcctggaatctgagtatttgtcctagtgttgatagtagaagaaaaggaaatcactcagcttctctgggccatggttttctagcctagagaaagaaagataagggctagccacctctgaaggcctttccagctctaattatctttggctctgatttctctgactttacacaaggaataccgtatcttagggccagctgagccaaatcaattacagactgcaaataacttaaaagacaagtatgcccagtgtctgcagatgaggaaacagagcccaaaattagactaccacactc

SEQ ID NO: 59929 - DNA, 965 bp, Homo sapiens
aaaaaaatatatatatatatatatatgtgtgtatacacacacacacacacacacacacacacacacacacacgcaatgcattccaaataaagtatatagttccttggaaagtgaaactggcacctcctttattaaaatcaaaatgcaaacaaaagccatggaaaacatacccagtgtacaaataaacagtaacaaacagtggcagctcccactgctgaagctcctcccacgggaaggccttgtgctgggcagcgttcacaaatacggtttctagacctcacaaccaccccatgagaaagagaacactgtcctcattacacagctgagacaattcgggcacagatcttacacaagatcccccacagctcggaagcggggtttaaggatcatgggtcattctctggactgcaaagtgctcatgagctgcaagcttcacagggtgcctgactccagaggcacctaagtggcaaggctcatcctgtcatcacactagaatgccaggagtaaaatgtgataccacttcccattccctacaggtgaactcaccttcctgtattttacaagaactgatggaagcaatgatgagtatcaggaaactgactattctagaagccagaccaaatcgttttggtgtatgcagatttcaattaataacgcatttcctttacctgaaaatcttttagcttttagaggcctcgaaggggaaattcctggaatggaggtgcgaaggtcatagacaaggttgatttgtcacaaataggaacacacgtatcctgcccaccggggggaaaaatgtcactgagtgttcttttctccctaggtggggcagcaagggcaagagggaacgtgagcaatcaagatacaatctgtgagccaaatcctacatctcacagaaaccctgcaagctccaggccaacacacttcagtaggggccagaaaacaaatgccttaggctttggggacta

SEQ ID NO: 59930 - DNA, 1189 bp, Homo sapiens
aagccacatcattgtgaaacttcagaactcaaggaaaaagttcagatcccattaggtccaggaagaacagcacagcctgcacacacagaagccggtgctggcagggcctccatcttcaacagcaacactggaagctaaaacacagtggagaaacacctttaaaattctggaggaaatgaatgtccaccctgcaattttacaccatgctaaaatatcaactgagggagaagaaaaaaaatttttgaaaagcctgtctcccacgctgcctattcacagaaaatggcgcactatatgcccaaccaacatcatggcataaaccaagaaagaaaatgacagcagagacaaaaaaaaaaaaacaaaaaaaaacaaaacagatattcaacacaagagagcagcagaaggaacccagaggatgagagcaaaggaagaccagaggatgggggtggcacaagaagcatagaagatacgcaggtgacgaaaggcacaggtgccacccgaacttcctaagacaaggttgcaacaactacagagtgctgggatgaatgagaagcattaccaaaagaaaagaaatctgatcagtaactatggttgagtaataatggctgggctgcagatccgtctgcagtccattaatgtacacaccgcattctgacctcactgacattacaacatctctctgctgggggagagcggggagcccatgtgaggaaaagaggcaagcggaagagaagtaaatcctcatccgcagggtccaaagtctatagacaatgcctgaaaccaggaaaaaaaaaaaaacacaggcagaaatttttttttttttttttgagatggagtttcactctgtcacctaggctggagtgcagtggcaccatctcagctcactgcaacctccgcctcccaggttcaaagaattctcctgcctcagcctcccaagtagctgggaatacatgcgcccaccaccacgcccagctgttttttttgtatttttagtagagacagagtttcaccatgttggccaggctggtcttgaactcctgacttcaagtgatccacctgcctcagcctcccaacgtgctgggattacaggcgtgagccaccgcccccggtcaattttttaatgttcctcataaactaaggagtaacaaaaacaaaaatcaaccaggagagatcaaaggggctgccctcgggg

SEQ ID NO: 59931 - DNA, 3419 bp, Homo sapiens
ttttgaatgcatgctaaattcaacgctccttaaatgagagtcgacaaaagaatattcttcaagcatcttcccagtcactcttaagataataacttaactgttgctgcttaaatgtatatttatttactgcttaaacatatatacacacatatatatactgcttatatatacacacacacacacacacacacatatacacacacacacacttggactaaaattctagctgccattaaagtggtaactttgagttcctatttttccagaattcaaacctgaacagtgaaatccagttttctttttacggtttcaaaaaaagaagggagagggatgatctcactggaagaggcgagcagaccccagaggcagtcccaggtctgggctctgtgcttctcagccctcaagacacagggaaggagcctgttggtacctgtaaatcaaccagtaatctacttggatgcttttggttttcttcaaacacttaacgttcactcagctaaactggcagagcaaactttcatgacatatcctaactgcatcctaagatttccatcctaagcattttgccaccatttctgcgcctacaaagtttacaagagttagccaaggacggtagctttgtttttcaaagggctaaaagcaacgacaacgaaaacaacaacaacaaaaaacctttaacttatacatgtaaatttgaaattcaactcctctcccactccccaaaaagtcactggtaggccaaggtgtcaccaagtaccgaaagagaggtttactgggcgaagaattcctgtaaatgcaaccaagtctcaaagtgaaagtccagggtcccggggccgggcccgggaccctggtgcgcggctgtccgagggattcctccttccagaaggtttgcaactcgcactttcccccggtccgcaggtgcacgggggctccgggcaaagccactgcaagtggaactcgcggttaccttcctccactccaccctgcctactccgctcgggcccggacgagtccaggcgcgctccccgtccccgccctgcccaggtctcccgcccgcctgcccgggggtgggggacgagcctgggggacgcgtcctggggccctccgccaacccggccaccacgcagggccccgggacccggcgggggcctccaagggcatcactccacctcacttctcccggggacagggccacccagggcctgcagctccggaagagtgttggggcgaggggagcgcggaggactaggcgcccgcacccccacatccggacccaggccgcggttcctacggctcctgcacgcacacgccggagacctcggccgccggagccggcagggacgcccagggactcggactcggacccccggccgagccgggcgcgcggggagccaggctccggcgcgaccccggccggctgagcgtagggggacgccgtgtggataccgccaagttgctgcttccgccccggtcgcgcatcccggccccgcggcccgcgcccgcctacctgcatgccgggcaggcccgactgcaccggggagtgagccatggcgctcaggacggccacttcctgggacgggacggccgggccgcgacgatccgcgcggggcggcgaggcccgcgggccgcgcgcagccctcgggcggcggggccggccggagcccgaggccaccccagccctggcgggtcccggccgggcggcgggggctcagcggcgggtggcgggccgcgtctccatgcacggcgccagggaggagctgctgggggcgcagggcctcgcgcgcactgccgccgccgccgctgctgccgctactgctgggctggagccgggcggcctgggcccgcgcgcgctggccgctggagccggagtgggcgcgcacagcccgccgagcccgcgagcgccgagcgcgtcccgccccggcccggcccccgcgcccgcccccacggcccggccggggaccccgccccgcgcttccgggagggggaggggagaggccggtggccgcgcgggagccctaggccgcagccgccgcctgtcggcccggcccgggtcccagctgctcctgcggcgctcccacgcccccgcgggcgggcggcggggccgggagggggcctcggctggggcgggcgccgggagggaccgagtcggggccggaggctggccgcgtgcccaccgggccggcgccggggcgagcctgggccgcggccccctcttcccgccagccagcccaccccgccccggcggcctctgggaaaacgcgtcccgggcgagcccctgagggcaggatcggagtcgggggcacctggggaaggagagcgccccgtggggcctcggccggtggcctgtgccaaaaggccgggcagagctgcttcggtgtctgggtgaagtttccagccaacccaagaaggaaaccgaaagggaagaggccgagagagaggttaattcctagtgctttggttaccgaaaacagcccggctgggactgctgggctgggaacttagctaagcagtgcggaggctgaaccccaccatctctgggatccgcagcaaatcagaagcccccacccacgataaggggaaaatggggcgcagagggcagggaggaagggaagagaatggaaggaaagcgcgtctggactttgaactgcagccctctccctctttcccttgcctcggaagctccaggcccactcagcaccagttctgtctcctcttttcagccgccttctctctagctactgaggggaaaagtcaggatgaagcgggtccctcggcctccagaaggtgttttattacagtcgcaaacaggtagagcggcagccaccccagtgatgactccctgctccttagattgtagggacgctggcacctcactcatgctcctaagtggccattttgcgccctggctgggcgagttaggcagacaaaatgagcccccaaaagtttaaaggcctccaccaaaggagtatttcttttctgaggtgtcattgtattccatccacgaacttcagttcccccgggtgctctggatctgacatggagtaggatgctaacatctaatcccttctttccctttggaaagatgcatgttttttctcggagtcctagggaataccttagaatactttcatggttgtcattggtacacccatcccttgaggagccctgccacccgtaagtaggactgcaaggaaatacaaaattaagagaagtatgaaccctgatacccaggaacttaaaatcaggtgtataaattttgtacacctaaaaaatatggtacctaaagaggcgaacagcaaaacaagcaagaatgtgaatctttaaaatgtttctattcttcagcgcagcccaggaattctacctaaagtaacatatcctaaggcaacaaccaagaagtgtggaagaatgcatgtaagaag

SEQ ID NO: 59932 - DNA, 850 bp, Homo sapiens
caaaaggactatttctcagttcgtgccattatttcatataagaaatgcatacaaaaagcccttaattattaaagaagttgtcttctttggaaaacccaatacattatgctctgaaagctctagagaaaccccttggatagatgggattaaaatctgaatgttttaatgcatggaaaataaaactctttctaattttatttttgtatcaggaagacagtgccctggacatgatggccacttctttaaaagaacatcatctgatgtgcccaaatatgttaaaaacaggctcagccttctgtttcaattcccaggtcaaaagccagtgtgcaaaaaggttttgttgtcataggtaacctatgttccaagaaaacaaaggcactctgttcaaagtccaaaactcaatttaaaaaaacgtctatttcattagttcaaatgcaaaggaaaagaaatatttgggaatagaaatattttataaagctacaggattccatcccaaatataaaattcaatgtggattctcttcaaaagctttctataccttgtaatttgcagtggggttgtggggactgctggtagatcttcacaaagtatgtctggaatgttgactgaaatcctcaggcactgctgctttcaggcagcagagcccaagttactgccagcaggctgcaaaagagcatctccaggatggcattaacccctccacatcactgggtggccatcattagtgccctcatagggcagtgtcttcttgccagagagggccacaagcaaaggcaagattttcaattgtttttcttctcagaaacagcatctcagcctgtcactcaggctggatgcagtggtgtaatca

SEQ ID NO: 59933 - DNA, 665 bp, Homo sapiens
aggaagtggcagagctgggaagtaggtatggacgtacactgtgatgtgtacagctccatagaatgttagggggcagcatttttctgtctcctaaacgtggcagagtaatccctttaattagaaggaaacctttagattcttcttagtggcttcacatattgctctgtttctaaagagtctttctctctctccctgtgatcagcacaacctgaaatggaggctctcaagtgggaaaataccatccctccgtggcaagtattgttgagggaagcccagtctctactgtcaggcttctcacggtacatctgctctgtgacctggaggtgttacctgcacttccagctccaggaactggctccttaagccagagcttgggttcccgtcaatagatctgggctcaagtcacagccctgccacctactggccatgggattgcctgcaacatatttaacgcaggggttttcaaccaggctgccctgtctggggattaccagggattgggcatttaaaaccctccaggtgactctcgtgcacagccggtgctgagaacctctggctgacctctccaaagctttttgttccttatgtgtaaaatggagggatccactcttcaccaagatttattcattgagcacctttgtttttttggccatcagcaaaagccc

SEQ ID NO: 59934 - DNA, 2837 bp, Homo sapiens
taatttcatttaattactatattttgtaagaatcaatattattaactttaaaacaaaattaggaatgcctttgttttccagatattggatatctggacattcccaagtctgggtctgtctagtaagtattatcaatctgttcccttaaccgtaaactctagaggctcagaatgcctgactctctgggaaaacagcccagcaagccccagcctcattttccagccctcactcaagatggagtcgctgtggttcgaatgcctctgacacctccacaagtctcacgtttctctctggtcctgactcaccagatacagtttctataatggaaaatacgagcacaacccatgtcaggtggtgagtcagagatgttcaactgtgactaaagaagcctgctccacgggtggctcgggcactgacacctacgcagaggaggaacctgccagggagtcgcggctgctacacgttgatgttcttttgtttcccttccaagtcatcttttcccaatctagtcctttctggaactgcagcccctgtcctccctatggcttctggagctctgagtggagtgggtgttctactgtttctaaaacattccctcaaagcctcaggcatctatttggtgggtttctaacaaaacaatcaaatgtcaaaaaaaaaaggcaaataaatcacaaattcaaatcctctgcctccagacaggtcattgcctgatgttttcaaggtggataactgctggtcttctcttaaatgaaatatcaacattgccacattctaccgaccatacattcattcacttgttgattccttttaacaaaaatgtattgatggccaactctgcattggacactactctagatggtatggatttaggatagattctgcctctgtatgccccaacagactgaacaaatgtggcaacctgtggggtttgagccatgcatccccagggatgcttaagtgttcctggcagtgaccagggacccttgggagtcatttgccatgtggtctgaattctgtatctctcatattcctgaaaactgttcagtggaaagaccgggaaacctttgaaaaccttgaaaagcatctggtagcagataaggaagcaaggaagtttcatttagcctgtgcatttggccaaagtctgtcattcagctttgtggttaggattgcctttagagtgtctgacagcaaacttcattgcttttttggacatcctgacctcatgtacctaggttaccattaagtctaatcaatgtagtgatgaatgctgttcaggttaattattatacctgaatacttgcttgcagatatgagtaaatattccagattaatgtgtaatgaaaacacccagaaaacacattctttaagcaatgcacaggtcttagtttatgggattgctttgatgagcttgtatttttgccattgatcaaatcagtaagctcaggagttaaagaacaaatacatctttgcctttgttgcttgccacttggagaagaaaggaagcttaataacttggtaaacatgatcaaccccaatgcctgccctggcaaaggtaatcccccagaaatcttgctcccccactgactttattggaaagtgagtgacaaatctcacaaaaatgtggttttgtggccacgaaagaaattgcttttgtgttgaaacgtcaaaatttaaaaactgacttcttaaattcttgataacattgaaataataaataatttttgatgaaatttcaggtttatttttgtagcccagaggtttagtctttgatgattatttttggcttcagcatcagctgaatattgaatttaacactcaaccattcccatttggccaaaataaacatttgatgcacctgtggtcacaaagaccttcaggctgactctccctcactctccatgactggtctgtggaggggttggggtggggacaatgaagaacaatgagggcaaaggtcaaggggtaaacaaaatagctggagaagttgtgagctcaaaagcttgtgacattagtcttacagcttaccctccactaatctccttttcttctaaaggtagggacagctgcatttctcttttgagcccagggccctggttggtactagcattttagcacctggacctcctcttgtcctgctcctggtctgagttctttggtccagaggccttggtccctctagcactgggatctcgtctcatgccctaagtctacctttgaagctttgcgctcatggctctgcccctactgtccattgtcaggttctctgaaagaactttccatctctcagagtctaagccttggtctcactgcatggccccttcctgtggctgttggctggctgagccccactctctagattgagaaggttctgctcctgtattggctttctctgaaaaccctgtggcaagggcacagctgccatattgattaagtgtagaagcaggcttggtcagactgttaacgcaaaatacactggaattcaagaaatctttggaataaacagataaaggaagaaacatacatcataggtacaggcattttaaaaaatagctcttgtagcaagccagataacacctggtttggaactgacactgatgacatcagttaatgggactgaggaccccatgagatgccagagcaggtaatggggagggggcaagctcactgctacaatatcttacttcatcttgattatatgcctggaagagatgctcagaaatatttgccatagaattaaatgaattggaaatccttttacgtctgtctttccaaagcatgctgttaatatttgatttaacaatttacgatgacgttttcatttttcattcaaaattttt

SEQ ID NO: 59935 - DNA, 2076 bp, Homo sapiens
tgtcaagcaaaagagaagggagaattcaaacattttcagacctgcaagaccctagaaaaagtttacctcccctattacctttctcaggaagtcactacagaaaagtaccccaccaaaaaaagggtcttctttctaagtcaagaaagaagatgatatggggtacaggaggtgacaaagtggtgagatgaaggggaccccaacatagttttttgttttgttttgttttttgttttttaacccaaaccaaaaatggtcaatacccaacatagttttagaaggatttctctgaattctgctgtacaatgggcctccaggttggagtccttcaaaaggttcttcaaatactgaaattaatagaatactcatcagagttgactaaaatatcagccttcattactctctgcctccctactctctttgtttctgctttgtgacacttatccacacctgacgttagactctctgtcagtttatctggcctacatccgtgcctagaaaatagtaatgcttactaaatatttgttgaatgaatgaatagatgaggacatatgtaaaataatgcaaaccctggcatgtaggaagtgctttgtcaatgtgaatttctttcctgaatttctcctaattcaggtaaagcccgttgcttccacaagatgtctggtgccatctggaggaattgcgatccctgctggaatccctacctgagtccagacagactgtaagtccgctatggccagtcccaagattgaaacttctagaaatacaaatactcagtttcggacaggccttctgatgtgtacgcacaaaaaattcctaatttctgacattgagaaaagccttttgttgccatgttttcctacaaatgtgctttcctgccatcttgtggccaatctggggaacttgcaaacagtttgcccggacctcactcagtctaaagaaaagctccgggagctgggcttgcccagagccatttggcaaagcacctgtggtcatttgaccacaccctggggccatccggcttctcagacgcccatgttttcgaaacaggaagccactgaggtcactgctctgtttggtggcttctgctggggacagctgagagaagtgcctgacctttgtcctcccatttagacacagccccactattaaccctgtcatggttggaccccaaggatttgctctgagcattccgtgaacacctgcaaactccttgagggcagggctttatctatgttttacccccagtgtatcatacagcattgaacacatagtaggtgcttactaaataaatgttgttgaagagatactatcattggagcatctaagagcacttcaatgagccaagtccaagcactttacatagattgtcttattaaattaaagtgaccaactcatcctgtttggccaaggactgtcctgagaatcctctcagtcctggaccaacgagggcagttgttcggtccccttaatgcaaattctggcaacacctctctgacattgacactaccattatccccatatttcagagagaggactgaggctcagaattctaagaacttgcccattatcacacaggtcctaagagctccctacttagggacttaaatccaaatcttggactctgcgacctccgttctcaccaccgttctgtgctattccctgagaggcagcgcaggtccttgcgtcgcagatggggctgcctgtctccaaggccttccctgctcctatgacagtggaggtgtgaaggggattggaagtgtcctcgagttctttctgaagaaacacatcaggcaaataacagatttataaaggtgagctgaggggcggtggggagagagagagggagagacagaaaacatgctcttcttagcaattccaccttgatatgattacagactggaagtctatacctagactagttaaccaggaaggcagatgggaacttggatttcctacttcccaactgtggtttctgtttcaatcacagactactgcagtcacctctctgttggaaacaaacattgactctctgcttcctcccaaggtgcaggcactctcagaattcgagagaacagaggc

SEQ ID NO: 59936 - DNA, 1063 bp, Homo sapiens
aaaatcttgtcactaggggcagattgtagaagttctaaatgcctagtttgagaacttttaacgagccttcttatggaagtacattttgtgaattttctatttgttaatctgatctctgaaccaaaattccctctggacatggacctgttgttccatatccccacatcatacctggaggactctaaaccctctctccaatgagagacccctttccgcagcccggtgaggagctttgagcagtttccagtctaggaaccaggagaggaactagaccttcctccttcttaagcctctgtggaagaccctgtccctgtgccccgtggctgtggcacttcccaacggctgagcctgtgctttaactgtgttctcatagctgccctcatcctaaaccccaaaaaccagaggggccgagagaagaggtgtggccccccccaccccggctgacacagcctcctttgtatcacatccatgaggtgaacccagggtccagtgtcctccgcaatagacttccagcttctgaaaccaagggacaaaggtacaaaagagtgactccctggttcttggtgttgcaaccccgggatgatgagtcaaccgtgctcgctcagctgagaatactgctctttctctcactgtcctcaaggaagaatgtggaaaggttcctcaggcctgacccttgtttttatttccttatcggctcacctgggacacctacccactttctcatcctgcaaagcatagaatcaagacgcaactgtgtctgagagcttctgcctccaccatgggaacacacctggctgggaagtcttagctccaaagttctacaccaggcccccagtcatcagcagctccaccatggggaatagagtagcagtcccattttctagggaggattcctggtagctcaactagcccattgagtaagccctgtttgttcttcatggaatggttcagtaactcaaagggcagtagaaaaaaattattaatcaaaaaaacccagcctggcacagtggctcaggcctgtaatcccagcactttgggaggccaaggcaggcgggtcacctga

SEQ ID NO: 59937 - DNA, 1914 bp, Homo sapiens
acaaggatgctgctcaggtatttggtatttgatgatcaacagaaatagttcagagcacctcccagcaaagttgcatagagtgacaggtgggacttgtttgagggcgggacccagaactgcagcccaggaatctgcctgcagagctgagctcggccacagtctccgccagagagggaagttgcaggtctttctggaacaggcacaactggctacaattagaagtccaaagtgtgaaccactcactgcttctccttaggaaccaccacatgctgtgtccggcaggcattctgagagccagaggacggctgcaccctggggctgggcactgacacacatcactccaccaggaccactgaggcagccaccgaccgacattcctgtctacaggctcagatccccctcaacaacgtggccacatcttctgcaaaatgctggccgggggcatccatggcacaactttgggaagctgactgggcttcctcatctttaagaaagcagcgggctgggctgctcccagcagctctggctctgcttccgttcattctctctgggtctgccttagttccagggtgattaattcggaagcggggcaggagtcaagttgcctcctagctgttttgctgacgctccagccccatcaagagccagctcctcaccttctgtaaggcacagaaggtgcctcaaattaagccaggggacagtgcagagggttaagagggggccacaaagagaggccccatctcctcttgggccagggttccctgcggaactccagggtcacctcgccagccagaggcaagacaagtgcaaaggcagccacaaggcttccgccagttagacggtgtttctgccgcccctgccgtcacccgctgggtcccgtcccgctccaagcgcactcccggcccgcagggtgggaatacgaggattacagtgccccacgggcgggcgggccaggatcgcaacctcggcggagtcggcgcctctgggcacctctggcttccgcgccccggccgcacggtgaccacccgggaggggatcccgggcgccccgcaacctcccggcccccgtgggccttcgggtcgccccgcttcccgccgccgcgtacccttcgcgcctcccggccctcggtgccggcccccgccccgcgtagctccgagtctttagcccggccggccccccacccgccgagcgtacccatggcggcggctcccagggctcctgcgacctgccggcgggacgtgctcctggcaggtgctactcctccgacctgacgtccaggcccggccccgttgccccaggtacagccccagctctgcgaggcggggccgccggctccacccggggggcggtgctgcggggagcagaggtccgtgctcccgagccgtcgcgcgtggacaccagccccggcccaggtgcgggtgggccccgacgggagcgcgtggcaggccgggggagagccagtctaaacgcggattcccaggccccaccccccggccagctgactcaggaggtcggggctggggccccagaatgtgcatttctaagaagtctaaggggaggttgatgctgctggatccagaacgacactttggaaaccactgtgggaggaacgcacgcttctgggtggggaggcaaaacacggtgggacagtggtcagctgtgtgtgtgtgtgtgtgtgtgagagagaatgtgtgtgtgggtgtgagtgaggattgtgtgtgagtgtgtgtgtgtgaatgaggattgagtgtgagcatgtgtgagaatatgtatatagtttgcatgtgagaatgtatgtgtgatgtgtgtgtgagagtgtgtgtgagagtgtgtgtgtggctttattttgagattcaacctttgaaagcatttctgggggattctacatttcctttctttaagaatcatcctttc

SEQ ID NO: 59938 - DNA, 534 bp, Homo sapiens
gctgaagagtaagaaactcttcaattagttgcagcattgatacacacaaggtagcggtcaatgttacctccagaaatgggggctgcaagtcacaggacctcattaggtagaaaaatgcagcctcggctgaaggaaaggaaaactttctctggaaggtttggaagcacactcacagttgctaccctgcgagatatcccgggcgtagaaaggtggagcttgtgatggtttgtttaggtcaaagttttctctgcagggtggtatttctgtggctgagctcatgaaccctggaatccggacttctgtaaacacactcttggtctaggccagcggttcttaaactgtgatccctggaccagcagcatcagcatcacctaggaacttgagagaaatgcagattctcaggccccgccccagagctactgaatcagaacgtctgcagtgggtgcagcaacttctcagtagttgcgagacaaatgctgtttcttccacaggcttatttaatccttcattcaggcattatttatttatcacctc

SEQ ID NO: 59939 - DNA, 1497 bp, Homo sapiens
cctcagtttatcacaacattttggtgagccagccaggagtggagatggcaggtttgctgtctcctttgccagtggggctgaagccctgggtcaagggaaacttgtgaccccaggcactgccaggagaacttcagcctggaggggaaatcagctcttctgtgaccaggcatccccacccagcagtgcaatggaacctgagaggggctaccagatgattactaggaacagtgtgctactggaccgcggtaaggttttggggcccaaggcaggacccttcccataaggacagaaggggagcctgatcacctcccatggtgtaactagtagtctgacccagagaggttgggggcagcaagagtggctcgccaattcggatgaaactcacaccccaaccaacataggatgcaagagtggctcgccaagtcagttaggaaaagaaaactggaggtggcgagagtggctcaccaccacagttagggacacaggaactgggagtggggaggtgtgtgtgtgtgtgaaagagattgttccgggaggaaccaatgtggggagtgacgtggggagtcgtagatctcttagcatggacagtgtgctccgagcaaagtgtggggccgacctggactagtggcaaaccgcatacagctaataggagctgccccacagctcagaattgtggtgggaataaagacctctccaaagctaagcagcgtctgaaaactcccataataggaaatggtctggtcagtccataacaaaaggaagagtgagtgagctgtgccataagaggaggaaaacgggaggacagtcatcaaaacctaccccgttagagtgcatgttacagaactttaagaaaggttatgcaggggattatagagttaagctaactgcccagaggttgagaactctctgtgaattagaatggccttctttggtgttggatggtcaaccgaaggaattatagacagggaaataattggccatgtatttaaggtggtgacaggggtcagaggacagcctgggcatccagatcaatttcgttatattgactcatggttaatatagcacagacaagaccggcatggatccagccctgtttagcagcttattgcaaaacacttgtggcccgaactgagccaaaaatgaaagtaagagcagcttctctggcagacacagagttaaagggaaagtcccagagggagcaagaaaggccagtcttataggagccacgagagggagaagagattcctcctccatatgtcccagcctacccccctttaccaaggccaacagcccccaaggaactaaattcaggagctagcacgccccaagtctcaacccaaaggtaaggatcggagcctcaagaggccagggaaggaaattaagatagtcaaggaggccgtctcagatctggctgtgctcgagctatgcaaatgcctctcagggaggcgcgaggactcatttattatgatgaccaaggccaagtccagggggcgggca

SEQ ID NO: 59940 - DNA, 907 bp, Homo sapiens
ctgtgacatgttcagcagcatcccagccctccacccacagggttacagtagcacccccaccctcaaccatgacaaccaaaaatgtccgcagacgttttcgtttgcatcccctggtggactggggcatgggggcggggtgttgagaaccaccgattagtagactttcaaagactctcccaaatccagtttttttgtgatcaaaagtccacatcaaatcctcttagttggaaaacacgcatcactctaaggctgaaaaagatgactccacagctgagctctaaatgtcctcttaaaaatataaaatcccagatcaacctgtcttcacaatggccgcatgtagcagcccctccacaaagactgggtacagtggcatttgcaccttctaagggaccctggagtgcggcctgactgagagagtggatggggaggggatgccgggtctctggctcaggtgttgcgtgttgggagcccactaggtagaacaagtgtcctccacccagctcagctccggagccttcctcgaaaggcaagaggtcaattcatcttctgcctcagcagaatcgtcccttcctttacaaggggactttgctccatgatctgacagacctgggaagtgtgtggaggttttacacgatgactcagtgcacatcagagtcagagacaggacggccgaacactgattccagagataggcatgtgggccccgcccgggaaggagagctgcctgggagatggggagctgcaagagagcacccagaggggtaaatttgcacaaggccactgcgtacactggtacgtgcttccttgaaaatgtgacattttcaggcagggcgcggtggctcaaggccgggcacggtggctcacgcctataatcccagcactttgggaggccaaggcggatggatca

SEQ ID NO: 59941 - DNA, 515 bp, Homo sapiens
ccggaagctaatccaggtttggaagactctggaatagtgactgggaagaaactccttggcaaaagttccatgaaagaagtggaggaggcttctcctcgccccccttctttgggacaggctcagaaatttccactgaaggaggctggagggtgatcatgaggtttttcaaatgattgcacagttacagtcagctgactgggaactacccagaaaggtgagccttttcctggtgtagagggcagggaaggcctgggctccctttgacctttggaaggccaaaggttaggtacaaagcaatgcaatggaagaagaacctgaggggttgataacttgagggaaaaccctcaggtctagccttcagaacgccctggtgtgtgtatctagctcaacagcggatgaaatctagcaaaaaatgaagaacgctctttcccttgcttcttactatttacaaagttatgacaatataatgagataagtgtcctaacttgcattttacagatgaggaaactaaggca

SEQ ID NO: 59942 - DNA, 597 bp, Homo sapiens
aaattcatcaaattagcaattacagaaaacagagaatttataagatataactttattatagttttttttttgtttttgtttttgtttttttttaaaggacttaggacagtctgcagaatggacaggaggctcacctgcccgaagaaggctacccggaagtaggtccccagaagcctgcggcccgagtgcatgacctcggtcactttgctgtaggcccggtgcagcgtgtcatacagatgggccagcctctggaaagcagaacaaagcccatttcttcccatgtgcaaagaggagaatcgattttaaaataacaaatgtgataatggaggtgaaaagtccttgaacttgaataaaaatacacacacacacattttggctgcacaacttgtagtgatcattaatgaatggtaacatttcctacccaaaggccagcccacacgtgaggacccatcacatttccacattagagtaagcaaactctgttttcaagttaagatgcgatgtcagagatggttccccaacgtgattcttggcctttgcttttcctgctctgtttgatatgcctagagaaactggatgacctcccaagcccaggat

SEQ ID NO: 59943 - DNA, 2973 bp, Homo sapiens
gccctcactcaagatggagtcagtctggtttgaacacctctgacaatgggatgagagctgcaacaagaagcagagtgttgcctggttcggcctcagctggaaacatagttgagtggtaaaatcttttgatgctctgtacatatccctgaatgaccacaaaagtaccaaggagtattgatttggaggctacaaagaaatttcagcagataggtggataatgaggatcacctgtactttctacttttccctctggagctcctctgggccctgttctcctgggctctgctctgagaagcagacactgcaggactcgtgcatggtgacttcctgtctggttgctgttgagtttggccaaggataggccccagtaggaggctggggggcaggaggagagtgaggtgggcagttactcctttcctccctgcgtgggtgccctcaggagtcctttactaaaaagctcacaggtcctgccaggtggtccttctatgtaatttctccctttctccctaaggttaaggggtgacgcccagctgctgctaacctcggggcactgcaacatcccttgttggcttccctaaaccctctctgaacttttaaaaacagttcctttcttagactttcttcaatctcccaactatgctacctgcatccttccaggaccttggtactgcattcgttaacaagggagggatctcagaactacatgggccatggggaattttgacaccacaggaaactctgaattcttcaatctacacaggctcagtcttgcaaaacaaaattgtgaataggaattggaggtttctctttattaatcaaaagcagctggaaaggagtctgctcttcggctcagaatcaaggaaggtggaattggtgccaataaaaactcatctgagacctgctgctaagagaattgagtatttttaggtagcgtcccttaaagtcactttagagaacatctcaggcatttaattatatctaataatgtagatgaaaagggcaatgatttttattcaactgtgttatacacttatctcccaccagattttccccaaagtccttcctctctggcagagattttcatctctctttttcttgcaacatcctggcagccaatgcaaaaacgtgcctggtaatttctgctttcctgtcttttagaacatgttagtctttctgcttcccgttagtttcaatctggatgtgcaaggcttgctcaggactttataaccctgctgtgtcacatcctaatcaccacagattgtcatgtactatggaccttgttaaagatttactaagtttatgcttcaaggacaaggtgacgaatccgtcttctgaaaatagctgataaaggggtccttgtcacaggcttagttattacttagaggggactccattcacaatttccccaaggctgtctgcacttgatttcacaggctaattcattaggctctaacataataactatctcagcctgttactcaatcagatgagcaaatgcaagcttcattttatcagctctgcaggataggtcactaaaaatagtctactttccaatctttaattgttcctggcatcgttgctttccttatctaattccaaacaaaatggtacactccagaggtctgactcggcagaggtgccagggtggtttctgcaaggagacaatgcagtcatgcctcttctcagagaaaaactcagttgaaattcgcctgaagtgaggagttcaaagccaagagtatgtgggccttgatccttcagtggcaggtttcatatttgagagtaaaaagtaaaacaaacaaacaaacaaacaaacaaaaaagaccatccacccaggcctttcaaggtggagaaacagcagaactgttaaaaccacgtaataaccaatctatttctttttttgtaggatacctagaaaactttattggggtttaaattatcttaatatttaaacatgaagtacactcaatatgttatccttttaattcatgcttagtttttaattttgaggaccatttgagactagacaatttacaacagtggttcttaaactttttgagctcaagaccccttcgtagattttaagaattattgaggacctcaaagtttatgtgactgttctctctcaatatttacaatactagatatgaaaactgaaacaaaattaagatttacttattaatttaatgaaaacaataagcctattacatattttaaaaatagcatttgtaaataaaaaaggatattttttccaaaaaaaaaaagagtgaagagtagtagtattttccatttttacaactctctttactgtctgattttgcaagataagcccaaatgtgcatccattctgcacacagcctgtttgacaggctgtttgggtcattgcgtacaaagaaaacccagcctcatagacattcagtagcaagagtaccgcctcaaagactcactgaaaggttccaggaccatgtttagagaaccactgacttatggcctagctcatgtcatgaggatgtgtgttcaagggcctgcctccctggcatgagaatggttaaaagccccagtatcaaccgtatgccacaccgctgtggccctggaaatcaggatgaagcaggtgcagcagaggcggaagagactgactcctttcttggcttgctctttcactccatgggagaaattggacaacttcaatttccttaaaacatgggcaggattaaaaagctttccctcagctgtttcattctgccctgggctgaagggaggcaggtacacacaaagaacccttcaggcagataggcatggaaaaggaaacagagtgaatgagtgaatgccagcagaaaactggcatttattcaaatatctagttttatgtcaaaactcgccagttacagataagtggctgcaaggctaacctgttttagcaagaaactggaatttgcagacattgctacggtgatctaatgtcaaacttgctggtct

SEQ ID NO: 59944 - DNA, 812 bp, Homo sapiens
actggtgctggagacattaatttaaaagtcagattaaaactaagaaaactcatgagccagagaaattaactgctataaagaatgagaaactttatgaccaatatattggaacttttaccggatgtgctcaagcactgagcctcacttcattacaatctagcccctcatgatctctttccaaagaaaggagacactcctagaaggggagaacggcagaagcttttgctgctctgcatcagttgtctggagaatcatctcagttagagctatgtgtataagtagcagctacagggaggaaaaagccctggtctgatgcactagcaatgcaaacagcaggctcccagataccccagtacctgaaagcccacatgagttcaagcacgcacctcgttgaaatggacatcctgcatccccacgtcttccatcatggaggcctcctcgtcgatgtttggggtaatgaccctgaaggcggtgcatccttgtctaaacacgcctaggaagagaggaaggagggacagtcagagttaggaacctgaacgtgggtgaaccctgagggtttttcctgccctgtgtgtttctgtgttgaatgaaataacggattttgaaatctcttaggcaccaggccagcattcacgggggtacctggggctactgtgtgcttttcttccctatagtgaaccctaacctctttcactttcttttccttatccctttttatctacctttattaaaatgtatgcaatctctaaatattaaactataaactgagaaataggtattaaatcaaagtaatagtaaaataacaataagtg

SEQ ID NO: 59945 - DNA, 2955 bp, Homo sapiens
accacgtggtgccctcgtctagaccctcacccctagctactagccaacacacaccagcagaggctgctccacgtgcacgtgtgtcaacgaatgttagcagcgtggcatgcactctgatgtgtgcagagagaagtctgttggagagtggagttatgtactgtccagtcctcggaggcagagttcatgcctcccacgtgtgtccctcttgcagtacaaagcagggtcacatgcactgaacaggcaggaaagtacatgacgggttactgagcacacacacaaaaccagacacggcaagggcaataagaaatcttataaattagctgctttcgtcccttattcactgggtatactgggttgggtagtgtcccgccaaaattcatggcctccctgagacctcagaatgtgatattatttggaaacaggctctgttaggtgtaattagttaagatgaggtcatactggtgtgtggtgggccctaaattcaacattactggtgtcatagacatatggggaaggatgctatgcgaccacggaggcaggaactggagggatgtggctacaagccaaggaacatcaagactgctggcaacacaaagagctcagggacaggcatggaaccagttctccccaaggacattcggagatgtggccctgctgccactgcaatcttggacttctgcctccagaactgtgagaggatacatttctgtgtgaagccactcagtctgggtactttgttatggcagccatgtaaaactaattcacagaggaacagctgaagcttagtaagttcttcctttctttttttgagacctaggccacatatgtcattaaagaatcttaaattcttagaatgatagaaaagttacttctcttagttattcctttttattatggccaatgtgtggtttacattaaatttatagtcaaaactgtcacgttaatgtgtactttttagcatattgagctccttgaaaaataaatatgtaaaaatagttaaaattttcagacttagagtatgtttattaattcaaacagttataaaagtttaaaagtcaaaacttgcttgctattgtaataatgttgatcatagctaaacatctcaggcacagacactgaatgagttctcctaggcgcacagactgccttacagccaattgttttcttcaattccccattttacagatgatgtcattgagcaatagaggggttaaaaaactggctcaatgtcacagagttagttaatattggatcttggattcaaagtccaatattacttgtactggagcccacacacccaactcccagccatgcagtctacatattgaaacacgtcagctctgcatagaagggaatgctggaatacctactgcatccacaaaaggaaatggactaccctacagaggagaaagcaacacctgtcattaccttaaataacaggaggaattcatttgatcataaaatagctgaattttagaactacagaggaattttgatgtgtattttaattagcaggagactgtatgaataggtttaagagcttaaacaatgctctttgttgacaaaaataaccccttacaatttgttttaaattattaaaatgctcagctaactatgaagtcaccctaagcttcatactgtttaaagttttgcatacttttaattggtttttgattaatggaataacttttctcaaaactggctttttaagtgaatggggcctcactggttttttcaaaaacccattcaagcggctggcagggctactacctctgagagatcgccatttttgacatggatcctggccatgctgtcgagccacgtcttcctgagctcgggcgtgctggcataggatttggccaggctgtactggaggtccaccagcatctctgggtcgttctcatgctccttcatctgggcggtggccattagcaccgtgcgtatccttttggttaagtccttcacatcagaggagaagctggtgtgctaaaacaagggtggaagaggaaaggacacatggcttcctctgtttgctgcctgtccacaagcacctcaggtgctgatgcagagtctcagggtgaaactaacatgggccaggctacccaccttaataagccggtcactgttggcacagttgttgatgatggacagggactgctggaatctggttcccccaatgccaacaacgtctgctatcagctggctgacagatatgatgaccttagggacacacaaacatgagcaaatcaatttaccttcaaatgactgcccaggctgggcttctgcgttcagttaggatgtgcctaaggacccagcaaagtgggggttggggggtgctttgagcaggggtcgctccgtgtaggaaacaatgtctgaggtattttcttcccctttaagaataattacagaaagtgattctgctatccttaaaaaacactgtttgcaaagcaaaatgctgatcaggagagcaaagggagaaagaaaatgagataagcccatccacttggatagttacttacctattaccttctctaaccaagagggagacatgatttatttctcagttttcagtttgaacttaaatgtattaaatatgctatgggtagactgtcctttgcaatactttatcagaacatggatagattaactatgccacagggggctctgtctttttttggctcaatgaatagcactgcctttacccagttgcttgagctaaagcatggaggccatctttattttccttttccttcaccacacccagttacaatcagtcaccaaatgttgtcaactcaatctcctcttccttcttacctcaccatccctggtctaggataccatcctctctgacctagctttgacaatggtctccctagctgaggtctagactacccttgacccatcatcaacacaggagtccagaagatctgtccaaatatgcaatgatttggatat

SEQ ID NO: 59946 - DNA, 565 bp, Homo sapiens
ctaaaattacatatgaaattgtatgtctgtgagtttcctaaagaaaggccaagggagttcacctagttctcagaaaagggaccattggaaggtccttcactcatagaacaaggagaccgaggcctggagtgaggagctagagagccaaccaaagttctgtggtacaaatctcttcccatgggcaggttcacattctatttaaggaggggtaacaacaggaatttaaacatcaggcatgaggtaaacaaacaaccagtggatgccaatcagcagtgtcaacatgtgcacagtctactcatttgttgacacaagtcagtaaatggatcatttgaagcctaatgccagttggacaactcgaattcaatagttgtatctccaaaacagggcaaataacataaccaataaaaactgttttctaagaactttaaaggacattgagaaaatgctcacactatcacacacacaagactaaaaaaaatacaacagaatgtaactactgattacctctggtacatggtactattagtgattctttttctctctaaagtcttctatattctgcaag

SEQ ID NO: 59947 - DNA, 1787 bp, Homo sapiens
gacagaaccactccccacactaatgttaccattcaaaaacatgcaaattctttctttttaatgactgactcagattttgaattcatttgttgattgctagatgatgataaatgttcatgcttgctacagagtttaacaggaaaagaactaatctttagcccaaagttcaatgcattcatattttaagaagatttttctccaaaaactcatgtaaattatctcaaaaaaaaaattaacaacatagactttataataaatatcttactttctgtaattgatgttttttttaaaaaaaagtatccttatcactttttaaaattaatttctggtgcttttatagcataaaattattttctgcaatagaatcgcaatttgtaacattgtgccaaggaaatgtctatgaatttaaaagagatcacttcaaatgttatccaggaactaattaagccatgagacgtgggtcacctgaacactcttccattacagatgaaggctcagagaaataagctaacttgaccaaagtcacccagctggtatctgaaatatgagccagggctctctggctccaaagtccctgctccttccagcatgccacattaaatcctgttaacaataatgaggataatataagaaggaattaaaaatcataaagtatttacacacataagattctgaggaacatgaacttacagttctttatgtagttacattggttccttaatatagatgtggtcctctatttgagaaacctaaagctaagctaggtctttttcatcaactgaaaggggcagtataaaaccacagagccaaagagcatcgatgaaaatgttcagtaaggggtcaggtgtcactactatcccaggccccctagcaaaacttataaaacagcaaaggtggttcacacatagccaatgtaaagcttttgttttcaggcttgcttcatgttccaccttcttccatggaagatgaggaattattcctaatgttcctgatgagaaccagagtaaattcaagggctgatgtcacagcagcctgcttagggcattccaaaacacacctctaaagagagggagagatttgattcctccaacttccacaaatgaacacacacaaggacacttctgggaagatatgcttcttgatttcataatagccagtacctgggttaaatatattatgtaaccaaagaaacatcctgatgattcaaatttcctggggagaactaatgataacccatcagagtcatcaatgtgggtcactggaggtcaccaggagatcaaggtacattttaatgctaagtggcttcagtccaaggagtgccaatgagattatacactgttaaaactgattccaggctgggtgcggtggctcacgcctgtaatcctagcactttgggaggcctaggcaggccgattgtctaagctcaggagttcgaaaccagcctgggcaacatagtgaaaccctgtctctactaaaaatacaaaaaaaaaattagccagaagtggcggcgtgtgcctgtagtcccagcatcttgggaggcagaggcaggcgaattgcttgaacccagtaggtggaggctgcagtgagctgagatcacaccactgcactccacacttcagcctgggcaacagagtgagacaccatctcaaaaaaaaaaaaaaacctgattccaaaattcattcaaatatacgcacccctaaaacccctctttgggaaagataaggctgaggctaggtcctcttcctcaactgaaaggggaagtactataaatttattaatttatatga

SEQ ID NO: 59948 - DNA, 1044 bp, Homo sapiens
accaaagtcacagagaactaaagtgtctgaactaggacttctactctcacatccccagacttcagattagaattctttctactctaccatgatggttttctgtcaggtcccagaagaacctcaaatgctccctacatatagatgtgctgagtaaataaaagttttatatttagagaggaaaaaatagagatcaaaatgcctggccaacttcagggggtctgtgacatggctctgatatgaacaccatgtcttttcttccaacttctaatcatgaaatatattcaaaccagctgctccatctagtggattaatggaagatcctcaggatgagagaaaagcacatttttaatactgttcagctcacacaaccctaaagcattcatctgctatcccatacctcatatccaaaatagcaacactagaaaagagattatgaagattacaagctttcaggagtcaaggatgaattcattccaactggttaaaaccatattccaaatttgcttcctccctcatttccccagtttcccccaacataagtacagagtcggcaaagcaggtcacatcacaagtcactgaggtaacagctctccagtagcacacccaagaggtgtaactccaaactgaagctgaagctcccagagattccacagccccttgatatactgtgtttactaatcatcttaagcctaagaccttctttccaaagagaacaatatgtggtgggaaaaacccaggctcagaagtcagccaaaattcctggttctgtcagtttctgactgttgtaaccttgagtcaatcattaaacttctgcctcagctcctcatctgcaaaacatggataatggcacacccctcaggggtgccatgaggatggagaggtgacaaaaagaatgcacctaacacattcctgaaacaccgcagcactcaacgaacagcagagacagataggtggacctgagtaggctccaatttaagggccctttatctgttttccttaatcttcaaatttctattttaaaaaggtaacaaaaatggtgagcag

SEQ ID NO: 59949 - DNA, 2004 bp, Homo sapiens
catggcttctggagttaattaaggacatcgtcaagatccaactccttgcatattttggggatctttgcacctatggagcgtattctaaattccaagagaaataaatctcttaaatgccctgttttccctagttagcttaaaaggaaattacctgcatatagctacaaaatgctaattttaggagtccttaggttgtcaatagctacattaccataaaactaaaaagcctcccatcccatctctctagcctgttccttggagtcctgacccacaattctcactgcatgtatctcattcatggtaatttcttctgccactacccagaatctttacaagagaaatatcctatcactactcccatgaataacagccatattaaacatccggtttctgaatcttgcaaaaggagtgtaatagataagtaggtcccagtatgtttctactacccagaaggctgacttcagtcttgacaccttcctacaaactccatctgcaccggtcacaaccttccttcttccttccaggagcaaaatagccaagcggcagaggaccctaaaagaggacctcaacaccaaagctccctgggtcccatctgtgttcctttgtccactccagattccatgctccttgaggacaaggatagtgtcttcaccaaatgtttacctttctttagtgtttgttgagtcaatgaatcatgagtgacaacctgagacctactcaatactaaggtatgagagctttaaaaacttctaacagcactgcatttttctctgctaacatcatcatcaagaactcaaaaatgactcaagatctgctaagatcctcaactaaaagaggacactgaatcctctccaaattccagggaaagatgccctggcctgagaatgtggaaaaagatcacaagggaagcctgcagcagagaagactggattccatctggcctctgcccctcctctcccaaaggtcactgcagatggaagtgagctccaggtctgcaccaggccagactcaaaaccaaatgatttggtcagaaaggaatcaactctgcagcttaaatcaactccaggctggtcagtgacttctccattgtgcaggtgccacccataggcaccaggccaagaccataaaggagtaagtagtatgggtaaaataccattttcctgacatgaaatgcaatgctcactggaatatgctgattctcccactgagttgcccaagagatggagaggtagggctgcttcggggcccattgcccagggtggaggatatccaagatgccaagattccacattgtaaggacagaagcttttttttttttttttaaatgtctaacaactgaagccatggaaaaaacatctgtagttcccccaaattctgggagctattctgaaactctcccccatcaaatagagttccctaagcctacagaaagaaccgatccccagtaccccacatgtggttctccacagcccataatcttcaaccccccacctcctgccccagcattgatactctagaccaggatatggaatcaccaactgtgactatcctcaattcaagaaaccctcatctgctattggtgatcccttttctctcatgccacctcttacacatgaaggaaatctcaacaccaatgtgtttagtaacttcgaggagaaaccaacactgtcaggaatctccgcctctctgagttttcagtggagaactaagaaagtctctttaaaaacctaataccctggccgggcgcagtggctcatgcttgtaataccagcactttgggagccccaggtggcagatcacctgaggtcagaagtttgaaaccagcctggccaacatggagataaccccatctctactaaaaatacagaaaattagctgggcacagtggtgggcgcctgtaatcccaggtactggggaggctgaagcagaatcacttgaacccaggaggcggagcctgcagtgagcccagatcgcgccctgcactccagcctgggcgacaaagcg

SEQ ID NO: 59950 - DNA, 2853 bp, Homo sapiens
ccccaaacgtcacaggaatttgcaccaatactaaattagcgagggttcccatcatgccccccaagccttcctaaaaggcggccaaacttcaggataccggcttggaggtggggggcgcaggagaggatgccgaagtccttccctcctggagttcagccaactcaaagggttagcaggggcatctcccaccctgagcgcagactggatgaggaagcccccacctcaattcccctgcgcccctccaaaacatggaaggagagggaggccgggggagggatacgggggagggatgcgggggaggggggagagtgtaatttcccagttgacagaaagcaggtaaattgggagagagcggggtgaaaagagtgacagggcgacatcactctgcggaaatttcccaggaggaaggggacagcgatggggacaggatcttgggtggcggggaggggtctgggagttgcagcccctccaggaccttctcttctcccctgtccaactccctcccgccggccccacctcttgattccgcggacccagcagggtcggccgctctgcctcagccctgccgactaagaggcgcccggcccggggcccgcagctgcctgcgcccccgccatcctcccccggcccgcggtcgtcccgcactcaccaggagcacggagccgcgcaccacctcagacacgctctgccgcagctcggccgccgtgcccggcttactcagcgcccgggtgaacttccgagtctccgccgaggcggggagcagcggcggctgcgacatcctcctgcccccgccgcctccgcctccgcctgctcccgcggcccggcccggccgcgcggccgccaggtgcgccctcggcgcccggcccgctccgcccgccgctcccggcgccgccgccgcctgctccccccgctgctcgccgcgagtccggccgccgcagcccaggccgcgccctctgcaccgtgtcacgccccaaggcgcccccctcggcgtccgcggccccccgcgatcgcagcagcgcccgggctcgctccgggcgaccgtgcgtgtggcggcggcggctcccccatgccaccagcctccctcggcgaccactcgccgggccgcctcctcggggcggggtgtccggcgcggcgcgggcggggcggggcgcccggacggcggaggaggggccgccgcggcgggacggcgggccaggcaggtcggcgcggcccggcgctggagctaggcggccggactggcaggggcggcgtgccgcgcgggaccctcactggggaaggtggggggtcggggccgcctccgccccgggccgcacgtccgaagaccggaggaggggactgcgcacgccaccaagagggcgcacagccgaggctggacgatgcgcggtttcggagcagggtttcctgcccagggagcccggctgcgctcgaggggaccccgaagtcaccggcagggtcggagctcggtgcaccacgccccccctctgcgcccggggcctctgcggggacagaggtctcaggaaagtagcctttatttatgtggcaccgatcggaacccgcggccggccaggcggacctggacggagcgtccctgctcggaacctggcgcggggcgccgcgcgctcgtgtggcgcctcggcctccccaccgttcagtccccggaggcacggagctcgcggcgggacgatgacggttgggccgggccaggcgtgggagactcccagactccggcccgccgggacggccagctgcgtcaccttggacgtgggcaatacttcggagcctcggttatgtcgcctgtaacctgaggacaacggcctggaaggggctcaggtgacacggcggccctcactggggccgatttagccggtctgccgcccctccgcgccggaccgccaggcggggtaccagggaaactgcgatgcgccggcttgcgagcccaccgtgacgcagagctggcggccgctagcgacagccaccctgtgagggactttccccccaataccctaaccgctttcctgtccctaagggcccgctcccgccccggctccgtttctgtctctctgaggaagcccggcgcagcctaaccctcacagggccgcggagagggcgcgccaggcggggatttgcgccaggcccgcggcgcatgctcagtggttggggactgggcgggtaccccgggcggggagcctgactgaacggcggctctgctgattggtcgggctgctcacgccacgcccgttgccttccgatggacagttccttacctgccgggtcggcctccgcagagagtggtggtcttgaaaacccagttttgggagaatacctgccgcgcctcccgcccaaatacccagaggtttcatagccgccatcgctgcggtggaggaggccgcctgttgcgtcccaccccaccagaaagcctaacactggcctgaagcgtaatcttaaagtggtaggggaaaataccgatctagcgcagagagcaaaacacctccgttctgggtttaatgggcaggtctggaggtgaggtatgccgtccgcactcaataattacttgcaggatcggattgtttctccagtgggtggggactgcaggatgtagcattgagtgagcctggcagattgaaagataaaacaagggtgatgataaaaacaattacacactaacccatttcctcctccgtgaaatgagggaatggcccagacattttccagacctcttctgtcctaagagtggagctgggtgacagagcaggtgcaagccggcctttccctgcctccccggggaacgcactctgttcggtgagagcaactcagctcgcattgactcctttcagctgcaggagtgtggccgtt

SEQ ID NO: 59951 - DNA, 2695 bp, Homo sapiens
ccaaaacacttgtcatttctttgtggtgagaatattcaaaatcctctcttctagctattttgaagttaacattatcgttgagtatagtcatccaaacgtgcaagagaataccaaaacttattccttctaactataactttgtgtctgttgaccaacctctccccatcttcctccccactaactctcctctgtacaagaataaccactcttttactccctactttcacgagatcaacttaaaaaaaaactttttaaaacgactgcatgatatgttttcaggctcacacatttaaaaaccgtgactttggcaaagagtaacttcattctgctggggaaaaaaatttaaatggcctgagtccggaagctcgccagggcagaagcgcagggtcgctccgccgggctcgccgggccggggaccccccagccacccgccaccacggcggggagggcagggtgctgactccagggaccacgacagtcggccccggtggtggggattccgcgcgggacccacgcgggaacaaagaggcggctggacggcccagctctccgcacccggaaggacctgttccacctctccggctcccgtacccctctatccgcatctgagtgaccagatcccactgcagtcaacagcccgcggggtagccagcttcgagggaccgcccggaaagacacaacgcgcgtggaaggcgccgggcgtccagtctcgggagagattagaagtggcgctcctgcccagcgccggcaatccaggggaatccgcggccatcgcggatccaccaggggtgaggcggcactgagcacaagtgtgaggctctcgggagctacgcctccgcttccccagtgccacccgtttttacctcaggcggttctgaccgccatcgtttcaacctggagaggtgagccctcccctaccgacgcacttcccttccccggcaggaaggagggcgctgacccagcgggcgcacgcccctgactgcgcatgcgccgggtgcgccgttcgtcagcggcgagtggcctcgcggcgccggattcgtcgctccgccaagagtgcgcctgcgcggtcgctggggctcgcacttcagcttcccctcccccggcgccctctggggctccgagcccggcgggaccatgttcaccagcaccggctccagtgggctctgtgagtaccggcctccgccatcctggctgccccctacacgccaccctaggcacctctttgaggaggctggggcagcggggaccctcgggtttgccggaggtggtggggccgaccctccagacccgcgtccgaaccctgctagttcccggtcttgggggtcagcggaaaccgcccccatttcggcctggaggggcgaatggggacaaagccccgccgcccgccccgaccccacctggtatccccaggtgctctgcccaggagtctcttggggccgctgcaagtgggcaggtgccctggtgttctcgtgggccggccccaggccctttgcggagcgtgtgccgcgctgaaggaaggggccgtcccccttaccatgccccattcttttaggcttgggggaccgaactaactccccccgcccccacttgcaaagttcagcctccgctttagaagctgacctctcagtttcacttggatgtgtttcttcttcagtctccaagaagagtttttagacaaacacacactgatgagagtgctttcaagtggagggaagttaggaagtcgtggcgagggagcgcagctgtgctgctggatgttgctgttttcctggcgtgttagcggtggtcagcaggtagggggcggagtatttttacagccagttaaacggcttttctcactgagtgtgtggaattgactttcggtaaggtagactgcgtgttaacagttaggcacgggtacagcaacggagaacagctctaattttgcaattgcttgtcactgttcatactccatgtgaagttaatgctgctggaggacagaaacatctgacatttccaaatattaaagatctgttggccgggcgcggtggctcacgcctgtaatcccagcactttgggaggccgaggtgggcggatcacgaggtcaggagatcgagaccatcctggctaacacggtgaaaccccgtctctctactaaaaacacaaaaaattagctgggcgtggtggcgggtgcctgtattcccagctactcgggaggctgaggcaggagaatggcgtgaacccgggaggcggagcttgcagcgagccgagattgcgccactgcactttggcctgggcgacaaagcgagactccatctcaaaaaaaaaaaaaaaaaaaaaagatctgttgggaatgtcatgaatcttctgagaatgtgtgtctcgtcttatagtctgacagtgagttagtatcagcgccacaggcataattttaaatcttcctcacttctcaacttctcaggttttgaagtggtttcaatatttatgatttcctttgtttcataattaatttgatttatggcatctttcatggattggtcccggagtatgttacaactactaagtaatcttccccaaactaccctttagataaagagcattaggactgtagctgaagctgacagttcaagaaggcaatgtggttttcctgggatcacacagtgagccaggaactactggttatgaaattaatggtggaattcttcaatttcaattg

SEQ ID NO: 59952 - DNA, 509 bp, Homo sapiens
ttgccaatcattttaacaagattttagtaatgtttgaagatctgtgccttctgaatcaaagtggcgtgcagaggtacttaccttatggattgctggctaattgtgaaaggagactcaggcttttaacactgcaggaatttcaaactgcggtctcagtggccagagtgtcttaccagggagcagacctaatgtatccagtttaaaagggcgtgtaagctgttgccagaagtctacatgaagccacatgataagtgattttgtatttgaacatgaagggcagtggcatcattgacctaagctagagtttcctcaccctcagcacttttgacattttagttgcataaccctttgcggtgggggcggtcccgtgcactgcagggtggctggcagcatcactggcctccacccagtgtatgctgttagcaaaacctcctttccccagtcttaccccagtcatgacaactaaaaatgtctccagataatgccaaatgacacttggggggcaaaat

SEQ ID NO: 59953 - DNA, 554 bp, Homo sapiens
gcatgagccaccatgcccggccagctggctcattatctgttccagggttctcctagtgtacttcccataaagcagaggttggaaagctgaatgctctatttcttaaactcccttgcctggagttctggatatgatttaggttccattattcagaaaaacgtgtggctcttgaattcagtatgagccaaggcatatgagatagccattttcctggtgcagttctacacatccaacggggtgccagagttcacagttcaactccctgaaactccctgatccctagactctgccaaagtggtttgaccttggagctcacagttgatgtaattaacttttgtgatttcccagctgcctcagtgtgtcagaggaaacagttctcctggtagaccagtccttatgtgttccaggagtctattcctggaggcgctggatctggccttctagccttttcagcaattgtataagcaccgaattctgtgtactaaatctgctgcccaaaatagctgacaagatttctgttatctataactgaaccttggctgacagaactgcta

SEQ ID NO: 59954 - DNA, 707 bp, Homo sapiens
agccttgagacttctgtaaccatacattataaatgaccttcaagatgaagacaaggttggtttataaatggaactaatattggtgaggattttaaatgtctagaaaaatcagtagttgaaaaactgattaaaacactatgtaaataaaaaccaagattttagattgtgtttattctctgataaattgatcgtgtgactgggtcagctgagacatggcagttgttttctgctggtgtctctgtgatggccatctgccaacaaaggtaaccgcagagtcagtacagtgtgaaagtgtttcaataatcagatcttttacggctttttaaaaaatgaagacagtgtcttgacaatcttttaccagaactttgaatactaaatgattagaattttgctagctcttctaattcaataaaaaacaattttgttttactaagttcaattttgtgttgatttgcactgcttagtgttctgcagtgtggtagaggattttgcttattgcctaacactgctatgactaagaaaaataccgtgtgcagtgtctggaggctgctgatttttgagtcgtgtacattttttaaaataatactacatttaaacaatcacattggacgtttttcttctagatgtccggtctgtgctacgacagcaaaatgttccaggtgcatcaggtgctctgcatccccagctggatggcaaaattcttttct

SEQ ID NO: 59955 - DNA, 560 bp, Homo sapiens
aggtaattacctctcttttcaaagctcatttctcttgtgcttttgctggtcttgatgtgtcacacaacagcattcacccccaggatctactgctcttaaagcaatagaaagaacagctcaatttcctttatcaaatatcaagcatgaaatataggtccacgtgtaaaataaggaatttgataccagtcataaaaatctacccacaaacaggtggagaataaaaaaaaaaagcaaaatgcctagatcaataaaatatttcataaacccaagcaaacactaacattactgagagctggatatctaatctgagtcattacccaaatagggcgactcaagctatgttcacccaatcctggatattttcattcgaaaggcaaggctttcctggaacaaggtttgctaatgccttaataaagttagtcactgcaaacagagggaactcagctagctccacagcaaccgctcatatatatatatatgataaacatgtttttccttatagagcttttttcaatctttgagcatgttttaaaatgctttatttcagggtgggtgaggtg

SEQ ID NO: 59956 - DNA, 1813 bp, Homo sapiens
ttgaacctggaaggcggaggttgcagtgagctgagatcctgccactgcactccagcctaggcaacagcgagactctgttgcatttaaaaaaaaattgtggtaaaatatacataatagaaaacttaccgtctaaccatttttaagtgtacacttctgtgacattagcatatttgcattgttgtgcagtcatcaccattcatcccaactttttcaccaacccatactgaaaccgtatgccattaaacagtaaatccccatccctccttctgcagactctctctacaaccactgctctactttctgtctctatgaatatgacagcaccatagtattggcggtaaatcagagttggcaaatgcaatctgaagcagaggagaggagagagtcatatccctcaagttttacagtcccattaaaagtattagtactttgagaaaaggaccgtcacgatcatggggagaatgaaggaaaaactccatttctttccagtttgcaactggaattgtcactttcgtctttcggcacgacagcgcccaggccacaaaagcccacagggcagggcctccattttgtggcctgcgtggagggcggggcggtctctctccgccacgccccagcaccgggtagacaccgcagccacgtaaccaaggaaccccgaatgaggcgttggccaggtgaggccggatccggaagtagggggaccacttcgccccgcgtacgagccccgcccccggcccctcccaccagacccaggccgacctagatgacgtgtccgagtaggagttggcgaggtgcggccgggcggccggccctgcgcatgcgtgatacttgcaccggtcgagatggtagcatgagtctggaggtcattttctttgagaaaggctccgcttctccgggtttttgctgatgccgatcccgggggattgaggaaacattgagctctggagtggaaaaggttgcagacttttagactcccaagtcgttgtagtctcaatctctagtggctgcgttactgcaggaagtcacggaagcctctcccctttcttaggcgcatccttggctgtaaaaggaggttaaaagcccctggaaaacctcaggtttatttcagctctgaaagtccggttccaaatttagatccagcactcttgtggcctggccagtgatggtcgtggagtgctttccccgcgcctgcggtctctaggctctgtggatgtagaggtgtgggatgtaggagcaggcccttacccgtggaattcacatataaatgggggaatgagacagcaaacaaacaaacgtgatccttcctgatagtggtaaatgtgggatgccgaggtttaagcagacgagtggtattaagggatttcaaggttttataaaattgattttgccaagagtggaagctgagaggctactgcagtaagaagtccaggggaactaagaatttggcttggaccagagtggtagctgtgggcatggaaagtactgaaaggatttagcccatagtttagcagcccaaccaacgggacctgctgaaggactggaggtaggtagtgaggaaatgagaaatttaggttcttctccagggttggggcctgaaaagagatgggcagcgatgccgtttcctggaaaactgggagaggaaatgtttgggatgagggcagtgagatataatgaaggtcaagttttttttttgtttttttttttttttttttgagacggagtcgtgctcagtcgcccaggctggagtgcagtggcgcgatctcggcttaccgcaagctccgcctcccgggttcacgccattctcctgcctcag

SEQ ID NO: 59957 - DNA, 1985 bp, Homo sapiens
cactaaaaagcttctccttgaaaaatactcagaagatgcaacacacacacacacacacgtgtgtgcacttacacacgcggacaccgtctcacatcatcagtgggaaaagtgatagaatcttgctaaaggctgatcataccatattaatccgattcgccagaactactttcttcactgagctctcaggtatgctcgggtcttcctttaaagaaaataaatgtcaacgctacactctatcctactcccattttcctcctcaccccatttccactctcccttaaagagatgtgtgcacacaatcactgcccaatgcaagaatgcaccactgcatccaatgcttggaaattgtccgtgaagatgcctttgagtagctgtctatttgaggatttgtggctaattcctccccatttgtttccttagcctgctcccaaccaggtgtctccagaactttttctctccgccaccaactccgcctccagacagaccgcaggtgctttctgtcatagggactggcgtgccgcggacagtgtgacaaagaaactgtatgatggatatgagaacttcgtaagacccagcagcaaacggggagcggctggcgagcgctccacagcccccaagcgtgggagctctagatcggaatttgtaatttggaattggaacgtgagcgccggaacagctctcccagcaaccacctctcccagcaaccacctcagctggcgcgcggaaaacccggaaagtggatttcgcccccgctccctcccggaaactcctcctggtgcctgcgaccgttctcactgagcatgtgcagacggcggtgcgcatgctctgttgcggtccgcttcggtttctgttgcgggacccggggtgtctcctagcgcaaccggaactagccttctgggggccggcttcctttatctctggcggccttgtagtcgtctccgagactccccacccctccttccctcttgaccccctaggtttgattgccctttccccgaaacaactatcatgagcgcgaggctgccggtgttgtctccacctcggtggccgcggctgttgctgctgtcgctgctcctgctgggggcggttcctggcccgcgccggagcggcgctttctacctgcccggcctggcgcccgtcaacttctgcgacgaagaaaaaaagagcgacgagtgcaaggtgggtgaggcctgacgagccctctgatgcactgttggaaggggaagtcgtccctatccgggggagctgatcctcgggtgggagcgagggaagggggcgtagcagcgggtggggttgagtttccccagaagcttttggggtctgctgggctgtgggtggggggctctgaaacagcccttgcaagggtagtttctggaggacgcagtgggcctcagactcgcctcccgtcttgcgggccaagtggcacgagcagctgtattcagttttcctggaacagggaccgtgtggagcgcccttggagttgggcttcacgcctcagagctttggagttggatgtatgcaggtccacgcgtgagtgttcgctcacagccctgtaacatgtacgctgaggaagcgggtgaccgactccctacatgtgagcaacactcagcctagttaacagtttccattagcttttaacttcattgcttcctgtttaattgcattttcctggaaccttctagttggttaggagagcttgttctttctaggactttgatatctcgcttcacaattagaagttggttccttatttgtggagtataacacccagagccacacaaagtgcattaataaagagttgctgtaatggttgaggcacttgatttctgagttttaagtgtaaaagattttaatacacaaaaaaagatacgaggtctcactattttctctgagatggttttaaacacttaaaaggggcaaatggtgggagaaactggtgttttcctagggcaagtcttgaaaactttgatctcttacaacattca

SEQ ID NO: 59958 - DNA, 435 bp, Homo sapiens
ctgtaggatctgtcgatttaagtggagtccagggcttgttggaggtgatgaacatttgagccagtgagttggaacaacgggaggaggtggtttgacactgggaagcttgaaatggagataatggctgggactgctgtcattgataaaggcagggtggaatgcgaccagaggagggagtgctttgaaattggatgaagaccagagtcgctggaggagagggcagaggatcaaaaggtcattgttttggaaggatcgttgatatagatgtaatcaccaagaatcaggagcgaggaggagtgttgcagtgacagtgagccaggagctgagggccagtgacctggggttggtagatgacaagaacaggaaggagtaggggcggtgtggtctgatcacatgggagtcaaagctagaggtttctggaggagggagaatggt

SEQ ID NO: 59959 - DNA, 1115 bp, Homo sapiens
tggggtaagaagattgcttgagcccaggagttagaggctgcagtgagctatgattgcatcactgcactccagcctgggtgacagagcaagatcttgtaatcttgtaaatacatagaaagagcacattctgtggctgagcccaagaactattatgcacaaggaataacttgttgggacgagccattaccacattggcagggtcgtcccggtctctgcttgggtatttttatctgtaggcctatcagttagtatgcttttggaaaaatctgggatttactagagaaaaaggtaaaggtctagggtcgatgttaattgtgtcccctccaaaaaaagatatgttgaagtcctaacctcccagtacctctgaacatgacatcatttggaaatagggtctttgtagctgtaattagctaagatgaggtcatactggagtggaacagattcctaattcaagatgactggtgtccctataaaaataggagaatgccatataacagctaagacagagatcagagccatgcagctgcaagccgaagcaggccaaggattgccagcaaaccaagagaggctggaagaagagagaaggatctttccctgctgatttcacagggagcatggcccttgatctcaggaccttgaccccagaactgtgagtgaatcaatctgttgttaagccatacggtgccagtattttgtacagcagccctcggaaactcatacagcaggcaaccaataatgtcccaagtctagtaagtaatgaaatacactctgacatggggatggaattgaaataaaaataaccatctgagggagctctagagccttcgcttcctgagtcctaatttgaccgtaacctagaggatgggcaaataatagctgttttcaggacaggactcttaacctcctttcagtggttttgattatttttagtttctgttctattgatatttggattctgagcacagatgcctttactgcactgagtgcctttgacctgagctggattttagctggaagtgcaggattctgagtgagacaacactgaatgctgaatgaccccttaaccaaggcaggccgttctcctagtcggggccaggttctggggacagtgtgac

SEQ ID NO: 59960 - DNA, 2087 bp, Homo sapiens
ttttaattaaagacaggattggtgttactgaaattgcctttgcctcaggcttcagtatggctggaccgggcactggctgggactaaggtggtgacaagaaagtgaccaaattggagtagacaggcgaggcctgaggtggagcaggcgtgggagctgggggagggcaccaaggggttgagcagtctcccctgttggtatcgaatataacaataattcttaggctcagcagaagtttagcatccatgttcccagtcacctggacttttccaaatcttggaaccccctctggctgaaaaggcttttgtttgtttaaacggccactttttgcatccaagagcacaagtcagcttccactggaaggttctgagaaacggtttcaggtttaagtctagagcatgaatggaacggagtcacagctgaaaaagaaacatgccgagtgccaaggaaaagacatggttaaggggtaacatgggcccgggtaggtgaaggtcggcaggtggaggccggctggatcagggaaggtgaaagaagaggcaggggcagggcccagcctgttttaacgcctcggcgttctcaccgctgcagaacggctgcagggggcagagtaaagagctgctgtcagtttccctgcccagagagtgccaacagctgctctgacctattgcaggcatgtgtgttccaggatgcagccttcctgcactttgaccactctagattaattgctaaccaagatatgcacatgatggggctcacaaagtattaggcggtattttaacaacaaaagctgcgaagaaatccctagaaatgttggctcttctggctgggaaaacgcagtctgtcaacagttgcctcaaaaactcagaagctcagagagttggattcggtcaccagagaggcccctcaaagaggccccaaccattcagatcctctgctctgtcccccatgacagcggggacgaaggtcctaagccctggccgggagggcagttgacctcgggactcgccgcggggcggagcgggtgctgggaggaaggagggcgtggctggcggggtgtggctggcgggacggggcggggcgaagacagagcgaggcggggcctgggacggggggggggtcggtgtcgccgtgggggcgtggaatgtggggtgggcgtggctaaaggcaaagggcggggcgcgcgcgtcgggaagatggcgctacgtctgctgcggagggcggcgcgcggagctgcggcggcggcgctgctgaggctgtgagtgcaggtccccgttccccgccttcccggcccggctcgccgcgggtcggctcctgttgcagccccgcgggccgggcgcggcctccccaagccctcacgggaacccagccggacggaagcaccatgcgcctcccacgcgctggctcgacctcgtccaaggtcgctgccgcccgcgcctccctttgggagggccctcgttgcacccggaaaatgggtacacaccttaggtcgaattacctggactcagccccaggaaacaaaactgcctgcctcccccaaatggcaaacgtgaacgcgccagtctttgagaggcggcttgcctggtgaagaacacctgcggttcgtttaacacagcggttcccaaacggtttggtctcaggacccgtttacacgtctaaaaataatttgaggaccccccaaagcttttgcttatatctattgatttttgtgcatgaggaattaaaccagaaatttaaaaaatattcacttaataacaaacccattaacttttaatacaaataacactttaatgcataacttctcaaaaaaaaagtgagaagattggctcatggtttttatatttttgaaaatttctttggtttaataaaggacagctggagtctcatatcagctgttttgaaggaaatatttgaaagaaattctgggctcatgcagatgcagatattagttgggaaagggaggaccaagcagaccctctcaacgggtctcagggaccccctcaggtgtctttggaccacactttgagaaccgctggtctagcacttgcccatcgcctaggtacgtgcacatacatggtctcatttggttccct

SEQ ID NO: 59961 - DNA, 965 bp, Homo sapiens
gggtgacagaaactgttgccaaattctcactggcagcaacttgagttttgatttggctcaggtacatgtgctcttctagagagtaaggtcagcacagaggctgctggagggtgctggaggctgcctccatggactctagcaccacctttcctcgtcctgtagctgaaatccttggagtcattcttgcctccactagacccttggattctgtgcatctccacatggctcccagccattgtggctctttttttctgggactctcctctctcctgtccatcttccagaagtagctttctgaacacagacgtcattgcgctcctctccacaagcagcagtcactctcaacactgaggaatgaagaccttacagtgttctttacaccctaacccaagattaccttcccagaatcatcttcctaccccatgtctctgaccttccaatcacattaaaattctcagggtggtgagatactccagctcctttctgtctctgccatggctcatgctgctgcttctccctacagagccctcctctcatcttccttgagatcttgctgaccaaatatcttctcttctgatgacttagcagtcacccacactgccgtgggccagcagacacccttcctctgccttccagtagctttgcccaatgtgatctctgctctttgtaccctgtgctgtctcccatgttagatccaaccacctaggtcatagcgctactgctggtacctgattgcaggcccagcatctgtcttggtgccaagcacatgacaagaactgaataaataggccaggtgaggtggctcacgcctgtaatcccagcacttggggaagccaaggcgagtggcctgacgtcaggagttctagactagactggccaacatggctaaaccccatctctgctaaaaatacaaaaattagctgggcgtagtggcgcatgcctgtaatcccagctacttgggaggc

SEQ ID NO: 59962 - DNA, 2440 bp, Homo sapiens
cccagtgcggtagggtgggctgctccaacccaaatcttcttctcccaagtcttctctttcccagcatattatgctgcttccatttcaccatagtttcactcactatcaaggtctccaaagcaatcccatcatctacatattacttgattgttgtgtacagggtattgggtgaaaatgaaggtgggcagagcacatagcctccaacctcaaagccagtaatgtgccagatgaaaggtaagtcacagtctttagattcagtagcattttaacaaaactaaaatgtcaggccggatgccgtggctcacgcctgtaatcccaacactctgggaggctgaggcgggctgatcacgaggtcaggagatctagaccatcctggctaacacggtgaaaccctgtctctactaaaaatacaaaaaattagctgggcatggtggcgggcgcctgtagtcccagctactagggaggctgaggcaggagaattgcttgaacccgggaggcagaggttgcagtgagccgagatcgcgctccgaagtccattctttctgtgcagtggctgatctatcagaagaagaacccccttccccaccaggcctaagaacccatgggagtgatggcccagcactatggtgttgcatttctttcttttttttttttttagacggagtcttgctgtgtcatccagggtggagtgcagtggcgtgatctcggctcactgcaatctctgcttcctaggttcaagtgattctcctgcctcaacctcccaagtagctgggattacaggcacctgccatcatgcccggctaatttttgtatttttagtagagacggggttttaccatgttggccaggctggtcttgaactcctgacctcagatgatctgtctgcctcggcctcccaaagtgctgggattataggcgtgagccactgcgcctggcctggtgttgcatttcgttactggcaagatgatgtatgctctttcacgtgcccacatgcaaaggtgtgactcatggaatgaagacagctcagcaacctctagttgctgggacagaaatgcaagtcagtgggctctggcctttctcccaggctgtgttgccaccttggtggctggaggggcgctactagggggtgtgcttggcagagcctggggtggcgtcctctttcatcccactaaataacacattggtggcttgatctgccatgaagctgacaatcagagcaagtatttgaagcctgggaagctgtgtgggccttgcttgtgggacctggtgtcagctgatgacgtggccctgtctgggtgcccgtgagtcagatggcagggatggcctgacatcatgaacactagctccacctacgtcacattggacttgactctttacagagcacctaggaagagatattgatgagtgaaccattgcccagtcatcgagttaattatttccccccagaaaggttaacatactgaggacagagagggcatgtgtaggcggcagggcgcacttttcatttagtctggttcgcaggtgcggtcaagacgattccttattgtcttggagccagcccttttaagccttcctgcacagctctgtgacagtctcgcggggagacctgtgaggccactttccttttttccagacccacccccacctttgagattatcactcttcctgctttgttttctgaggctttttggctttttagtttatttgtaattagagcagaaaaggtacagtaatcggatagaagggttgggagtgatagaatgagccaggatgcggtggagaaatggggtggagaacccccagaccttagggtggcgtgtttgtcagggagtagaccagggtgcagttctaggcagaccactagatggcactcacacattggtgttcagtcgggtccacggcactttccactttgggcttctgtaaaatctccccatgaactagccaaagctttgtatctgtcatcccgccatttgtccctctaacctctcttgatcgtctacagataggtatatatatatgttcctctctagttcatttttctcttaacatttagtgaccttaaaaacctggcagaaataccttcaaagcctcccaccttgttagctgcattgccgcatttttactgttctcctaagccaatgtttacatggcagtaaatccatgtttagagtaggtaatagagaaacctgtttctctctcagtcactctgagggtatgtttgataaagaaatggaaattgagaggatgagttattaaaaggattaataggtaacaaatttttttaaaatttccattcaaaattatgggttggtaaattgtaagatacttaaaattaatgagttgttttatcaaatcattttctgttgttagagaattttcagcaagctgagattcaaatgcaaaatgtcttattgcatactgctggctctaggaagga

SEQ ID NO: 59963 - DNA, 1663 bp, Homo sapiens
taaattttgacctaattagagggggagatggggaaaaaaactctttaaaagaagattaaggtaaagttctaactttatccttgattctgaattttttttcttttttggaaatattgcatacattttatactgcaagttacaatgtgaagggcctttgaagcactctaaagagacttagctgctttgttttgagcaattaaggtttgttattgagtgaattaagcagctctgctgtggctcatctgtaaatagtggtcttcagcgagtttcttgatccgcttttcccaggaacagaagccaagtcggcttccttaggagctgctcgccctgagtctccatgtttcctcgcagtccggggcagaacccaagcccgtgccttcctcgccctgccttcggagtttcctgctattgacctggcggggcgcgccagccctccctgcccgctggtgccgcggtccctctcggctgcagcagtggggcacagggacgtcatggacaaaagacgaggatgccagttcgatgtgcgagcagaaggccgcctgcgtgcgctctgcagagcaaccggcccggtttcataaggggccgccggcaggggactgccatggcgccccctcctaccctttttggcaccagcagcttcatccgcaggcccactcggggtgaatagtgtgggagctctcaagagaaagaattttaggtttgtcgatagtaatcaccaccttcagcgctcctcccactgctggagagaccgcggactgggtgacaagtcttccaggctcccagaaagtttctgctgcaaagcgcagggtccgcctcccacttccaggagggaccaggagggaaccatcgcgaaaccccgaggctgccggggactctgactgaggcctttcctcctgtgtccctctcccccacgccggcctcccctcctttcaactctctgcgctttgaaaccgcggagttggggtagctaggccctccagcccggcgacaggcctcggccacaggcagcggggcggggtgtggacaggaacaaggaggtggggtggggaggaagcctcgggcagagcaggttctctgcggagtttcggcagccgggtttatccattttgattaaagaaaagtaaaaaaaatcccccaaaaccaaacaacaaaaaccctctcccaacccccaacccgcctccacagctgcattttgttcctgggactgttggtgtcaccagagcctctttttttatgcaatcctagactccattgcaaaggacttgtaaagcctattaatttttcaggcaaaacagatcaagcctgcctttgatgctgctgtttcctaatttagtattcaaaggtaaagaatcctactaccgtctcttcactttttacataattaaaagagatttttcccccaggggcaaagaactagttgcttagtattttttgaagtgaaaggtctaactttatatcacatctgtttttatgctctttcctaaacataaccaatatttactctttgctggtacttagttgcatgctattcacccttgcattttaatttctgacagagaggggattagtattcctcttctaaatcatcctctaagctatgtgtgtgtgtgtgtatatatatatatgtatatatatgcgtgtgtgtgtgtatttctcctctaac

SEQ ID NO: 59964 - DNA, 765 bp, Homo sapiens
gcccctacacctggtgaaccttgaagatattatgctgagtgaaataaaccagtcacaaaaggacaaatacagtgtgattccatctatgtgaagtatttagagtagtcaaattcatagagatggaaagtcaaatggcggttgccaagggccgaggggaggagggaatggggaattcatgtgtaatggggccagagattgagttttgcaagatgaagagttctggagatagatggtggtggtgattgcacaacggtgagaatgtactcagtgtcactgaactgtacacttgacagtggttcagatggtaaattttgcattatacatattttaccacaatacaaaaatagtagtgtttcacatggtggggagtataaaatgatagcctatagatcagctcaaggtaggaaacaacgatcttaaaatgattcatggattattgttttattgctgttcaaatcaggaagttataaaactttccccagggttcagatcgccagtccctttccacagttacctttgctcactacacacattccaactcacaacacacacaacatacaaaaccctgggcgtagacagtgcagagggccacggatgggagagcaagccaggcactctcatatgccgctggtgggagtgtaaattagcacaactccattgggaagacagtttggtgaagccgacggagagcattaaataatcacactgataacctttttagccctctgaggacagaggctaatggaaacttgtggccctttctcc

SEQ ID NO: 59965 - DNA, 694 bp, Homo sapiens
cccctgcacttctacaatgatggccatggattcagtgggtggggatgtgaagcaacatgattttcaaacaagggaaacttctgctcatctcaaaattatcatttgatcagtggaaggttgtgtaattgatacctatctcccctgcctaaatgtaataggattaaattctggttactattaatgttcagcaagcccaagtcctttttgggatcggtaagacaccttagttgtacttacaacccttaatgcagagattctcatctttggctgtactttggagtctttctggtagctttgaagaagtgctgaggcctgggactcaccataagagtgatttaattggtttggaatgtggcctggtgttttagcccctaaagcaagcttgtccaacctgtggcctgtgggctacatgtggcccaggacagctttgaatgtggcccaacacaaatttgtaaactttcttaaaacattatgagatttgttgttgttgttgtttgtttgtttgtttgagctcattggctagtgttagtgtattttatgtggagccaagaccgctcttccagtgttgcccagggaagccaaaaggttagacagtcctggactaaagcttcccacatgatcataatgttcaggcaaagcagagatccttaaactagctaccagctaagtaaagaagccattcacttgggtttag

SEQ ID NO: 59966 - DNA, 4491 bp, Homo sapiens
ttagcgattagctgttttcagcaattatgcccttccatcgagggtgtgacggctggcgcctctggtaatgagctgccttccaaggctccctcccggccttcacttgctgctctccttagtggcctcagagtctgctgacattattgccaatgtgacatgttcctcttggccaactcgggaagacatgccagtctgccagtgagagagcctgaaggaacttcaggagagaaacatgaagctggatgaagccaccaagcagacttgtccccagggaatggggacatcagctcatccatcccgactagctcaaaacgctcaagaataacctatgcccaagttttgctggcaagtggaaatgtccattctacattagaatagcataggaggatttttttattattatcacatgggagttacattgttggtgaagtcatactagctagataaatgattaactcggtaactcatcaaataatgattgagaaaccactttgtggcaacacaaggctatcactagaggtgacagaggtggggaaagtaagtgtagctcctctcctctccgggcttatggctggtgagacagacatacatcattccagtggccactcacatcaatgtttggttgtgaactgtcctatgtgatgggaagagaaaatacaagagagtgtaaaacaggactccagggtggagagagggaatccctgtggaaatgccatttgaactaggagctgaaggatggagaggaggtaactagacaaagtgtggggtacagtggggagtggagcagagagagaggctgtgggtggagggggaggcacatgccaaagccgaggggtgacaagaagctgggcactgccaagaaactgtgagaagcgaagcttggctggagcggccagagcccagggtcatgcaggatgagcctagagaggaaggcaggggcctggtgatcctggacttggactgcagtgaggattttagatgtattctaagggtaatggaaggctactaagggtttcaagcagcagagatatgtgtcttgcaaaatagcattctgaatgcagcagaatggatttgagctgggcaggtgtggacggggaggccatcaccatggtcaatgagaagagtggagggtgatgaggaagacagaggacatcagagactgaattccctttccttccttccctccttcccctccaaacgtagccctcctgtcagctccaaaaggcagaagtgggttctttttcttagaagaccattccagttttctaagcaaaattccgttctcttctccttcctaagaaagtttacaaagaaacagaagcctacaatcccatggcagataaaaaattttaggagagccacgttccggttctgaaggagcaaagacctcttccacacacacagtggaccctgtggtgccactctaaaacccatacctccaggcccattagaacccccaaagtgacctgatttccatcaatcccaaagccagccaagcaaggttacgtttataggactccctcctggtgacagtccagaaaacaataaaaacagatgcaagtcccactgtggtacagaagcccactttggaaaccagggggtcaagtgcccattatccaggtaagcaggctctccctaggagaccaaaaatgcatgtcaacatgccaagtggagaggggctggaagccacaggggccacctgggaagggaggcctcagccaggcagtaataataaaaccggacaatgccacagagctggcgtggctcagccaggagccagggaaggatgggggtgggaggaagggcctcccttcctccaaaatcaatgtccctgttaacttgggcagaagaaaatctgacagctctggaaacctgcccatctgatgagaaggaggaagctgagaagcggctggagccagagaaagcccagaaatggcaggcgggatcagttgcccattggggacctggtggcaggagctctctgcattgcttttactgacgcccaggaggacaggtgccactgccagtccccacacgacctccagctgcctcctaaagcagcccgcccctctgatgatcctggctggatttgttttatgaaaaatccacgaaacaaacagggcactcagcttctgaacccagttccctgggggctattccattttgttatctggaatataaccgactgagaggcaactggaataactgaaatctacagagaaatacaagtcttgacaagtttcaggaaaaaccacccttcttattgataaagcaataccagccaactagtcactgatatttatttaatgcctcccatatgaagagagtagcatgaatccacaatcctgtatccactattccaaaatccaaaaagctgaaaatcaaaagttttattattaagtttgcagccgacatattgggcagcaaagcctgacctaaactgctgtgagactgagacttcttcctcatagtgtgactgttcctacattttgctccaggttttggggaggggagatattaaatagactgtctaggtgccatctaaccattttaaagtccaaaaacttcttaagtccaaaacacatttgtctagagttttctaacaagggattgcacactcctattgttatgggtttgaggactcacagtccagtagaaaaacaagaaatcccagagaagactcaatagaaccctttgcactataaatattttatagacatatagatgtttggggttacagaattacataattcccttctgtgtagtctgagtacagtttccaatggagacagcctgcagtgaggaaaacatgggtttgggaatcagaaggtggctgggccagtattaaatgcccctgtggccttgggcaggacttttctcctccctggacctcatccataaaatgaaagaatgggacaagatgatttctacacacacttccggttttcagatttctgtgttctatgacctccctataggagggataaaggaccagggagcaagaagctcagaaaaggtctcttttccacatgaagtgggaaaaggaaaagcgtaatcacgtgctggaccctgactggagatggaagtaacaccagccggttaactggggtgactcatgtcaccagttatggaactactcagatccttgggtgctgagtgaccaatacccagcctctggatggtagcagccctggagacaagtggggccaagggggggccctgtcatgccaaagctgtgatatcacatactgctgaaattgatttggctccatttcctgcatacctagcagatttaccagattgtgaaaatgaatgttttctatgcgcgtggctgatttttgcatgcatctgttcactcatctaaaccttagttacatcctgctaggagaatgaaaggctataatttcttcttctttaatctggaatagttagaaacaccatgatttttgctttaaaattctgcaccaaaatggtgaaccatttttatttttgtctcaggaaaaaaaaatgaaatgatactgccgtatttttttctagatttgcaaatgatcctgaccttaatgggggtcccatgcctgagaacatggcccttggaatagaaatatccagtggaatgcaaacatgagtatctaaacatatcatttgcatctgacattaataagccctttctggctttcacgtttccattttagatgacagtgccgtcttcacatgtcaggggtcaagtgcaagaacagtaatactagtatttatttagtactttgcatttctggggtgcttttattgcccttaattagtaaaccacaaataatttctgctcagtagcttggtactgcaatcttcagtgttcatggggacagtgtgctgtagtgactaacaggatagactttggagtcagtcaaactcagatttgggctctgcctctgccactaacttactgactaaccacttaccacttactaacttaccactaactaactgacttcagcaagcttcggtgtcttcatctgtaaaatggggatagcgacaggcttgtcacacagagtggatatgaggattaaatcagaatatgcatgtaaaatgcttaacgtaatgcctgacagtagtactgtatatatatacttatatataagtgctccatatgccttccctgtaaactagatgttggatacgttgccgtccgcaagtccttctgcctctgagaatcacatcatagcccaataagctacttaaaatggaaaagtccataggccatccccgtggaccaaagtcctgccacctttctggactctgaactccctctccctttccttctccaactgccaaagcctcttcattcttcctacttcattttgcacagaaatttggtttctttcactaatcctttccagccttactctgagggctctctttccactcacaagtggcccaacaaggttttgtttgttttcttgttttaactgaacagaagatcattctttccaccctaag

SEQ ID NO: 59967 - DNA, 988 bp, Homo sapiens
aaaaagtaacctgagctccagtcacctgttccctgcaggttcttggaaagagctttttccttctctacaaggaggaatctgatgcaactgacatcctcaatagctacagagaacttgcaaaggagtagagagaatgtttgaggtccagccttggtgtagagaagcggcagaaacagaaatcccaaaaggtgtcatgcttggctccagctctgtgctctcagaactcccttccctctgggcagaggcccatctgctctgtttacacacctggacctggtgtgaagggaggtttggaggagggtagctccctgaccatttgtggaatcgttcctgcttccaagcagcatgctacaggccagccttcaaagaaagaccagaagccaagtgtactctgtcatcacttaataatgcttgaagcttttcatataacaaaaggaatgaagcagccccgcctcgcagtgtggaagcctgatcattcttccatcagctctgcaccaaaaagcttttcctgagctttgaatattagatctgaccaatatgggtaaccaatgcccttaggtaaggtaaaataggaataaaatagctgtttgcaatgttatttcaccacacagtgtggtagggagggaactgatatgttgcaatgcaaagtaatctagtagtactgtttgtagaacagacaagtgtgtccaatttaaagaatatcaacatcatttttctatatcatactcttgtgaggttggatttaaccacagaggcagaaagttggtctactttgctcgttcctggcaactagcatggtgcctgcccctaatacattttcactgaatgaatgaatcagtgagttaatgaataaataaacaaatgggaggtgttctcctttatattgtgttagaggctgaggatatagaaatatgtaactcagagtcccattccacaagcccatgctagtgagccaacacaaacaaaaaacaactcaaattcaatgtga

SEQ ID NO: 59968 - DNA, 1412 bp, Homo sapiens
agcgggcagcagaccagccccccgccgctccttgtggcgcgctcccggcgaggccccgggcctgaaatgtccccgcgcgcagagcctcctgccaggcgacccagctgttagccacctctcgagcggcctggagtgctcgggccaggcgtccccggggttttcggtgtccgctgggagctgctcagatcccggggaagtcggtggcctacgcagaaagactggagcgctgggttgcctcccattcctgacccggctgagggcgccctgaccccgcggcccgggcccgcgtccgagccacgctggacgcccggctcccgggagcgccgcggtcggccaggactagaagccgcggcgccgaggtctcgggagaagcgcggcaggatggcaggccgggcccacgggcacgttcggcggctgcctgagccggcagcagctcagggagcgcgaggactgaggggcgggcccggcagcggggcgggggcgcgggactgactaggccgcggcggccaatcgcggcgccgggagggcgggcggggcgggagccgccgttaaaggggcggtttgaccgggggggcccggcctcgagctggagggagggagggaggccggggcgggagactagggggtgcggggggaggggagaggaaaaggaggagacaaaaaataaaaaataaaaggctgccgctgcagcgttggcggcgcccatcgaaatcaacggaggcggtggcgaacgcagcccaccgcagccgagacctgggagcccgcctgggcctcacactccctcgggtcgcggactgcgctgggtccacgcggcgcggtcactagttccgggcccagcgcccaggcccgaccggcgggagggaggaggcgagcgagagatcacttttttattgttgttattgtttttcagcccagcctccccctcctcccctccccctgctcgctttctcccctcccacatccccctcccccctactcccccgcctcctcctccggcacaacttaaagaaagggggagcggcgcggctgctgccttcatctggggaaattcgtggccactgcaagtttactacgcgaggcgcagccaatgccaagcgccgaggccgaggagggctaaacactgcggccgcggctccgaacaataaccgccgcgcgcggggcggcgcgagtagggccgcgggggagggagctgtcgccgcagagcgccgcggagaggacgcctggactccgcctgccgccccggcgcccccgccgcggtcaggtggagccgctggtgcgctggccccgggtgccgagcgcggagctcgcctcggtcctctcctcgcccgtctgcctggcgtgcgcacggccgccgcggttgtgactgcattctaccggcgctgctcggtgcggccgggctccgggtccgctgg

SEQ ID NO: 59969 - DNA, 604 bp, Homo sapiens
gcccgaggcagatccaggcggcggcggaggcggcgggcgcaggagagcggctcccagggctgaagtggccgccaccaccgccgcctgcgcctggagcccggtggccgccggacgcaccgcgcggatcgggagcgggagtcgaggcggcgcggaggcgcagggctcgcaggggcgggcgggcgcgctggccatgctcctggacgcgggtccgcagttcccggccatcggggtgggcagcttcgcgcgccaccatcaccactccgccgcggcggcggcggcggctgccgccgagatgcaggaccgtgaactgagcctggcggcggcgcagaacggcttcgttgactccgccgccgcgcacatgggagccttcaagctcaacccgggcgcgcacgagctgtccccgggccagagctcggcgttcacgtcgcagggccccggcgcctaccccggctccgctgcggctgccgctgcggccgcagcgctcgggccccacgccgcgcacgttggctcctactctgggccgcccttcaactccacccgggacttcctgttccgcagccgcggcttcggggactcggcgccgggcggcgggcagcacgggctg

SEQ ID NO: 59970 - DNA, 2156 bp, Homo sapiens
ctggccagtagttgtactaacaagggtttctgcttgcgagcaacaaagactgactctagttgtggctaatttctttcacacacacatattaagtgccagaggtaggacttgagctcggatctctgatttccagacctagaactttttatgtgttattacagtcgttaaaaaccttacctggatttgtgctttgcaatttacgctttcgaacatgcaggaatgtagtttgggcatttgtctggaacttcggattctcgggactccagggtggccaaggcgcggaggtgactcaatgacattgaccggcctggatgcacgtgggttgctgagccgatgctgggaaggtacggggtttgcccggtgcaggccgccggaactcacgcacgcccctgtctctctcactcctggggtcggctctggccggtggcctccagctcagctagcggccggacgcgcagcccgccgactagccctccaggtcctagcgcgactcccggatcccggatccggcggatctggccgaccactcaccctcccctttccgcaagttagggggcggggcatcgggtttctggctcgtgatttgccggagctcctgcgctccccttctccaccccctccggctgtgtgagaggtcagcagaggggcggtctgcggggacaacaatggcggggttctgggtcgggacagcaccgctggtcgctgccggacggcgtgggcggtggccgccgcagcagctgatgctgagcgcggcgctgcggaccctgaaggtgaggagcaacggggcctcgcgggtccgggcttcactgggcttctagccgtgccgcctctgggcggctggcgccgggagagcgctggctgggtccggctgcccccgcgccccggttccgcatcagctacaccgcttgctttcctccctcccggagttcgcgtggcagcgggctcaggaggcatccctcgttgcagctgttcctcgcggggatcctgcggagcagagaggcctagggcagaggcagttgggtgcccgcacgccctccgaggcggctgatggctttgggcaggcatattgctcgaggtctgcttccagggccccgcggcattggctttgtcttaagctttccagggtgtctttttaggtgtccttatagtttccgtgttctgttgcctctttccagcatttttgaagggacactgtgaactgttgcttaagtagtgttagggttgtgagtttgtcttatcttttaaagtattataccatgtcaggactgccaatagattttacgtttcatttgaaagcctgttttaattgtatgacaccccagtctactgtgtaccaaatgcatcccgtgaacttactttccttttcggtatagtggtgagcctgattttggcactgttctaaacacatttcatgactgttctgtatacctaggctgtcatgatggcagattgacaaacaggttggagtgcttgtgtgtgcttctgagctctgtctccagtcaatgtcgagtctgtcgttaattctggggcacagaccacctaacctactttataaggtttgttgaggcacttgaacacattctttaaaatgaaggtcccctgaaaaccatctgtcagctggttcagtgtgcttgttaaacttccttttaaaaaataattattaaaacattgccacataacttgatttatagtcatttaattttagacgttgaagacactttagagacgacctgccccatcctactctttaaagaggagggaaccgagccccaggtgggcagtatgagagctggagcttatcgacatggaagtgagtggcacctatgtttgttttgtgtccaattcagcgtgcggactttcactgttttctgtgttcccatacagtttagtgttctttaatctttatcattctgttcatctgtgttggccacttcaattgcagctgtaagacttatgcatttacataggaggcaagttagtatggtgtaaagtgtgggctttggggtcaggcgcatgaggctttgtatattggacaggtctcttccttgggcgtcagcttcgtccttgtagctatttttttcaacaaatatttactgaatatctcctgtcttccacttctggggaatgaatatggtttctgctttcttagaaatttt

SEQ ID NO: 59971 - DNA, 3445 bp, Homo sapiens
gttagaggctgccatgggctataattgtgcctgtgagtagtcactgcagtccagcctgggcaaacatagtgagacccccatctcttaaaaaaacaaaaaaagtaaaataaggtgaaattaatatattttacttaatatattcaaatattcaaagtattatttgaatatgtaaatgtaaaaattcactaatgaggtcttttacattttctgggtactaagttttcaaaatccagtgtgtagtttactcttagagcacatctgaatgtggctcgtggctgccatattggatggaacagctctagggcacagattgtgctactaatcaagtcccaccttgaggtgctgggactggccttttgaatgcagtgttagtcagcccttggccaggcagggtcgggggagctctcaggcttgatggagagctgtatagttgaggaacatggtcgagatgagggtgcaggtgtgagccgttagttgtcaacacagcagttagagaggatctgagtggccactgacaacatctgctacagcgggatggggaagaatggcctggcggaagagtcaagggtgggatgatggagctctagagttgacatgtatagtttcctggtgcttgagcttagtacagaggcagagcccagagaatcttgagtcttgaacatctctctcaaatattaggtgttcaacttggcttttggcagacactgaagattggaatggtctctaagatcctgaagactaaatagtctatttgaaagaaaagctgtgcttccaggaaaaagccagacctaattaagtgtcttcagagaagggcatgggctctgttacaatgcatgatgaaataccgtgtcataatacatggataagaccttcacctggaattttagagatgaagcaagatgaagtaaactaatgtttactttgaccttggtgagatcattttatagctccattaacccagttttgaggatagtttcttctttgaagcagaatgcattctgataatgaatttatctcataatgagttatttagtattattcatctgaatgctactgcgggtatgttaacaacagtagttttggttttggcagaaatagtgttcagattgttctttaagatatttgccagtggatttaccagttttaactgccacgtgaggccacatcttgcttatgaaagtaggtgctatctaatcttttttttttttttttttttgagatggagtcttgctctgtcacccagactggagtgcagtggcgtgatctcggctcactacaacctctgcctcccgggttcacgccattctcccgcctcagtctcccgagtagctgggactacaggcgcctgccaccacacccggctaattttttgtatttttcgtagagacagggtttcactgtgttagccaggatggtctcaatctcctgaccttgtgatccacctgcctcggcctctcaaagtgctgggattacaggcgtgagccactgtgcccagctggtgctatctaatcttaagaaaggatttttttccagccactgcaaacaggatttgtttccctgtttgcagtggctggaaggcatgcatccagtttgtctaaaagcctaccatttcccccgctttttgtgtaagttattgtgtgctgatgataatatatgcaagactgtgctagccatgttagacattctcatttaatcctcatagcagcattatgacctagataagtactattattatccccagtgtacaaatgaagaaactttctatatatctaggaaatgtcagagccaagatttgaatccaggtcagaatctgagtctagaccagaactcttattgactatattattctctaatggtaattcccaagtggttctggtataattttaagaaagaaggtgacagttacatatttggatttagttttcatgtaaaaccttacattttttggcactttactgtttataaaaactcatttgatccttttaataactccctaggaaatcagggaggtgtcatcacctacattttgtagatggaaacgggggcccagagaaatgattagctcaatgactcacagctgagagttgacccaagtcttgtgactctgagggtcaatgccacttcctatgtgccaagccattttcaggcatttcttttctatgtgtggaaaatacaggaaatcattattcctgtgggagagaaccagtggcaatatgttactggggagtcattttgcacacgctgacctctctcattttggctgtgattggctagcctttataaacagaattgattaaagttctttctcagaacctttgttgctaggaaataccttacaaagaattttggactgggcgtgtagccagtttgttacatgcttaacaaaaacaacaaacgttaaaattctgtgtagaggtccaaattagcagacttcttcaaacgttttccttcatttagaaaataaactttatgttgtggctttacacaaatggtctgagtgttgacctgattcttcatttttgaccttccatgaatgtctcccaggaggaaacaggaacagagcctttatggggctcattccaaaccagttcagacttgtcgtgggaatggttcacattggtagttgttctgttatagttgtgtttgcttgtacgagttctacttcttcttttttttttttttgttgagacagtgtttcgctctttttgcccaggctggagtgcaacggtacaaacttggctcactgcaacctcggctcactgcaacctccgcctcccgggttcaagcgattctcctgcctcagccatccgagtagctgggattacgggcatgcaccaccatgcccagctaattttgtatttttagtagagatggggtttctccatgttggtcaggctggtctcgaactcccaacctcaagtgatctgcccgcctcagcctcccaaagtgttgggattacaggcatgagccaccgtgcccggcccgagttctacttctagttactgggtaaccgggaggcatctatgctttttacagctttaggccacattattacaagttcacatgtgtgcaagctctgtggaacaatatcatatctttgagtagatattagtgtttatctgggaattgccactgtttttcttatctagaaataaaaaatttcagaaagctcttgaccaatctgtggttaaatcttataaccattacagcctcagcctgtgacctttgaaaagttaaagtccttgggactcaactttgtcataaaattggggataatactcttgtaactcacagttatgcttgaaggaatatatgagagatagtcttgatctttaatagggacacagtaataatttcccgttcacagttccttcttgttcttggtcttttacttggtaaaggttttattttataaactatatctttttgtatcttttacctccac

SEQ ID NO: 59972 - DNA, 676 bp, Homo sapiens
aagcagaaaaagtgagacatacaggctttttttcttggcctgcacaagatacattcaagtttaaaaactgtttacttgttcactgttgtgttaagcaaaacgacagtatcacagtatcttctatatgtgccgtaagtattttcttttcatagctttaaaaacttagacagaaaaattgccaggctgattgctggtcaccaagtagatttaagcaaagcatgagaaaatttgagtcaaagattaatgaaatgtttacacagtgctcccttatgagagcactttcccccagcatagcttcagtatcactaagggaatgctacaattgtttaacctttcctaaatgcttcaacgtgttcagctgaaagtttgacaaaaatgaaaggtaggctaatgctaattggatacaaacaaaagaaggtttagcataaagcagatatacttttatttggtacttttaacacagcaggccttttttttttttttttttgggacagagtcttgctttgttgtccaggctggagtgcagtggtgtgatctcacctcactacaacctctgcctcctgggttcaagcgattctcccgcctcagcctccggagtagctgggattacaagcacctgccatcatgcctggctgatttttgtatttttgtagagacagggtttcaccaagttggc

SEQ ID NO: 59973 - DNA, 1004 bp, Homo sapiens
ccaggctggagcacagtggtgtgatcttggctcactgcaacctctgtctcccaggttcaatagattctcctgcctcagctcctgagttgctaggattacaggagcatgccaccatgcccagctaatttttgtagttttagtagagatggtttcaccctgttggtcaggctgtgatccaggcaccttggcctcccaaagtgctgagattacaggcatgagccactgtgcccagccttatcttttatttttaatgattattgtttaaagtacactgagttcaggttaaaaaccaactgccaaagtaaattttaacacctaaaagctgggagaaggggccattcttcttttatgcagtaactctttggagtccagatactaacatgccccagatttcatcctggtgctaaactgacttgttttccaattaaaaaaaataaaagtctgagtaatattgcgtaggagtaccagaaatggccttgttggaaaccaaaactatttacattcgttaagaaatctgtttgcaggtgtgtctgccacatttacagcacagtgtacagctcctggcactcaatacacagtgttgcacagcttgccgcaggagcataaagtggaggtagtaaaaaggtaaggaagaaagagggaggaggatgagttgttctctattcatttgcttctcatttcatcactgatttggtggtacccagacctttacagagccggtctccataatactggtgcaggtggcctgatgcccagtttctgttgctcagataatgcagtctcatctcgtctgtgatttcagcagcactcatggcaatgggaacattcttcttctttgcaacccaggagtgagattgaatctctgattaaagagcaaagcttgagtgttttggacatggtaatgctgcagaggtgagttcctgttctggctgtccatgtccaaacaagtgaaacaaatgttttcatactttgcagttgccacgttcattcattcattcattcat

SEQ ID NO: 59974 - DNA, 729 bp, Homo sapiens
ttgcgttaatttgctaaactctggggatttagtagagagtaagacagctagttgttgccctcatgaaggttaagtgtgaaaagggctgcataattgcagggcgtggtgtatgtgttcatgtggcaatgatacctagccaggtgtgggaggactggaaaggcactctaaagaaagtggcaggctgggcgcggtggctcatgcctgtaatcccagcactttgggaagccgaggtgggcggatcacctgaggtcaggagttagagatcagcctggccaaaaatggtgaaaccctgtctctacttagaatacaaaaattagccgggtgtggtggtgtttgcctgtagtcccagctactcaggaggctaaggcaagagaactacttgaacccaggaggcaaaggttgcagtgagccgaggtcgtgccactgcactccagcctgagtgacagactcccatctcaaaaaaaaaaaaaaagaaagaacgtggcattagctgaaactggaagcatgccaccctggactctgggaggaaatggtcattttcctgtcacccagactactgcctcccagcctgactcttcagatccctcttgcctctcaaagtgttcatttgtttgttcattcattcatttattcttccaacaactgttggttgaataacaactgtgccaggcgtgtgctcgggatttgaaatacctaacttgaaccagctggacaagggtttctgtcctt

SEQ ID NO: 59975 - DNA, 745 bp, Homo sapiens
atggtgaatatatcttacctttcaaataatattgaagcaagttatttccctgacccctttgcgggaccgctttgccacggggtgcctcctttaatcagcctatagctctcaactccttgtgggagggagcacacgagcgaaggaggcgggaactgtagtgcaggagcactggaactgaccagccgttttggcgccagtgggatcaaactccactcatttgcacctgttgccttccacacctcgtaggagggagtgcacaggtgagtgggtgcaggaaccagagcaagtgcttttgggcgccagcaggagcgaactctgtgcaggccccatggcagcatccaggaggggtgcctgtgactcccaaagccccagagggcatgttacagtgctcttttagctctgctctccacaggcggcttaagtgttaacagctcagttggcctgctgctgccctccaccagcgagggcaaagggccagcgtaacaaccttttgtatccacacacatggctcctgaactcttgtctggtgtccaggaaaaatgaggtcacacgaactaattgaaggatggtaaatgcaggaatgattttattgccgatgaaagtggctctcagtgggaagagaggggagctgaaaaggggacagaggaggggtaggtgatcttcccctgaagtccggctggattttctccggttactccatcaagctgtccctctgaagtcaagtcccttctctccaacattcagc

SEQ ID NO: 59976 - DNA, 2088 bp, Homo sapiens
ttcataaataaatacattaacatcatattttcagtaagctcatatttgatatctaatcaaattcttttagtcatgaatttgaatgagaggttttttgggttattgttactgtttgttttgtcttctgtgtttttatatttggaagcagaattagcttttggtctcttaagtgaccccttagtcacttaagatggtgttcatttccatcattgtgcttatcatgcacttgagttctcgtgtttatttctttgtccacttgtttaatttcagcctcttcacactaaaataggagctttgtaaaggcaaggacctagtcttgttcactgtcacacttcttgtacttctcaggaaatattcattgggggcagggtagaggagttggggaaggaaggaaggaaggaagagagagaacagtgaagcgggaaggaaggagttccaaaaactgcttccctagtggtcatggaaactctttaataaattagaatgttgtctccaaaaaatacaggcagatatgcgttgacaattgcctttcatacaccttaacaaactagttacataatgggatatcaaaattcagtcaatgtgtttgctagtttaatttgttgtgattaaagaaaacaatgattttatttataaatttagcacctaggaaatgtgatttcaaatatcaaagcataggcattttttactctttttaaaattgaagggtcaacaaaatctgccttattcttcacagttttttctctgtcagtaatgtagcagtgtgttaatttccagaaatttaatctcttctataaaatttcctgtgacctgaaaacttttgaattggagttaatttaccaaactgtcatggaatgcctgaaatttccttggggcagaggaggtagcagagaggtggtaagttaccatgtttccattgtgtgaataactgataagtgggattccaaacagaatccatgtagcgttttaatgaattcacatttggagaaaaaagtcacagactttcaaaacttacaggaatttggctgtcctagggcaactcctcacttaacagcaagaggggatgagaaggttgagtgactcacccagggaagtgactcacccagggaaggtcaagtgactcacccaaggttacttggtaagtaaagagagaagccagaagcctggggcctcctgacggctcctgcttctctttttactaaggtcttctgccatgggaagaaactctgaatgttagcaaccatctggatggtgttagttgtatgtctctctatgtatgttgaaaagaaaatgttgaagaattgaatttctcctgcttatgggttgtgtcacatttaatagcgttctttaagaaaaaaacacgattgctcaatatgattatatgagctcaccataaccaatgacaggcagaaaatcctgggaggatagacactaacaccacattatcctgttgggataatatcccaaattctgaatataactttcttttaccactttaaaggccaaaaaatggctgttaaatggagtatttttgtcaaaccaagtttttaaagttttcagcagctgcttctgctggcttttattaactactgaagagtctttttttttttttttttttgagatggagtcacgctctgtcacccaggctggattgcaatggcgtgatctcagcccactgcaacctctgcctcccgggttcaagcgattctcctgcctcagcctccctagtagctgggtttacaggcgcccgccaccgtgcctggctaatttttgtatttttagaagagatgcggtttcaccatgttggtcaggctggtcttgaactcttgatctcatgatctgtacacctcgggctcccaaagtgttgggattacaggcatgagttaccggaccctgcctactcaagagtcttaattgaacatcaaaatcctggttttgtttataaggaaaaaaagttaatggtgcaactaggactaattctttgattaattttttaaccacttctacttagcaagtatatgaaacacattaaagactgatgcatctgttttgtttttgttttgagatcaggtagaagatctacaaaac

SEQ ID NO: 59977 - DNA, 767 bp, Homo sapiens
atgtgacatgagagtcttcagaacagagatccaaagatacaaggaaagctgtccattttaatgcttaggtttaatgaagaatgggcagccgtgtaaaactgatgggacaaagaatgtaagtgaatgctagtaggctgagaggaacccagcaaggcctatgttcagatcttcctggcctctcttgtactatttcttcctcccaggtatgggacaagacccatctgggatgacggtcttatgacctgctactgttgtagagaagggtaggccagagaatttctttatgagcagctcttagaaaggcagggaggggttagagtcctctttctggtttcatagttgtctttgcgggagaggaattctgatgtctgtgactcatctcaggagagaatgaggggtgagagacaggaaggcagaaggtcagagatcttagttctgaggttacttctgaggccttctctttggggtatcattttctgagcctcaacaatacccttttctacttcagagctgctatattgggtctctcagaatttgcagtatggggtaaagatgagaagagcatggcaggaagaaccaggttttctggggcagaggcaacctggcattcactctcttggggcatggcagatgtccaaagctggccggtagccctgggatactttcatgtggatttgggggaacttctcacctgcagaacacttaatgcctcctgtcttttccagttgcctttggtctcctgagcaactactgtgttgactctgaat

SEQ ID NO: 59978 - DNA, 604 bp, Homo sapiens
gttgcagtgagctgagatcgagccattgcactccagcttaggcaacaagagcgaaactctgtctcaaataaaaaaaaaaagagagagagagaaagaaaatgaaactgtactccacagtgtgggagcgagcctgagcagtggctcaagggcccggataccgaatcttcttggttccaaatacctgctagaagttttccattgattactttatactcacctcatgtaaatgaagttgcagcctataaggttgcagaaagcagccaaccagaggctgaagtgaagttacaaaggtcacactcctgtgcaaacatgttgcaaagttatactcttatgcaaatgaagacttggctggcaatcagtctgattggttttggacagcaaccattcagagactggagtgaagttacaaagttgcaaagactggacccacagtcaatctgattttctgatttgttattggatgggaaattgactgtccgatttcccatctgccacacagaaaaggtgggtggtttgcaaagggagtagcccctggtccttttattacttaggtgtggaaagctaggattttcctttcaatttagttctaggaagttggcgtgaa

SEQ ID NO: 59979 - DNA, 1608 bp, Homo sapiens
tatttactgaagaataccagattaaatggattagttgtgaaatgactagagtattaaattatatatatatatatatatatatatatatatatatatatatatatatatatataaaacgtgataacttaaaatgcccagtgggcctatgtaatataaaatattacacaagcacatgaatatgatggacgagatgttattctgtttgcagattgtgaaactatctgtagtatatatacaaatggttgtccacacagaatttgaatcaattttaaaattgtaaccttaaatttcagttttgaagaaaataaattgttgattttcatatctacttgagaggaagttaaaaatgttattttcttttcagttttttttagattaaaatagctcccacaccctccaagaataaactttagttttaatcctaataactgtttatagatagtaaaattaatattttaattagaaaaataaagcggcatacatttttgcctgtactttgctggtacacaaatgaattgggaagtaattgtcttatgttttcagtcctaaagtgttttacaggttttaaaaatgttccccccacccccatctgtttgaagtcattattattttgtactttacacatgtgatttctctagaatcattgcatgtgacatgacactctcaggatatataggatatataaatatataacttagaataagtagaggttggtatttttcgaatgaagtaggaaatgaaagagtaattattaaccatatcctttttacattcctgacatatcaatacagctacacatcttagaaacaagctcaccagtagaacagaaataactctgttgactctgctttaaaatatttcaaggcagtttaacagctgggatgtatttacagctatggtataaagtattaattttgatgcaaggctacctgcttttgtaatgtagtcctagaagcttagcagttttctgggttttataatttggagttgcttttaaaatttaaccgaatgggaaaatgtctttctgaacttccccttcccacacccccacacatacaagcttttctcctcttctgttaactagaaaattatattttcgttgctgcctgaggaagagaattttgagtagtataaacactgattgtagtaaatgtggaaaataatacaaacagctgcactgcagaccgataagacaaatcccacagtaatggcctttaaaacatattaccaagttggaaatcagtgaggggaaaaagaaaactattactatttcttcctcttactgttcagtgacattatttttaaaggtgaaattacctctggttttattatcctaggaaggtatttttggaacatttgatttattgttttgcaaatgtttttgcctttgtgtgaataactttgctaattttgtatgaatttgattctaacaaatgttgaagtcattttgttaacaaaatcttctaaagtattttttaaagaaataaaaaggaatatattatgtaaacattggagcagactatcaaaataagaaaaggagaacatttttatctggctttggagtgccatttaaaataggaaaagggatgaaatatttgcagaaaatat

SEQ ID NO: 59980 - DNA, 818 bp, Homo sapiens
atgtgatgtgattttttaaatcattgcaggccttggggtagagacagagaaatcattgatttgaccattgcagacctcaggtgagaggtactggtggcttagaccaggaggcaccgtctgtttctatggggctcacaacttgagtggttattacatttttaaatagttgggggaaaaaattaaagaagaatgtttcatccagcctgggcaacatagtgagaccttgtctctacaaataatttttttaaaaattggctgggtacaatggtgcatgcctgtgggtccagctgcttgggaggttgaggtgggagaatcgctggagtccaggcagttgctgtggagagctgtgaccatgccactgcactccagcctgggtgacagcatgagacactgtcaaaaaaaaaaaaaatcaataatgtttcatgacccatgagaagtatgatgtcacattcagatcttattgatgataagcagttaactagaacatagccacattcattcatttttgtctgccatgtatagctgcttttgcagtttttgtcgtatgaagctgaatgcacagactttcttgccacgcagcagttcagtgggttattgtgatttttttttttttaatctcaggaccaagattaaagttttttgtgcagagttgcaggtagccaaattactttttgtattcctgtgccttagattcctcatctgtagagcaaaattgagatcgtctttcaggtctgtttgctctccacatcctaaggtcctaggtctgaatcagacttagttcttctgttgtggctgcttagcacatcaggctcctaact

SEQ ID NO: 59981 - DNA, 1107 bp, Homo sapiens
tagaactgtccactttttcagaaaggcataaaagaggctacgtggctgtgaattgttgtttgctgtgaaagcattgatactcctggaagaaagccctctttaagactgtctaatgcccacgtgttaaggatttgggagaggccataagaaaaattacgtgtgtgtgtgtgtgtgtgtgtgtaatgtgtgtaaaattcaggggaggacatcttccttctccagagttagggtcgtaagaggatagtctcgtggccttgacattaagaatcgttcacttgcacgtgacattatcagagctgtcagtggaatcttctagtgactagatatgtaggttcgtaaacaatataagggttttgttttgtttttttcatttttcttaagttttttttctggaaggcatctatctagtctgtatactgccagcctgagctttccactcctaattgtgtggctttaattataaaatcgtgtgtgtgtgtgtgtgtgtgtgtgtgtgtgtgtgtgtgtgtgtttcaagtaagtgttttccttaaatccttttctaacacctgaatccaaaccggagtggagggagggcgggcagggatgagggagaccactcctgcctcaagcctggagggcaagagggtgagactgcagccctggcccctcacacggccctcaaggaggttgctcagaggcagtaaacggggcgctcccaaggccagatcagcgcagccttctggtttctttaacagctgctggctcctgatctgactttcccacataccgaaagggtttggcctttgtacgttccatttcctggttaataattgaatgtagaaaagcaaggcatttcgtaaatgggaacaatgtgatatcagtccttggttcattgatgtagctcagatattaaaaacacccaccaataattaaatgtgtgtactcattaagaatggtttgagaactgttaaaaatatgttacggcagagcaacggggcctatattttatgcattcctttaaattcagagtacctggggggcacgcgtagtgaacaggctcaggacctcgggatctgtcagctccctcctaagttctgtttgcgggggctgctcaggtggggcgta

SEQ ID NO: 59982 - DNA, 1088 bp, Homo sapiens
acttggaagacttgccagtaaaactggaaaattggcagcctatatccattagagtcattttgccgaccatggcaagcagctggctttacgggatttgattcccatcactcacaattcatcatcagctggaggtgtctgcagctcttcagcacagagcaatgctgggtgacactcgggcccccacgacatgcgaaaatctgctgagtaaatgggccgaggtttctctcaagccttgtttggggcaaggccgactcctgcttaatgagtgccgctctgataatcggatgcgaacgtgaaccttgacctcgtgtcaaaggagaggacgcaataagctggatgaaagatacaggattcaggccttcaaactttacaccaattagacagggagcggggagatacatcaggcccactaggttcatcaaaaagacttgtgaggcttgtgaccattttgtaagcccaacattggagacatcctgtcacaatcattaagtctttatcagatgattcacaaaagtgttggagaaacgtgcgcacacatcctgcaggaacgggccccgcacatgggggcgtctgatggagacggaatggtggagggccctctctgtgcacccaattaatgcttggcttcccagccaccctgggcaatccggaaggtgttgcttccattgggcccactgcccagctccctggtgtaccctacatgtactctacggtgtgcgacacattctgcaggagtcagcgctgctgggagcaaggctccaaagtcctaaggtgagagcccctgctcccaagggccgagtgctggcattttgctgttgttggaaggagcccagctcaatgcccagccatccctggagcacgccctcgagtgtcagcctcttcccacagactggggcaggtgtagtttgtgtttccattgcattctttgacatttggtttgtacatttggttctccagctcaattttttccaaaggatgaaacatgttgaaattcaattaagctcgtgtgtgtgtgtgtgtgtgtgtgtgtgtgtgtgtgtgttggggtagaacatgtttctgttgagcaagatgtatctcactatttt

SEQ ID NO: 59983 - DNA, 969 bp, Homo sapiens
atagataggatagagctaaataagtagactagtagacaccacgagaggaactagggaggggaaacaggaatgaaaggcggatggagcagggaggatctaattctatgattcagtgctgtgcttggatggggcagaagatgggatcgcttcagtggggacacgccttctttaaagtcctttgaattgaattgccggactctcacaatcagacagaaggactatttgaatttcaggcctccccacttttcctgattgtctcgggctaaatccgaggtttttttctgatgaacaactggggacccagcacttgcagttacctgtgcgttacctctttgcaaatcacccacattagaagcacagagccagccagaaagatggtcagtggcagccacagcagagccccttaagctcctgtccaccacccacttgctcccaggccctggcggggcccagagtagagctgtagccaggtcaggctggcctttgcccctagcgtgaccttgggaaatccccaggccgcatttcttcatatttgcagttgagttgctaacgcactcacttgaagatcctgtaaaacagaagcaggagctgcctgcctgtctggcccgcagattctgagcaaggggatgggaggggacgtgtggtggaagggcacacctactggcagagagggtaggggctgtgccacccatgtgaagccaatgtacttggcggggggacggggctctggccagtcctgggccctcagatgcctgcagaggaagggctgggtgggtgtttgggaggccggcatgcagtccccaggaagctcctccacctggagagagaacagtgcccagagcgggagagtggattcctcatttttggatggcatttctactatgttctgttgagtctcagatccacttcccagagagtccccggtcctgttgcctgagtgctcagtcctaggtcagagtcagtcgcagt

SEQ ID NO: 59984 - DNA, 600 bp, Homo sapiens
cagaactgccattttcttgagcagttttcagtgtttcttaaaggactttgaaaattgccaataactattaaagaaaaattagaaataaccctaaaaatacatataattttgtaaccacctgctatccagctgcagtgagaacccaggtttcagcactgagttccactcaggtcctggcagtctgacgcagcggagctcagcacccacaccttctggtgtttccccttccaaggtcttagagggcagtggtgcttcacgggactccccgcagcgatcttggctccagcgtgaaggtaaatatttaccacttgcctgggtctgggccacagactgttacataaagacagaagtgatttgtgtgaaagtgactcaaacaaaaatggaaatgaacattaaaggggtgggggccgctctccccggcccctcgctccgctgccctgtgtgcccccgccatgaggtgacagcctgtggggcgactcgttgagatgggctttgcagacgggactgcaggtgcaggaaaacaaatgcggctatccaggaaacagcagcggctcgtgacccgccagaaatggccccggacaccacacttgccaccaatca

SEQ ID NO: 59985 - DNA, 1855 bp, Homo sapiens
tcctggtccagaaggtggcatggcaaagagcttatctctatctttacatttgctgcattaatttgcttttgtcattcaatacctcgtgtcaaaattggccccagcagatcctgggcccaccagactcacgaagggcatggtgatcacggctgtacactggtttcaaggacaccaactgctgctctagtccttctgtgaccaccagcagccccacactgtgccagccctgagcaaacgcagccattctacatggtggagatggagtaagagtcacatgcgatgttgtgcacgtttcccctagagagggtttttcttactttatggaaaccttcttgtgtctcatcaagtagccacttcccctccctcccccactgtaacattattttccctggagaaaacgccgagtgtctgatatagttacacattaattcttcagaagtttcttagaactgtaggaaacaggtgaaaaaacaaaatgccttgaactttcaacctgtgcctggcctgtgtgcgcgaggcgggccctaaggtcactcttccccgcgcggctcggggcaacgtgccagggagggctcgggccgcatcctgttggctctttgatgctttcgttttgtcgcttgctagtttctttacagcaaaggcaagggcttcctgctaaggcagacccctcaccagccccactgcataccccggaaaagtccctggcaaaacacctttcttccattatctgcaccggccccggtaaaacgctggcgcctttgaaatcagaggccagggtctcctcttcacagttcgctcaagacactgaacacttacgggtctgtgaaatcaaacggacacttggtccctgatgccaccccaggcctcctgaatgctcctcagcaaccatcccttgagtttttactctttggccatgccaaatataaataacgatttttttcatgccatatcactttaaaggcaattgtgttgccacctttaaaatgttcagtgaccaacaacgcagacatgaccatcccctgcatccccatgtctgcttcaagtatggaaaggaatcactggaaaatcccaagatgccaggccagggaacgagctctatgcaaacaggcaggatggagaaccggccagggccatggccccaaattccaggcacggcagcaggagcggaggtgctgccagcccctgctgcctcctggtgtgacactcagaaggcgcagcggaggcggcagcaggaggcagagccaggaacacatgctgggcaggcggccagcggcccaacactggagatgccgtcaacctcgtcacacagggccaacctgcaggcacggcctcaggaacctggctccacttgccggacctacctgtggctcacgggggatcaacgccacccccaagggagagccctgactccatgcccaccccatgccaagtgctttacttacattcttcacctggtgctccaaaccacatggtgaggccgcttcactcccagcttctccccccttttgcagatggggaagctggggcagaggtgaagtgactcacacacaaggcgacccaggcaagggcagcagagccttcacgtcccttcctgacctccttcctgacctccacgtcccagggcccctggaggagggcaccccctcactgcccccaagcactccagggccccaggcagccagtggcctgggctgccctcataccaggctccagtcacatctgccgtggcctcctgaatctagaaggtgccctcagggtttattaagcacaccctgggctgcctgcctgcctggcatgtgccatggaactggcactcagaagctgccactatcctgaaattcccgattttgtcttt

SEQ ID NO: 59986 - DNA, 514 bp, Homo sapiens
gaggggcagaggtgctgctcagtggggggctggggctcacgaccttggcaaatgactgaacctctcatcctggatctccttctctgtccagtgagaccctggcacttcccagagtgggggagtgggatcccctgggagtatacaagtgcccagcatgggtgggttcaagcaatgacagttgttttgaatgaaataaaacaaataggaaatcattaactctgctcaaaggtcatgcggcagagtctgcatgccccggaggaggctgtgcccaacagtgggttcgaaaggaccagattccaggcagctcctgggtgactcactttgcctcactggggtttaggtgcctctaaatagggacagaaactcttaccttgcctacctcgcaagcttcaacctaaagctcaaattactggaagtacacagaagttgtgaaattttattcttctataaaacggcaagcccctgtccactgcctgtgtggaccccgacagaaactaccctagatattctctac

SEQ ID NO: 59987 - DNA, 1189 bp, Homo sapiens
cgcgccactgcactccagcctgggcaacagggcaagacttcatcccaaacaataaaaagggccagaaatcgactgcattttcttatcacttaaatattaaatcaactaagcgtggagttaagaagctgtgttcaaaaaacacttaagtctgcttttgagcttgtggcgttgtccttggcccacagagtaaaacagcaatgataaccataattaataatcaaggcagtaaatttcttcaaaatttcagaagtttcactaatggctccaaagaaaccttagatcagaaattcacaagtgccaggagacgtttttagatttcttttgcagcttctagtctccttacaaacaggaaatctttaaaatgaaaaacaatttctgagaagtgttagcccggttcagctgaggtcctctgaaagccagcgtgtgggctgtcacgcttcctttacagggaagcagcgcccgtgcgtgaggcggttcctggcttttaccgccctctgcccgttctggcaatcgcgcccgtggcccccgcgcggggcaatggaggacgcgtttcggggtccaccgtcccctccctccggctggcctcgccggccggcggcgccccaggcctcctccctcacccgcggggacgccgagtgctgcggcctcgacccggacgccgcgcagggagcgacgccccaggttcccgcgggcgccaggacaccccgcctggggggcggagcaggcgcagccccgacccccgcccgggctcagcgcctcacctgccggcagccggggctgtcggggagggcagggccagggcggaaatgcagggccgggcccgcgcctctgctcccaggccgcccccggcggcgccccctgcaggcggaacgcgaggcccgccagcccctgcggcgccctcgcacacacgtggccgctcgcacaactggccgcctaacagccagacccacccacgccgatgcccgccggagacgccccgccgcagacacagcgcaaccagcttcacacacctggggacgccccacagaagtcacatccaccctaacacacctgggcactcaggctcaagccccgactgcatggtggaccctgacacacctgggccacaccccacaaaacagactcacagacgactccacaagcttggggacacgccacatcaaatggacacacatgcacacacaaatga

SEQ ID NO: 59988 - DNA, 2063 bp, Homo sapiens
agccatttcccctatctaggtgcactggccgtgattttaccccactccatctggggcgcgcccggcgcagacaggactgcagagaaaagggacagggaggggacctagtcagtccctactataactgtttctcaagacattctccccatgcatttatttgctctcccggggaaagagcgaagtgtgggatgactcatagtggctagatcgttcctctaactcctcccttcttttgtgtgtggtttaaaaaaaagaaaaacacacacgcagcccatagccacaacatcaacaagaccagaagccccgcagagttcgcaggaggtgggcagtggctgcgccacctgctcggcttccccaaactccgagcccacgccgggaagcggcggctcggtggccccgggcgcccgggccggtggccccgcgctcgcgccgctccgctccgcagccgagcgtggagtagcaggcgctcgcggcgcggcgggggagccgccgcggaacccagggcaggcggccaagcggcccggctgtgtccagccatcgcctgcgccgcggccagctggcggccaggcgcggggccccgcggccagatggccgctccggggacgcgccgcaggcgccgggtgcgcccgggccgagggagcgccggcgcggctgtgcaggcaggggctgggggcggcgacctctgcccgggcggagaagctcaggggcccgagcgcggcgggcggggcgcgcagcctccacgccgcgccctttgtcccatgtgcggctcacacaggggcccgcgtcccccgtgaccccggcccgggccgcagctcaggtcccggaaccaactcctccagcagcgccgctctggcccgggccgccgtgcggggctcgggacacggcggcagcggggaacccgcgcccgctccgcgtccaactccgctcgccccgcggcgcgctcggccctgcaggggccgccccgcgcgttacctgcaaggagcctgagccccggccgcatctccctcccgggtgcggaaactctggcggctccaggcacccgcccggacctggcagggggaggggccgcccgccgcgcacccgaccccccccgcgccgcgcctcccgcagctccccacgcgcgcgggcgccccccagcaccagtctcggcccgccccctccgcccgaccattggctgctgctcccgtcactttcaggccacagccaagtccctcctcagctcattggcggacgcgccggtgacgtcaggccagggggcgctagtcggcggcgaaggaggcgcagggacagacggacccggcgggagaggaggaagccgggttgtgggcgcggagctgaggcggaggcggggccggggcgggaaggggcggccccagctgggtcgggcgaggctggctgcgggaaaccgagtgagccctcgcttttcctccggggtccgcgcgcgggaccctatttctggcctgtctcgcgcttcgcctgcgcggtggtctccacgctgggactgcggcgtcctcgcagaacagccagaactccacttcttcctgtccgggaggagttgtttaaaacatgcgtatctccaccttctgcttcttagaacagaactgactgaagccgtgttcttcccgccgagaccatgccgccccatcgaccctgctgcggccagagccacccagggcgggcccactcaccgcaggctcgggccacttggttccaaacctccactcccatccaggggcccggcacacccaccacactcccactctcagaggtctttgccgcctgcttcaggagaaaagagaaacttccactttccaccggcaaaactgcacacctgctccctccatcaccgagcccccccccccaccttctgtttttccagtatcgcagaatccgatccgttgctccctctggactggaatccgtatcctcggcatttcatcattccaagattctctactccacgtacccttgctgccaccctcttctactttccatcgctgaagttggtgaaagaggcgcctgcccccagttttgtggtctctcaactccacgtgttcgttttc

SEQ ID NO: 59989 - DNA, 843 bp, Homo sapiens
tccacccatctcagcctcccagagtgctgggattacaggcatgagccaccatgcctgaccatattatttttcttttgtcaataaccagtttattcttccccagaagattttaaggattttctttttattttaatgttgaagtttcttcatggattttcaactgtcaactcccaaaatatctatcaaaataaccttttgataaagcaaagctaagtttattaaacttactgtaagggagaccatcactttgagaccttagcaatggctcaaagggagaagtaaggagaggatatttatagcattttggtgtctgagctcatgagatttgaggcagttctttcaagctggggaattgactgggatgagcaaagttcgtaactgatagtttaggattgtggccacagtgaagctaggggctcaaagcaaatatttataagtaaactgtttgataaaagagctctttgcccagatgaaaacatggctgtcctgtgaggaaaactggccagatgcacaaactatttgcccagacaaactggtttgcaggaatttcctaaagtaaatagcagttatttattggtttacagctttatctttctgggcaaggatttcctggagcaaataattaagttatgttgaaacaggtggtctttgtccttggtcctaatatttaagccatgtggatgcaaatgttctctcttctcaactgtgtctggataattttaaaaatatttatcctgctgggtattgatggcttctttcagagacctcatgtcttacttcgattctgtacatttctaatcaactatttcttaaaattttatttacttttaatttctccaggct

SEQ ID NO: 59990 - DNA, 1717 bp, Homo sapiens
ggtgtactgcacccattaactcgtcatttagcattaggtatatctcctaatgctatccctcccccctccccccaccccacagcagtccccagcgtgtgatgttccccttcctgtgtccatgtgttctcgttgttcaattcccacctatgagtgagaacacgcggtgtttggttttttgtccttgcgatagtttgctgagaatgatgatttcatgtcctttgtagggacatggatgaaactggaaatcatcattcttagccttcttttcagtgatgtctgggtcatgctggtgttgatattgtattcattctcattttcattatctgaactcttagaaaacatgcacaacaatgggactagttaattctagtcctaatcacaacattcacactgttaaatagtaaaatagcaccatcttgactcaaggcacaataggtaattcacaggcaaagtaggtctgtgaaggttcacaattacaatgcacttaaattgcaaacttgagtcatgtcactcaaaatgatgtaaagatgaatgactcattactgtgaaccaaaaatgaggttgtcagatcagtggttgggggaaaaaacagtgatgacagctatggaaggctgataatctttgccatatctttttgccactaaaaacagcgttgcttccagcttctattttttgaagaactcaatgtatagtcaccaccctggtttgcccaagaagttcaaaccctatccattgggagtttgtacttctcgtcccaaacttctgcattcattgccaaaaatctggactctttgtgtcatgaagagggattttttggaaatcagactttcagcactaaaaagggaaattcctgggcaaaccaaagtggtgactcactctactagccacttatattgtgatagccaaatatggtcacatgaatccaaccacaactgaatttatgactagtcgagtgctcaggaaaagagcaaatgtgtttactaagtacctcataagactgctttatctgcctttttgcttagctaattcctatttatttttcaaattttatttcatatgtaacctctactgagaatccaaacttgcacagtcaaatccttctcatcccatgagtttttctatcataatgcaaatccttccctttcctcgtcttttcctcccatatctctccatctcctgccttcctcctctccttccctctcccttcctcctttttcctttctttcttccctcattctttccttcctcctttctttccaaaactatgtatcgtacctcaactgtgggccagattcactgctaggtaagtctatgtttaccttcataggaaactgacaaattgtcttcccaaatgtctgtgccattttaaatttccactagcaatgagtgagagttcctgttgctccacatcctctccagcatttgatgctgtcagattttcggatgtgagcctttctactagatgtatactaatatcttcaaagttctagtctagcatagggcatgctattgttggaataaatcaatgaataatgaaatgggacaaaaaagagtattttactacttattcttcgaggttcctctgttactgaagcaggctgcatttggacaggaattacaattagaaagggattgcaagcttaaatgcttacaaagggaaacagagtgagtgtaagggcaggagagaatgggaggaactgtggcaatttggagaccc

SEQ ID NO: 59991 - DNA, 2356 bp, Homo sapiens
gcttgagggtagaaaaagaaaatcttcgaattgcattacataccactcctttccctttctatagatttccccctctctcctttccaggaatattgattttcttccctgggtttctgaaaaagcttttctccccaggcatctttatttggtttgctgaccaaagcattattcacacttctcctgcggccacgccaatgccacacccgctgcaaggtgctcccggtctcctacctctgaacaacagtggtctgaatctctgacttgagccgtgcagccctttgaaagaaaagtcatttaggagctcagccctctgaggatgtaaagcccgtcgcaggtgcttgttttgtctgtctccgtgtgtggaagatgccttctgtgaggtcctgcgcctctgcgtaagcagctgagtagctccttgggctgacaaaatactttgttgtggctccattacacacccagggcaacctctttagctggattttgcagaccgggaaatgggctctgaggggaagtcacgcctcatctcaaggtttactgaggagccacgaggaggccccaccgctgccacagctaactcatggcctccggccaggaagtctggagattttaagaccataatgtcagccagggtgacctctggaacctgttcaccccttcacccgttgtgaacaagagagctgaatagccactatcacagataataacaacagctgacattattaataggatgccttacaggctgtaaaatactttcacaaacaggatctcatttgatcctcataatctcaacatgaggtgcgtaaagcaagcaattattactaatctccttttacagaagagaaaaggaagtcctgagagatgaatccacttctgggaggtctgacaacgttcagctttacctaagccatggtcaggaaacttttctgcgttccaggaaatggccggccacaacgactggcccttccctataaaaacttacaaaaccctcacaggtgacctccttgtttacctatgacagaaccagacacagtgccagatcctccaaactcccattctttgccttatatgtaatcagttgaactgtttgtatctactgactaatctagacaaggtacttgctaacttgacctgtttaaaagttcgaaatgccaaactttctttcttttttttttttttcccatcccaccccacccagatggagtttcactcttgtcacccaggctggagtgagtgcagtggtgccatctgggctcagtgcaacctctgcctcccgggttcaagcaattctcctgcctcagcctctagaatagctgggattacaggcatgtgccaccacacccggctaattttgtttgtttagtagagacagggtttcatcatgttggccaggcttgttacaaactcctgacctgaggtgatctgctgcctcagcctcccacagtgctgggattacaagtgtgagccacagtgcctggcccgaaatgctaaactttcatcaagatattgcaatagtcttttctaagaaagctcttccttacttaacttgtgcctggccccaaatgctaaactttcatcaaatattgcaatagtcttttctaagaaagctcttccttacttaacttgggatttgttttatctgacacagggcacagggtaaagatcagaggtggcttcctgtcactcatccagccagccacccagctatggttacccacagggcctgatagccatccctgccagcggtcagggttgcattgtggcccccactccaggccttgcttattgcaggcttggttcccatggctgctctctgtgttcttgcaaccttgcatcctgccagaatctctggaagaaagctctttggcgagaaatgaagaacaatcccaaaggtgctccaggaaagttcattattttgtgtactctggtgtcttaccttaatcagagaacagttgtctgtgatcctcaaagagggaattaaagggaggaatggaaccagaattcagtgacaactggaatgagtgactgaggtgtagcgtcaatcatcaaggtttattaaactacttagggtgcgtctggaaaaaacatgagccacaaatacatctggggttgtttttccaaagaggtttttgggagatttagtatttatacatttccttagagggaaaaggcatgtggaaagaggggcaggtaggcagttggcaaatactacattttacataagataaggcaaatgaagagagaaagagagtaaaggaatagtccattttacttatgtctttgttctgcacctgggaggaagttcttcatgacatcagtgtggaatcaacaaactttagttttaggagctaggcttagt

SEQ ID NO: 59992 - DNA, 819 bp, Homo sapiens
atgacatcaaattattattattttttttggttaggaatcagttttaggagctaatttatttcctaaagtctctcatttcttctttaatgtcatttgtgtagtgagagatattaacaagctactctacaaatgatgagaaatataaaaacaaattaattgtatctattaataaccgtatctgttaatattatgaaatttccatatttctccccctagctgttgtcaacatcacatctatttattgtctgaatttcaatttctttgttatccctcatatatgaaagtttaaccttgaacctgaaatgaccactaaatatactgccttaaaaactggaatacacatgggtgtggtatgtgtgtaccctcacttattccaacttagatgccttccattccttctatccacctttgctcctgaggtcccaggctaggggaatttgggttgtactaataagcactttaatattggccaccagagggctcccatattccttccatctaagtatgaaaatacaaagtgcaactaacataaagttcaccatcaaatagaaaatattataggaatttatgatatagttctctctagagtgaaagtgttccaaacccattgtgttcttatataaaatacttacaatgaaccaatttgggatactcaacactttcattaaaataaagttatgaaattatgtttggttttgtctttgttttgggaggttatgataagacttataatacttaattggtgattccacattttaaatattaatgttagtaaatctggatgtaaatccattatttacatatgaatgatgtaaaata

SEQ ID NO: 59993 - DNA, 1320 bp, Homo sapiens
tcttaggtaaaacactagagaaatggttttgtgttctcaaaatgtttcatctggaagcacatgatgtccatctgctcatattggtgatgtcagttttgatgagctggtcaaggtgttggctggtgtcttaactgtgttatttctgacttaccctcttcacaaatgtgcattctatgaggaaatactttaaagccatacatgtatcacattcctcactaaaattaccccagatttaacatccgctgatgacaatcacctgacacagtattgacaatgatgactggaaaatgatgatttatgaactgtaacattctctctgaattgactagttggcactcagtattccaccacaaacaggaatcctcctctctcatttatcagttatttgttatttcatttacttagtgacttattatcagtctagaagcacaattcttattatttcattgatttgttattcattttgtacataattattctggtgcacagagttttccagattaggtattaaagcccatcaggctagcttttgtgtttttgtgacatgcctgccttttgtttttgttttttgttttgtttttgcaattctttacttgttggcataataacatattccagggtcatattggacctgcttcactgcacctttggaatcatccacttatccaaacagccctgattccttttagtgaaaatggtatttgaataaaaattgtgggcacagggatacttatttccactggagggtatttgcttcttggccctttctgcaaataggcttgtgtcaaaaaagtagattgaagcataatacaatttttattttatctgagcaaacaatgattcatgaatcaggcagctccaaatcagaagtgattcaggtgcttcattgagggaatgcaagtgggaggcttttatagggtgaacagaaaaagaaagcaaagaaaaatagttggttggctaatgttatatggttgccttatttagtctatcctgttggaaagtccctagttatataattataagtttgttggttgcttctgattggttaaacttaagttctgttcttctttaatgtagacatttataagaaataacttaagctaagtttcacttatttttgcctgtcaggcaaggttaggatcatttatgaggcctaactggcttagtctgctcaggggttctttaggccttgtctccattttaatttatcttgacactagtaaatatatgcctgtgcatatacacacaaatacatatacacatacttgcacacagatatgcatgtacacatacacatacatgcatattttagaaatcatg

SEQ ID NO: 59994 - DNA, 952 bp, Homo sapiens
aacttaaaaaacgaaaaattattaaggcttccacagctaatctggcttttgttactaattggataggattccaactttaaaaatctcttttgaataacttctgcctttaggatttgttttattctgccacatgtttttaaagatgtcaacatgtgaatggatttcagataggaaaaaatggttgcttttaaacatggattccgactatgcaacttaagaacgttctcccttcagtcgtgtgtctccctttgtacctgcctttatccccaaggtttctattttattttccctccccagggagggaatcctcctgtggggcacgtcactgcttgtgaattcaggtgggccttagtggcagatgacattctcttgggcagttagggacttcctgggtcccgcatcggctagatgtattgttctaaccttcacagccattaaactttcaagagtggagaaactttttctccctcttcaatctggttttcaatgttattgttaaagtgtcaacaagcaatgttattgttccagtgtcaacaagtctctcgcaaatgtcagcatgttctgtactttgcccagtttcctcacaacagatctgtcgctgaaataaaaccacttgtctccaagaatttcaaagccattggctcctgtgaaacaacagaattgactgtactttaaatgtgaaatatttatgtgttaaaatcattatttatataggcatttccaatgtagatctgtttgcaatgtttgtccttaaccttacatgagggctggaaataaagaaagataggaacttctttgttttgttttttttgagttggaatttccctgtgtcacacaggctggcgtgcagtggcacagtctcggctcactgcaacctccgcctcctgggttcaagcaattctcctgcctagcctcccaagtagctgaaactacaggcatttgccaccatgcc

SEQ ID NO: 59995 - DNA, 1746 bp, Homo sapiens
aaataagcagcttaccttagaagttagcttgggactgattgatgtgagtccccgagagatagcccttttgctgaatcagacagatctttcatctatctctaaaaagtaccatctactccaggaaacctggcagtttctactacctttatctgcattgctttgcttgtgacagtcctttgcatatatgatggcctttttcagtgctttctaaagctatttttaatacaaatgaaggatttgaatttaaattaaaatccagctgcacacattattattaaagataatttcgttgtggagaaaatctaatcagtagatatttttattgatgttaatgtgccaattctcagacaataggagtacatctttttttataaagaaatcattttaaaattgatcctaatttcagaaaccttaaaatatgaaaacaacattttagagttaagggtttagctaattaaatgttttccaaatttaatcttagtgtttcttcaatagggagacactggtatatcttaaaaagagccctggactaggaggcagaagatctgagtgaaatcctgattcagacacttataggctgtatgactttgcgtaggtcatttaaccttttggagactccttcatcttgtctgcaaataaagataaaacacgagaattaaataaggattgaaacttgcggttttctgtttcactcatttctgtaacaggtttcatgttttactttcattttcactgcttctcaaagtgtagtctgagttataagattcctctttcatgtaatttttttttatatttcttacaagtttttttggaattatgaccacagaccatagcttgtagaaaacatgtgatatttcaatgctttttgtaatacactttattttttagtgcacttttaagttcacagtaatactgaacagaaagtacagggagatcccatatactccctgccctcacccatgcatggcctcccctgtcatcatcccccaccccaccacagtaggtctattggttacaagtcaggaacctacatttacacagcactatcccccaaagtaattattataatttaccttaggattaactcttggtattgtattttctatgtgtttggtaaattttataatgacacgtacccaccatgacagtaacatatagagtagtttcactgccctacaaatcccctgtgctccacctgttcacccctctctccctacaacccctggcaagcacggatctttttactgtcaccatagttttgcattttccagagtgtcatacagtgtgtaggcttttcagattggtttctttcacttacgaatatgcacttaagttttttaagtgtgttttgatggcttgagagctcacttctttttattgctgagtaatactgccttgtctgaatgtaccactgtttatttaaccattcacctactgaaggacgtcttggttgcttccaagtttcggcaattataatgtagctgctgtaaacgttggtttgcaggttttcatgtggacattaagttttcagttcctttgggtaaataacaaggagtgtgattgctggatcatatagtatgtttagttcagtaagaaactgctgaactgtcttccaaagaggctgtagcattttgcattcccaccagcaatgaatgaaagtctgtgttttctccacatccttgccagtgttgggtgttttcagtgttctggatttgagccattctaacaagcgtatagtggtatttc

SEQ ID NO: 59996 - DNA, 2290 bp, Homo sapiens
tagtgcgtttaacacagattgggcataacagaagagagaattagtcaaaacaaataagagatagacatttaatgatgaaatatttaaagctttctcccagtgatcgaggacaaggcaaggatgcctgatagcaccacttgtattcatcattgttttggtgaacttagtccatatataaaggcaagaaaattataaaaagacataacaaatggaagggaagaaataaactgttattgttcaccaatgacataaagtaatttctggaaaaccattaaaattattaaataaagttcatagaaaataagaatataagaaaaaattagttgtacaactatcctagcaacaatgttagacatgaaagagtatattctgcataattccaattacaaaaatttcaaaaattgatctacagtaatagaagctaggttagtggtggagttggtgggggacagaagaggaaatctgggggtgttagtaatattattttctttcacttgagtgttaaattgatctgttcactttatgacaattcattgagtcatgaattcatgatttgtgcatttctctgtatatgcatgataagtgatactaagattgacatactaggaatatgagacatctacataagattttaaagagtgataagagccataattaaaattatgattaacacacttttattcttaataaagaggagtatgcatatgaatcaagaaattggtaattttagttttagagtcttgttggcttttaaacatctgttcacttttgtggttcacagatattcaatttttattgaaatttaaatgtgaaaacacatctgtttctctgattcatatttttatggtcaactctgaaatgagacagttgtgaactgagaaattattcaaaacacaagggatgtgtcttcctattatttgtgaggaggaagtacaataaagtcctgaaatcagcaacttgcattggtggcttgtttacataaggaatatattaaatatttccttttctactgtggatttctgtctttctcaattagactataaggtcaatgtaagaagggttcctaaataaatgattaaagaaattaaagtgtgaatagcagagctacattttgaattagagatttttaaaaatattgtcaaggtaagggacctgcggatgatatttctcatggaaatctatacttgtttagatattttttttccagtccaatgaggtaatgtctgatcgcctagatgcttctgtcacaaccttagcaaggatcatgatttctcaattgtattgctcaagagcctttggctgctcttactgaccagcctattactcatcttgtacactttgatttatgtattcaccacactaccttcaaggtaatctggccaaaattttattttctaatttttcagcttaaagtttattaagactttaggacacgtctagattcctttcctctaccataccctcttagtttcacttcaaacctcagtgaaagtgtgacctttttcaagaagctctcagggctggaaccagatatctgtgatctagttacatttcccacattcttaccaccttgagttataacatgtaggattatttgtctgctctgcccaataaagtgtaagacacctgagaaggatttagagtaagaataaaagcaagagagagagagactgagagagataattagcgtttttttctgaaaatgcattgtcctcttaatgctcatggtactgttgggtctcagctttctcatcagattctaaaatgctcaaaaactttttgattaaagtaaatgtaattgttgccctgcaccgtggtcttatattttctcagatatatactaacagcattagaagctgtactttactttctttcttttaggaagaatattaagttagtttgtgtttaaatgaactaattgttttgcaaatgtgtttataaggagatgatatacatttttttttcttgtaccttatggtaaatacttgaatgtttgtattatatattttcccagtatcttcctttgacagtaatttttatatcatgacccttatttcatgttgaaaagcataaatacattcatggtaattgaaaatattaattacttttctttagcatttgtccaaaataaaaagtaagtatcaccagtgatttaaaatgcaaattttgagaaatacaaaaattggatcaagttctggctccccatctgctggccaggtgacttcttttttttctttttttttttttttagtcaacttttaatttctagggtacatgtgcgggatatgca

SEQ ID NO: 59997 - DNA, 742 bp, Homo sapiens
gggaaatgagatcctatggtttacacatttctttcttaaaactctctgcttcagctggttatttcctcatcctctcactcctttcctgtggttgcttcacaggccacggcacatgttcctgtggtcgctgtgtttgtgagagaggatggtttggaaagctctgccaacatccgcggaagtgtaacatgacggaagaacaaagcaagaatctgtgtgaatcagcagatggcatattgtgctcggggaagggtgagtatctctgctggtgcctggactccattcctgttctgacacatgatttgtagaacagcatgtagcaactgtctttcccagactgaactttgcatgaaagcaaaccactatgtcctctgctgtccccaacttgaagcttgaagattaaccaaatgaagttttggatctaagaaaatgaaatgcgtgtgagaggattcatgcaaaaatatccttgtatgcaaagttattgctgaatgaaatagaattaatacttttatcaagaaattaggacaacaaaatataccagatactaaatggacccaaaaatggggaaaaaaggcaaaagaatgattattgggctcacctctgaaacaacacagctcagaactacagaaaagtaatcacaagcatctgagctgcccaaagatatgactttgggaacttctggggctaaattatttagctgtatgtggagcaggggaagattgaaggtgtgagaagacataaaagg

SEQ ID NO: 59998 - DNA, 676 bp, Homo sapiens
agaaaaacagcaccatctccatgtcatagatgatgattttgtgtcttagaggacataatagattaagaagcatttatttctaccaatttgatatttcacctacatcatgctgctatttagtaaatatttattaataattacaatgttgaaaatacaaaacagataaaaggggtttaattttttccccagggcaccaaataaatcatcttactgggatatgaggaaattaagcatctgataagaatcagcaacactgaatttgtggaatacaaaggaagcccacatagttctgaaatgcaatgctgaggattattttctcttggttttgctttattagccgggaacacatcggccatgagtccccagattctggcaacaacttgtttgataattccaaaggttaacacaaaaggacaaacatgaaacactgaagagggaggccaggaaagcaagaaaagaggcaataccttctggggaaagagagaccctgaggaggggagaatgtcaacctgtgggttaaataactctaactagataaagctggagctgtgaaagttcaccatgctatagattttgtcctctaaaaatcagcagtgaattttcatattatattatgaaatgttatagaaattaatgaattatattgtcttactttccaggttgttagttgaaagtg

SEQ ID NO: 59999 - DNA, 1683 bp, Homo sapiens
tcatactttaacagtatatatatatatatatacatgtatatatatatatatatataccattacaaatactaaaattggtctaccagatattaaataacaaattaaaatttttgagtactgtgaacacatggaaacaaatttccatttattctttacttaatgatgtctaaaattcatgcattcatttattcagtaaatatttagtgagatcctagtatttagccatcactgttcttgatcttgagaagttagaataagcaaaagttgacatagtttaccattttttgaagtgtacagtctaatgagagacaaatgtttacactaatgatcgtattattacaaattaagaaaggttcttataagaaaaggaatgatttctatgagatcacatagataaatctggcctagcttgggtggtaaggaaaagcattgaattctgaactgagatctgaaacaccagtatgagttaactagactaagagcagcgtgaagaatattcctggaaagggtgatataatatacaaagaccctggggcaggaggagagacaaggcatttgaatgaaaaagagaaaacaacgaaatcagaatgcagaatgtgaacacacagcagtaggatttgggatttgggtattaggcatgagtgaaaccagtggtcacattaagggtgagggaagagagagacgctctcatattgttttatactcagtacctgttttaagaaaaaaagaaaaaacaacaaggaagtaaaaccaaagacaggcagcccagcgccaggcctgaaaccaggcctgggcctgcctggcctaaacccagtagttaaaaatcaacttagaaccctatgcctggcctaaactcagtagttaaaaatcaacttagaacccgatgttacccatagatttcaggcattgtataaaagaacattgtgaaactccctgctctgttctgtttcactctgactaccagggcatgaaacccctgtcacgtatcccctagattgctcaatcaatcacaaccctttcaggtgaaatctttagtgttgtgagcccttcaacgggacagaaattttgcaatcggggagctcagattttgaggcagtagcttgccgatgttcccagctgaataaagcccttccttctacaactcaatgtctgagaggttttgtctgcggctcattctgctacaagggttttcatcgttctctaaaagcaatgggaagacattagaagttttaagcaggaacatgtcacactcagatacaaatttggaaaggctagtctggccaaaatgtgaagcctaaaagagagccaatttggatataagaattctggtttgtccattatagtaccagaaagaaaaaaacataacagttgtgtgggccaaggcattggcaatggaggtggacaaaacatggctgattggagaaatatttaggaggtcagaaggtcagcactatgtaattgtatatggcagctgagggaacagagtgtcaagcagtgtgcaggtttctagcctgtggaactggatgacattttgtccatgttcattggtgcttctgaaaggtcaaatattgcagttttgtattcttgggcaaaaaaaaagcgtaagagtataacataagtttccagagtgctttctgtccttttacagaatatcatttcaaatatctatagggtaattttcca

SEQ ID NO: 60000 - DNA, 1134 bp, Homo sapiens
ccccccaaaaatgttagtactcatgcaatgtcgaatgcaatttcaatatgttcatatactcctagagagtgcagttaagaattgttgctctaagtaattaggtaagtagatgaagctacttattttcccttctcttgctttattttaggcgagaagggcaaactgcataaagtgcctggtagagtttgtgtgatgatcaacagtaggtaggcaggagcatgagaaggcactttatcaatgccaggagtgtgctttactcaacctgagtgattatttacatgttaagcagtcagtgttgtccaatgtgaaaaatggtgtcccttctatcatgtgatattcacatgggaaaccccttaaaattatcataacgcattctctagccataattctggtatactttagaaacttaattgtattcatttccagaaactagcaatagttacagcaagaaacagcattctacaccttttgactctcagaaaacattagattattagattggaaaatatacttcattctgggtagactgtctaaactatgatatttgcctctaggtttgcctggtaactaaagtctctatggtgtataaggcattttgtggcaggaaagtggtatgttgagcattgtcaatgaagctcttctccattagataatgagccccaaataagaaatagatgagtacctgccaaagaaagaagcctcagaatagcctctggtaaaggcaatttagcgactgagctctgctaatgagtacatgatagatgctggggaaaaaatgtctttcatcaagactgtgtgattcatccagcaaacaagtattaggtacccattaactagcaagctctataataagtgtcagagattcagcagtgaaaaagatataatttcctgccctcaaggaagtttactgggaaatttagacagaaagaaaagttacaaaatgctactttgaaaattaaaaaattcaaacagatctaattaattacttttggcaagttctttaaatgatgactctccttctaattgttaagggatgagacaagactgcaggtagactaggacacttacatgaggctgatgatgaagaaaacgacaaaaactcaccttactgaccaacaaacatgaaaacatgct

SEQ ID NO: 60001 - DNA, 556 bp, Homo sapiens
taaggaaaggtgtggtagctattctgcttaagtggcccctgttgtatgaattttgcaccaatgtttgctgatgtatttccttcctttagtgaagcaggaggtgatgcctatcagtaaatatcagtagacatattctgcattttcttctctccacactcagaaggaaagaattttaaaactcagcctcgcattttaaaacatattgaattataaaacttttaatgcagggaaatccctcagaaattctccagcctgatttcctcatttcacagatgagtaatcagttgctctgggagaggatgttatctgcccaaggtcacttagctaataggaaatctaatctgcgactaatgacaaatgtgtgctctttctttcacaccaagcacttgtgggcattttttttttcttgtcagtgatataggtgaacacaatttcataaaacttgcagatggacagaaactgagaggaagatctaatgtgtgagaaatgataaaataagagttcaaaagaaggttggcaacttagagaggtagaaagaaaatggcaaaatacaatt

SEQ ID NO: 60002 - DNA, 1117 bp, Homo sapiens
ttcatgatggcaggacaagaattttgcaaactggtgactctcagaaattttattaaaaggttttttaatggagttctccttttacttaagttgacaagtattcccaaaattaaaaacaaacaaaacaaaaaatacctatattttaaaaacattcatactaacatatgatacatattcttaggaaaagccccaatttggagaaaacccctggatgtgtgaagggtcattgttacttccatggaagtatctgtgctgcttagacatattcacaggaaaacggaaaactctacttgtgagctcaggggaaacacagcaaacccacgcatatgaggtcagctctgaggcaatcaaatagagaaattagacaaattaaactgctaaactcattaacttgtataactaaaaaggacagtcaagttatacaatatgaaatctgattctttgtcaacgggcattgagatagagggcagtggaagtttatttaaacaaaaagggaaatcatgtggtaatagatcctcatttgatgattcattgaaaagacatccactctagtaatccagtgcttcacaaagagtcagttgtacctttgaaaacaaatatttgcatgtggttttgcaaaagccatccccatctcagggatagattggatgtgggacatcataatcttcaccatggcaactggcatctctccacaacagctgaatgggccatgctaatgcaatccgctgtcgaaacagtcggacgttactgagtaatgaaacctagcaccttataatcaatagaaaaattgtggtcttgcaaataggtgaagacaaaaaaatttttttgagagctatccttaagctctttattagtcctgaagaaattacaaagaatttcagtatctatttctatgcacatcatttaaaactgatcatttgagacgtgactccattgtacctagacttgcttcatagatggtataatattggaaaaatccttttggaaaataatgcacgaacagcagatcatcacaacatcagtgtgactagctgtattagaatatgaaagcttttaaaagagtaggattttaaaaataaatatctaagtgattattgcattgcgttacatatgttcc

SEQ ID NO: 60003 - DNA, 1277 bp, Homo sapiens
taacaacaacaacaaatcaacagaaaataatcagctccaacacacccacagcattgcttagaaaatgggctccctgattcaaatggctttaattgcaaaaggcactatagcaaccacaatgatcctcttggaagagttagttcttctaggatcaacataggcagcaagcctagctgtaaagcagcccacagattaaataaattctatgggaaaaaaaaaaaaaaaacctgagactgataaagttagtccataggtttgaaccatgaaataatccaaagtaagtatgactgatctgaatatggaaatgtactgtgttcagttagcaaaataaaagtggcatattcttctccatgtttatcttaactagctcatatgtatttgatgtatgccagataaaaagaaaacaatgatccagagctatgccctgcctctctcccatacttggctaatggaccagtcatggagtttttatcaagacggggagaaaacctgggacattagattacttagtcgaacaatatttacgaactttgtgacagtgataagagcctgaaactaggccatactgctctttatattttagaaacagcaatgaggtcacttttaaactatgctaaagtttggctactaatgtggtgtggttgcttcattatgctcttaaacagccacaccagccattccttcagcactgtctattgggcactctataaaaatcccaacttttgtttttccagtgatcacaatatattcatgctgaagcaacctcatttcagacatctatccctcttggcaaccaaaacaagataactgacaaggattaaaagccaaaatttatgactaaatagtgtttattgactttgcacaactaactgcaaacttatctcatagagatatactccggacaagcaaataaaattacttgagcaaaagtatctcgaaactacacatagttgtccaggctgtagattattccataataaaatatatgcaaccaagttgtttggtcatatgcctgatgtgtcccaaataagtctggactctggtaatttttaaacttagatgaggaatccctacaaagaaatggacttaagcttggtgcaacccaaggaacttgttctggactgtcaacaccttgaatttgtaggtgaaacatacatcctagttcttgtttactttccaggcataataattaataactcctcattttactctcaaaatgtctttgtttgaatgaattgtagtcatgacacatcagtacccttcaagtctgataacac

SEQ ID NO: 60004 - DNA, 1974 bp, Homo sapiens
tggaacaaaggggagtgctgacttaaatttctggaatacaagcaagcccactcatcccagagagatggacaggacattgcctggctgcaggcaggtagcttcatagcactgtcactatggagcgctatataaaaaacatatttgataggaatgtgcaaaattaaaaataaaaaatagaaaaataaatatttgcctataaaaaaaagactcacctataatatgttcagaatttattcccctaaggatttttttagaattcaaaatttctattatattttcagtaaagttaaattaatcatgttttctacgagttcaaaacatattcatcttaatcacaacacttgcagtttggtagcctcattttgaagaatggaaagttaagagagcataaatcaattgctaaagaaagacaaagtcattataaagcaggataagtactgccagatcgtccctgccatatagactagttaaccctacttttacatgagagaaacatgtagcttaatgaaaagcatctttcattcagtaataacaaatagttgtcaagtgtctaccatacgctgggaataagaaccccagacttgcccctgttcctcaatgaactcagtcatttgctgtcagaatggaaggtgcacttaacctttgctcccaccccatgtgagtcagtctgtgggtcacattagcatagaaaaggcacaagctgagatttccctacccactgccagattggcaaagaaatatagcagagaggccatgccagacttgggaatcggacagacctagattcaagccctctctccttattagctatgtaatggtgggaaaatagtctaagatgtgggacacagttccctagggctcagatgtaaaataagaaccatcgcatatcctttgcagtgttgctgtgaggactgaccaggaaccacacagatgctcacccagttggctcatcatacagggtgctgggtacattttaaccatgaatgtccttctaggaggttaagtaaatatcaagaaatacaacaaatagaacacttagccttctttgcacattctgcaggagtcttgtgaaatcactgagttccagtcactcaggggacttggtaatggagcccctgctgtactcgtagacacacagctgtgggtaagagaaggtggggatgggacatcagacaacctggaataaaggccagtactgacttccgtttctagattcacaggcaagcctactaatcccaggatactacaaagatgtcaaaacgttgacactgaggagagaacatcatcacaaggaagggtgcatggaagaaaggtgggggagggcagtaaaaagaaggaggaggagacaataaagacaggcagaaggcttagagacacatattactcagtcactcagcatcccagggatgggctcgtggtccagtccctgaatctatctagactcacatgtatagtgagagattgatcatgctgattgcagctgtaaatgtctttaatttttgtgattctattttcctgaagtaaagtggtgatgaatgatagtggagagttaagaagattagttggacaattttcaaaagaagaatagaaatgactagtaaatacgagcagtaatagttcagttttttaaataatgcgaattaaatcaatgtgatgcagcatttgcctatcaaatgaaagaaattaacaagaacatccgtgtagatgagggcacagtgaaatacacgcactctgatgttgtggataggggtatgggttggtatgagagttcagaaagaaatttggtaatgttcatcaaaataatttagaatattcatctcttttggcctattaattcttcttagaaactaccatatgccaaaatgcccacaaaagttatgcacagacgtgcatcatttataataacagtgagaaattggacatcactcaagtattcaatattaggtacatgcttaaataagacagaatatatca

SEQ ID NO: 60005 - DNA, 3535 bp, Homo sapiens
ttcctgaactaataactgtgatcaggggattgacatacgctttaggacataagttttgtttacctgaatcaatttttgtgtttataataatgaaactatattaatgtggttagaacagtgattctcagtctgaggcaattttgtccagcaggggacatctggtaatgtctggaaaatttttgattgtcacaactgcaacagtgttactggcctctagttggtagagtccagggatattgttaaggatcctacaatgcccagaacagccccctacaacacagaagtattggacccaaaatttcaatagtgttcagagtgagaatgttggctttgaacaattaggggtcatccttggatctgggtgtgagatcagctccaaatcccaccttacattaatagataaggataaaaccaatgttaggaagacaacgaaaagtcaattaaattaatatactcaacaaaaattaattgagttggggtgtggggacattgcaagaatgctgcagtgaaaggcttccaaatatctgctcctccacaatggcaatgaaaacactaaatcaacattttaagaactctgtcaactaaccaacagagaaattcaaagattctttattaaagaaaaaacagctgaatctcaatgagaacagtgacctttctggtgttttaacttgccctactcccatcctctcttctcagctccacaatagctttgaaaaccaacagcttggtaaatatgatagcagtgacaagcatagccataaaaaaaacagcagcctaccaaccaaaggagagggaaaaacagttttgaagctcctcaaaagtgcccttaccagttgttattatttgatctggctggtagtttcctggaaacctctactagtagggcttgtctttacttgaccggactcagagataactccttgtaaacaacctttccccaggacatcggtcaaaaaccatccatggtaattgcttaatatcagctacctgaggcatctataaaatttgggcaaacaagaagctgaccaaaaccttacatggaaaatgtggtgaatgaattgtccatagggtctgtgtgcttgggctgccacaacaaaataccagagactgatcatttgaacaacataaatttattttctcacagtcctggaggctagaatggtccagcatggtgaagtttttgtaaagcctctttttcaggcttctttctcactgtgagctcctttggttaacatgcagagacagagcaacatctctggtatctcttcttttaagggcactaatcccatcatgagttcccattcacatgatctcatctaaccttatttatccacccgaaagcctcatctctgaatatcatcatattaacatataactttgagtggcacacatatattcagttcatacattctgccctagacccccaagatgtccttctcacatgcaaaatacattaattttatcccaaaagcctcaaaagtcttaacagattccagcatcaattctaaagtacaaagtctcatttaaatagtatctaaatcaaatataagtaagccttatccccaaaatcaaaattattctccagctgtaaacctgtaaaaccatacaagttatgtgcttccaaattacaacagatagtggaataggcatgagatagccattcccattccaaaaggaaaaattaagaaagaaggaaggagagacaggccacaagaatgtctaaaaccaaccaaggcaaattccattagctcttaagtctcaagatatctctttttcatttaatgccatttattctagacctacagggatagtggatcctgcctccaggcttttacacagccctgtctccaaggccccacccccaggctttagtcagaggccatatggcctattgaaactgaggcaatggtcccaccctttgccacaaaggacactgacctgatgatctctgaattgcctttggggtcactacttcattttcttgaaaagcacaaagttagagccaaatagctctctggtctggtcttgcaagatctaaaagtctggcagcctttatttcatctcatttgtttctgaccccttagttcaaattgacagtgtttttgcttgtataattgatctctattcctggcctcttctgagatggctgattcagtccatgagtcattaccacgatctctttatcaaataattgttcaaccacacccttcctgttgtcttcaccacaggcttttttatttatttgcaatagagataggctgaaaactttccaaatcttcaactctggttcctttatgcttaacaatttcttcttcaacttctctctctcctttcacattttaccataaacaggaggaaccaagccactccttcaacaatttgattaggtatctccttagctaattatctaattttatcacttgcaaaatccaaagtcttatctaaatattatctaagtttgtttgtcaaaaatatcaatttcacaaaacactagaacatggttaatccaagtgctatgtcactttataaaaggatcacctttcttccattttccagtaatgtttttcctcattttcatctgggaactcaacagaatggcctttaacatccatattgatatcaacattctcttcacgattatttattatattattatatctctagaaagatagataattccccttagctattctcttttctttctgcgccctcactccaactgccttaaatacttcactgcaattttggctttttctagcatacacctcaaaacttttccatcccctatccattgcccacttctaaagccacttacgcatgtttaggtatttgttgcatcagcaccccacttcctggtaccaaaattagtgtgagtcttcttgggcttccataataaattaccatagactaggtggtttaagcaacagaaacttattttctcacagtcctggagggcagaattatgagacaagcatgccagcagcacactttgccaggttctggtgggagctctccttctctctgtgctctgccatggcctttctttggagcatgcgtgtggaatgagaagcaagctctctggtgtcttcttttgggggcactcatctcatcatgagggatccagtcacatgatctcatctaactgtaattacaacatagacattttgagaacacaataaggactttgaaaagctccaacatgtttctgagaatctagaaggcaacacacatgtgcaggaagttgagacacctgaaaaggtcctaattttttaacttttgctgaccttgagtatctgagcaagcaggacattaatggtaacagagttttcaactgcctaccagtaaattgaaggcatgcacctaacacacatggaactattcaggaaagactgggagagttgctcgttcaagatactaaggaaatgcatgtctagtcattagctgacaattatgttaaccagttactacacatgagaaactatagagttcttacaggaaagtcatgaaacaaagaacaacaataacaaacaggaac

SEQ ID NO: 60006 - DNA, 1439 bp, Homo sapiens
tatgactctggaacccccttgcaatgtgctgtttctgtacctcacctcttggaggtagatgttgcagtggcagcctcaaacagggatgcttttttaggcaccatcggaagccacagcacagtgctaggcaagaatcagaggaataaaacacaatctcctggagctgatggtccagttgtcccaactggaaaacgaagttagaccacagtggtatgcaaagtgtcttctgactgtagaattctcagacaaatgaatgcacaccagtgccaaatataacacattaattttaattgtagccctctagagaggatgacctagccactgagtgaagatttcaggcaggtgggcctttctgtttccaccgaaattatattatattggcagccacctagtcttaaaattgcctttaggaaggcgtaggagactgaattggaaaatgcagccaggcaatttatgggaaaattgaacggagcgtccctctgagtaaggagacagggcgtggtaatgtcagtcctccttctaaagaccagagaaaatttctgttccacctgataaactctgtatccttttggactttgtaaatattgcacttggaattgactgtcatttaaatattgagaggaaatctgccaaagttatttgattagtcaaatgctttaaagattcattaaaataccaaccctgtgggatgaggggaggtattttattcaatgccttcctcatgtggtatctctgacatggcttatggacatcctcagtagttccaaagggattaaatgtttaagttcctggaacaaatggaaagtgcttactcctcactctttgtcaaactctaaaactacgactgcctcagtgaaacccccaatatccttatgtctaaatgtcacaatgatgatgcaggtcttgaaatatacaaagaactggcttaagctgatataaatcagaacctgaaacactattatttcactactacaaatagtttaaagtttgtaaagatgtgtaggtggttcttagttttattatctttgctgtgagtcactaatattgcttcatagtggaaactgtccatttaaactaaaataaatcttgtccacagagaaagctggtattggttgctttttagttaaaacagtgtaaagccttggtttaatagagagttcgtctttcttctgaggaattaaaacatgttcatacaatagattatctttttatatctttccttctaccactttacctctaatactaggataactagctaacatttaatgaatgatttctaaatgctaggtggtgagttggtgagttaaagtggctttctatggattatttgtcttcagaacaacccaatgagccaggtacttttgtgacttgatgaagataaacaacttgattaggtagcaaacctagttagtcatggagccagaaacccaatctttgac

SEQ ID NO: 60007 - DNA, 714 bp, Homo sapiens
ctggaatgcaagttccaccagggcagggacttttacctgttttgttcacagctgtacccccagcacctataacagagcctgctactaggaagagcttgaattaaattgttaagcaaatgagtgaacttgggagatcatctctggtgcaactccctaattctgtagatgaaacacgtgactccccatagctgaagatggagtcagataagagaatcttctatgacatcatactgcctatataaattagtagaaaacccagccactgttccaggaagcttactcttgtcgacacacaacccagacacttttccaggaagcttactgttgttgacacacaaaacaatgaggtcagtgagtaactgaagcctctatttgcatcatgctgacttttaatgtgcttctaattggtttctcgtcaagtttttaaacatctatcttcaactgttaaataaactatgctcttccatatttgactactatatggtagacaactgtccaccttacatgaggtatctagattagtcaaaatcagagacagaaagtagaaaggtggttgccagggactggggaaagtggagaatgtggagtggtttaacaggcagagtttgggttttgcaagatggaaagagctctagagatggaaggtggtgatggttgtacacatcaccaccatcaatgtgaaggtacttcataccacagaaacatacacttaaa

SEQ ID NO: 60008 - DNA, 1577 bp, Homo sapiens
attcactgaaaattttttgctttgttctttgctgctcaaagtttggtctgtgagccataagtgccctggtcacctgggaacttgtttgaggtagaaaaccccaggcaccacctacatctcatgtaacaaaatccttagctgattcgtgcgcaccttaacatttgagaagggcttcctagggatatataaagatataccatacaaatgttgcaaatttatggtcaaaaaggatcaggatcagggaagaaaatttgtttattttttaatcccttatttcttagcttgtaaaacatattttctagagaaaaatgtgtctcttcaaggcaactggatattttgatgcaagatccctgactttaaaactttgggattgtcagaggcactgaaaccagagtgactctatcttgaataggtgctgggtaaaatgaggctgagacctgctgggctgcattcccaggtgaggcatttttaggcacaggatgtttacaattcagggaacagattcgtaatatttacccaatagacccaggacttgtaacagacccagcaaaagtcctgatgtcccaatatcttaacagtaaaagcattcatagtttaagaattagttttgctttaaagatagtaacataaattcttgtggaagataatagttacacaaagcttggcaatcctttgtcaggaacctttgtagtagagcacaccttccccatgactttttgctctgttgtcttatacgtaaacaagcttcaaacctaaggtgagtgcgtccctcctcttgctttggggaatgccctgctctgtctattctttcatctcttaactttctaataaacttctttcactttactttgtggacttgcccgaattattcgttgcacaagatctaagaaccctctcttggggtctggatcaggacccctttctggtaacaggatcagcagatcagggatgagaacaggaaaaaatgattaagaatggcctaaaattacaggcctttgcagaaggaaaatccttcaacagactcaggaagacttttgcttgcagtaaatagcccatcaatgcctgctgaccctttgacagactgagaactctcaccggacgcaaacaggaagcctgaacctatttgaagagcaaacgactggtggcacaaatagaacgaggtgcactgtcccgggaagccaaacagtacaagtgagtggagttttccaggctgtggaaagaagagcctgatctcgggctagtgcctggtttccctcccccaggactgtgcattgtccaccctctaaaggacctctggaataggagttagaaatgtgcctggggtcaaacaattcacactgagcaaagaaagctaacaagtaagcgtgttttcttgcagcctcttagtaaagtgggtgtctagtaagtccacatggacataggatgcggaaccctcatttgcatcatcagcctagagcaggtgcagggtgattcccttcactcatgccgaagtgagaaaggcccagagaagccaggctggagagtgctgagctctcagagggcctcccagcaggaggggactggaaaggcgctggagt

SEQ ID NO: 60009 - DNA, 2246 bp, Homo sapiens
accttggaggactccatgactgaacatatttattcatttagaaattgcagccacaagaacacatctacttatactttcctaatgtcagaggaaattttttacagagcaaaggataatactcatgagtccataataaatccctctggtgatctgattaatgttcttggtacctggattaatacaatttttttggttatacattctgcttcgaagtgaagacttattttattaagaagaatttctggaatgtgtgatgttatataaatgtatttctggtagctatttttctggagataataagaattatagaaaactcactttcttggaatggtttacatccgtgaatttcaggaattagactgaactgacagttggtggggtaaatgctagttaagacttatatcaacaataaactcggttcttcaataacctggaaggttacactaagagttaataccacacaatctctgccctgaattcttctgtattttgatattaaactgtttgagagtacactacattccaacatttctaatgatttttcttcacaaactctctacatttttagacctgtgtttattcagcaaatggataagataaatctctgtgaactagccaaataatatcttgatgccttttaatacattgatagcatttaatcagtacccagcactgttctaaatattttaaatacttacaacttacaatagggtaggtattatttttattcccattttccaaatgaaaaaatggaagcaaagagaaagaaagtaatttgcctaaggttacaacagcttgtaacacatgaagtcaaggctgatacttcaaggcaaagggttgcagagttgcagagatcgtagtacaagatagaggattggtgaggaagactaaggagggggtacccctcatggaacaggattcaatagcaaagcagcatcaagaaggaaggaaaactcactggaatttatatccagaaccattggtctgagactcctaaaacatcctcagagagcaaaataggtctcattgttcacaacaggctccaacttggtagagggaggtaagtagtctcgttcatgaatgtttttatttaggggccagcgttcctaagcaatcattgccatattctcaccaggtttgtccacaagctctctcctgcatgcattatgagcactaactatttagcaccaacttccctgaccacgttctcccccgcccaccagtctgccccctcccgctgcccagaaagaaaccccctgctgcccaaagctcacccatcacataggaactggtcaagttccacctcttccacaaaatgccccctttcctcttaaatacctaaatagctacagcatttgtcatctgtactttacactcagtcacatatttcattgaaatgtttttgcttctctgcatgagtaactaacctgggaattctctgaggccaatgaccatgtagtattacttctctctatgtataagtattgcttaactcatagtgctcatcatggtgtttgctcacacaaattgcctaatgggtacttgttaaataaatgtatccgtgaatgtcataacttccatcaacccactatttgtggtgcataagaaaatgctcaataagtccatactgactaatgaattatttcactgttgagtcagtaattgtttgcagtattacaacaaaagactgtgatcctaatccagtactagttatttaaaataaataacatttaatatgtgtcaaaggcactttgtataattctacaggagccacactatggactaatccctgggattcatttctaaagaaggcaaacattttccttattctctcaagcctagtgagaatacattgcatccctggtcattccctccctatctttgacacatacttgacaatggttgtgatatttgagctttaatagtcatgggggagggggagggggagggatagcattaggagatatacctaatgtaaatgacgagttaatggatgcagcacaccaacatggcacatgtatacatatgtaacgaacctgcacgttgtgcacatgtaccctagaacttaaagtacaataaaaaaaaagaacaaacagaaaacaaaacagtatttcagagaaaaaaatagtgatagcgattaggaagaaggctagtaactcaaggctacagtccctggctttgattttgctttgaccgttctgtaaatgtgcatgtacacagcatgcttgcatgtactgcgtctggtg

SEQ ID NO: 60010 - DNA, 1117 bp, Homo sapiens
ttaagccttttcttcttttgaaactgtctttacaaatattactctggtaattttatatatggggtttggtcctaccttcagattagagaaactgtattttgagttctgagtagaaggcagagaggaactcgctaacatgttcataggatttgggaggaaaaaaagtctagaagttttcacagtggtgctaggagaagcttaaaggagtgtattccttccccgtgtcaagaatgtgttctctattcaccagagtaaataaataactgcataggtgtaaattaaaatagatagatcaataaataacattttttagaaccagaaaaatcagcatccatcaagctgagagtccccacacaataccatactgtggggtgtgctatactgaagaaaccaaggaaagaatgttaaagacttgattggaataaaatcagaccctaagaataaggctgggaaaaaaatacagagctcagagcccagcagctacgtacacctgaaaggattcaacaggtcccaggaaggtgtctgcacctctgccctgactcctccaatgctctggtttttaccacctcaaaagggaggtggtatcacttattgtaggaccccaggccgaccctcctgcttgtccacatggtgcctgtggtgcctacttggacttaaagtataaaacttggaagcatttaaagggtaagagaaatgcttgagagtcgctgcagtgagtcagcacattaatgctgactccacagttatctggattagagccggccttgtctgtgacctggactctcactttgcccaatcccaagcgcttgcagaatggctggctggccggagcccccgccaatttgtttttctggcttgcatttcattatttaacataaaccaggagtcagtactaaaccagccttctagttctcatatctttcatcatcccagaaattgacaaaaactgacagagttgagaggatgtctcattttacctgccaaatatttcctaccttatactctatagcaaaaaaaaaaaaaaaaaaaaaaaaaaactgacaatttcaaagcattttcaaagcagaagattttaatgtattgttattcttgaggataaatctttcaggatattacc

SEQ ID NO: 60011 - DNA, 1543 bp, Homo sapiens
tggcttgaactctgtcacttgtgtttgaatatttgagtggttgctgggaactagattgtcaatttctgtttgccctcccctcctttcttatttccactatttctccagtggtcaaaatagctgtttccttctgataatattagtgaaatttttctagtttcacttttccctagtctatatagttagactgccattgtccaagttctggctccctcagaaccatctgtgtgacctctatcaaaagacggctctctcagtgcctcagtttcctgatctacctcctgaggttaccgtgaggactaaatgagttacaatagcacttagaacaatgtctggcacagagtaagctctgtgttaatgttctcaacttgaaaattgaagtgatttcattgtgaatgctattattcaaaatattttaaaatacctactttgatttgtttttctcccatcagtttgtggattactttactttaagtagttggtatgattattttaagttggccacccataggagtttaaaaccagaaagaaccataaaaatcatgttgtccaacttctacaggaggttcttcatcattatgattatcaccaggcatttgttcctcagttagttatacttcttatcgattctggtgccactggagcgcatttttatctaagctcggggcatggagatgttctcaaccgtatctacaaattcactttcgtctctgtccctctcatcaacatcttctgaacagtaaagatcatcactccaccatgcactgtgatatctaatggttcgtggtgtaggcaaagaggattcctagttactctagacttttccttgccccttagcagccttaagtttttttcttgtcctttgacttgtacggtactgtgtggtttgtgatacctttgcactgtgtggtttgtgatacctttgcacaattattacacaatggatcctaaaaccaactttctaaaggtcggcgaagcaggcataattattccctcattctccctcagggcactgaaaatcaaaggctaggatcttgcctgagattacagaattagaagtaccagagagaaacataaagtccaagtcttaggattttctctccaaaggttttttcacagcaccacattgcttttacccaaaacacattgcttcatacaaccatattagcagaagcaaatacctccgcaatgggcagcgaccaagaaaatgacagaaacgataaaataatgtctgaatgggcagtaaaatatttacaccattcagcagctctgggtcaagttcacactgaggccatccagatgatgcagagattgcgaaaatagattcctgagttccctatccatccaaaatggagttgaaaaataaagtccctttgaactatagaagaaaaaaaacagaagaattgacctcagtcgtgttgctccttaatgttggttatgtagaactgagtttgcattgtcaggaccactgtttctgttccttttggaaggttagaaaaccattgttatttgtatatttcaactctacaattaaaagttttgc

SEQ ID NO: 60012 - DNA, 2032 bp, Homo sapiens
catgaggagctcttcctagtgtcaccagtaaaatacgcgtttcttcacccaaggctcaaagcttctacctgtgtttgtgcctacaattccaaaactggctcttggaacagtcgcttcctccactgggaaggagttgccacacctgtaaaaggaacaggttgtttgtgatcgctaaggtcaacctcttatctctgatggtctctgaatttagagtacaatttaaatatatagttaacatagtccgggagagatacagggaaggggtgagggaagtttacttacaatcaggactgggtgtgaacgttatgggaacctagaatattagagctggggctgatctgggattactctaatcaatatccttcttgtagtagccgaggggactgaagcccagaaaacttcaggacccgcccagggtctcccagtagctagtgtgtaagctgagaccagaacttggctcgttctctcccagtcctgagcttgggcagaatcaccagcaacgccagctcccttccctttccttcagatgggtctcgggtccagagctggcgcccgctagcgggaggccagaccgggagggccaaggcagccacctgtggctttcccatccctcaggtccagcagtgcacatggggtgcccccgcgtcaacgccggaggagtgaccttgcaaacccgcgccccgcgggcggcagagccggccgctcactgcccggtccccggccaccacggaagagcgaagatctctgccagggcaggagccctagccccgacccgcgccccaagtctctcccgcgcggcggcttccggccgccatggtttccatagcaacaacagcacaagctgccgggtcccagagacgccctagggtcagaggtcatctccgtggcaacggaaacttcccgcgctacggcggctccaacgggccgcttccgccgcattgcgtagcgaagcccccggcgagccgaggctgggagcgcggtgatggccggtccccgtgagcagagggcagcggcggcgggaccggggactctgggccaatgggtaaagccaggaggaagcccgtgcctggcccgttgggctccctcctcctcagagccgaagcagtccacactcggaacccagcttcacccggattaccgaggggttccacgcctggaggcagagctgcagcgtgggcccgctcgcggctttgcagaaaacaaataatgacacacttctctggaagcccggggcctgggcccagagccgtggcttctgccaaactttctggtcccggacaccaactccccgcctctcagcccgaggccacagcggcccagcaccctgcaccttttaaagtggctccaaaaaggagaaagccaaatagatcagggtggtaggcgcgagtgcagggagctgcgaagttggaagattactgcttttcaaactgccaaagagcaaaatactaagcgagaaactccgtccaaagcaactggaactcgaggttctttactaatgagagttccagttaccatcttcagagaaaggagctcaaaagagggagtttattttttgcggaatgtcttccttgttaagaagaaaattaaagattaaaaaagaaaatgaagggtctggcaactatgaacctaatggtgccctaacgtttgctattctaaggccgagaatgccagatggggagaacgccatgagcttttgagcttgtgtattttgcgagaggctcgagtgtgaacagtagactacaggccttgagactgagaaggaagctataaaatgtgggccaagggaatgtctgcaggaccgggtttcagagcaccctatcgtggcggataaagagccactaacagcttttttctttatttagtagccaaattcttggttggcgctttgagaaaggagtaagcattaagcgaatttaaccaagtaaaatgtatcgtcctgccctttgtagtcccatagttcactatcctagagatacctatttttcactattttattaaagtgtattgaaaacctaccatgtgtcgtgaacag

SEQ ID NO: 60013 - DNA, 1661 bp, Homo sapiens
gggaggaggactcagggcagagcccagagcccactgcagcaccgagtccacggagcagccagaggctactaccagagcctcaattgccaccccaaagtaccagctgggggcaatcttctccgccccagcataggagcctctgcccttttagactgtctaacaactcgcagtttctcctttgctgcaggaatggtggccgcaaacggtctcagcctccgcacccaccgcctccgtccccgcccacccgcacctcctcctcctctgcctcgcgctgcacccgcaggcggcagacccctcggagcgcgccaccccagctacgttgcattggcaaggttcggaggctggagggcagcagccacttgctgccccagtcgctggggctctgggtgccagtgcggcccccggcagagcccagggcgtcagggaggccgtggagagccatgatctactgcaccgcagtgccagcgtcaggagcttccagagcccgggctgccactgcgggacggccgatctgcccgctccctccttcagacacaaccccagacaaaaacagccggccccgggtccctctccaccctgaacggagctaggggacgccacacactcccggctgccagcgtgagcggttccgggaaaggctgcgcccagcctcctcgccagcgccgccgccaccaccatgcagccctccagcctgcctcccctgggttgctcgcccacagctccgcggccgcccccaatcgcctcggactgagacgcggggacgggaacccctgggatccgactccccaaatcagatgcatttgcatttcttatgtaatgtactgcaagttcccttgttggagccctttggaatcggggcgcatgatcaccagtaggcttaaaagcaggaactcacggcctggctcatccccacccctggccctgtgggaccccgacgcagggctttgacaccgctttctaaagggggggacttcaattacaaatattagaggggctgggcttgtcctctcagtctggggttccctcccggcgcaagccttgctcaagtattcccggtggcaggatgtgtcagaggcagacagggggaatgagttaatgctcgggcacccggagctggacgggggagggacgcgggggctgacggaggagcggggccgcgagggagggggcctcttttactttggtaaaggtgatcgtggtggcgaatattgtgcaagctaatcagaaagtctagagcaggttctcggaacccagctacgtccctcgaacctgctgcagaagtaaggggagctcgcggttctttttcctggcaactaccgaagcttcagctgcctggggcacaaccttaagccatagcccttcactattccaccaaacataggcaaccaaatacattaaaaaaaaaaaaaaagtttcctcctccctcctagtgatggattgtgtcacagccaagggatgccaataatggttttggggttcgtagacgccgatccagctgttacttgtttattcatgcaacacctctatatgcaacactgtcctggttcctggtatgtttcccctgccttcctgcatagcagaactgcagatctagctcgatgagcaacagacaggttattatgaggaaaaacataacatgatgcatgtttcgcttaccagtt

SEQ ID NO: 60014 - DNA, 843 bp, Homo sapiens
atatttgtcacgatttcctggcatcattggaaagctttcctatgtttatggaatttcccacattttcagtcctgctctccaggtaagaaatcagaactacttgatcaggcttccatacagccaggcacggccttgtaacttaaactttgctgatcaggtcgccctggcttttggactcagttatctttggtagaaacggtaacgacggcttttgcctttggggggcagcagtggcgaaccttcatgcatccgaacctgtttctttggtgtgagctattttagtttcgggtcctcggggtgggggcggacgtgttgtgaggagcagggatacgtgttagtgcctgcgcgaggtcaggtagtcaagggtccacaaaaagctgagagaggcatcaggccgcgatgcaagtctgacgccgagtaaataggagaggcagagaggctgggtggaagcgccctggaccaccacgcagtccaacttggcaaagccggccggggagtcctggagcctgagacagcagtccgcgaaattgcccgcctcccgaaacagatctgctccagcatcccttcgcttccatcacgggctgggagccgcccacgggaggtgcggcctcgctgcaaggcagaggaagatttcaaagcccagcggctggcacatgtaggatgcttatgcaatctctagagtcttggaaaattaaattttaaaatattctctaaacgataggctgcagcaatagttgcaaggaaggcgattcatagaaagctattgccttccacagcacctgtgccttggattgcagcctcaaatggggcaggtgacaggaaaaacatctgactcagcacttc

SEQ ID NO: 60015 - DNA, 2477 bp, Homo sapiens
gatacaaacctcttaatttttttcacatcaagtatgaatgtaggcaaaaaccagggtagttatgctgttatgtcaccaataaaaatcagttcatcgtagtgcagttttcaccgctatctccaaataattatattcttcactattttgaagttatggtagtttattagccttggccctagctcctgttatttaatgcaaaagaagtacacctgtaactatacacacacacgtaaagctcctgctatataacaaaattgcctttagtatttttgataactgcatttaaacataatttatttcctgggtaatcctatctatttcattgtatgcattttaaaacactgcttgagaaataggcctcaccagattgccaaaggggtcttcggcacaataaaaggctaagattaccctggcatgagcatagacataaagatcattagaggaccactatgcagcttgcagcaactgacggcaggcactgtgaatctggaaaactgaaaattatggctctataattgagtggacagccgtaaggagcaatcagaaacttcagtgtaagaggaaaaaaaaagatgtttttcagaaatcccggaagctaaggatcagcagaggataggaggggcccatttcagtctcgtgctttgttactggctacaaaggcgacggaatgaccaacaacccacttcctgttgactgaaactattgcctgtctccaccctattgctccccctcaccacctcacccccatcaaaggggcataacaacacaggggaacccaaagtctacaccccttaacctacgaccttccaaaatcatgtccggagctttcgccgacaccgcagactccttagcggctaagcgtgagtgcgccggctcccttgcctcgggtcagcagcaccccggggctggggctcctgcagcagccgcaccaaaaagtttcatccacaaccttaagtttggaaactatcgtttgccaagcgaagggttcccattattcctggctggcggtccatctccttgcccgtctctcggggagtgattcggtccgggacaccaggactctgcttggaggcctgctgttgcctaaaaaccccaagcgcgggcctcttcaaggccccaggttcgagatccgaaccctccagtaatgtcctcagactcctcccccttcactgcagcccgggcaatactcgggcctagctcctgagagcggcgccgttggcttacgtagcagcacgtgattggccaccgctccctggcaggccgggattggtggaagacgggccgaccccgcccctcgcccccgcctccggcccgaggccgcacgggtgtcctcgcgctgctagtccgcgcgcagcctggcagtttgccgcttcctcgtcctccatcctgcgtccatggccaccgctgcgactgaggagcccttcccttttcacggtctcctgccgaagaaggagaccggagccgcctccttcctctgccgctacccggagtatgatgggcggggggtgctcatcgcagtcctggacacgggggtcgacccgggggctccgggcatgcaggtgaggcggcccccgagggcccgggcgcgggggcgcgggcggccggggacgcgggtggggacacagtctcggagcccggcaggccaaagccccgctctgcggccgagtccgggccggggtgggcagcaccggggtgggcagaggtcagagccaggcgcgggagggacgggcgcccgccaaggggactcaacggcgcacagtgccagggtcgctgggcgggcgagggcccggaccccaggttgggccgtggtccccccagctcaacaaaagcagcgtgcccggcgcggctgcctggggaagcctgggtccccctttggccccagggactccccttccttctcgcttcggcgctgccaggccggaccccccaggctccttccctccacgccgccttcctctgcctacccctcgtgcctcggacaccggtcccagcctgacgtttttaaagagaattttacagcttttatcattggggtggggtggagacaccagataggcaactgacatgtgagaacttaatgtttagggatcgggagatttggtttggggaagaatagtttgtctttaagcacgaaagctgggtttccagaagataacccagtcctcttccggaattgtttcctgtggtagttttgtgtattctatttttaaacggtcttctgcagcgtgtttgcttagggtcattgaatcttgtggcttagtcttcgtttacataaggagaattcagttaggtttggttttggcgagcttctcagaccttatgaaaatatgcgacttttttttttttaaacctgaaaacatacgacggtttttaaaaattacttagttttttgccttaggcaactttaaaatctgtagattcaaggtatcataccagaaggtagtttttttgaaagtatgttgtctctcgttaaaagc

SEQ ID NO: 60016 - DNA, 622 bp, Homo sapiens
aggcccaccagagtttcgtcacgaatgtagtgattccaattagagtggctgtgtgtatgtggggtaacctggtggcagaatgccataaatccagcttgagtctctcactgctttcaattgtccccttctctcactcatatcacctctcatcatcccattgttcttgaacaagctacagaaaacaaagcatggcaacaaatttgagacagcagttccaaacatgcgctctgcagtgacatggagtatttttgagctgtgaacatagcggcatctgttggacactgtatgaattattagctcaagggagttcacagttttattattgcatggtgctacattcctttccattacatactttctttgtcgacctgagttttcagccgttgctgaaataaaagcaagtattgcacaagaatcagtttggtgttccatccaattccaaagtttgagttgtgtcatgcccaacaggcaaacacacctcactcagtaattgtggttaagaatgaaataggcgcagtggctcacgcctgtaatcccaacactttgggaggctgaggtgggcagatcacgaggtcaagcaattgcgaccatcctggccaacatggtgaaaccctctctctac

SEQ ID NO: 60017 - DNA, 636 bp, Homo sapiens
aggatgctgtatcttgtcaaaatatggtaatgtaaaatgtataaatacacatttttgtaagaatcttcattctaaaccaactatcctaaacttaatttttcagcatctttccattaacccattttcttcatcattatagttcccaagcctacccatccacatcttgtcatggaacttcacagtgctgctagaaggcagagtatatatgtcttcaccctgtttactttggacttggctacgtaacttgttttaactaatggaatgtaggtagacatttcaatgtgtgacttctgagctgaggcatggcaaacttccagaagcccttttgaactttcaccctcagccatgagaaaaacatgctctaggtggttttgcattttcagcctgggtctcaaaatgaagacacacggaacagaactgaacccaaaactgaagtctggagtccagactagtctaaccaacatctgaccaacagctgatctgaagatccatgagcataaaatgtaagccactgaaattttggggttgttatgcagcattccttcctatgttaagagctcttgtattgtttaagacattaccaacatcaggatctccattactcacccatttttcccattaacatttatttattca

SEQ ID NO: 60018 - DNA, 2249 bp, Homo sapiens
gcctcccaaaccgttgggatcccaaggcgtttgccacctctcccggtctgctttacttcttttcagacttcacgatgcacagtgtgttcttcacggcagctgcacacatgctggttttcttcagaaacacggaaaatgccccataatgcaatccccaagcaacctgctctaggtcatctgggtttgtttttttgagacagagtcttgctctgtcccccaggcaggagtgcagcggcgcgatctcggctcactgcagcctctgcctcccgggttcaagagattctccagcctcagcctcccgagtagctgagattacaggcgtccgccaccgcgcccagctaattttagtagagacggggtttcaccatgttggccaggctggttttgaactcctgacctcaggtgatccacccgcctcggcctcccatggtgctggggtcaggcgtgagccaccgtgccaggccactgtcgtctgggttttcatctctggcttcaggttcagagagggcagggtttgaagcctggcccggcctcagtgccctcaatggcgatggtgaagatgaccggctagaggtgctgcgcccacgaaacgccagctctagtggcgtccggagcgccggctccaccggctaggcggtcggcggagttctaggacgacaactactcacaagggctgggcgatcacctcccacgccacgggacggagacgccacagccccttcaactttcagttacaaacgttcgtgccctgttacgtccacagcattaagctggctgtcgtggggcaaacaaaaacgttgagtccgagtcttacggggggtcgggtcaacaaccccagcaaacatggagagaaaattcaaagcgggtctcacgggcgtgcggggctcggcggcgctcggggcacgggatccgttctctccgcaaatgcgcgctgccggggctgcgccgcgggctgccccggtcgacccctctcaactccgaggctacttcgagccagtcacccgggactggctgacgtggtccaggttggccccgtccggctctccccgcccgtaccaaccccacattccgccctcctacccggcaaagcggacgaagcccccaccggctggtgcccgcgggcaccgaacttagcggaacgcctcccggctcggaccagacgcccctgaggagtgacgcccgcgagcctcaaacgtctcaggcgggcctgccgggtgctctccccgtctcccaggaagccgcccgtcagccggcggcgccaaccgccaccgccgcacttacccgggaaggcaaaagtggccgcgggcacccaaccgccgtcactcccttcagggagctgactagcgcgctcgaagcgaccgcctcgcctgccccgccacagcgttcggctacgacgcacgcgcgcgcaggccacgccccccgggtgcgcgggccgggccgcagagcacgccgggagcgtgggtctcccagcccgccacatcccagggctgtacgcgcggactagcggagctaggggaaggtgccagggtggccgccgcctcagtagcacgcggacggctggaaagtcagcccccgtttccgcctcacccaggattgctccactcggggcctttccgcatcccagccaccactccattccgaggcgcgatcagctctgaccagtcttcctcacacccatagtcgattcgttactcccgttaaggtcaaacgctgacagaaaccagccgcttcgcacacttctacatggggtcaagccccctgttatctttgcggggatgattgtaacaatcacttaaatggtcgcttcgtaccatcttgcccccgcctgggccttgtcggcgacgccgcagccacgtggatgctgtggaagcctgtcccctggatcttccaaaggctccgcgctcattgccacagccagcggccggcagtggcctaggctgttgcacgcgatcggtcccccacatctcccctctccatctggctcctttccctggaagcccagggcagcccacacttcgctgtcctcacccccactcaccaggcgggaccccacgacgaccggcttttgtcctggctgctccctcccagcgtgggccgcgtctcctcggggtcgacagggcgcgtggttttcacagcgaggcctcccctgatcacctccccgctcttcctgtccttccccggtcacctcacgagctatggatgtatctgtgtctcctcactgcgctataagctcccaggtgaagaaaggg

SEQ ID NO: 60019 - DNA, 634 bp, Homo sapiens
ggtttgaccatgttagccaggctggtcttgaactcctgacctcaggtgatctgcctgcctcagccttccaaagtgctgggattacaggcacgagccaccgcacccagcctagctttttgtttcacatgcagagtggagagttaatgtaagatgcagtgcccgctgtgttcagcctaggggaactgccgtgccatctatgggcaggcagcttcccatttacaggccaaagtctattacgtgaacatcctggatgctctccaggtacaatacatttcaaaaggacccatgatattgggaaacaagtggaaataagccttcaaggggactaaccttacctcttcatcgtgatctttcgcccatttaagtttttctagcagatcgctcaggttgctcttaactggaatgtagtgtttccagggctgcagctcattgtaaaaatgttcatagtagatggaatcctgcttcagcacaacactgtcaccaactagcaaatatggcaggcgataagctgctacagtgccatcgatatttatttgatacttatgctgcaaaacaatggtaaagtctaagaacctctattaaatctccttttctccactctattctccttcccatcccacacataaacctttgc

SEQ ID NO: 60020 - DNA, 2775 bp, Homo sapiens
aaaataggtaaggagccgtttctcgacttacttattccctgatgtatccactgcctgaatatagaaatagcgggcgggaaggacgacgtctgcttttagcccgggtccccatatttcgctcttctccgggctcagctgcctttctccgccggtctcggcgagtgctggaactgtcgccagaaagaagcaataaagtagcaaagtgccaaacatttacaagacggactctcgaaatgatccaccgataaatgaagaagtgtaagaggtggacagaagcagccgagccttcggcagggacccgccggccgatcgcagcagccaacgcgactgcaaaggttgccgcccggcgtgcagggcaggcgcgcgggtctccgcgaccccaggacaatcaaagcccgtgccccggcgcgcccaggtgagggtcccctggcgttctgctgtcccggccgagaaccgcgctgctcctctctctcaggacaatgatgaacttgagttgctcctgccactggagcatcatttgggagcgaatccgtctcaggttccagccaaggtgtagggcgaggggattggcccgtgcgtcgggccaggctcagtaacgccttctccaagtggatggcggggtggacacgcgtcccggcgccccgggctccctgggatatgtagttcgcgacaggacgagcggaaatactgccaggattttaccacctctcgcccatttatttacttctcggtcaccgctttcgggggacagataaacaccacagatgcccatcaaaggggcgcacgggtctggaggcgcagctcaggtttttgcgttggtcaccctgccctccgcacgtggagagggcaggcataaagcaccttgaaaggaaggtgctgtcaatgctatccgacgacctgtcgccgggcaccgcagcatcctcgctcgctccgatgggacgagggacgccggccccagggtaacaggaggcgcctcgccggccgcgcgctggatgctgtgatccaggtccggagccgggttccgccgcggccgcagcgacccgaccccacccgacaggccagaggtaccccggggcggggggcaggggccgaggtggcggccggctgtgcgctctgagcgcctggccctccgctgggcacctgggcgccgccagcccggcctgctgccgctctacgcgcagccacctgggcattcaaaatttttacttaattcgataccggcctgggctgccaggggtcatcgcctctccgagccccgtggcgtccagatggaggccactgcatgggtgcgcgctctcccgggaaggagtagggggaagagctgtgtcgcggggggaagagaagcgccagggaaagaagggcctagccctctggtgaacaaagctcgattaggaggtgtccatgtggataccggtgacccctgtgcggccgtcggtctccacgccacgctgggcagggtccgggaaccagcgcgcagcggccgtcgccttcccctgcacgccagcacccgggtctgggccgccgccaggagtcacgggctcaccgccctggtcagcttggcagtcggacccggagccgcctcctctgcctgcctccctcttgccagctgccccgaaaacccagaagagccggtggctccgagccaaggcgggcctggttcggcgccaggaaagggggtttctttcctattttcttttgtgcaattgtcattattaatgataccgactcgtttactcaaacagtcgaatcggagccccagctcttagcccggatgcagcaattgcccgtgggccccctttaacaccaacagcgtccccggggcccggggcaagcatgttcgaggcggtcacccccgggcctcggcgcgctccccctggcggagagcctcgtcttccggccggtgagggaaggtagaggagggagtaggggcgaggaggcctcggcggcccttgggctctgcgggctggggactcggggtgcccgcgacacgcgcggaggcgcgggctgggttggccacgggcagggagcgcagccgcgctccttcctctctgcccgcgtcgcctccgcgcgcactggttctgcgcggcggggcttggcctgcgcgactgtctactccgtcccggcggcctcggagcccggccgagcggcgagcttgtcagaggacggtggtggaaacgctcccggcctccccaggggcgcgggctggaggctggcgccaggcgcggaggactcccggtatcttttgacaggctggcgcctcggctctggggacccgcaggtctgaaggggaggaaggggcctggagggcgcgggaggacaccgggtgggaagggtggcattagctcggccgggggctatgcgcctctggtttcgccctcccgcgcatattcgacccttacgaggtcaccggaatgcccctgctcctcagttgccttctatacaggatatcgatcagggtattttgttatacgaaaaggctttactgaagaggtttttagagatgtttggttctctcataaacttgatacttgagaatacagacaaaatataacctgaaaagactacaacctaggcgatgaagattggctttacaaatggacgtttattttacagaacacttcgttcagtgactttgaacaatcatgactctggcggtgctttttaaacttgccattttataaatttttgctttgcatacgagcaaaccatatttctattgcttatgacatgattttatgagtaagctattagttgagcctgaggtcctgcagtcat

SEQ ID NO: 60021 - DNA, 630 bp, Homo sapiens
atggtaatacttttgaaattgaccactattatagttatggcaaatgtccagggaagagtgggcataagaggttgtggtggtactaccagcctgtctctgtagagatgttatcttgtcacttggcttgtgaagactactcctctagcctccataagttttgtgtaaagattaaagtgtgtgtagaaaaatctgggttcttatcacacaacaaggaaagattaggctcacagatactttgaagggtgaaggggaacagaatttattgggtgaaaaggaaaaaactcagcaaagcgagaagggttcctgctaacaggcccccatctcacagattgaatcccaggttgccacacagggacaggagaggccaaggtcctcccctctgcaaacagcgggcacttcctgaggcccaaccccatcctcccagcacgcaggccagctggagattctccaggaagccgtttttacttggctgtctcattagtaggagaagtttgcatttttagaacttgattattacctggagtttatttttattcatatacatcagtagttttttaagttgggatgtgtgtactgcatatatattagaacttctatattttaacctaattttaaattccaactttttgt

SEQ ID NO: 60022 - DNA, 624 bp, Homo sapiens
ctttgggagaggctctcaggaaatgatatcttattgatgcaatcttactcatataactatatgaagaataggagagagaggaaaaggaatgatcttggtgtttgaattaggcagatggggaagttctctagtatgtgttgggagtgagtagtagagaggcatggggaggaaggtgttttggctccggtgggcattgttatattttgtaaaggcagctgttagaaaaggtgcaggatgaggtgctctgatgatgcctggaaggaaagtaccattctgaggccggtgaagtaaaaaaagaaagaagggagttcatagggacctacaaattagtacaattaatttccctttattttcttcagccaacatttttttcttctcaggttgggggaaatttgcattgcatcatagcattccagagacttaactggcaaagatttggcctttggaactttccatttggaaccattagacaagaatcacaacctccaacacatgcccagggaattgccaaatctgagagtgaagacaatatttccaagaagcagcatgggcgtctgggccggtctttcagtgctagtttccatcaggactcggcatggaaaaagatgtctagtatccatgaga

SEQ ID NO: 60023 - DNA, 2997 bp, Homo sapiens
atgagagacaaaaggctgcatacgagtttctgataagcctttccaaaggagacaatcagaatatgcatctatctcagtgagcagaaggatgactgactagaatgggaggcaggttttgccctgagcagttcccagcttgacttttcccttttgcttagtaattttgggaccctaacattttcacaggctttaaattttattattctttagttactacgtgctagcatataaataaatagtacaaaaccaagaaggcatccaccttttggttgtctcttcacgtgtaaaacaacactttgtgttaagtatcttcacacacggcggcgcaaaggtagaaaccgatactaaaaaagcgtgtagaaaatagttcccagcctgggcaacacagggagacctcatttctacaaaaataattcgccaagcatagtggtgcgcacctgcggtcccagctacttgagaggctgagatgggaaagttgcttgagctcgggcagcaggagttccaggctgcagtgagctaagaatgcgccactggactccagtatgggcgacagcgtgagaccctgtctcaaacaaaaacaaaagcccgttactccaccaagaaggcgcttttgcacattgttttaatgcttaacgccttcaggatgccagcgtgacggaagcaagtaaccaccaaggcatcaccactggcgctaaacttctcacttccggagtgctgcaagcgcagaaaatatacgtcatgtgcggaggcggagcttccgccctgcgcgtcgtattagacggaaaccgagcgggcccatttttcatgggtttgcggacccaccagcgaaggcgggaggtgtcgcagggacatcttctggctgtttccgtcgcctgcgtggcccttgcaccccggtcttccattagcggcgcagacgtttgggcctaagcgctgggcgaggcgaggccctgcccctccccgccaacggccattctctggacctgtctttcttccgggaggcggtgacagctgctgagacgtgttgcagccagagtctctccgctttaatgcgctcccattagtgccgtcccccactggaaaaccgtggcttctgtattatttgccatctttgttgtgtaggagcagggagggcttcctcccggggtcctaggcggcggtgcagtccgtcgtagaagaattagagtagaagttgtcggggtccgctcttaggacgcagccgcctcatgggggtccaggggctctggaagctgctggagtgctccgggcggcaggtcagccccgaagcgctggaagggaagatcctggctgttggtatccttaacgccgcgttgggacttggggtgcagggattcggggctggattcctcgcggggctctgccttgggcacagtggcatctgcaggatgatggtcttgggtcggggtcggggtcgctatagaatctctgtcactaggttttctaagtacagtcgtccctcggtatccccggggctttggttccagcccctcctccgtataccacgatgttcaagttccttcaactcccttatataatggcgtggtatttgcatataaactacccacttccgtaatcttttaaatcgtttctagcttacttgtaatgccgaatgcaatgtaagtgatctgtaaatagttgttatactgtattttaaaattttttgtagtttttattggtatgttttatttatttatttttttccatcgcaaatatttttgatccgtggtaggttgattgcggaatcgggtgatgaggcgggccgccctgtctgctttccccagctttgcagtcttagcggcctgtgcatcctggtttgtcactttgtggcagtgctttatgttcctctctgccttagttctctcatctgcaaagtagaggtggtgatagtatctacacacaggattggaatgaggaataaagaaattgcctacatgagagaagtttagtgcgattaatacagtaaatcttaaagttattatcctgtccgggaggtcagtaaggagagcagagtagacttcgacgattagttttgcttgagtcttgccccatttatgtttcttagaggaaggatagtgtggacaggtgttttacccattttttaaattgactttttaaggactattgtttctgtacatgtttggctggttttgtttgtcattggaattaaattcttttttcattagcaaaacgtgatactgcttttgaaatttttatctttttctttgttatgtagtcattttttttttttttttgagtatctattctggctcagaatctggtgataccttacaccaatttcctaaatggggatctatgagtctaggggctcgtgggcttgtggaaagagtcctgtaaatgattgcggggggattggggacgggaaatggagtgcaagagtgtgtgggcgttcagcaaaggaatccctgactgtggagccctaattcttcagtaggtacaaaacttataaataaaacgacattgataagttttaaaacataatgagattatcattttttgcaagtgaataatctttaaataaatctgtaattgatttttggcttaaaagtttttatacagggtactttgaattggggaaagccaaaggatttttgttttgttttgttttgttttttgttttttagagcacatgcgctgttgctgccctcaagctgttgcttagtatcattgcagtctaaagattttctcagaaataaagggtaaaggttagttttcagtgacaagaacccttaaaacttcagcaaagatttagatcattttatgtagcagcccttgtgaagaattactaaagaggactgtggccaggctcagtggcttacgcctgtcatcccagcactttgggaggtcaaggcaggaggatcatttgagcccaggagttcaagaccagcctgggcaacatagtgaacccctgtctacacacagtcaaaaaattagctggacgtggtggcctgcacctttggt

SEQ ID NO: 60024 - DNA, 601 bp, Homo sapiens
tggttccttcatccagtacctcagtggctagcatgttaccacattagcttagaatttctcttggtctctctgtggccctctatatgtatatcatatatctccaaatctgtatacatatgtataccattgatcctcattatttgtagattccatatttgcaaaattgcctgatcactaaaatttatttataactccaaaatcagtactcaccgcaatgtctttgtggtcatttgtggacatttgcagagttggggaaaagcttgagttgccacactgtcccctgctgaggttaagcaaggtgacactctgcctggttcccgtgttctgagagagatgaccagagggtggggacagtaggggattatgcaatggagagagagcaagaagctccggccccaggccagttggaccagatttgaatccctattctggcacctgttagcgtggcagcttcacacaggtcactaatttgtttcttgaactttgtttcttgtttataaaataaatggaatctattaagatggtggttttttaggatttaagataatatatatgaaatgtgttcatatatatgttatatatgcatatgtgtgtatatgca

SEQ ID NO: 60025 - DNA, 922 bp, Homo sapiens
tagataatctccagcagtctttgaacgactcctagatgtgttgttttttaggctctcatttatattgacttggccagccaaacttctccagtacttggactacagcagctgcttttctttgcacactattttttcctaatttcaaatacgtcttctgcatccatcattcttctctagcagctccttctaaagtcaacaatgatttccacataaactcaaatcttttcttcatgcttcttttctctggaggtacttggagcagaacatttttggaggcaaggggaggggaaaattaactttttcgtgtttttctcatttctcagaattacttgtcactgggagttttctgcatatatatttgcaggtagaataattgtcttgctaacaaatttaatttgatgcctttaatagatatttacatttgtttttcactgcgttagctttgggaaaggataagctactgtaacaaaagatgctcatatacagtggtctgaataagctagaacattacttctctcttactcaacagtctggccagtctgagctggtgaagcagttgtgcaccatgaggtcatgcagtcctgtgttcagccaacccctagggtgctatcttgcctgagtggtctatactgggtgattacttcatctgcattgcatcctgccagaaggggaaagaaccaaagtccagggcaagcagaaggggaaatggatggtcaggaccatgagaaacctgttctgtaacactatttatatgagagtttgatattgtatcttctttttctcttaaccctgtgaccaagacataatgcttttacaaggggagaaacacgtttagagacattaaccagttttgccaaattcacccatgtagtaggtaaaacttctcacctgaaccaaaatcttctaactcaaaattccaggg

SEQ ID NO: 60026 - DNA, 1126 bp, Homo sapiens
gcaaatacattaaaaaaatgagaactgttccattttaaaacttttatttcctatatgagtaggtcagggtaggcttgtttcgaaggcaatatttaggtgaagctgacaggaggtagcagtgtaggtgtctggggaagggtgttgcaggcagaaggaacaaccacacagggatctggaggcaggagccagccaatcctctggaaatatcaaaggccagtgtgcttggcacagagtgagcaggagaggctggcgcagagtgagcaggaattcagagaggctacagggagctagatcacgtaggactgtgttgcaggctgggttctctagaaacagactctgagagggaattgggtgagcaggtcattttttagggagtgctgttgaaatgaagacctatggaagggagtggaaggaagtaggacagaaacaggtcgagctgcaatgcaggcccggtaacagtttgaggtgacccccacatggagcactgtcctgagagtggcctctggagttgtcctgactggggagatacgtctgggcctttatgaccccatgtggcccagtcattggatatgggctgccctgggaagactctgtgaccttggatgaggtgacttcagctgaggcagtcctgaacatgttgacagctgtgggctgcctgccaccagctccagcagctggggttaggtcaccctcaagaggatctgggtggcttatcatagggtccagcatgatctttaggccccagaaagagctctggctgttcttctggtggaatggagaatctctgaatggttttgtgagtagaggagtgaaataaactttcctcatgtaaggaccactgtgcctggcattttgagactagaatggggagagatgagaccagggagaggctgctgcaatctgatgtggcagcctgcattggagtgacaagaagtggtcagttctagacgtgtttggctgccagagccaacagaccttcccaccatgtagagtgtagagtgtgtgggagaaagagtcagggctgagccactgtgcatacatttagagtcaacagcttagagatagtttgtgaagctccctcagggaacaaaaagactagacagagagtaaaacaaggactaggccc

SEQ ID NO: 60027 - DNA, 699 bp, Homo sapiens
tgtagaagtgttaataggaatacaggcacagcaaaatttaaaaattatagacatttgtgttagtgtgcatgtgtgtggacccagttccttctatcttccttatgaagcctggaagtggtttgtgaatgagttccacacccaggtatcaccgtgtttgagtttgtgatgtgaaattaagtctaggatattacctgcaagtccagtgtcaatatttgctttgctttcaagttccacacaaaatcaaagacagcgttctgtataattatactgtagtattaacgggatagttgtgtcttaggtgccttggttagcatcaattagttctgcagtcatattaactcctttttgaaggattcctgagctagacatttgtgtttactcaggtcgcatatggctgtgtagtacttagattgctgggcatacactgttgactgcttattctattgaactaacctttggtctctatcataagcaatgcttttactctcaaaaatcctgctcaaaggcaggatttttcctctctgttctttgtttgtttctttgtttctaaggcaattgtcttttcctgaaatccaatcaagttttagaattggcatttaccatcaagcaatttcaagggattactaaaagcaataacagatatccaggtcagttttgtgataaatggtattaatggaaaaaacatagaaaaatattgaa

SEQ ID NO: 60028 - DNA, 621 bp, Homo sapiens
aaggtgtatgttgatcttaaaacactaatgtgggaagcgaaagaccgtattatataaaggagatgctgaggtggaagcaaatgctgttcttttgcttgggcaacggctcaggaagaatgaaatgaatgaaatgcgggctgccctctggtgacttttcagcagagaaggccaagggggtggggatgaactttaaaacctcatctgatctgtttgtggccatattctgtgaacggtgctgatgtttataggtctgttactaggcgggaactctccctgaatcagcagagttaagccatggggtgatgtgagaacaccagttcttggaaaccacctttcagcaatctttcaacgggagggcccgcatggactcaggcagcacagccttccaatgccaaagaccaggccgtagggacctagtgggagaatggaaggacaccgatatctttggcagcaaagtgcttgtctaagtggaaatggcctttggtgcctgttagcctgaggttggccaggcacctctgtccctggagggcgatattgcagagtaagctgcaagccctggctggaggactccgacaggtgacaggatgtaagctgatgcaggagcagggtggtaggtgaggg

SEQ ID NO: 60029 - DNA, 1143 bp, Homo sapiens
aagtgacacttctctttgacaaaacagtgtattctaattatgagaaagcacttccttatatggagctgaaatctgcttacctcttacaaccaacaaaaaataagcctttttccatgcaaaacgaaccttttctatgaaattgcaatgagaagagtataagacagtcttttttttttttttcaggctaaacatcaccagttctttttcaatcatttgtcatttgaagttactttcacagtcttgattacaccctttggacatactccaattactcaatattgcctcttaaattgtggtctccaaagcttgaggcaatggtgtagacgtgatctgaccaagatgggaagcatgctttctgaacattcttaatacctcagtaaggggatgtaggcatttcatagatatggtaggaaccaagaagtgttccttccaggaatctgactttagttggttcataggaaatatagtattggaacacattggtgtaccaatgtggatccacccagggtgattataatatgtgggatttcccatggaaatttttgccctttgtaaacccaaagagttatttgctttgcaagatcagagtccaatgcttcacttttggtaactgatgaaattactcaaatctatgcacgggctgagtaacaggtaagagggagtggtcatctaccagtagctgagaagtcgtcggcacccacctgaatttggctcctggatgaagggtcaagaaggtatatgacctttatatgtggcattaggcattttttatgtatatgtagattcatttagggattttgaaagccacattcaatattttcttaaaaccattatgttttcttcagaaagctcaagtaaagtcataacaataaatgtgctttggaacttgccttttaaaaaagatcttagccttcaacacagactgatcatttcaaaatagcacagagccaaagacaaccgtgttgacctttagagttggcatatttgtgcccactttttatttgagttgaatttcctaggtctgtttacgttttgctattgaaacatacataaactataatactggtgtaataatattatacttctcacattttttaaaagattaagaaaaaattggtatgcttcagtctgcctggttagcag

SEQ ID NO: 60030 - DNA, 866 bp, Homo sapiens
agcaaacaaaactgtagattccataagcagctattgcagctgcagagcagatactgccttttactttcaataggagttcttctctagctacacctgtgtcagcatggacatacgaaaatgacaagaacacaaaatgtgttaggggtttatattcaactctaggtaatttcttttatatttatattacaaaattgatgatgtttaagaaaacaaagttgtaaatggctttcactttatgtgtagacatcatcattacttctgttgcttaagcccatttggagattaaaaaaataaataaagaggaaatctggatttcaacatcagtgtgaggctcagttgtgagaaacaaaggtcatttatagaaagcactgtttacatttgattgcccatgggaaacctctgagccaaacaaggtaatgattacaccaaattggatgtaatgattacaccaaatgttaatgcttctcgttagaatggaaggtttcagttcagggtatctggaggccactgagaattctttctaagtatggctacacagtcttttctgaaaggacaaatttggaagcagcactttcagacttccctagcatcagtaagtagacacaagcagagttcagcttgaagatggagattagttaagcgacactaaaggacagactagggaacagagaaccaaacaacaatggaatggggaaaagattaggtttatactgcttgctgaattagtacagcctagcatgcttgccatgttttttaactatcatgtattaccagaacagaaaataaattcagaatattaactttcgttttatctggtggatttaaaatccagaaattccatctagtgcaaaacaccaagataatac

SEQ ID NO: 60031 - DNA, 640 bp, Homo sapiens
aagaataaaacagacacagcactttttccttcttttctacatatcaaacttgtcaccaaatttgtttgtttttatctttaaaactttcttaattataccccttcatctccatttctatagccactttcttagtaaagactctcatcatctttctttgtgttgcttcagatgacttctgccttatctcactatttctaattcatcctctggtaagagagctatctatctgaaatctaaatatagctatgttgtcattgcagtgctgaagatattttagtggcttactgcacaataagtctaaattccaccacatgtcatatggtctatttcacaatccgttccatatttacctttctaaacttcctcagtcaactctagtctttacaatattttggaagtccatgaatatccattgctcttgaaaaccttcaggccttttcatcttctagcctgtctgtttcatgcttttacaatcacttgtccatcccaagaattggggtgcaaagggaaagatctgggaatagggaaaagagcaccctttctactcaatacttcctagtgagaaatagtatttgaattgttggttgttctcactgattttgtttgtgtgcgtgtgtatgtgtgtgtgtgtgtgtttgcc

SEQ ID NO: 60032 - DNA, 571 bp, Homo sapiens
gtatgtgtttctatttaattgtgggcagctaagctgatcaggccttggagagagccacacactttgtctttttttctgagggacattttgtccagttgaaatgagttagtgagtgcttctccttaagttttacctttactcagagtctggtggtggatttattctctgcagcttgtgcacctactctgaatatcacttcaatggttgcaaactggcaatgaatggatgcattagtcagggttctttgttgccacgagccaaaactgaatctggctgattaagcagaaatagtgtctattaaaagaatattgggtaactcacaaattttttggcatggaaaaaccaagcttcaggctatgtttccaggaatgatgccaacacctttcctgcagagttcacctgatgaagcattactgacgctgccaccaccccatggagcaatgtcagtaggcaccatgaccaccacttctcgcttgaagctaggtctgtcccagggaattgtaatcaccgctggcctcataattggatgccctcaccactactgcccttgagaacaaaataaatttttgat

SEQ ID NO: 60033 - DNA, 1038 bp, Homo sapiens
acagcaaacttttttcaagctatctgcagtttcacttagagaaacatggaaggctggaaatacaatgtgtcttaataagttattaaacaaattgagaactaggaaacactgttaacagacaaaataatcaatcctttatctcttcctgctttacagaagttttgttttgtttttcttcttattgcaaagcagaagaaaacctttaattaacttcctagcatgacaatgcttatttaaaaagcaaattggcattagacttgtcccaatattaaattcattatttagatcgcagacaaagtgctttttttcactcattagcttgtgtatgttcttttaaaaagccaaaggtaagtcctatacatgtagaaatattgattgtggagataatgtctactactagacagtggcactgtatttaattgatgaaataggggcaaatgtgagttaataggtgaaatccaaaggagcaacaaatgtcattggcacttttttaacccaagaaacgtacatattaacctcaatgaaattaactgtcaatatttgtataaaacatggaaggttttgaagatggttgaaaatcataataggatatgcagaatacattaagctcggaacataacacttataaagtgaattcatcatttttagattttaaaattaaaagttaactttgagattgaaaattagcttagttggctgaagccaaatgtagtaggttgatcacatatgtttatcaatgtgggttttttgtttgttttattttgtttgtttgcgataccatttcactatgtcacccaggctggagttcagtggcgcaatcttggctcactgcaacctccgcctcccaggttcaagtgattcacatgcctcaggctcccgagtagctgggatcacaggcatgagccaccatgcccagctacttttttgtgtgtatatttttagtagagacagggtttccccaaattggccaggctggtctcaaactcctgacctcaagtggtccgcctgacttggcttcccaaagtgccaatgtggttt

SEQ ID NO: 60034 - DNA, 1674 bp, Homo sapiens
cctcttagaggttaatttctttatcaattgttacctctttcattttgatataagtaaagtaaattatttataaaaagttataatgcatgaaaaggaaaatattgatttcaaatgaaaaataaacagaaaaaaaatcttttacttccacgctttggatacaattttaaagcaggtaagaaatgaagagaagaaatttgggattttattttttggtcataaacaggatagttaatgatttccaccaaggtttcgacttacttgaaaatcaaatgatctgatatccaggtgatctctggaaagcatgtgaacattgtgtttctgtcttttgtttgcactggaatgccaaatctgcaatacaactagttagaaggtttgaccacccgacgaccacacaaagtctaagtggagagtgctgagaggtgattcaccctccttctctgcctggtcagcccgctgaaaccctccagccattaaaccgctcttaacactagggagcacactttccccaggaattatcctggggaagtcagagacaggaggcttcccttgtgcaagtcagcatcaggccccgtgccagcccgtgctccgctgtagagaatgacaagtcacacaaatatgacagtgctaatggtaaacaatgacagttctgtcaggaatctgagaggcttttcatacttctgcatgtgccgaaagagaagcagagctattttatttgtggcatataaaaatgacggcatgaactcttcacccccttttttttcccctttaaacaaatcaaaattagaagagtgttagcagctttatggtttgggaacagaaagcaggaggctttagacatgtgaaaattcttctaaaaatttccctaactaaaaattcgaacatatagtagttttaaaaaaattacttaaatgaccttagatttgtgatatcttaacataaagctttcttgcattctcaagggcatgctaatgtcatctagagggcatggaaccaatagccacacaccagaggctgttagacaggatacaccccatgtaaacatagatgaggcatgctctgacaaggctacagtagaaggaggccacgtgatcattggatcacccgcaatgttacatccatcagattttccactgagttcgttcaaaagtgtgttatatatttacggtgtggaaaacactgcctgaactatttgagacataaaaagaatgaggcaagagctttgctttaaggagctctgggtaaagatgaacacctgcaatgtctgctatacgaaaacacaaagtaccgtacgatcaagagatacagacaaagtacttcgtttgtttggggtgtcatgctaggtattgcggggataagaagacaaagaagatagggacatacactgcagcgaactcagagtctaaggaaagacataagacatgtatagataaaagacacttttattaaaaagaagaaagcacaatacaatcaatgagacacgaagagaaaagaggaagcagtgatactgatatcagtaattatgaagtgcttaaactctgagagcaaccatgtaagctgttgacagaaatgatctcatatctcccaaacaatggactttatagataagaaagttaaagatgagagaggtggctggcaagttatagagtgaagattcaggcacacatttaagcacaa

SEQ ID NO: 60035 - DNA, 1474 bp, Homo sapiens
gcaaaagccctttataaaaccatcagatctcataagaactcactcactatcacaagaacagcagcatgggggtcaccacacccatgattcacttacctcccaccaggtccctcccatgacatgtggggattatggggactacaatttaagatgagatttgggtggagacacagccaaaccatatcagataacatgatattaatgttaagtcatccaaagacaataaagaaatttaatattgtgaaataagactctatctgagatactactatggttatgagaataatttgattgaatgtgtgcatatgtgagcatgagtgtgtgtgagtgtgtgtgtgtgcataatttactttaaagggaattttaaaaagaaagtttcaggtaagtttgggtattaattaacttaattattgtcataaatttagagaattccaaggtgatgactactcggctagtacttcatagtagaaagagcacaaactttagtgactaacttacatggaatccaatgcttgttgcacggtacaccagttgtttgactttggacatatgacataaccctctcatgcctcaaattccacatttagagcatgagaaaaatagtgagtataacataatgtctggcatagagaagaaggctcttggtaagtgttaggtcatttcctcccccactttcactcttcacggaataggcaagtcctagtagtttggttaaaactcttggtttcattcattattttcactttataaaaatactcagattctccttagtgcctaaattactcagtgaattaaaagaaagtgtcattgaaacctatgttacatttatggatcttttaagcatataagcactgcagttatcttatttacaaagatgctattattcacctactataaatcaagcttacaatggctcattctcaactgtacaatgtaaaagataatagaagacattattaatctttacttacattgagagtaaaaaggtcatatgttcgtttgagcttacgtagagggtattgtggtatattggagtagaattcggctaccttgcaggttagtccaaatgcatctacctgccacaggacctactgaggcttcctggtcctcttctctaatttggggccaccatagttatggtataggctaaagataagcctctatttataaaaaaaaatagaaccttagctttacagagataggagaaacttggataataagaacacatctgaatttatacatgaaggtctggagtcataaataagtaaaatgatttgctcgaggtcacatggcagagtcaggtaggaaactcctgtatgctagtaactcctcttttctccaccatatcatacaggagagttttcattctttttgtgttcttatgattccatgcactggagcatataacagcactattgaatcttctcagactatagaaaatttgaagccttaactttattttaatctatggttt

SEQ ID NO: 60036 - DNA, 1282 bp, Homo sapiens
taacaaatgtttgccttcccatgtacaagtcaatgttgtagattatcagcaggaattatactcctaaaacaattagaaagaaatgggcaaagatgttttttatctaatgaaatcactacgcacagacaatgggtctgaacatattgacccagttattaggctaggccctgtgaacacatgtggccgcattcactgatcaaactccattaagatagtcttactgatttatccctgggcaatgatgaacatccatggacactgagtcaatattttgaagaagattataggataaagtactggcctttcgtttttaagattgcatcaattttgagccatgattcaaagtctctagccctgaataagtagagctgaactccaaagtacatcttggtacagttaagatgatgaaattaattggctgaggttaaagttgtactcatttaaacagaatgcaaagaaaatactcagcttgtgagatctttaatgaggacttctggcatttgaaaatgtaaaatccaatataaacatacatttgttttttattatttttcaaaatatatttctgcatttctatttctgactgatatgaaatttattagcagttaatttgattaaatgtgaaagctgttatataacaatgtgctgatattatttttctctccatgaaagtttcattttaatttatatgctcaataacctttttttccttaggattgttgtaaaatttctaatatttgtatgatttagattaatataagatcaaggaaattattttgtttgttcctactgtaatagtatagctcaatgttctctctctctctctctgtctccacatacacacacacgcatgcctaaatatatattgctttctttcacttttatttctcaatgttattgtgaaatgtgcaattgaattatagaactttttgtttgagtcattttgtttttctttctttattgagaaatagtcttgtttgtttattgagaaataatcttgcagatcaggaggtcaggagatcgagacaatcctggctaacaatcttgtttaatctattgagaaataatcagaacctatggtctgatagttcataagaggaaaatgcaagtctaaaagaatacttatagcacattctgataaatgaaaatagtttccaagtttctttttatgcctatgtaagtgcaagtcccctttagagggaaggggtaattgagcggtttagggaagaatcagtaagagtttgtcagccaagaagtagggaaggtgacccaggacagaaaaagt

SEQ ID NO: 60037 - DNA, 576 bp, Homo sapiens
cggcgccgcggtccccgccgaggagagtcagcgcggccgccgcgctgtcagagcgctataaacgcggggccccgccccgccgcgcgaagcccattggcccgcggctccgcggccgcgcgctggttggacggccggtccgtccgtccgccatcccctcccgacattgggtgccgcgaggcggggctcgggctgacaggtgagccccgcccctggctcccgcgggcggcgggagcggagcagaagccgggcaggagaagcgctcagcgcgtgcacagggcgcccccggggcggcgagaggccttctgggcgcggtgcagacgtggaaacagcgacggccgagtagcgggccacctgtctccgcgcccgggggcgccttccccctcggcggaatcagagggcgcggctttccctcgagcagtgcggaaggcagcaggctccgctcggcgtcccttctccgcagatgcggcgctgccccgcgtgcaagacttgcactccgcgcgcacccttagagctcccggcttctgcgcgcttctcccgacgcctctcggcgagggcttctcacttgattttggtacc

SEQ ID NO: 60038 - DNA, 1852 bp, Homo sapiens
actttcatagccagaaatacttgagagctgacattttcggaaacacactctaactctagttttcactaaatatccttcatgggagcaacgccaaaataaaatcaacccttcaagtgtcttctgaagaagcacagtgtaagggaaacaacaaaactgcacgtgtttgctacaggaatagaaagcaagttaaaaaagcggtaggctttgggatggtgattacacaggtgaattcaaaggtcaaaaaactcatcgcactgtacacttaaggtctatgctttttttttttaacatctcaaggaaggggtgagggtgtaggctcaaggggaaaaaagcaatcccaacaccttaacaacaggaatacactaaagtgaaaatgcatttttctggcggaccacctaaagtgtatgattcccgagattagttaagtcctgtcccaaatttgagcttcaatagaatgcttctggccagctgtgattcgcatctcaaaggttaattcccttctctctcctcctcaagccgaccagcaaacgctcaccaccctccacatctgcaggccggctcgctcccggcctcacaagccaacgcagctctccgacctcactccgaactccacccctacttccgggacaccactcctctctcgcgccaaaatcgccttctcttaaaccctttctgctcaagccctcgaattttccatcccgaacaacttctgggtctgtcccaccccaagctttccaaacgccaagcctgcccgccccgccgccgcctctccgacccgttcccgcgcccggtccccagccccggaccgtccccgccattctcccggcccgcaccgtcccgccccggccccacgccctcgccccgcgccctgctctccgcacgccccggtccctccccgcgcgggcactcacatttttcgctgccgctcgaactccgctttcttctcctcctcctctcgcttctgcttctcgtccaggctgctgcgcttgctcaccgtgcgcccgaagatgtcgatgcggtcgggcggggacgaggcgcgctcccggtcccgctcgcgccgggacacggccgtgttggtggagcgcgaacgggaccgcgactcccgccgccggttccgtttactttcccgagatttggaacgcttccgcacgcgctccttgtcccgggatcgcgaccgggaccggctgcgcttcttgttgtgcttgctgctcttggtgtgcttggagcgggacgagctccggctccgagaccggcccatccttccgggagacgctctaaccgctcgcctcaggcccctcacgcggccagttcccctcgcctccgccttcggacgcgggctggcggttctaccgaggccggaggaaagaaaggtgtcggccaacggactttatgccttttcccggcgtctacagctgccacgaaggccgcctccaacgagaaacccgtagcgccaggcgcccctaagatggcagctgcggctgcaccggccgcccttcccacaatgccctgcgcgaaacgtgccgaagcgtgggccccgcctcctgacgatttttgccgaaggcaggcgagcgcttcggagcggactcgtttttttccgccagtcttggcggaagcctgagacgcaatagatggagactctccttttcgccttggcgtactctttttttttttttcctccctggtaagatgccaacgcctgttgaatgaattaagcacgttttagtgggatttaagtccggcctcgcagaagttgattgattgcattattttctaggagctggtcttgtggggcagccctaaaatgtatctccaagtgaccctgcactcatcacttgctgccttggacttagtt

SEQ ID NO: 60039 - DNA, 1436 bp, Homo sapiens
gaaaacgcaggaggcctccgcgggctgggtgcgccccgagcactgccatcccttttcttgtaattacttaatagcctgtgcctttgtcttttgctttgttttcttaaggaaatgttaaaaaaaaaaaaaaaaaaaaacggtgtacaataagaaatgagacttgaatgcgagcgggcgggaggcagcgctgaaagaggcggccgtggatgccacggcgctgggttcaagtcccggtccagggggtttgaggggaccgggagacagtggccgcagcggccatggggtccccgcagacctggcccagagtgcggaaggagtcgcctgagccgctgttttaattcgtgaattcattgaaagacgagagggccccagggactccctgggaacgcttggattgcgggggggtgggggggggggcggtcagggctttcctaccctccccgtttcccatccctcagaatgttctagaaatctcagcacacaggaagatgcagtggccgaggcccgtagaaggaagcgggcgaagggcggaggaggacgcgcggggccggggccggggccggggccggggccggggccggggccggggccggggtcggggacgcggggcaggttcgtggcgcagcccggggagaccttgggcgaggcctccaggcggggacgggaaagggaacgggaacggggacagggcgcagggcagagggccgggacggaaacggggacagggcgcagggcagagcacagagcgcaggggcgcagagaaggggacgaagacggggccggaggcgcctgaggggggctccgtgcgggaatcggcggcgccacccagccccgcacatcgccgagagaggcccgcgtgcttctgagagcgccgcccctgacgtttctgctgcgcgctgggaccgaacctacaggaagcaaaaccctagaggaagaagtcggcggctttttggctcggagacaaaatggagccccgcggatgcagcctgggctccctcgggcgcatccccagaagctgcgggtgtccccggaggacttgaagtcctcccgtgcgtctcgatgccaccagtttttgtttctttggtgaggaatcggttcacggtgaaacttcattcctcagccggtggggagccgaggctgggccgggcggcgagggttgcgctgggacgcactgccccctactggccgctgcgccgcgttcccagctgctcgagcgggtggttcagtgaactcggattaatttaaatacagccgtagatttggcttttttccctcccgggcgaatctaaatttaaaaaaaaaactagggagagtaccaaacttaaaataataaacagactgaaggatattatttcttaacctttatacagcctcctaaaagagtgaaaattttattgtgagtaaaatcagagtttggctctctggtatcccttctg

SEQ ID NO: 60040 - DNA, 1947 bp, Homo sapiens
tatgatattcagaggaaaatcaacattcattcatttattttccttcctcctttcaacaactagctcctggtgtttgcaaattataaaacggtttcttatctgttttccattttacgttgtatgataattatgcaactggtaacactgccttctccctagtcatggacagtgtgcatctcggttttatgattgctttttgttgcagcttggggaaagataaaaaggcctgtcaaatctcaagagattgccggctaatgaatcacaaatagctctgcagcaggctggaagcatgctgtcctctgtgaaacatgcagggttctctttcgcattcccttccatttgctctggtggacctgttggaggacccagtgatttctaggctttgtcatggatgttggatttgagagctcaattagcaactatctcagccaacaacaatgcggagctaatgggaggtttgcttggtggcctgtgcctctgtggcaaagccacacctccacatgtcctgcgggctcgcttcttcactcctgtccggaagccaagatctgagttcctctacacatgccctggcagtgtctcagtcctgtttctgagactcttacaaacatcccatatttcagtcaaatattctccttctcttttttttttctcccagccccatagatctaccaggcacatagaacaaatgttctgtaatgagtaagcttaggctggtgtgggtgagggtgcctggtaagttcctttatggaactagcaggggtcacaaagcagaccattttctcctccagtgtcgctcaaagttagctagccagtggcccttcaaaagaaagatagaagttcaaaacataaaaaaatacaaacaaaacgtcttcattaaaaaaaatcatcttcatcaaaaaatacaaaatgctctgatggttactccacatttttaaaaggcaatatgacctttgcactttctgagataaccggctgatgatgttcccggaagcctctgccatctcatctcctgttccccgcatcactagccttcagataaaatttgttcttgcaacacctctggtcttttgaaatgtgcagactcctgtctggatttcaggtcaaattcagactttggtttttgagatggagtcttgcttcagacctctttttttttaaaaaaaaatatattttactttaagttctgggatacatgtgcagaatgtgcaggtttgttccataggtaaacatgtgccatggtggtttgctgcacctatcaacgctcttttttttttaaatattaccataaatactgtttgttgctatctttcatctggaacaagctggctgagtaaggtagatcttctcgtattgtcttcagggcatgccagcgcaatgcatttcctggctaccagccctcatgggctcacgttgggtgcttgtggcacactcacacatccccatagctgggactgagatttctcctttcatacattattcacagcttgcagcaatgagtacttccgcagtcttttaaccttatccaaatgtaacctcgcattcacaattatacataacttggaagaagcatgctgtaccataaaaagttgccttctggggaatttgttgttgttgggcttgagcttaaactaagatggcttagacggaaaattggtgaacaacaacatttctccactttcttttgcataacagctgggaggaatcggttcatgctataagcccggggtgtgccggccagctggcaggagcgctccagagccagggtgccagatccccaacagctgcatcactgctcatccatctgtagcacacaccatatgccaaaccccaaagtaagtggggaggggatccctttaaaaagagattttcaaagccacagagaaaaagcattttctcctataatgcacaggctttgatctcgtattctcctgctcctctcgccctcac

SEQ ID NO: 60041 - DNA, 2021 bp, Homo sapiens
taaaatatttattattaacagggagcattgagtctgccaagattaagagccaactgttctgggtgagaggatttgggccttactctctattatttactgttcctaccttcctcctgaagctcatttaatagatagtttctcctgagctcactgatcttcctacctgtgctacatatggacagatctcctatgcttgagtgtgctttaatttttcttctagtctataggtaagaaaggggactacctcttggtcttgagagtggcctgcagagcatatctgagcttattctttattttgtaaactgtgaattttatcaccttgctattcttttcatatatcgtgcagctgtttactctctctccaaagttaggaaaagaatctctgcttgattttcacttatccagcctccctgttggcccacagctgctaaaaaacaaggtgagtggtgcttaagttcaggcttgataaaccacaactgagctggactttgcaccacttcaccctctacagcagtcactgaattcctgctgggaggaaagtactatgtgaagtattagtagataaggctgggaggtgcagaaagttaactcatatgtggcctcacctctcaaaggaatttataatctagctgggaaaaaaatgttacgccacagagttaacaatgcaagagaaggctttgttgcactggttttaaaacctatgctgttatttatacaagaccctcagacactctcctgcccctatgtccctgccctcacatgctgcttttcctttggtcaatattgacattagtccagtgaccaatattgaaaggggacagggagagatgagctgcctccaggtttagaaaacaagataaacaaatacgaagaaggaactgaagtaagaactgtattcagagaatagcaagtacttcagggtgagaataaagttgcagggagagaggacactgggagatttgtcagtaaatacattttaaaaatggaagaaaaggcaatctttaaatgtctttactcctcctaatgttcacacaaagaaaaaagtatgagtatgaatattccgtaaactctaacatcttccccagtagtggggttctgttatttagtcacagtgcagatccagctaagaggaggcaatcagcttgaagttagatagagcccgtggaactcagggacacaataaagatagttttgaattaagtttaacattcaggtctcttttctaaaaactagtatttttcctaatacttttaattttaatcccttacatttccaacagttaagcaacactagaaccagactgtctggtttcaactcccacctacttcacctagtagctgtgaaaacccgggcaaagtccctgcctcaattttcttgtctgtaaaatgggcacagtcataatatcaacacaaagcgtgctgtgcgcaatgatatgtattaggtacttagaatggaagtatggaattagtcctcagtaaaagtcctatcgttatgacttagtgccctatattatccccattctgaaaagttattttatctttaacatagatatacatttccttttacattaaagagtggaaaaactcagtcacatgaaaaaagagagcgcagccttggcacagattttttttttaagtggcaattctgtgctttcgtgatacatgctgccacctgctggacccatcaggaattgttcccatcgcgggatgtgattaacattgctgtgttgtttgacataattttatatttacgcaaaataaagaaagctaaatatattattcaaatcgttcaaagaatagccatctgagcaatttctgtcactaggtggcactattaataactgcatgtgatcttaagacccttggaaaagctacatagtcggctgcaagaccccagtgtgatgaggagcttcacggcttttaggataatgaccatagacactcgcttagttacaaatccacacttcagggggcatcataatgaaactagaatgtgaaataaacgcagcatttaaaagatcg

SEQ ID NO: 60042 - DNA, 1962 bp, Homo sapiens
gccgagatcttgccattgcactccagcctgggaaacaagagcgaaactccgtctcaaaacagcaacaaaacaaaaacaaaaagtagcggggcgtggtggcgggcacctgtaatcccagctaggtcagaggctgaggcgagagaatcgcttgaaccagggaggcggaggttgcagtgagccgagatcacgccattgcactccagcctgggcgacaagagcgaggctccatctcaaaaggaaaaaaaaaaaaacccacagatttatgaaatatcctctgtatatataaaataggggacatagaataaggaaagcccaagggaggggaggcacacatctgtaaacaagtgtgtacacttcagtgcacaggggggttgacagcgaagctaatgaagcccaagttttaagggcccatttttgcgaacacttccaaggccttgagaggggccctaacgaggtgttcccatggtcgtgtacctcggtaaaatttgcaaaaataagacaattttacattatttttctttaaaagggctctccaaatggcacaaggttcaggcctcacaaaacctgcattcgcccttgacagtccactctcgtagaggtaaaaggagaaaaatagttatggaagcgctttaaatcgtggacctcattgcgacacccttaacaaccctatcaggcagaacaaattgctccgcaaacctgcggcttgcagagcgatggtggactcccgagctcatcgggtccggcacctcttcaccacggaggcctcgggtacggaactggagggagtcctggtgctcggaggagggtggaaggccaagatccctaggtcctggagcagggagccgggcccacgccgccgaggtatcttttccgtccgggccaccgtcgcgggggctcactggcagcggcttctgcgcatgctcggaagagcgggcagggttcccactccgggagcggagacggagaacaggttatgtgggagccggcgggggcatttgccggcgacacccgagcgggggccggaagtggggccacagctcgcagcaggagctccgggctagaccgtggcgccggcagcggcccctgggctggaggaggatgatgaggagcgacggaagcgacgcgggggtacgctgctgcgcggcgcccggtttcgtgcccgcggccgactgcgcagcctgtccgcgagtctgagtaagtgcggctcggggaccccgagcccgcggggcccgagcgccggtccgctccttctaggagggtcgcggggagccgccggctcctccaggcgggcgcgaaaccctcccgggaggctgtggggggagccccggggctagtgcggcttcccctgggggtcgtgcgggggccgagcgccgggggttgtggaggaccagcccggggtgcagccctgccggccgccccgactccgctcaccactcaccaggggaagcaaactgaagccaaatacctgttttggaaactaaggtgcgcgcattgccagaggctcgccgggtgtcgttttgtaattggaacctaaaacgtatcttagtgttctatgtcaattgtatttccagtaatgtgtacaaacctaagatccctaaaatccaaccctccgctcccccaccctcccacacagacatgaaaagtaaaatagaataattccagctactaggttggagagagggagagccccgatctaatcacgacagtaacaggtttagacctgtgaatatcatgacaggaagttctggggttattcaggaaacatcaaaaaagcaccccatacaatcgaagtcaattttgctgtagattttagtcaacatttaagtaaaatgaattactagtattactacccaaggtatcgaaaccaaaaaaaagtccgtccccatttaacaactcttatttatgtttactatgtgatagtaactggatagaaagagatgagtatattggctttgtgtgttg

SEQ ID NO: 60043 - DNA, 885 bp, Homo sapiens
ggcacagagaagtaacataacttgtcccaggttacacagctaatttttagacttggtttaaaccagccagtctggctccgcaccgggagcaaccaaaactcttcttgcatgctgtggaagaaatgcccctggccaggcttgagggtaagggaaagttgtacaatggcttctttctaaatacaggtgacatcttgtgtcagtggacaccagacaggagaaatgcccctggccaggtttgagggtaagggaaagttgtacaatggcttctttctaaatagccacaagtattgacaattcagatgacatcttgtgtcagtggacaccagacaggtgacttaggaatgcgaaagtgtaggcgcaaacctacctttgcacccaggagcagtgagaggcagagagcacggcagatcttgtaaactttaggtctgtttcagctgtaattgccaacatttccttcattttatttttcaagggtgatttaaaattaatccaggctggttttgcagaaaaatatttaccttaaacacatttattttctctgttgattttgtaaaaatccagaaccctgaggaatggcttcagttccagatggttaccgtgaatgaccgtgtgacacacaggaacggaggctggctatgcattttgaaaaactgtatttcaaaggcatttacaaacaaatgcccaataagtcagttagaaactaaggaaaatagtttctaataatggaaatgatgtcattctggatctgcagccacagatagcattggtggggagatgaggaagtttataaaattagaattccctaactttcataaagagatgtttcccttcacccagtgctgactagtagtttggagttgcaaaatatttataaatggtgagact

SEQ ID NO: 60044 - DNA, 3665 bp, Homo sapiens
attattattgtcacatcttcttgtctgatgtttttcaaaataatattgctattcctatgatgtagaataaaccagcctacatgtgaccacatgaacacagcatctctttgctcactcacttatcccacagtgtagcttttagtggaatttggatgaagtacactaagtcctaaagcaaacactacaaaacttacaagccttcttccttcaaattcattctctctcttcttccttcatagcaactcactagatacatgaatcaaaataaaatatacatgcatcagtaactgtgagctaaaggcatattcaatacttatcgtatcttatgtgattagacctccagagagaagaaaacattgctgtaattcccttttttttcttttatttgctctgtcgcccaggctggagtgcagtggtgctatcttggctcactgcaacctctgcctccctggctcaagcgattctcctgtatcggcctcctgaatagctgggattacaggtacatgacaccccatctggctgatttttgtatttttagtagggacggggtttcaccatgttggccaggctggtcttgaactcctgacctcaagtgatccacctgcttcagcctcccaaagtgctgggatcacaagcatgaaccactgcgcccgacctgtaatttggttttatcattaaagctacaaaagtgctgtttagctttgactctgtttttagaactaaaaatgttgaaagtatcacatgaaaatttatggaggtttatttcagcataaaatgaatgtaaaactactttcctgtttgtaacataggaatgatatctagaaacagcagataggacgtgtgcctaactttagaatataagtgatacagatatagacatcacctcctaaggcttagctgcatgaaaacagtatttataacactttgcataagcatcttcctccacagattattaaaacaacaagaaaaaaagtctgtaggtttctatattttgagctgtggcagtaagactgcacggatctggaattccacaagatggcgagctctccataaagtcagacgagaaaaacaaaacaaaacaaaaatccaaaccaagaaattaaaataaaaacagaaaaatgaagaaacacaaacacaaatgcttgttaccaaaagtttctttttcacttacggttcttcctatattgactgcttccccctaaccccctcaccagcagctgtttgttttacaagggctatttcaatttttcttaccctttgtatattatacaaacgttacatttggggaacgaatgtaatttctgcttttgggaattgagatttaatgaaagccagaaatagtcattcattgtttatcttcagcatactttaaatagcttagatgggtttagtcccagaaaagctaggttcctaaatccaaaaagttattctgaatctctttttgtattgattaatggtggaaatgattgtggtgctgcaggataacatttgtgagtaaaggtcaaattttgaatgctaagttgaaaacaagcagtgtttgactcagagcatgtgacctgtttctaacccatgtggccatgaaaggaaaagctgagtcaccgcgcgcttgaacttgtgatcctgctgggagccgtacctgtcacggggaagccacggcaagcagctcccgtgaaggtttggtttctgctaagggcttattatgaacagggaacctaatctgagagtgtcacataatgtttaaaaagaggtaagggaaaacttaaatactatttggaggtgagtcttcataattatgtgctataataagctgtttacttagtaagtagcttgaaggtgctcccaagacaaaagttcaagacaggaggtgctttcaccagattctcacagactccattattaataacctaagtgacagtcacagtcatgatcagcacagttcatggggcacttcccatgtgccaggcactctctgaagtgtttgttcactcactgaatcctcacccgcagctaagcagagggtgcaaggctgtgtctgtattgtatagtgagatgtcacccagtagccaagatctgaatccaggccctgctgaatttatgcctaaattgtctccacaacaatgctgcctacaaaatggcaatactgtctttatctcctcgtgtcactgagattttaaggcaaatgaaagagaaagcacaaagtcaaagtctgcatgtctgtctttattttgcattgctgaagcaaaactaacttacgacgttctagggattgccacctctaatgactataaaaacaaactacgctaggtctttattttaatctagaagatcataaaaattttagaactaacagagcttttgttaccctaggtggacagtgtagccattatatgagtgttagactacctgtgtaagttagcaaggacatttcactttgaaatgagaatgagaggaattgggtcagtggcttccgtcctgccttctgttcttgatgttatatataataaatcagaagccagatatgtcacttgttcaaggatatttagctggaatatttggtaaatgacagaggtggatttcaaactaaggtacgtttggtttcaaatttctgttcattggaacttcttgattggtagtgttagattcccaactctaacacatttaaagaaaaaagaaaaagggggagtgttgagatgagggcgtagctgaagagagcggaggttatgtttgccccaggaatgtgagatgcagaaactcgaatgtgagatgcagaaactcaaatgcggcttctctctgtcacactcatgcacatggcacatgcacgcacgcacacacacacatcagttttactttgtatgtgttttctaacacagaagagaacgtgaccacgtgctgccctaggccccctaacttaagagcaactcgtctctctgccaaaaggccatcttggtggctcagcccaggtcttaggcccatcccgggcccctaagttaaggacagaaggaagaaatacatttggctcctgcgtagggatgggagctatttaacaggaggaaggggaagggagagctgagcactaatgagcaaggagcaacatgaggccctgtgctttcccctgcatggcactccaactacctgaaagactcccagcccggcaggtgaaggtcagaatgcaagtgtcagtaagtctgggtaccagttattcagcactctctattagtaactctggccaaacttatcaccttgatttccagctactcatacaggaccatcaatagtgtagatctattgcatgaagcctatagatgaatattgcaatgtatttccacatgactttgattcgtatggatgttttcaaaaaatattgtatgaggttaagacagcagcatgatctgcctaagccacaatgtcattaaatagttagcataagagaattttggccagaggccctatatttgtggtctgaatatatctcaaaaattcagacttctacattacttttaaatggtcaaatttattatgtgatgacacattgttttggctgctgtgttggttttgttgtcacccttgtgatacttctgaagctaataacagctgtcattgagcacttctcatagattttctctttgtctactcatgataattgtggaagattataattgatttcc

SEQ ID NO: 60045 - DNA, 712 bp, Homo sapiens
gattactaaagaataatgtctaaagagcctacaatatcataattccatttcaatttatttctaaagaaatatatactttgcatgttttaaaattgaagatatatttgtcagagatgaagcacctgagtttaatcatattttccttataacacttttattagtatttttaatgggtgtaattggtttagacaactgtagagttattttctaaataggaacaatattgcaaaatggcagtagtaatagtaaatgagtaacccagtttttgctaggtcataatattgcttcatttcctaagtgcgtgagaaagatataacagaatgctaattatttctctgagtcaacaaacatattaagcccagtatgcgtgcttgtctcgaagtttccagaatccatcttttgtaaaacaggttttaaatattttgtattgattcagtatctttctatgtaactgattgcttcacaatattcttgtgtaacttacttcgatttctcacactaacatctctaaattagaatattacaactggagctgaagcacatcagtccaaactttactgacaattagtttcagaatttttcactttccattaattttttaatgtaaatgtatgatgacatttagacaatgtgattgggtctttctggaaaatttctttaatgtagaagtgattgtgacctgaaagcacaattcatggccagggaccactta

SEQ ID NO: 60046 - DNA, 748 bp, Homo sapiens
aaacaaaaacatgaatcacttgtgaccttctcctgtcacaaggaaaggtgcagctaagatgaaaaccgagtaaagcaatgtaaatatgtcctggtacaacaagaactaatgttttcctttcctgagatatcatgtgctgtgatgcaccaaatgctttgaaaacacgtggggacaccatgtccaggtgattcccatcattttagagatcaaatacggcagaagtgacttttaaccacagaagtctgaccggaagccaggcgataacgttacgtgccttgtctcctaacaggtatttgaaccagaccatacaggatgatgcatccacaggggagcgttctctgaacagggagaaattggctgttttgaaacgagccctgaatgtagttggcttcagcagcttggtgagtcatgtcataaatatttcactgagaaaatcaaccttctactaatttataaaagttattcattcaaaagcatttactgagcccctatgacattccagatgttgccgaggacactgatgattcggcagacaacaagccccaatccctgcctcctagagctgacatgctagtggaggcagggggcaggacttcatccacatgttgaggaagaaaggaactaggaagaaaacagagcagtcagcagagagtggcaagaggagagggtgcagtttccaagagggtggacaaggagccctttcccaaaatgaatataatatatacattatatatatttttaaatatat

SEQ ID NO: 60047 - DNA, 837 bp, Homo sapiens
ttttgaattatgaggttttgatgttgaggtagagactggtagttttcttgccatatcgaacatttgggatctgcaaactcccaacctcattaatagggtcatcatttttgtaacttacttttagatatttaaaaattttgccttttaatctttcttctaagcaccctattcattctctctgtttgtaaaatgcataggaggtggagaatctgttcgtaattctagcagcaatattgcaccttggagacattcggtttactgccctgaatgaggggaactccgccttcgtttctgacctccagctcctggaacaaggtcagtggaacatgaccttctgacattaaccacattgatgtgcaattttgtagatctaccagtagatggcgacatagtacagaaaagccagttggcttaaaccctttcctctatagtagaattcagtgagggggggaaattgtctactttgttttttcttaaaatctgttgtggaaatgagtagcaagatgtacttttatgttctcattctgtgcaccacattagcaacactgattctttagcacatacttgttgtttatttatattgttctaagtacccttcaccccactacccagtgtattttgggagcatgttattagctcaacattttaaacagaatgtaattaattccctttcaaagatcttgccaaaaatctctctctttgaagttgcctcgttagtcgctcccagatttttaaaaaataccttaaaaccacagattgtcaggaaacaacatatcttcacctatatcaaagagatttaaccaggtacctggaaaaaaacaattccataccatctgt

SEQ ID NO: 60048 - DNA, 818 bp, Homo sapiens
taatcatgatatctatgataaattgcttcaacaatagtgtagcttattgacccaataaagaactatgtattttgccttaagtacatgttttcaggagatggagaggaaaatagatttatcagatctaggagaatatgtcattttttatattaaacattagtgttttctttctgttaatgactaatatgttattacaaatattgagagccacatagttttaataataaaatgtatacgaaatgcaatgatttaaaaggccaaaaaatccatttagcattttgttttgctagctctttcttgagccaagagtgcagaggctaaagcttgtatattttatataaaggaaaaaattcattgcactgttagctattcctgctcttgtttcatttctaactggggaaatgcatttggcctcttttcaacccctgttaactgtcctgctcaatagagttagccgaatctttgtttattatgctctctgtgcctgtcatttgagcatagtggcagttctgccagaataaataacactgcagtgccgtacagaaaggagagcagaatgtccctttttggctctccatgaccctgtctgtccccgaaaaaaacaccaggaaggaaatgtcagtaccactagttaaatatcgtttgcctttttcgaatgtaattttctaattgaggaggatgtgctttgcaacaaaggacattttcagtttttgtcagcctcaaactttgaactattctctcttcacatactgtctagtggaaaatacattttccaagcctggcatctttatgtgtggaggtgtgagaagttgtgaagc

SEQ ID NO: 60049 - DNA, 1171 bp, Homo sapiens
aattattttgtgcgagctcagatgttttttaagctacctttggtggttttcatccacctccgcatttaatctcatctcagggtaccaagtgtgtttctgtgctcctcccctggctttatctgagaggacaagtgggcctggttcatccagatctgaactcccctttttgcactaatcccaaacccagtagcaacaaaaatgctttctttttgaccagatggaaatccgaggctagcctaggacatgacatgcattttaatccaatgactcagcataggaggactggatcaacccaactctagtgaaaccaggtctctctttcctgctgtatacattgggagggtgatcaaaatctgtccaccttattttaaatcagctgtgggtcaccaccacactgtttccatgaggtcatttcttgttcatcatccactaaggcgtttgccacgagcagcagtaaaaagcacaaaggacagaaagccctcgaaaggagaaaatgaaatgcaacacagccagctcacatactttccatgccacaatccccaccacctaacattccgttctcgtcgatgaggaaacaatagaatgtacagccctgtcactgtcgctattaataacttggagggcttccagaaccacacgggttcaggggaatatgctgtccttagcagtcacatcaatgcttaggtatctcttcatgagactgtgcctctgtgtctcctgcctgccatgtgtgaaagttctaattttcaagtcacacataagccctgattagtggtgataaggcaataaggaggaccggtttttttgagactatgaaaccacaaagaactctgagttccaaaacactctattagcactttccagtcctattttagaaaaccaatgggaaaaatgtaaaatggagtgggctgggaaattttttcatcaaagtataattgtaattttaagtaggagttttgtatttaaagcccttaatggcaagcgtgattaagagaagcttggcttcactgtttacagcaaaccttgattaaatacaaacaagcaaatgaaacaaaaaagaaaagaaaaatgaaaagaaaaaaatctttctggagtgtcctggggtccttagccaggagaattatcttggaggggaaaaaaaaaatccatggagtcagccatctgtctctat

SEQ ID NO: 60050 - DNA, 2998 bp, Homo sapiens
agaacaaaatcatgttctctgcagggacatggatggagctggaggtcattattcttagcaaactaacacaggaacagaaaaccaaataccacatattctcacttataagtgggagccaaatgatgagaacacatggacactagaggggaacaacacacacaggggcctatcagaggggagactgggaggaaggagaggatccagaaaataattaatggctactaggcttaatacctggatgattaaataatctgtaaaacaaaaccctatgacacaaatttacttatgtaacaaacctgcacttgtacccctgaacttaaaataatagtttaaataaagatgcctggtgcagtcccaaacataacagaggctgtaattcaaaatatcgctattcaattactttaaaataagctttccttaatacttttaaattgtaaatgagaaaacagatatgtacagaaaagaccattaataaaagtttaggtttttcaaggtgttgtttgtttgttaattcatgtgtttgcttttgtttcagttgttgttgtgtgtttgggggtgaggctggggatatttgtttcctgaggacctctgcattttctgacttttatttgaatgtgctaaggcaaactgagaaaattcaaaattgtgtccaaccgtttgacttctcaagtcacataccaaaacaaaaactatgggattacatcaaagggcatagtagggattcctgggttaaggagaaaaaagtgtgtaacattcctaactagagtgatggagtatgaactatataaggaaagctatcatcaccattgacaaatatttgttatgttaggcactagcctccctgtaaaggaagacaatacccatgaattcagaatgtaagccacccacagccctatactgaagttatcctggactttcctgcctgtgtccacacagataggaatcctagtcatgatgaaactgaacatccacactggcagctagctccatgataggacatgtgagcacaaatagttcaaattgctcagagggagaaagtcaaaagcacattgtgcaatctgactctttggaatgtcaatgtgaggcatgaatcacctgacagaatttgcctcggtccatttaaagacattattcaaagaaactcatctacacatcactgcccaacaaggagacgtttctatttcaaaattaaataagaacctcagacaattttttcacagcagttatcatgattattgaatatgtgataatccacagtgtattcaatccttgtggattacaaaggacacattgtagaaaactgcagatttggtgacagcattggcactaagagtcagaaatcccagattctagaccatgccaaaccacttcccagacaggtgaccttggacaagtaccttcatcttgctaaactttttttttcttttttgttaaaaatagtagtaagagttcctgaatttttcatcacacacaggttgcacaggaatcaaaagaaagtctataacaatatttgataaagtgtaatgcatatggacacaataaccataataattactaaaatatttttattatacaagcaaaaacttataaaaagaaaatgtttaattcaagtcatgggaataaatgagactcttcagagaacttgtaatataagtcagaaagaagtaaaagaaaagaaaagccatgaggaacactaatacttagaaataaggcagacggccgggcgcagtgggtcacacctgtaaccccagcactttgggaggccgaggtgggtggatcatgaggttcaggagatcgagaccaacctggctaacacagtgaaaccccatctctactaaaaatacaaaaaattagccaggcgtggtggcaggcacctgtagtcctggctactcaggaagctgaggcaggagaatggtgtgaacccaggaggtggagcttgcagtgagccgagatcacaccaccgcactccagcctgggtgacagaatgagacttcatctcaaaaaaagaaaaaaagaaataaggcagacacaagagccaataaagaagtgagaaggtgggtttgtagaaatgtcagggaactagggatgttctgtgttacagatgccaagagaggggaagagtaatcatcagcaaagtacctcccaaatggatcaaataggatgatcacaactaaattaaaatcattagctttggtaactagaaagtcactgctctgtttctatcaactgattttttttcttggtagggtcacatttgcttgcttccccacatgtctagtaattttaattggatatttgacatcaccactgttgttcaatgtctggattcctgtcttcctttaaaatactctgtactttgttctggaaggagattaatctctttgaggatgtttgacctttacagtctttcttaggatgtttttaagctttgttagagaaggtttagaatagcttttgctctggggctaggtgagccctgcacttaagatgtggcctttgtggagcctctactgaatgccctggtctttccattcaggctagctggagcccaaatgtctcccagctctacatgagctccagtggtttgtgtttgtagttccatgacagttatcttttcttgatagttgttctgtaccctacacaagttcaggttactattcagacaaagactcagggaaaactctgagtagattctgaagctccttctctgcttggcccttcctctctagtaccctgccccaaaaatttcaactgtgcatttcctgtgcaagtacctttattctcagtctttctgaactttgatctctatcacctcatctcagtgagactccaagttctgcttaggctgcctcttcaggggccttggtccagaagcactatccaggcagaaagccaaggcatccagggcccaccacattagttttttcctgccatggattatattcctatgctgccttttgtttaatgtctaaaaaccatttctttttcagtttctcta

SEQ ID NO: 60051 - DNA, 1112 bp, Homo sapiens
gtaatgcctattactttgatatttaactcaaatatattaacaataattgaaagcttttgagtgctacaggttgataataaacctgaaagtatagaataatcatctgtattttaaaatttttattcttaaggccaacaaaacaaagtaagaattatgtcagtgtttctaactgtcctacccagatctagctcctgactgataattgtcaacagagtcaaacacgccttcctaaggccagctccacttctccaaagcaagctcctctcactttgccacccagaagccacactggaacctggaatctaaagaatgtgtttgcattatcaaagaactctccctctcctaaagggtccaccctgggattccattctagtgacttgacaaaatgcttctaattactccttagttagttcccataatccgcttaaggacttgtttacttgttgacaggcagggtaggaattcagccttgacagtctgtgtcagtgcaacatcataaataagataaacattatctgaagtgatcacaatgttcttgaacatctgtgcaacatcataaataagataaacattatctgaagtgatcacaatgttcttgaacatctgagccggacagaatcaagcctgcgtcatcttccttctgattttccaaatgagcacacaggagaggccactctaaagtcaccctgggaatgtgtctgcctccagccccattcacggcccctggcactggcttgtcatgagatggtgttcaatgaatgcttgtggaattgaatgaacacaatgtggatttacaccctttcctgtcaaatagctagttctaaaaaatacagacctgcacttcagccatgcaatgccttttaagatgtttcatactctgatgcagaggaagatgtctcttgccattacagaaccacaccgagaaagatcaaacaaaatcacaccaagaaaattcatgtgcagatcatctcatttgcaattattgcagcatgcaccaagtccaacacatttcacccacactttatcagcaaaaaagaaaacacctgagggtcagcgtcttctccaggtcctggcacaggactacctgaaccacggagatgttcagtgggttg

SEQ ID NO: 60052 - DNA, 1195 bp, Homo sapiens
atgacgccatcatatttttcttgagttctccatgaccaggccctcactgagggaggggggcaccctctttcctgggggccagtgaggagtctgacaggttgtagatctacctaagatttccagtctgtaattcagcatattgcatccaaataaagtatctcattttagaaaaagacaccattttaggaaaagatggcagcaatttgatgattggcctccttcgttttaaaataatttataagttttaggtgaaaagctagaggtcctagttgctttagtatgacagctataaaaccctgcttatccggacaacattaaagacacaactgtggctgtctgtgttttggtcaatcactttttctggtagtgtcaaacctgtgttattatctaccacatgccccatgttgtagagctgtgtttacattgtgctaaattaagcagcagttgggcaaatacttgcacaatatgatcaataactatacttaatacagtcactacttggtaatattgtcagaaaatttaatttgttcttagcggaagaaaataattggctttgccatattgcctagcataatttggaagaaagtgtgcaggtgtagttagcaacctatgcagaacgatcaatcagactcacagctgaaggaccttggtgagatgacgtcattgtacagatccaaaacgctgcacgagacgaccttggttcccatcattttccagccctagcggtgtgctctaaagagctaacgtttatcttaactgttttgaattcagctcagtaggagatctcactgaaggaacaggcaaacagcgcaacttcctctgataaggtaaatattgtgttaagataattgttaactttggaatgagcaccactgcagggtatgtttaaccgccagcccaaactgtacacacctctctcattaagcaaacctcccctcctcacaacacaaggctgctgagagcaaactaagtacaaataggcctgattccatgttacagtaaagccctggatcatattcaggatgaagtgtgggaaatttttcaccttagtaccaaaagtgtccccaacggtttaaagaatatttaattaataatgacaaccattatttgaggacatacagtctgcaaggcctgtcctgccctttacaaatagcttacattttacttctcaaaacaatcacaaacataaaagtcc

SEQ ID NO: 60053 - DNA, 2049 bp, Homo sapiens
aactccatgtcaaaaaaaaaaaaaaaattgtcacaacttttcttaaaatagcaaatagttaatcctggcatccacaaaatgagatggaaaaataaagtaatcatgtggggaggtggaatataatatcacctctaaatcgacctatttttcacagaagtagttgttactcattttattgaatgacacagttattctgataattgttgagttacttaaatttgctgattagtaaacaggaacttaatggcaaaagagttttggctttccaaaattcatctgttgaaagggtagggttggggagaggggagagagagggagaatgcatacatttatgtgtttttaaaatcatgtattttaccatgttccaggaaacttttaaggcaaattgatttgtgatgggctatcaacagtcatatgtaagtgaaaaataaagcgacctactggaataaaatggcatccttccacacctctcaggagaccacctcctgtatctttaaagtccactgactctgcgtactacaactgattcataatttcatgttcactgtagacctgtagcgagcttgtgggccttcttcatcgcttgatgaaggtggcttttgttcctgagaatgtcactattcaaaatgctgaatgagcacttgaaatcaggaataaattatgaattctttagggaacactgttcccagcagcccatttatggtggcctgaatgcatttttatttcgtttgtcacacaggccttgcagacagtggagccatgtggttttctgactatagacctctcttccccggggcttccgaaccaccatggaatgtgtcacctggaattgagtccactcctcagttattacttagttaagcataaaacatctgatttgactagccactatccattcccataatttgtaatggagttgtttttctgtgtctatattcatttcctgatacttataaagagcactaaatcaattgataaaccacccacaataattaaccaaacaaagtgaaatcatttgttactcaaaacatgttactcaaacctgcattatgacacaggagaaaaacccactaccctttgacagttattgctacacgattgcaaaagagcaagtgggtgaaagtcgtaatttttttttcagacactatatttgccagagaacatagattgcaccattcctgttgctcatacttgtaactccataatatgggctgttttcataggcaaatgaatttgcaaaatcagacctacccttccggcctacgctgccatcgctacaaatatcaacgaagtcagcaaataaacaattctcaaaggagccttccagcaagttctgctagcatcactggattcctttgggaagaattatgcaactgttgtttatccatctaccccgttaaccaaatcaatgaatatgtatcgagcaccaactgtgagcaaggtgctgtgttgggtggggaagaagacacaatgatgagtaaaacacagtcctactgctttggcgtttaactgtagtacagaaggtaaattatggatgcaagtatataaaaaatataggagaaggtaaattacttctaagcaaatctaaatgaaaccagaagccccaccctcccttatcctccatgcagaactcaaagcaggaaaggcaggcttcacctcccaggtagatttcaagcttgcctacttcttgacattcctcctccctgctggagcaaatggcactgggctaaccttggctaacctccttgatagccttcctgtatctactcttgtccacctgcagtaagttctccctactgcaataagcaagatgttttaaaagtccagacctgatcactgaaatacctgcataaaactcttcaatcgctttccatttatttttatttttatattattattgttacttttttttgagacagaatttcactctgtcacccaggctggagtgcagtggcacgatcttagctcactgcaacctccacctcccaggttcaagcaattctcctgcctcaacctcctgagtagctgggactacaggcgcctgccact

SEQ ID NO: 60054 - DNA, 535 bp, Homo sapiens
cacagcacgcagggccagttgtcccatcagtcctggaatatagacatcttaggatgtgcagatcacagccagatcaaaatagtccctgtggagggtccaccacgttaccacacagcacctcctaaccattgcatctgttcatcctgcctcatcccaggttaagaaaacagaaagaaagagagaggaactcatcttactgccaccagctctaccagcctaacagctgtggggctttcctagatctcggctttgcctgaggtttcagaggatggcatgtcctttgtcctatcaaaggtcaaccaagcatttctgctctgctcctatcacctctctcctcagtcattacccctgtcttccacaccaccctctccctctactgggccatttctatctgcatacaaacatgctctggagtacacttttgttttcttaaaaaatgttgctgttttgatttcctatttctttttttcttttcttttctttttcttttttttttttttctggagatggagtcttgcgctgtcacccaggctgg

SEQ ID NO: 60055 - DNA, 2633 bp, Homo sapiens
tgtgagtctgcctccccccacctccccagggtaagcactaatgtggcaggagtttatctgatgtgctcgctgagcagccttgcacacagcaccgtgcttggtacgcagcatgtgcaaacgtgtgcaatatgtgctggacaaatgaggacaataacaaggacagtgatcattgctggcaagtgcagaattagccacagattctgagtaaataccaatgaccagaaaagtttagaggacttttaaatgtctctcccaccctatctgtcatttagattcatcctgttaggactcacttactggttggtgttatgcttagggtctgtccctgcaatgggctcaatgctcatgttcccctgccccaaaccccatccccaaggtgatgttatatggaggtggagcctgtggggggtgattaggtcatgagggaggagggctaatgaaatctcattccaattttagaacacgtgctgcagaagcaaacacgtcatgaaatctcctatgttgaaatgccatcctccaggtgatgttacttggaggtggcacctgtggaaagtgattaggccatgagggaggaggtctcatgaatggggttcatgagcttatgaaagaggcccaacagagctcacttgcctcttccaccatgtaaagacacagtgagaagacggccctctaggaaccaggaagcgggctctcaccagacaccgagtctgtcggtgattttctcctggatttcccaaactccagagctgtgaggaaccaatttctgttgttagaaacgacccagcttatgggattttgttatagcacccaaatggacttaggccttgttttatgatttcaaacatgacaggagcaagttgatctacattaattgacctatctaattagtcttttcctggaataaagtttctcagaaagtgggtataaaatcttagagcagtgattactttatgggtaaataggcaaatataattttcatttcaacacagttactttcagggtgaaattggctactattgataatgacaacaggacaacagatagaaaaccaggattgtcctggacaccatggaaagttctggaaaggaaattagaaacaagatgaacagagaaaagaaagacacaaggatatgctgaaacattttgaaacactgtcacaatgactagtagaggaacatactagtatgtagtaaacaaacttaagctcactgaaaaagatggagtaaaaacataagcgtaggaaacagccagtctctagaacagtaaacatccctgtaaataggccactgctgtgaccacagggcaggagggcaaacaaacaattgcatgtatccacattgtagaaagaacatcaggttcagaatgattcattcatacaactctgtctcggcgtgaaggattcacacatatacacagacaagaagataggagacggccaggcgcggtggctcaggcctgtatgtaatcccagcactttgggaggccgaggcgggtgtatcatgaggtcaggagatcgagaccatcctggctaacacggtgaaaccccgtctctactaaaaaaaaatacaaaaaattagccgggcgtggtggcaggtgcctatagtcccagctattcggcaggctgaggcaggagaatggcgtgaacctgggaggcagagcttgcagtgagccaagatcgcaccactgcactccagcctgggtgacacagcgagactctgtctcaaaaaaaaaaaaaaaaaaaaaaaagacagaaaagaagataggagacgtctcagctgcaccatggacaagcctctccaggcataatcttcagtttatcctaagaatatattaaccggcaacttgttttctgattattcactaaagtcaactcagttataaaacaacagacagtttacaaagataaggatcatagagtgacaggaggggaagccacctaaagaaggcattgatgatcaaggatagaaaattgcaaagcagatgtagaggggtcaaggaatattatatcttgagtacagtaaaggggggtggatgagttataattccatcttgctgccctcagctctattgattcttcggctccttaaatatgaaaatagaagaaaggcaaacacttaacaggtatttttaaaaatctggatgggctaagctaaatccatatgggcccattccacttgatatgcaggtgagcacatagtcctttcacggcaatggcaaaggtgaagttacacctgtattgctttcttggagccctgggaaatattggtcacctgaactcctcaaaaacaagtgtggagaaagggaagtgagcaacaaggtacctggtgtcattgtcctggtagaagcactgcggggaggagtcctgcaagctgcaatcagctgagtcagggaaggacaggacagaggccctggccaagtttcctttaagaaaatagcaattttctcccacaagtaacgtgacattcaatttcacccaatatccacacctgacttttgaaggtcagagaactgacagtgtgttttattttgtcagcagtcaaagaatacggggaatgtgggagagtactattatgcctggtttttttgttttgttctgttttgttttttagactgagtctcagtctgttgcccag

SEQ ID NO: 60056 - DNA, 996 bp, Homo sapiens
aaacgtaagtcatcaaaaggtaggcatgtcagcattaaacctgctatttttaggataagatccactttccgtgaagtttgttttattgcttcctagttctctgtgcagaaatgtgctccgggaggcctgccctgctccgcccagctgtcaatctgctgcgcgtttccctcaccagctactgcttcctcctgggcctcccggcattcaccagccaggaggcagaacttggcctcccttaatcctgaataggcatgcagggttacatgctagacacaaaggaagccacagccagcagaaggcgagccgacaagaacaaggaaatggttctgccgtcacatcccctggaatctctgtgccttggtgtctccgttggtaaagacaggatgtcctagatctccaaggtttcttgaaaaactaaaacccattattgtttaatgccttctagaagttgcctaggaaacacttcttagaaaagattcacaaacagacctggaatgaatccttctcgctcttcatacactgagacaggttgaaatctaagaccatggcagggagaagccgcacgcggagtcgcactgtcaggatccaggatcggtaggaaacaggctctgtgccctgctctggcaccagccgggctggcccttatctgaatccattccaaatgcttgacgctaccttaagccacagaactcagaattagatataataggcgaggcaaatgctcactattcatgatacaagataaatcctgataaggataataaaagtagaagttatctgtgattagctttaaacaaagctttgctgccttgaaaacactttcttttcccatatctatatcattttctcccacggtaatttcaaatcatgaccttttatttggaatttgagctctgtactttcccctctaaatgaactatccttagaaacattaattatctttgaaagcataatttcagtagcagcaaaagaattcactgtaatttaaaaattcta

SEQ ID NO: 60057 - DNA, 532 bp, Homo sapiens
ccttgcccagagccacacatgtggcagctgcagagctggtgccttgacttgggtcccctgagcctggagtcttgtgcacacaactgccgtcatgctacactgccagcgggcaggtagactgagaccagggcatggcccctcatctgcatgtaagcaaggctgctgcttctctgtgtgggtgatgctggtagggtttcctaacccaggccaacaatgaaaacattaagtaacactgggttcagggccacccattgcaaaatacgttggtaagatcctgttaggtctaaattgatctgttttttaatggctcagtttcagctccaggcttcagcagatgtgtcgttgaggcggtgtaagatgaaagtacatatggccgaggccgtgagctaaatgcagcagtgggctgtgtctggagaagacagccttttgaagtgtgttgaagaatagttaatggcaagagagagtgctttggacacattgtgtggtttttaaagaaggctataaaattgatatgctgtatagtggacattgt

SEQ ID NO: 60058 - DNA, 1435 bp, Homo sapiens
atagggtacaccttcttagaaagcaaaacattacaaaaaatatagcatatcctaaatgtcacaaggaggaattatttttggtacctcaatggttcaaaaatctgtttatacacagtcataaactttaatggaggggcccctatccattcattctcttaacaaacattttttaagcatctactacgtgccaggtgccatgcagagcactgggaataccagaatgggtgaaaatcatgcctgcctatgagagttcaagaagtagagcagaaagcagtggctaaaggaaatggcattcaccctggattggctcataactcagttgggggtgctcaagggagttttttggggggcaggtgaacacagatctgagttttatgtgacaggtaggagttttgtctgggtagtctgggaagcaaggactggatgttgacctcagaaaggcttgaaaacgtgggactcactaaagaaatcagtcttttttcagtccagcagttcagaggtgtagtattagaagattgggaaagattgcagattgtgaaatttgctggccaagctatgaagttcaatttaactcagggtaatagggagccactgacaggtctgaagcagaggaataacatactcacatttggctttttaaaataaattactctggctgctttgaaaggagataaatgggaagggaatgaggataagaatgaggtccagggaaaccagtcacgaggttctcagccatggcaaagtgagaggcacggcgcagacattgtacaggctggaaccagcagaccagccgtggctgatgcctgatgacacagggtgagggcagaggtggaatcacggaaagtcacgagtttcttgttgaagtctccactgggtgtgttaaagcaaggttagcctcaagctgcctccttccatgtgtgacattcggccaaaaggtttcttggtacgtcgtgaactataacctaaatagagctgtaaacagactgtagcctactcttgtgccaatcaccaagtgttggcctatcaaaggtggccaacttttcaaatcttttcaaataaagggaacgcggagctgtagccatctggccgtttctgcacctcacttccgagttctgtccataaatcttcttccacccagtggctgtgctgccagaagactgcccaatttgccaatcattctttgctcaattaaatgcccttacatttaatttggctgaagtttttcttttaacagattgaaacctcagtgtgggaagactgggaatccaggagaaaaagaaggttggtgggtagatggattcagcttgggaagttatgtttaaggtgcttgtgtgaaatgcctcaggtgattccacaaacaggctgactgtgcaggaggccaggctgaggactcaattgtggcggtcaggagagtgtagacagcaagccacatgtg

SEQ ID NO: 60059 - DNA, 939 bp, Homo sapiens
attcatttttgtttcaactttgagcattgcaaaaccttgttctctttcatgtggccattgcatcagtgtggattttcaaatgttttactagcacaatgggcttggatagagtgatttggggtcttatcaccctctagttttaatagtgtctattacacaggcaatttaaaaatttaggattgcctataaagatagttcatttaacttttttttttttttttttaaaaagctacttccccttaaactccaataactgataaggagataagacaggatatcgtggaggaaagaatgtctatgcaaacacaatcctggcactgtgaggcatgctgctggtcttgacaaacattgctctaatcaggggcatatcacaaacacttctgaaactttagaaaaggatgcaaggtgctgtgtgatgaggtgccaagtgagtctaagagacgacctgcactcaagattccacaggtgggagacgtcggcacaggagagtatgggacggaatggactgatgagggtcagggagaaggctagaactgagctcggcttttgagaatggacacaggggaggagccttgtggatgaaaggtcatcttgaacagaggaagtaatgtgagccaaagaacagggtgcgggaacaaagcaaagtggacttccttgtcagaggaaaaccccatggtgagacctaggtagaaactgaaggcagactgcagtcagagtttggtaggtgaggaagactgaagagtaaaggattggtaacagcaacatttttaggaatgattgaccccaaaaccatactaagatgaaaaaataaaaataaattaaaaactgaaggcaaatctgtcagtcccaaagccaagaaaataaatatcccatgtgaagtgataagatatgacagctatgaaaatagaaatacacagatgtgagaaatatggcagttca

SEQ ID NO: 60060 - DNA, 921 bp, Homo sapiens
ctctgccttcactcaaagtgttaaatgaaaacctctcaaaaattaaaaaccagctgtcttatgactgacatttaattttgaaagatgtgattttcctccgtatttcctgtgctctttacaaacctgtttatcaaatgtatagaagacttttgtttatgacagtttatgattaatcattcaccaaggacacgagtcctttgtacctattattgtcaagcatttgtttggactgtgtttgaccctttgtaccgaagtggtctgtgttggaaccttttgaaaacaatctaccaggctgaatgtgctcatgccacttactgaaatatcatggctctgttgctgtgacatcctgttacatgggagagaccaaaattacaattttagtgacaatatcaaatctattgttacgccaggataaatagattcatacccagttagttgtaagtattctagagtgaaattttaaaaaacattttaagaaatgtatgactgtctggtgaccagagttacatgaatagtatgcctccttgaaaaaaaaaaaaaaaacggaaaaaaaaaacaagagcaatctagcgtcagatctatattctgctttatgggacaatcaaagtccttcccaaacacacctcaagggagtatatccatatatctgattacttagtgaccagagaatctcagctaccaaaacaacagcacaggtcaaaaggaagaacagtatgagttactgctccttgtttaatcattcactatttggacacctcttagatgagtaactgcttcaattttaatctcttctcattcactcattcagtcaacagacatttattgtaaggttgctatgtgtgaagtaccttgaaaatatcaatctgggtggtcgatgacctccaagaattcataatctagcactgggcacaaacatgccca

SEQ ID NO: 60061 - DNA, 618 bp, Homo sapiens
aaataaatcgagaaattctcaaaacctttaaaagtcaattaatctgacctgccatttctaccctctcaggttctgagcactgatttcatcaagccgatggaggcaacagtaagtatgaatccagtctctgtgtgttggttatttcagaaaaagtccaacgataatgaccttcatgttctttaaataagcaaattgtcagatgcaaataactatcacccaaatcaatacaatgaaataagtgaagcctggcgatttttgcattttgccaaaatacattcaaaaatggacagtgaccccaaatgacatttgacattcctttgacaaaggaatctcaatcaataaagaatatgataatattcagtaacggcattccactcagttctctttaccctctgcaaacaatagacattcccaaagtgttatcctattgggaaaaatatacacaggcacacacacacacacagaggcacacacatgtacataggtacatatatatagaatattggtttaatggagcttatgagagaaaaccaatcattatagactgatgaaaagccctgtgctgcctcaatacttctttattcctataaaggtattttacagtcacatgaggtaaat

SEQ ID NO: 60062 - DNA, 1717 bp, Homo sapiens
ctgtcatcgccccaaatggtaaccctcttaggcaccccaagaggaagtgagggatgggacacatctaggtcagacctcagcagacatgattaaaaagagatgtgtagttggacagacagctcgcacacttttgaaaatggcacgcaggagaaaccaccttccccttggcttcctcgcattaggtttcactggatctgaataaatgttacgtggctctctgtggcccagcaaatacaaaggctggagcattgtctgtgctggcctcagtcaccgcctcccttggaaaaaccaagtgtgaggcagagacattgctcctgtgggaaaagcaacttggcccacagtcaagtctaagtttgtaattggagcaggaaggggtgggtgtgttttcagcagaggcaggtcaactagggaaaaggtgatgtttacttcggggctggggaaagcagatttgctgcgtggaaagagctgaaatagcagcaaatgccaccgtgcccgtgcaagcagctccagcgaagaaagacagctctatcgtgtttaggcgaaaggggaaagttaggcaaccgtttggaattaaaaaaaataaaatccggagcccactaagcctgtgtcaacgggcgaaaatgaagtgaagggttgagaaaatgaactgggtatggcagccccaagtccaccatgggacagccacctaaggctggacccggcctctgtgcaggttagaaatgcgaaaactccactcagaatcaagcttggagcaagcctcacatgcccagcaggggagagggtggaaggaggagtgggagggagggagaaaggaaggaagaggctatgtggatttttaaaaatccagatgctagtgtagaagggatcattgtgctttctccattgatttacttatgcttctggaatttgccattcactgcataattgcaaccggaatgttatggtgctcttcattaaaaatctcttggagcaagttgagcctttattggaggctaaatataaatgttgttggaccaaaggtacagcggtaaatctggacttttgtgtgtacagtgtaatgttgtggctgacattttggggtgtgaccacgtggtcaaaatgaactgaagcactgaaacattatttgggacaatcagatcaatggaaagagctgctcttcatcccacaggagaaaacaaagtcggcttaagtaaaacctactcctccttattttctgtagcacatttatgtgcataaattgtcctgaaataaagaactcaaatcatatttttgattgtcccataaagccagatgtctaaacaagggttcttaaaattacttagggaatgaaacatcagaaagttacgaaacatgataaaatatcaatgtttacctctgttttttgaactagggttattttagcgattaaaagtatggcaacattaaaatcacgcaatacaaattcacaactatgagcacagctgtccatgaaaatccagctgtcaggctaactcaggtagctatttccaaggtactcggttgagagtttggtacttgttcactgtttttcttatcaatttaagtgctttccagcagagaagcagtagaatttccaaagatttaagaaaaagttattggggaactttttaaattgaaaaaagcctatcccttttctcaaccttgtatgtgcacctggaaacgatcattatctcactttaatagtaaaaccccaggttca

SEQ ID NO: 60063 - DNA, 1418 bp, Homo sapiens
tggtgcccacctgccaacccaactactcggaaggctgaggtgggaggaccacttaagcccaagaggcggagtctgcagtgagccgtgatggcaccactacactccagcctggacaaccagggcaagactctgactcaaaaagcaagaacaaaaaaaaaaaacaggtgcctggtcacagagaatttacattctggaagggataaacaggagataaacaatgcaatatgcatttaataaaataaaatgtcagatgctagtgttattgaaaactggcaggatcaaggggacagaaagaaaaattcttcttagagtggtaagggatggccttgcagataaagtgacatttaaacgggaaaccgaaagaaaaattcagggcaaagcacacagctatctgggacaagagcattccaggaagcaggaagagggaccagcaggtgcaccggctctgggcagggtttgctctttaaccctcctagaactaattggtccacaaagcctttgtaccttttacacatttaaatagcctccaaatgacttcttttatgagataagcacaaagtcaaagtcctttggattgaacatttctgtcttttcaaaattccaatatcacctctaccagaaactcctgttggcttgatctcagatgcaagtttcaaagcattctctttatggtttccactaattgtgctcttatttactttccctgcaccagggacaaagaaagatgagctcctgtggtgttggaaattcactgtgacttcgggcagaaggcctgctttgagaacgtacctaattcctgccaaagctcatccctgtatttcctcaaaattgttggcgggtttctcatttgaccgagatttctttgaaatcaacagccaggaaaaacaagtaaacaagcaagggcagcctcccagggtcacccacacttggtgaacagtagccaggatgggagcacgcaggccgcgttgtcctccgcaaaggcctgggtttccatggtgctaggtctgcaaagggcagtgttcaaaatcaagccactgcgtggtgaaactagcaccgcaaaaccccaaatgctttgggtgttggttttacaaaggatttacactatgtcgtgggcatagaggttctacctgatcactttttggaataactccaggatgctttccatctctcactacaaatctcacatcacctctctccaggcctcagctgctgtttctcctaaaaatatggcagtgggaggggatggctgagccctctgaagttttactaatatcagggcgcaaacacttgcctcgaaatgacttccttctcctgtgcaataacaaaattaataaaagctcggtggccactaccagatagtgactttttcatagaaatgtagagaacatcaccataatccttgtccaactgtgataact

SEQ ID NO: 60064 - DNA, 1890 bp, Homo sapiens
tctgttgggttccaggtacaggcaccctttgccacagagatgacctctggaatgttctcagcctccttccatgccctccatgtacctgtgggaatgtcttgatgctttccatgccacagtgacaaggacagcaagctcagatcctcactctacctatttgagctgtgcagtcactagcactgtgagaagaccaccctgaagtgccggagcaggggcatcctacaaggccgtatttgtgcactgcccctctgcccttgacaggcgaccctccatctttctggatttttgccatgcactcccaccctcaccccacatcctgcccatcaaccttgaggagaaggccccacacttggcgtggacaggacctggcactgtgctgctttacactctgctttgccttccctgccccatggtgtggcacccgacaggccatccctcttctctttctgttccaccacaccttccagacacaaaactctatgatcaattacactttgcctagctttgaatatgccaaaaagggagcttcccaaactgggaaatatttttctttctctacaaagcttggccttcgggcctcgtgtgtttctgtgaactcagatagcttcattagcatgcagaacctgcccatccttccccgtatgagtaaacccgctgtctgcatcctggcaggtcaccctcctccctgtagggcaggaggctgcccaggttgcgtaggagaagcccatataccgggaaatgcaaagcataaaattacatcagtgtatctcaaaactgtttgccctatttcgtaacaactcgagaagtacatggcacggtgacatcaccaaagagaatatttgcctactttgaaactgaaaaaaaaagattcctgaaggagtaatgctcgaggtgagttttgaagaaccataggaagcacctggtggaagaggaagttaattttctttccgggcaaaatgaatggtgtctgcaaatagccagaggccacaggagcatctgtgtttaaacaactgaagaaagcccacagggctgcagaacggagagagaacaagaggcataaggagatgccagacagtgggctttggcagggcagggaaggcttgcgtttgtcaggcgtggccatgtctccctgctctaaagggaaggagaggaaaaatgggaggggccggcagcggatactgttgcggcagctctggcacagagcacataagattacaaaatctgatgcctgctagggttggtttcatgcccctttcagctgacgcactcatgatccacaggctgaaggaggcaagggttgtgagccccaggtgccagctctgcccaaggaccgaatcccggctcccttcctgcgttaccccaccttcttccaagcggccccaccctcaactgtggaatttaattctcccagaaggcctggcacggtggcttacacctgtaatcccagcacttggggaggctgaggcgggcgggtcacgaggtcatgagattgcgaccgtcctagccaacatggtgaaaccccgtctctactaaaaatccaaaaattagctaggtgtggtggcgcacgcctgtaatcccagctactcaggaggcaggagaatcagttgaacccgggagttggaggttacagtgagctgagatcgtgccactgcactccagcctgggtgacagagtgagactccatctcaaaaaaaaaaaaaaaaattctcccagacatgctcagagccaaagcaagcaaaatgagggtcctccactgagtgattctcctgcaccctccttagctgtccaccaacactgcctccagttgtcccaagcctgaaatgcacttgagaacacgtcctcaaatccagtggaaaagtctacattattttgggagaacagagcatcaga

SEQ ID NO: 60065 - DNA, 1675 bp, Homo sapiens
tggtcatagtcaagcccatcgatggggaaaactagaatagaacttattggatgggtaccatgcatgccatcatttaacgtcgccttgtcctctgggggccgttatcccacaggactccatggcttcctgcctctctaccatctcctctctctgtggaagcaagggtcggctcacagtttggaatctcaattgttgagaaagtgtaattgtttacaaggacagaccaatgagtaaaaccagccatattttcacacacacaaaaaggggcgatagatctcaacttctcattatggataaaaatttcaaaatatcaagtcaggtgaaggacatgtgcagcgaggactggtgtgacctcaggactcagcatttattttacctcattagtgtaagaatgtcacaagattgacaggaacagcaattcaatcaatcggcttcaatcaaggctaccaaaaatgagagccaatctcttgccattagattttgggcttcaaacaattttaggaagaagttctattcgctagctgtataaacactagaaatttattgcctgaaatctttgtatgaaagattattccctgaagtctttgtctgaaagttttgcgtgtaagattagcaaatctttttaaaaagcaataaatatcaaacaataagaaaaaggaagttgagaaactcaaagaccacagtttaatctggaatggatccactggaaaagtatattgttaacatgagttcatctaaacgtacacgctaacttgtagcaactgagtttcaaagcccctccctcattctgcccccactggcaaacaatttctaggtctgctaggagaaaaagatcttcaattgcctcagtgagaggatgggggcagaaaggagcctcaaatcttccatgtccacataaacccttagtcatctgtcacatgtgaaatccctgctgtcagccctgacccacatggcaggagccaggctcattctgaagcaacacttgttgctgttgcaaggagtgacctgttcatataaaagcctacttcacagtgccaggctaacttttgttcagggacaaaatcctctgttgccagaaacaacaacagcatttgctcctcaggtcaacgtaatacctcactaatgagattaccttcttcattctaacagatttttctgctatgtggagaccaagaatatgagaatgcctacttaatttaatgtcctctgaatattatactgatttgaaaaaaaaaatactgttgtttcaatgttgctgttgacatttgaggcagagggacagtttacaatgggacacgcaggactcacatccagtgagtaggaaggactttttcagcctgggggaaaataagacaaagtgatggttaaaggtgatggctccagagtcacaggtgtgggtttgaaccctgggtttctcatctactagctgtctggtcttggataagtttcttaatctttaaatcttagtagtgctggtaatatgaaggtttgggtgagatttaagtaagattctgcactaaaagcaattttcaccataccttgcacgtagcgaaggcctacatttccatatatatattattcctatttgtattacattaccatggctgtcacaacaaagtaccccagacttggtggcttaaacaatagaaattgattatctcacggttctgtgggc

SEQ ID NO: 60066 - DNA, 1025 bp, Homo sapiens
ttctggtctcagcagatctttgagggagacgtagggtctaggccggcaaaaccagagagaaggataggcttttagatgctcatcccacccaaaaccatgaaataatctcccctgtctcctgattagtatttgtcagcctcatttacccttaagatttgtgcaaatgaaaaacgttaaatgcagttcctggatcagtaattaaacataattatttcagtggaagagatttttgttttcataatctcctctttgtctgcatagagccagctcttggttacatctgccactgatagcctttgctctgtttactttaaagaataagccactgtttgatttggtttcttgttttcaatatgtaaaccctggtctcttgattccccattccaggaaggaaaaaataaaagaacaaggctctttaaatatcagagccatgatgacttaacagatacacgcaggctcaatattttatgtaacagccacttaggaaaatgcgtaagaatttcccagctggcagccctgatttggcaggtgtacctcaattgaaccaatcgcttttcatctggctgtcaatttgtttggtttttctggctacattgcaccagagtctgtgtgtattccaaaaggtcgttcacctattccacggttcaaagggatcattctgttcacttaaagggtcactgtaatcatatattgaaacatagctaagtacgatgagctagaattttaggaggggtaaaactaataggaaaatccaggagtataaaccacaaaacacacataaaaaaagagataaaaacagaaaacataattcctcaattaaaaaaaaaaaggaaccaaaaagaaaaaaaatctataacaaaccacactgtaggagtctcactatacactaaaattaacaatcacagctggggtaaatactttatttattttattcatattctgcactggcagcatattctagttgcctgtttgatttcattaatccaaagcaaaagagaagtagagatttatgtaaatttcatgtt

SEQ ID NO: 60067 - DNA, 843 bp, Homo sapiens
ttactatgtaatttagaacaccactttgttacaatctgttcataaatatctatgaacagatcttaagttacataaagggggaaaacaatggctcttgggagcctggagcggaactagcaataagcagtaaaggtaagcaatttttaaggtgctggctccattttcagactatgctgttactgtttgtttcaatttaagagcacccatttacaaaagtgtctttcctgtatacattcatggtttcaaagcaataagtatcaacaactggatttattagcatcttcctttagaagagcttaaaacactcttgatgtttatgacctcatttaccttccagcggccttgtgacacagaaaggggaggattataattacccccattttacagacagggaaagtgagaaggcaggattaagtggctctcccatagacacacaatgactcattaagatcagcaactagaaacctggtttcctgattcctggtttagtgttccacatactatgcttccttctatgaagtactatttttgtaaaggtttctctttcaataaaggaaacagaacaagtcatgtgactttcattcacgaaagccggtgtgtgttttcattagcaccttagttgtctgctcctgcgaatagggcagcagcagtgcacgctattgtcttattatggccagagccagccaactaaagcaaactagcacccgccacagcaaacagaaaacttgtgtggtttgtcaatcacctcactggatttctgaatttaggaaaattctctgctttacgacttcaaaaggcaaaacttttcaacataaatcgtgattttattgtccctttggaaac

SEQ ID NO: 60068 - DNA, 1670 bp, Homo sapiens
tttactatatgtttcactgttcccacaaagcctctatcctgctaggaaccctacaaagaaaacagctacaaaattaaataaagtctcccgaattgagcattcacctttccctctcatctccccgaccccaaacaccattcaaagtttagacagccagaatgcaccaccagctgcattctgcatcagctctctctcctcatggatatttgatcagaacgggaagaacaataccaggcaccctcctatccaattgttcttgagaagacctgtgttttttgtctttcccttgttttctccaaagcactgattgtaaatcctggctgcacattcaaatcacctggacaactctgaaaaatgtccgtccctgcctcctagccatctcatgtttcacttcaacgggtctggggtgaggcccaacaggtaatttttcaatcctccccaggtgagtctcacctggggcagggtcctcacagggtggtcccccggccagcagcatcggcattatgcggagactcactagaaatgcacagcctgggccgcgccccaaagctacagcatcggaaactgcggggttaacacaggccagagatccatgtttcagcaaagcctccaggtaactcccacatatgctcaagttgaacaccactgcattaggctgtgtgcagccttaccgtttcaccccttccgagaaaaacaatgcctctgatggaaaagctcccacagtttgtgtgtaaaacggaaatggttaactgtcgctattagcagccatcaaaatggatgctcatttcttaaatgactttcaggtctgaaccttcaagctcaccaagaatcaggcggagcccagctccaggaacacagggaaaggtgaaagctgcggctgagggcagcggtccggacccgaggtccttccagaaggacggacccacgcagccggatgaagacagtcgggtgccccgcggcctctagtgtggccggtctgggagaacttccactgtgttaagggacagggggctgtgggacgcacagaatgggtgaatgggtggggcctcaaaaaatcagtctccctcccacgcggaaaacgtcacattcaactccaagacgaatgttcctggcaagttctctgaaggaagagaacagggcagcccgcagaaaaacaaaacaaggagccagtgccaggctgtcggcttctgggtcaaggtccccaaaaagtgggagcagtgaaacccaagaggctccctcagcgccccgcccctccttcccgccagacgccaaggcaaagggcctcctcacctttcacgatggtggcctccttcaagtggtgggacaagaagtcaatgctggcgtaggtgttggcagggggcagggcaccgggacccggccccccgcacccgccgccggtgctgccgacgcccacagcgctgatgagacccccgaggcttcgggtccggccccaggagctcttgtctcccggctgaggaagcggcggcggcggcggctgcggctggggtggcagcccgggctcctccctcacgtcgatggcgatgtagttgagaccattctggaagccggcagaggtctctctgcgcatgggcgatccaccgctcccaggacaaccgaccaagcccccgggctgacccggggtccacggccggccctgcggtgccaaaggg

SEQ ID NO: 60069 - DNA, 4256 bp, Homo sapiens
cacatgcgcatgtacccactgtcctcgggggagctctcggcgggcgagctggccttgtagccgcccccgctcgccgggaatgtcctgcccgccgcagaggtgggtgctggccccgcaggccccgcagaaggcacggcggcggcggcggcggcggcggccctgggctgcaagatctgcttgggggcggacacgctggcggggctcatgggcatgtagtcgtcgctcctgcagctgccgctcccactgcccgcgagggccgcgccgggcgtcatgggcatgtagccgtcgtctgcccccaggttgctgctggagctcctgtgggagccgatctcgatgtctccgtagtcctctgggtaggggtggtaggccaccttgggagaggacgcggggcaggacgggcagaggcggcccgcgctgcccgagaaggtggcccgcatcagggtgtattcatccagcgaggcagaggagggctggggcaccggccgctgccgggctggcgtggtcagggagtaggtcctcttgcgcagccctcggtccaggtcctgggccgcgtcccccgagacccggcggtaggagcggccacagtggctcaggggcctgtccatggtcatgtacccgtagaactcaccgccgccgccgccgtctcgggccgggggcgtctccgcgatggactcgggcgtgttgcttcggtggctgcagaaggcgcgcaggtcgcctgggctggagccgtactcgtccagggacatgaagccggggtcgctgggggagcccgaggcggaggcgctgccgctggagggccgctggccggggccgtggtgcagcggatgcggcagaggcgggtgcgggccgggcggcggcgggtaggagcccgagccgtggccgctgctggacgacagggagccggggctggtggcggcgggcggcgagtgcgccacgggcatggacatggagcggctgtgttgcagcgcgccccctgccggcagcagcgccaccttgctcccgcggccgccgcagccgccgctcagggtgtgcgagcggctcaggggcgcgcgcaccggcccggggctcagggggctcccagccaccgacaccggcctggcgcccgcggccgccgctcccgccgccgcgccgccgtcgccctcgctggcggtgcgcacccggcacgagctgcacttggccgccggcggggtggcggccaggctgtcggtgcgcgagcggcgcaccaggcccgtctggctggggggcaggttgaccaggtggtggtggcggcgcgcgccggggacgctgatggggtgcgtggccgacgaccccgacgattggctcttactgcgcggccggaactcgaagagctccttgagcgccttcatggcctccaggatggtctcgtggatgttctgcgccaccaccgagtcgtccgcctgcatccacagctcgccggggcctgtgacggccgagcggcccacctcgatgaagaagaagctgtccgagtggccgcagcggcggatgttcatgagctgcagcgtcaccgacggctgctcgcagttgagcttcacgaagccgatggtgcgcgcagacaggcacagacggtacacccccgtcaggttcttgctctggcccagacccttgggcttcaggttcacctgccacacctcacggtaggcggccgtggcgggagccaccagcccgtagctgtcctcggccccggcggcgccggcagagccgcccagggcgccgggcagggaggcgctgcaggacgcggcgggcgcggcggcggggggcgcgtctccggcggccgcgcggccctcgctgaccaggtcggtgagcgcgcggtaccagccctcctgctcctgctcgttctcggcggccacggcgaagtactcgtccttggtgtagagggcgatcaggtacttgtgcttggcgtcggcgcgcttgttgatgttcaggcagcagtcgagagcgatcacccgtttcggcgcgcctgccttgctccgccactttttctcgctctcgtagtactcgagccgcggcggttgcggcgccgaccccccgcccgccgtcgcctcgtcgccgcccgcgccgggtccgcgcagcacgaagaagcgcttgtggccatgcttctgcttgcgcaggtagccgcacttgcgcacgctgtggttgttgttgttgttgttgttgttgaggttggggccgtctccgctcgccggcccgggcggcccgtgccgcggcgggctcgccatcgcgggcgcttcaggccgcgcggcccgggcccggcgcccaggggttggggcgaggggcggagggggcgcgggcgggggcggctccctcccacccttgcgcccggccgcccgcccgatcacgcgtccctcgggcccaggcggtggggaaggtccggggaggcccgcgggggccagcaccgctcggcggcgccgcgccctccgcgctctggggctcctgaggatgcccggcgcgggcggtggccgcccccctccccggctgcctgcggccgctgcctcctcgggctctcgggcggcgccgggggacgcgctcgctgggccgggagtcggggtccccgagccgcggggccgagcctaaggcgcgcgcggccgcaccggggctgctgccgccgcgtcgcgctccgggaagccggggtgcgcccgggcgctcggggtccgcgccgccgccggggctgctgctgctgctggtgttgctgctgctgctgccaacggcgacccgggctcgtcgcggtccccgccgcacagtgagtaacacatcgcgcaccgagtgactgaactaagaagagcaaaacaacatgtgactcggcgttacgcaggcacacacagcgcggccgccccgccccgctgcctcgcattggcgccgcgccccccgacggacggcgcgctcggccaatcggcgcggcgctcgcgggggcgggccgcgcgcccccgccccgcccccctttctccccgggccgcgtttcccgccgtcccctccccctcccgcgaaggccccggcccggccgggcggggtggggcggccccggcctcattaatcagcggcttgttgtggatgccggcggaggagatgccacccagggcgggaaaaggggcgcggaagaggggcggggcgggccacggcgcgcagggcccttccctcccgcctcggactcaattaattgggcttgagcttccgccggggagggggcgccgggcggggccgcggctgggcggggcgggggatcgggatcggcggcgggggctgcggccttgcagtggaagcatgggcggcgagccgggccgtgctctcggggcgcggggtccccattttgggcgagggcggccgctcccgcgctcggggtgggcgcgccccatccccgtcccccgtttcccgtccccgtctcccggccgcatctccgtccccccgcagccgcgaaacgcggggaggttccagggcccgcggccgcgggttcgcgagcaccgcgctccagatcgagagcggcgcgcgcccttccgtggaggacagaggggcgcggagggggcgcctgtgtcccacccgctcgcgggcgctttacggggcgtcctctgcgccattcacttgtcagcttgtcgggaagttgaaatcgcgtttgggaggtaataggagaaagagatcggggacggcaggcggagaaagtgcggtttccatagcgccggggagagggcggacccgcgagccagcggtccctgagccgggagaccgcgcgggcgtctctccagcccccgcaggagcgccgccttccttccgcaggggcgtcctctccccccaccgctgcaggagcacccccttccttcctcggaagcgtcctctcaccacaccgcttcaagagcccccccttccttccacaggggcgtcctttccccctccgaggcaggagcgccccttttccccccacaggagcgccctccccaccccaggagcgccctgcgcccagcagacgggcaggtgggcgggcgtccactacctgtgtgcgcggtgcgggcggtgactgccaagttggagatgcccttggagaactgcttcgaattcatgtatctactgggcttttgtgactttcaaagcctatagcaaataagcacccctgcaattacgtctcctcaatgaccaagtcagggtgaggtgagggcttcctgagttcagatcccagcaagctcccgatcctgcgcaacgaagaaaactcaacaaaacaggctttggctgtttattttattttttttttaatt

SEQ ID NO: 60070 - DNA, 960 bp, Homo sapiens
attttggtaggttcaatttttttcagtttaaagaagttctcctctagcccattatgccaatgaatttaagctgaatggatataaaaattaatcaaatattttttagtgcctactgaggtgatcttacgcctttctagtttgatttataagtagggctaactatattaattgatttttcaatgttaaacaaaatttacatttctggaatagatttaacttggtcgttctttaactttgcgttccccttaaaaaggaccttgagagaagggctcagcgtctgatagttccagcatctggctgtggagctgtatggctgagtcatcatctgttggtttgtttgctgacttccaacctttgtgcctagatattgaagtcaccttctctccctttgaagggcagagactttgtgtgtttgtcctttcactcagcatggctcttggagtttctggctgcatgagaaggtcctgggagactcttcccttccaagagcctccatgttgtcttctgccttttggggctactgaaaccgcagcacaaggtgtagggaaattaccaggttcccccagagccgtcgttccttgcaccgcctttccacgatgtgtgtgcccccttttgttttgtcccctgggatttctcctacactcttgcgaggtcattatgaacttaaaaggatgtggatttttattttattttataccttagaggtcttttatagcagagatttttcagggcatcaagactagacgttttgcccaaaagggaaaaccagaggctttcaatttttttttgaattctatctaaaaaccttttttatggttcattctttgtttttgtactagaaagaacatgtaactattttatgtatagtctttaaatgacatttgatgtaaatacagtgtcacagcaatagatagcaataccaaataaaatacatttcaaagaagctgcttaaaaatttaa

SEQ ID NO: 60071 - DNA, 1042 bp, Homo sapiens
tgccaaaggaaagggacccgaatctgatcaaacctctgaatccagctgcacagagaaggcactggataatgctgcatgctatcagcgatcagcaagatctagtctgtaggaaacactacaggataaatggcccaattcctcaacaggtgatccatgagaaaaataatggaatagagtgggtgtagatttaaaaacatgtcaaatctaagtgcaacaataaaaaaggcaagaaagtgattcatataaaagagagtagtggttactttggagggagagaagagcatgtggttgggatatggacacagagagaggcttccgggcagcttgtaccgttgaatacactgacctagtagctgttgcaaaagcattggctttataacaattcactgagctctacatttgtttactgtagtgtctgtgttttattgtcttttctcaaagaatgctcctattttcttctccttcgtttttctttgagggttcccaccatctttttgattgttgtttaatgtggttcacctctttatgctgcatatgtgtttgtagagacagatgcacgcttgtctgtgtgggtagggaaagtggtttgattattagcaaaggtgaaaattggtcatgaactttcacatggaaaattactggcctgcgtccatcaggagaaggcagcatattgattcctgtgtggacttgtttactcatgcacacacttgttgccaaggagcaggggaagagaatattcaggacttctgcatatgcagaagggaattcctgggggatgccaagtgaatggcagggaatcaaaacatggcagtaataaacctggcatttacaggggccttccagggagaaaaaagtatctatagaaatggacccaaaggcctccggaatgaatgagaaacaggaggtcacatgtccgaacttctttgtttgcaacagatacaacctcagctgaaatcattgtaatgcagtattaaattgagcttccctggtgcctcagagattcagtggaggcttggaggctggggacagtggggcaggatcg

SEQ ID NO: 60072 - DNA, 1132 bp, Homo sapiens
cagttgcatgacatccaatcagggaagaataatgatcacatttggagaaaaaaagcttaaattgtaattgggtaaagagtgaccttgggctcctcgtgccctctacctagtaattggagccctgcttgctgtgtctgatgcattctccgttcagcctcatggcttcctggtcaaagggcccctcggcttcctcaggatggtcatgagggctgcctcacccacacacccagggctttccggctgataacctcggtctatcagttaggcttgttcagcttgcatgtgtcctctgtgcagaaccaatgcagagcgagcacttggacctgtggcaggtgaagctaggcatttattaactcaggcttcctgtaaacacagggcacaggagccgtcacaatgagaacatgaaaatgagagttatatgggaatgagtgcctcaagagccatcccgtgactggtgctttaaaaaagagagaaagttgtgagcagcgaaacccaggagagagaagcagcatgggggctcacaccaggtcgtagccctgcacacctgctgccactctcacagcagtgctggcctcctcatccagcatctctcctccacctgctcctccactccagcctggaggtctctgctctggtcctgcttgcccatgagagggaaactcacactgtggcccttttgctacttagaagtgcagccatttgttggatggtaaccctgtactcagtgctgggatgacatgtcacttactttgtccaatacaagtctcagtaccatctcatgaggaaagaacatgattaatccaccttcacagaagtggataaggaggctcaggggtcctgcagcattttcgtggtcacatggctgctaagcagcagaaccaggaataccaagtctgtctgataccagagctggattccaaccgattccctagacatcctccccccaggccaaatccattgaacatcagctgcactcagagacggcaccaaccaagcacttcctgtgtatctttgaacttaaatgaaatctaagtactctgcagccttgttctgtctcaaaagcccaataatctccatttctccacaattctcagcaattagctaacataattcttatgcctttatgaacata

SEQ ID NO: 60073 - DNA, 3640 bp, Homo sapiens
ttatcatctataaatctatatttgtttcctagtgctgccctaactatgtaccacaaactgggtagattaagcaggagaaacttgttgtctcacagttctggagtcgagaagtcagaagtcaagaggtcagctgtctgaaagttgtgtgggagaaaatgctccatgcctgccactcagtctctggtaatctgctagcaatctttggtgttccttggcttctgcttcatcaccctaatatctgccatcatctacatatgacattctctgtgtgtgtgtacgtgtgttcaaattttcctccttttgaaggatgccagtgatattgaatcagagccaacactaatgacctcatcttaccttgactacatctgcaaagactccatttccaaacaaggtcagattgtgaaactctgggattaggggaacataattcaacacataacactatctatctatgtctatacacacacactatctatctatgtccgtgtacatgtgcatgaccataaaaatacttggaatcctttaataaaatcctgccttttgatcaaagtttgctcttggaaaatacaattttattctaacacctagaggaaaatttttatagctcactccaaagtacatattcagtttgtatttaacacataatctgggacaataaaaaatgcagccttgataacttggctctagatgtatgactaaaacactgaaaatggtccaacatcatttttaggtagtaattattggaccttaatgaaaaatcactcaatggagaaaatggtgttaatagtatgagttacaattagattaaattgctgtttcatgcagttatatagtgaaatgtcaggtgttcttgtaatttaagaaaatacagttagaattaatgctataaaagagtaacaggcaatgacaatttctgattcgtgtctgcaggggcttgaggtgataggaactaagttcttgccctctgttggcccctttgtgctgtagtcaagggggcagcactggccccctcctgcctggcatctcacccaggagaagagctgagcagagcagtgtcacctttatcccactcttagcaaaacatcgtgatgtgcttgtactgtgaacagtgagtcaggaacatgcttagataggatgcagatcaatcacactctcatctgcatggtgctttggagagagcaaagtcttctcatgtgttttgaacattctttggatttagtaaggcaactataactactcctctattaaacagataaggttagggacacacctgcctccctgggtgcccatcagatttaaatgtggtaattcctggtaagtgctaagcaccatacttggcacacagaaagcgcttgacatatacagctttatttattagaataagttttataatgagttttaatgttattgcctctgcaagatcataaggcttaaaacattctgaggaagcacttgacctaaggtcatcagacttcaatgtcatttcagattgccttgaaacatgaaaaacaactacgctgcagcaagggatgaaaaatcctgagtcaccaaaggtcaagtcttggtaaacaatatcatggcttcaatgccaattcctgtcaaccagcaagattcactgttatgtgagtgcctttttgagatagatgagaataaaaatctggttgtcactctaatttctaagaaaatcccagcctgggctcgctaaatgggaaacacagcaataggtttccactaacacggtgtccccatttgtcctcgaggttcatggcaggaagcaaatcagacacctggcccagtcgcctctctgataaggagtgggagagaatgccagccatgcatttcgcgactctccctctgctcgttcccagaagcacacattgaagcttcctttccagggaaagaaaaaggccacatttctggggaaaaaaaaaaaacttgaaaaataaccaagcactcgctgcacataaaacagctgctgcgtgcagaccacttggtgcagccacgacgcgggggagagtgaagacgggcaattccggggcggtcgtgtcatctttctgggtgagtacacacgtgacaccgagagaagagaaagtggtttcccaggttggcggcaccagcacgttgccaggcaatgagccaagaccgagggctcagacaaaagacagagcggccgactgggctcagcggacacacagcgcagagccagctgctggctgggaggacgccctgcagcctcgcagggaacgtgggctccggcttccagagggcagcgccattcgctcacagacggccaggagaccctccctgtgcaggcaatgccgggtgaggcatcgctcctgaagaattaatcagaaactcagaaaaattccgccgagcagaagccagatgagaatccgactggaaatctagaaggaatctgaccagcatcgcaaagaaggggaggagctgagtgggaaggcagcctcagggagcttccccggaaagatgggcctgctcattccatccccgacaggactgtcagtcatttcacaaccacggctgctgatgaagacaatcaaacagcagcaaccttctgaggtcaagacagtgctgggcgtctctcggagtcactcccctatcttttcgtctgttctctcaggacagcttggtgacgttgctaaggaaggaatttgtgaaaatgaggaagcggccccagaatccttgttgtttttccccaaacctggctactggtggtcagagtgaccttgaggtgcctcacagggttgttccaggtggcccaggtctgcaccctctgacccatggccgaccatctccatggcctgtaaaggtgcttctcttaggtgccacccaagtgccacggcagtgtcagagggaggcccatagccagcctcctgagtcagagcctttgggctgggaccggggcaagcacatttttagaaagttcctccaggacacgtttggtggagctcatccataatgctctctggacaacctttggactaagtaactttcctaaagtctctcaactcagtggccaccaccttagaactgggaactgtccctcaatgcccactcaggtatttctgccatgccctgtgtaatttggcctttctagacccagctttcttctcccacatggaggccgtggaggactgcctgtgagtcctggtaacactcctccacatcttggcaactccaagattgttattgattttccacttggaaggctgttatctgttctttgacaaactcttatctatcctccagaactccctgggaagctttggacttagatgtctccatcgcaggcacaccccagcgaatatcttatcaccatgagctgcgcttgctgatctcatttattcttcatgaaatatttgtggattttctttttgtggccaggcacaggatagacttagaacagcatccactttgtgaaacaagtaggacaggaatgcagatgagtaaggggcaagacaagaaagcacagtgagatgtgagatgtgtcctgctagcatgggtggcgggtggcacacagcaaactttggggagtcaggaaaggcttccaagaaaaaaagtgtctgggagttactcatcaacggcataaagtttcaatcaaccaagatgagtaagcttcaga

SEQ ID NO: 60074 - DNA, 2944 bp, Homo sapiens
ctgctcctctcctgtgtggacaatgaatgtctccatgtgagactcaacggtgtcacacacggtggcctcagtgtggcaaggcactccctatggccatcttctcatgctgagataagtcattcttcattaactgcctccgttgctagccatgtcccctgaccttccagataaactattctcatataaattcttgtctcagatctgttttggggggagatcccgctaagacaatagcgagagaaccagacaggtaacctaaccaaacctgggctgcttcccggggaggtgcacgcaggtctctgcaaagagccccagaggacacccatacggccacaagcgtgaaatgcatgagatgcttagggacatgccacaccccaggcttgggctccggggcaactcctaatcccaacccttgctagcctcacagccaatgcactctcctccaccgcccttgctgctacctccgaacaccatttcctaacttcaagtttgtttgatgctcttgtggcctgctgtgctctcctcctctgtcatctaaattttaccctctttcaaggaccagctgaaatttcccatccccgataaatccattcctggtttccccaacaccaggggaacttgctcttctctgtcattttgttgctctgagggaatcctagtgtacatcgtttagttacctgcttaataggcaggacactttgctcccaaatcactgtaaaagcttttataggctgcattcttgtcttagatttttttgtagcttccagagacctcagcatctagttttgttctattttcatttgggaagaaagttctgctgacaatagttaacacatttattcattccccagacgcttattgatttctcagtaagtgatgatttaattattaagtctgctttttttcttatcttttcatttcattcccaccatgtaactatgctcaaagatattcttttggacaggaacagttttctaccacgagaggaatagggcattcttctgaagaaggtgaggctggtgtgtaaacagcaaggcagtccagagcaccccctccacccaccacaggcctgccttccctctgtgctgcctggataaagcaccacagcaataatttctgtagttagtgtccctatttgctatgtcatccttgactcttcacccagcagcaagaagactgagaaagaaatatgacaaatgagcaaatcactgacattgtagcccattactaaatcagtgcaaagggtagaccacacctgactcctgataaatccttctgtatcttggggtcaaagagtttaggagcatcaggggagaggacaggatcagaggggcaggggcgggagagatgtggagaccatctcggttcagaattctgttgctaaactgatttcatttctaagaatttactccatctgttgccctgctcacactgtctagacaatttcaaagtattacataattcatagtggctgaacattttcctgtttactacagagtcagtctacaaaggtcactgataaaataatctttttaactggcatgaaaagcatctcaaaaatccaagaagcataagagccaaccacacaattacttttcaatactcattcacggataaaataaaaccacaacgggcctgatggtttctggttcctggcaaggttttgacaggtttcaaaaaataaaagaccaggttgtctctgcatgagtgaaatgaagacttattcatggacagcctttcattctgtgatgcctgctgaacagacacccaatgccgaggacacagcacagcctgccctggttagaaaccatagctgagttaatgcatcatgcattgcaaaataacatttttgtagtgtattttgtacactttgtacattttgtagtgtatttaatggagacactgagtacattgactagaaagtcaaaaacatactttgacttcttttttcagtccctttttagtcaaagtactgaaaacaagggagggaaggaaggaaaggaaggaagggagacaaggtggaagggtgaaagggaggaagggagtaggggaggaaagatagggaaggagggaaggaagggaggaaggaaagaaggaaggaaggaaggaaggaatgggaggagggaaggaccatgtaagtcaacaaggtatatcccattcagtactgttttcattttggcacgtatgccaggatttgcatatgaaaatgaacaattgggtttgcaatcataatgctcactactcagaagctgttttggcattctcaggctagtaggctgtgtccttgctttctctcgcacttctacagggaccataccagccacgctgtcacgtgggacctgtcccttgaggaggcagtggtgcaaagcaggggtggccacaggtgaggccaaggcctgggccaggcgggctctctgcaagttttctgtgccttccccactgtgaggatctaagaactgtcaggaggcaggtagacctttgctaaagcataatgcattttcttattcatgctaccctttttattttacctgctctgtgcatgggatgctctgtgaggtttaggagactagacagcaggttgaccagctcttcaggactatttggcttgctaatttagaacttacaaatatccttctccaagtcccaaaggatgtgtcgcatgacctcagggaagcctgtttctgtttctctgagtggaggctgatccacccacaactgcaagagcagcgtaatagccgtctgactctggttttgaaaaacagccctggaaggatgtcagatgagtctgcccattgctcctgagggcatgagtgtaagggcagcatggcaccccctggcatcttcagacgagtgtgggcctagcacgcgtgcctctgctccctctcagcgtccaggtcacagttcctgggaccacaggctctgctgggacttgggacttgggtag

SEQ ID NO: 60075 - DNA, 694 bp, Homo sapiens
cacttcataacatcaggttataaacttcaatgcgaacttcctcttaatgcaaaaccttctgcccattataaaaaaaaatgtatatattgcctgagacacagcattaagttaaatttacagagaaaaggaatatgtcagtctccaagaatcttacgggtgagtggagacaagatttatatctgtacacctccctttaaaaacaaacagcaaagtttgtgtttgcaacctgttactggagtttaaattttccaacagcctctttctcctgaatgctgaaataccctggggggaaaaacccaggcaagtttgacttaaccacttagagaaaagtccacttggtgcaataactagccccagggtttatcaagcaaatatccccactctgcctgactcattccaaggtatttgttcaaggcatcgtcctgtgtaatgcaattggtcatatcacacgcttcagtacttttttttttctttttaccatgcatcccttttcttgtacactgacctactgagaggctcttcctgacagatcagctatgagactgcactggtctacatcccttccactccgtcctctctcatcatctgccttgttcctgagaagatgtgtttgatgagtaattccaatacagatcttgcactgttggctgacttctccaacttgttaattaattcataaaatggttttctgtta

SEQ ID NO: 60076 - DNA, 693 bp, Homo sapiens
agaaggagttgaaatgtctaaggtaaattggatgctataatggaacaaacagcagatcctaaatgagggtagcactgccaagcccagccataatgttgtctattgtaatcaccctggacgtgctccagcacctgtgatgactcaaaaggtccgtgccgggagcaccaaaaggagactcctctctgccacaaagaatgtgtattaagcattacgttctggtctagccaagagggtgacatgcggttcctcacttgagcagatctatttcttcacatctctgattgtgtcacgtacaaaggccactcgagcacaagctcacgtcctgtccagagcatttctacaccagggccaccttgcccttggcctcctatctctggtttctgcctccttccctcccattgctcaactccaacttcccaggataggatcagtgtcccattggaaccgcagcaccagctcttcccagcccactgaagaccctgcctgtgaagtctcacttgtcttcagggcccacaggatatgtagactggatgaacctcaaaccaaaataataactctcagctgtctctactccacatgagaccttagagcctgcaaccctcaggtcataggccttcttcttcttagaatgtcttcttattcaagggatgattctgtttttaagccacacctaaatattgtgactcttgaatt

SEQ ID NO: 60077 - DNA, 767 bp, Homo sapiens
tttgaattgatgcttgcagcttctggagacatttgtcttgagtgaaagcatcaggtgagagctctgagagcaggtgagccaaggctggggaagcgtcctaagccaggggagctctcccagctggtgctgcacgtgcgctccagagggaaggctcttgatgcctcccgtgctgcttggggcccttcttcagggaagtgaggatgtttctcccaggattcagataccagaagcaggatgaccacacctctttcctctcattcctgaggttcccagtgcgtccgcctcctcacattcctatgtgtttgcctcatctagtccatgactggtaccttttttcctacagaaaaactgaaacaactatgcagttttccccattcccatctcaggttcggggcagcttaattagaaagtgtcagtaaatgtgctttgagatccttagaagatgagttgagtggtcattccccaagacctcggcatcggtatcgccaaggcggctttgcagtaaatgttaggggaagaatggagggccatttgtgttgtgcagaggaagacaaaatgtccatcacataactgaacacgactgagatggtccaattactttgtctctctggcttttttcaatagtgcaaaggaatggtgattaggcaagaatcctaaacaggagaaacccaagtccgttctgaggtgcgttgtgcatggaggctgctgggcagcaccagtcatgcggtagtgtacaacagaccttcaacaccatcagcataatgatc

SEQ ID NO: 60078 - DNA, 939 bp, Homo sapiens
ataaactattatgttcaaatcatagtaatcttcaaaatacaagataaataaaatgcaacatttcaagcctactttcaaaaaaaatttaggtctaacgattcttactctcactgcctgctctagaagagaaagagtgtacaatagtacaaaaattaatatagaaactgctgcacccactgtttctgagattgtttctccaggccctccaaagcaatcatgcaaactagtttaatttttaaaaattgttggagtgctttatgcttgagttcttgtaagagatttaagataaaacaaacacacacaatctgtaaataccagcattaaaaacacccatgtaggcagaagtacacaaaaccacaggagattttaaaaaggtggtgggggtggggggcttcgaaaagatctgcaggaaacagacggtggttgaaatggccttatttccaggccaccccaggctcctcgtcccccgctcctgacttgaagtgagctggtggactccctccccttctccatatctgtgatccagcttcctgctcacccgcccacagccctcaagtggactgactactttggcctctctcccactgcactccagacaaatccatttgtattcgcaccagtaaacatactcttgccaactgaaccattgataaaactatgttacgacaacctcctttcaaatgagaatgagcaactcctgagtgacctcatgggaggggccagccatgcactgcacagctccaacttcattccccaatttagcagacagttactgaatatccttttaccgtaggctgagcttaccaagatgaacacccgcagagggagtagagtctagtcaaggggtgcgctggacaccagagctcctgtggttacccagcttcaccaatagctgttttcaggtttttaaaaaattagccattttcaataccattcagg

SEQ ID NO: 60079 - DNA, 3725 bp, Homo sapiens
taacaaacaatcattaatagcctatgaggggtggggtgctggaaccactgcatgctacagtgtaccagttcatcaggtggccctccagataactgctggtccgttttggcgatttgagatgtgttggttacagaagtcaaggaaaagcagagtacgttagctatttgcatgtaagtgggaaatagtgccttccacaggcagcaggcagaaggatgtggccccaggagttttctggggaaacaggcagtaacaactgtataatatggaaagatgacatcaagcccaaaacaatagggcatatctctagatacatattctgcacttggcactgtttaaagggctttgcattcatttacccgtttattactcacaataatcccatatggtaggtaagattatctccgctttacagataaggagactgaggcagcaggaggtgggatatcctgctcttggctacacacaagcaagtggtaaagtgaggctgaatccaagccagccgactccggaatctgtgccctttgccctgcaccaggctgcattctgtggcttgtgttttcttagtgaaaaatcacagacagaagacagatgtcaagaagttggcatagtggaaaagagggccccgtagatccagtggaaccacgttcttctttctcccttctctctgctaaggcaatgtgcacataaagacgagtgctcatcatcaccccaccgagtttggacatgaggatatcccagaaagggtgggaaagtctgaggctgccaaatctgaggccaggagtgtcatgcatgagaagtcccatagttgtggagtgtgcctgggatgccccaggagctgggccttccagagacctttgcatggaggcgtccagggaaggcccagctgctctgagagctgagcagggagctctcaacttcagcaggcctcagaaccacctgaggccttggtaaaaccaggtgtgggggccctgccagagtttctgactcagaaggtcggggctcagtcctgaaaacgtgcacttcctgcaagttcccacgatgccgacactgctggtctggaacccggctttggattctgtgtgtcgggagcatctctggtgacttggcagccactctccttgttcccatttgccttgctcaccctggcccccaccccactccatcctctccttccatctgatttgcaaccactaccctttatgggctcagggtagatgccatttcctgcaaagccttttctgactccacaaatctgggtgtctcgtagaagggactttctatgctgcctgctctccccacagggcgcggtcacatgcacaggctgtgcctgccagcttggctgagaggccacacattctgggaaggtgagacacactgagctatgcatggcagtctcccctgaccttggcagcatctgccatgcatgatgggttccataaatatttgctgaatcaatgagcagattgatctatcttgaggtcatcccttgagaagaggatgtttgggggttctgtctggagtttcttatcgctgtgagtctgtgggctttccagccttgctgccactgctccttccaagtgctgacaaacctacctccctccctgtgttgcccattcagaactcacgactcagccacaccccacgcagtgcaggtacgctgaccgtggaatttactgcctgagctaagggagttgtgagtatgaaaaggagcactattaataattgattcagggtgaaaagcttacatttgaactgcgctatctcaggagacccaggacataggatcatcagcccaagtgcggagcatccctgcatggctgccctcccggctcacaagccctctgctgatggcttcttcaggacagatgtccatccttggtccagcccgcagtcgtcaggctgacagagccagcaggtgtaaagcatcccagcccacaactaggagagggcatggcatggactcagaggaccctcagcaggtgtcagcacaactggcaggcatccagcacgggctgcgcctatgaaacgtgtgctgagcttgctcaccgagtaagaccgcacgggccccatccagttaaactccctggagcgtggggagaggaggaccacgtctgggaaggcaacatttctgagggactcctccagaaggcgccactcctctgaagatgacagtttcagggtgccatctgcaaatgagcattggagtagctgggggctcacctcacaggagagggctgaccacggctggaggggctgagggcctatgggagcagagcactggctggcaagggggagctggggagaggaagaaaatgggcctctcctctttggcatgttgtttaccagttccatgcccagaaacagggcgaagagtctcttggtctgtttagctcctcttctgccgcactgagtggcctctaaccccaggtcctagcacttaggattgggccattcaactgtgcattaaaaagcagcctggagaccaaatcaacttttattaccttgtttgtctgggaaaatctgttccaaattccaaagaacagacttaaacatgagctgcgggacacaacccatgtgtaagttggagctgtctggagaagagagcactgatctgaccgcagtgaagaacacaatctggcataatctgtgcctacagcaatgggaatcactagtgttataaataaaacaggaacaagaattattacatgaaagactttagaggaaaaaatgttcctttttgaaaaacaacatccatctgtgcaatggtaagaggtacttagcgatcattcaattagaagcaaaataaagactaaagaggtaaggccagcattcccaaggaaagctaattataaaggctttaagctgatgaactttagatcaaagctctgagtcctctgataagatcgtgtactcattaatagaacacagtgtcatcagcttatttttagcccaggaaccggaatattctcagcatcacatgatcacattgtgacacaggtgccccaaaattcgggcaggttttgtttttctctccttgggagcaaagtgctaggtttgtttgagaataagaactcctcctataaatagcaattcctctttttcccagatctgagaccatagatagatagatagatagatagatagatagatagatagatagatagatagatagtttttgtttgtttgtttgtttgtttgtttgtttttggagacagagtctcactctgttgcccaggctggagtgcaatggcacgattgcagcccactgcaacctccgcctcccggtatcaagcgattctcctgcctcagcctcccgagtagctgggattacaggcacatgccaccatgacaagctaattttgtatttttagtagagatggggtttcaccatgttagccaggctggtcttgaactcccgacctgaggtggtcaccccaccttggcctaccaaagtgctgggattataggcatgagcccccacacccagccgagaccgtatttttattgtatatacagaaagccatgtaggattaaacagggcccttttacttttatttattcatttttttttatttttgtgaagacagggtctcactgtgttgaccaggctggacttgaactcctgtcctcaagtgatcctcacaccttgacctcccaaagcgctgggattacaggtgtgagccaccacacccagccaaacaaggccattttaagtttaagaatac

SEQ ID NO: 60080 - DNA, 2238 bp, Homo sapiens
ttaatgatgaggtacctgatatgaatggcctgcagaatatgccccaactatgccttcatcaaatctcctagaactgtgtaccaaacgagtgagtttcacagcacgtgctcactctgtgctcactgtgtgttcgtaacaacaatgatttggtaatgtggaggctgtgtgcctcccaaattcatacattgaagccctaacccccagtacctcagaatgtgactatatttagaaatagggtctgtaagcaggtgatgaagttaaaacgaggtcattaggatgagcccacatatgactggagtccttataagaaaaataaatatgaacacagatgggcacagagggacagccacttgaggacatagggagaaggcggccatctgcaagccaaagagagaggcctcaagagaaaccagccccaccgacaccttggtctcagacttcccagcctccagaaccgtgagaaataaatttctgtggtttaagccacccagtctgtagtgcttcttaatagaagccctggga[450 bp omitted]ttcagcaacctgatggcaggagcttcatttctgctgcgagtgagcaggctgccaatcattctcatgcctgcccttgtctgctaaatgccatagtcgtaaatgttcaaaggctgatctgaccagcattcacttctatttagcgccatgtctggtctgtgcttctgatcatcctgcctgctctccccctagggtttgtggctggggcttactttcaaagctttaagatgtttaggatttttcttttttctttttttctttttctttttttttttttgaaacagggtctcactctgtcacccaggctggagtgcagtggggcaatcatggctcaccccagccttgacctcctggcctcgagccatgcctcccaaagtcctgagattacaagtgtgagccactgcgcttggccaggaaatttcttagaactgggttacgcttgcaaccccattccccaaaattccttctatcaaaaataagagaaaaggggctgggtgtggtggctcacacctgtaatcccagcactttgggaggttcaggcaggtggatcacctgaggtcaggagttcaagaccagcctgaacaacatggtcaaaccccgtctctactaaaaatacaaaaatgagccgggcatggtggtaggcgcctgtaatcccagctactcgggaggctgaggcacaagaatctcttgaacccaggaggcggaggttgcagtgagtcgagatcatgccactgcactccaacctgggtgacagagctgggggccatctcaaaacaaaacaaaacaaaacaaaaacaaaaacaaacaaacaataaggagagaaaaggcccttgtgctctggagaaagagtgagccttgcttcttctacaaagcctttagggggaggatttcccttttacctacacccccatattaaataccccagtgtgacttattctaggggctggatgagcaccagtgctgtgaacagcattcacctttacttctcctcccctctgctccatgctgtctggtcatcatccgggtggaccagcatctggcatctcaatagcagcaggacaagaacacaagaaatggagaagtccccaaacaatggtctggttgtttggcctttcttgtcatttgaactccaaataattaagggatttttgtgtatatttaaaactggcactagaaacaatataagctaagaaagtgacttaaccagatacgaattttgctttaggaaaaccatgacagcaaaagagccagaccatgtaaaatctgttt

SEQ ID NO: 60081 - DNA, 638 bp, Homo sapiens
gcacctgaacgcagccagggtccccggtcacaccagaaactgttgctttgaccaatctccacagggattttgacaatcaagcatagaaaccaccaaaaaagtaaataccgaggttgtattttcttttctttttcctttttctttcctttttcctttttctttccttttcttttctcaccaatgcatccacttgtttggacgagcaggtcataaggacaggcaggagatgagtcacatctgacttcacaaaagtgcttaagccttttcacaatctccatttaaagccagccaagccttttagaattgcccatctcacaggaatgtttgtaacaaggctaggaaggaagtgtgtgctcaggtcggcccgtccctggctcccggaggcaggctctccggtgcagcggcagctgccagccctggggtcgggcttcatattttctcatgccttcaacaagtcctccctggaggaggggcagtaagcagaaggcagtacaagtggcacattctccttctaatgagcacagcacactaacgtctctcggagggggcccagctctcctcacgttcctctgggcccaggctccctgccagccttttctcttccccagagcattcaatcgctgtcaacagagccagac

SEQ ID NO: 60082 - DNA, 2077 bp, Homo sapiens
agtgacatgggggaaggcacagggcgctagaggttgaatttctttaagtaccaaggagggcttctttctttaggaagaaaccgcccaacgacagtaaggacgcatacagtgccacggatgctcatttgtaattccttaaaaatgtgagttctcattgtatttttactgttataattcatatttgcaaactctggtgaaaggcttcatttagtatatttggaataattctccatccactttctttccaacacagttagttacccgtttaaaaaaaaaaaaaaaatgcattgacctggccacagatcctaattagcacctagtaacctgcttcaggttaaccttgttaaacactgaattaaaaagggcaatgctgctataaattgcacctaagccattctgcagaggtggaacttcacaatcaggggaccctggtgccacctgcagtctgtcctgggaacgcgtcacagatagcaagccgtccacccacgtacaaatacacactgttgcatggagtgtctagcgaagactgcttcaaaaccagtctgcagaatttcctcatttacatcggaaaaatgaatatcccttaaggcggagctccgcctaggtacatttggtgcggaacttgccccaagcagcaagtcgtggggaaatgtgaaaccagcaagaactgcccccagggaaattgaagataaaacacaaaaccgaatttaaaaagtcacctgctgctccatttcaaactggaagtctaaaaaaggcatttcctgacgctggcgagtgactcagtgtcaccgtgactcagccgcgcccggttgcccacgaggcgggagggggaggcagatgctgcgggcggcgcggggagccgagcccgcgcgctgctatttcgggcaagtctgcggcgagcagggcccgcagtccacgcgcactcaggaagtacaaatagggcgtgcatcagaggaagcgctccccacgcagaggctgtgggaaagtgattcagcgctgctagaatccccctctcccgcgcccttcgcagcgcagccagggagggagggagcgcgccagagcctcctgcaggtgcgcgcggggcaggcgggcgggcgggcggcgcgcgcgcccagggggcccaggtgaccgccttccgcgcgcacacagccggccagggcgcacccggaagcccgttacccaaaggcaaggcttgttccagcctaaagcaaactcatccacacaacgtcgctagcgagttccgtttccctgtttctgggaatttgtgactgtcaaaacaaacgttcaggtgaccattgccctaaaccgcactgacgaaagggctaaggaccagggaaggagctggtatgaaaggctgtgagttcacagggtgccacgtgcagggttggagagaccccagccccatcagatctcctctctccagaagcaccctccctctccatccctccagaggccggggccatgtgtccacccatgtggaggtgtaaggagagccagagggagaggttcccacgtggacccaatggcgaaaagtcttgcagtcaaaatcacttagaaacattctgcgcagagctggctgagtgttgggtgaccaggtgattgatgctcaggcgttaagggaacaatgggctgtcctctgcatgctttcagagctggaggggccttgccaccggcagaagcagaaagatcatttaagcagcaccctgaacaatgagtgttttcagaaagttatcgaacaggcttgtgaaatatttttctcttgatgtctttaaaagatattttcacttctcccgcgtgattcagggtggtttggaagtgggagaagaaggaggcttgagatgttgaagttcactgcaaagtccctccttcaggactctaattattaaatattttctctatatataccttgtctatccaaatgatcatgaacctgggatggaggataggatttattaccttgtctcctcccaaggggtccagagaaagccatgtgaaatgaggggatgattaataaacattagattgactgatgacctccacagtatgtgaaattgtcttttatcaaagcagcagggag

SEQ ID NO: 60083 - DNA, 734 bp, Homo sapiens
acagatggtttagagctggctgtacccacttgagacaagaatgcagtggcagaacttacatgcacaaatggctgcattgtgtggttaatgctctatcgataagtcctgaggtagcaatggctttaagatgtagcctctttaacatacattataaatcttagtacaaatctcatttctaaattattactcgatactctgtgattgagaattacttaatttacgtggactaaaaaggccacctagaaaacctggaatagtaaatattacaatgtgctcagctaacacatcccattcaattaacaagagtgtaaagttcatatttttacatgacgtgtgtttatatttcatcacttgcaaaattacgaacatccaaaagaatgtccttttcccagatttccccaccattggctccctcacccccttcatgtctttgtaaatcactctgcttaaaaccacaatcccctgcccaccccccaccccagaaccctctgttgactctcctgcttaagtttatccctggacttatcatctcctgcattcatgagaattcccttgtcttgggtaacccctgtcagccccatggaatacttgctccaggacagcaggatctgttgagtcttgtcaccactgctagatctctgcctcccaggcactcccttccccgctgaatgaatctggaacccaaaggccccttggtcagagctcacaaccttctctcagacacacagagaaaa

SEQ ID NO: 60084 - DNA, 601 bp, Homo sapiens
ctctgcctgaactcttgccctttgctacatcattcatgttcccagttggcccctcacacctgctcttcagcatcctgggttctcagcagttcctacctggggccctgcctgccatccctccactgtcattcagcctgctttaaatgtctcaggatgactaatgtcactgggatgtgttctggccctggcctttggcccaccacacactgcatgccctggcagtcaaattcctgaattttttctggagccagtcctgcccgtcaggacccaagctccagcactaaagtacggctgtcagaggtggccctgccaatagcacactgtgtgtggaaaacacccagacattgagctgcctgaggagaaatggaaggtggcccacttggccggtcattgctcgttaaaatgtaaaggtgtgcagatatgaaaacacggggcttgttgccgatgactcaggggagggcaccgaacgtcatgcctcctggttatgtcttgccgccgtgttgaaccaggatggggaatgatcccattcctcaggtattcgtctgggagaccgtaaaggattgcttccagacaggaaggacgtctgtcttcctaaagagtg

SEQ ID NO: 60085 - DNA, 2416 bp, Homo sapiens
ttctgtctcaaaataaaagtccatttctaattccatttgagggatatggaataaagtacataaaaagtaacgagtcaaaagaaagaaaaggttttagtgaaaatgaatgtactcttctcccccttctattgtttgtaatagacttaatctttaaagcagttctggatttacaaaaacaaaaaaattattcagagtgtacccatatcccctcccgctacctctcacccctagttcctccgattattaacatcttgtattagcgtgctgcatttgttacaactgataccagtgttggccttccattattcttttaaatgtgaatctgactctggggatttgtgtgactgaatctcgcagattgagaacgatttttaacaaccagccatgcttgtaaaaacatgtggaagtttctctgactctgaaataagagggacaagatggttcccatgcaggcttgcgttggaaatgggggagcgtgcacagtctaactccatgccccgtgtttttcttgagtagccctctgggttgaatcaccctggacttcagctgaggcagggggattgttttatgctcaagaaagctccaggagtggtagaatctggccatcaagatgttctgtgaaatggggctcttgtcttttctggagaacatgccttcttggccctttgatcatgagacatctcaccacgccctcctttaacattgctaatgatggggactgaccaccccgtcattaaaccccatggcagtctaagattaagccattcagaatcttactagaaatgactaagcggaccgttttttcttgtgaggagagaattaaaggcgtttccaatccctaatgataaaaccagcatcaaattgtagagaattgcaatttctttcttacaaacagcaaatttttgtctcctttcattttttaaactgttgaacgtgtcagatggtatgcatagagagatttcagaggtctagtcaatgtgcaaatgttttgtggttttattttgagtttgaagtcagagcactgaattccacaaggcttgagcctcactctccctcctgagcacccaggcttcacggacatgactaataggagtttattcacagcctgctaccatccttggtcataacgttgctcaaggcccgagcaggcctgccaagaccacagtgtagccctgttaatatcacatgaccgtcggagagtttttggaaaacctcctctggccgactgtttatccgcccccattgatatttgtctgaagataagttatacagtctgtttacttacaaatgcgtcagaacagtcttggacttctgcacggaggttctgccaaatacaagtctaacagggaagtggtttgggcagccccggaaccgaagaacccctcagagcatcacaagccatcactctgggtccctgtcatttaaatagggattcaggcttcaggttgtcagtatttataggcttgattggagggaagtaagccgtatgagcactttttaaatgaatttttatttctcatttccacttagtgatggatgcacatttttccactaataaacatttgaacttttttcagtttttaagaacatcgtaggtggcatatttcacaatcttggcaaggcagacgtttttggagtaaatcgaaactggaggccagaagtactggctctgaactgaactaccacttgcaaatcgatgtagcagaaggaataatggatcatgtggaccacgcagaaagcgatctgagacgggcgtgtcagccgcatgtggatgaatagtcctttgtgggcaggaaggagagggagtgggtgggtatgagggcaggagaaagaatcagctctgtgtttgggggctgtgagaggacactcagaagaaggcttttacaccatattttatattcacaagtttatttatgttattttgagtccaacagaaagagtcacaaacgttaaactttagcaaccccctaatgattggaaaagatgggcaaatccttgctttaagagcagctgtatcgtatggagaagaagtcatctctgctgggaaaactcgcgaacagatgcaggctaaagcgaaagatcaactctccacaccattacattttgaagggctttgaagttatttttagaaaaactcaaaaatctaaatcaaaaatcagattttttctttttttttttcctactgcttccttttcctttttcttcttctcttgtcccttctcctttttggttgtttctattgctatttttacatgttcctttaggtggggggaagataaggtgtgaaatgtattcaagtgcaactttttcaaaataataaaatacatgtttattatgaggaaaactcaactgcctatagaaatgacaacggtaaatgtaaataagcaaaagatcagagatataagtgtatagccat

SEQ ID NO: 60086 - DNA, 2079 bp, Homo sapiens
aaagcagagaagccatgttcttaaatcacctctgcaggactgtggctggcttggttttgtacggatttccatgaaccccaggcatacattgtttatttttgtagacaatttgtccatctgcttttggcttaattatcgcttcaggaagatcagtggaaaagatgtattcagagtccaaggtcatgtctgttcctcaagggaagtctgtgtggatgacaatgccctatggaactcttttgaaaagccccatatgactcttctctttcatataccagccaaatggcccaaacctctctgtgcctcagtttcctcaccataaaatgggtacaatgacagtacctacctcgtagaggtttgtgaggactacataggctgactgttggaaagtgctccgaacagtgaacagtctagagtaaaaatgtcagctgctgttctagcttagtcccaaccaggggtcaaagctaataacctgaaacactctcttgtggaccctctgcaatgggctgggcctaacaggtccgccaatacacaaatttggaacactttcctttaagcaagtcaaagggaagggaattgtccaaccaatcagtgattgagtttgttccaccaccctgtagaaaggaaaatggaattcgatgtgctctttcgacatctttggaactctgcagtcaggactttccccatgggaggtgagctccccgtgacaaatgagggagctgccctctctcccactgagatgagtcattgtaacccaaaacaatctcaaaatctttgacatcactgccgcttgcaaatctgtgcctccagccaagggccggtggatgctactgcctgccacctcgtgttcaccaccagaactgcacgtcactccgaatctgctgacctcataccctggcatagaaacagtaaaaagaccaaacaaaaacgtgtcttttttggacccaaggttgaaatctgattttaaaacagagacattcagtaagcattaaacatcttccttttatagctttctcacagacctacattgacaaactcaccccttccctccataacctttacgcccctgagtcacagtagttgccctgaattgcttacgcaggtctggcttatcaccgacagttgtcctcaaaacacttggttcaaatgttaccagaactaaatttggaggagggagtcctggcattccagagcccttgcctcattttctagcgcgatcccagcagatggtctgatgtatctcatcagatgctgagcgcgggcctcactggcccagccctcctttccacaagtctggtggtctccttttttatgactccacttgagaggcctgggaaacattctccctgataatgcaggtgataaaaccagatcatctggtggaacgaacaatcagaaattccactgggcgggcacagggcttggagaagagttgagattgcggatgatgttttccggtagatgaaggtgactgaaggaattgaatggagggtggaggggactaaaggagagggtgaagtcctccacagcatgacccactgctgctcggcatcagaaattgggaagtcattataatggtcagaaacgtggtctaaaaatagaagattccatgtgggaagaacatgaatttcggagccaggcagagggggtaaatagcagtgccataacgcatgtgtttaacagacagcacatggagtgtgttctgtgtgtcaaatcctgcaagagatgccggggacagagtgtgaatgaggcatggtccctacctccaagggcctcgcggtctcacgtgaaatgtgggtacagagatgtagtatggcagtgccctgcagtgtgccatggggaagaagccccggccgcctcctccagttgtgaggaggggaagatgcccccagagagcccatgcttgagtcacatcctctagtgaccctgagagcctcaggcagcgagggctgcgtgtgccatggccctgaggttccagagaaactggcccaaccgctaggcactcagttagactggagagtgcagtgcactgtgccagcgtgggaaggggtgtgccagggcagtgggggacaaaaaaacgca

SEQ ID NO: 60087 - DNA, 2247 bp, Homo sapiens
tctctcaggctgtaggtgcaccaggccgtccactctctctctttctcgggctgcaggtgcaccaggccgtccactctctctctttctcgggctgcaggtgcaccaggccgtccagggagcccgggcctgccgggtatgccaggccgcagcgtcagcatcggctacctcctggtgaagcacagccagacggaccaggagcccatgtgcccagtgggcatgaacaaactctggagtggatacagcctgctgtacttcgagggccaggagaaggcgcacaaccaggacctgggtaggtacctcccacccggcccccgttgcctgctcagggctggcccggaagtggccaagatcaaagggccacagcgagactcccaaaccctccacggctggtaagttcccctgacggaagggtccatctacattcctcgagtgcagaaagattaaaacggcctttgaagcagaagccttacaaagcccttaaacctcaggaccttaacacagggacctgccttttaacctggtattgacttccgcaggctcccatgtgacccgtctgacccccgacccctctccagtggagaccaccaattacttcacctccttcttgtttttgacccaagttctgtagacttggagtcaggcaggggccatgaggggctggggttcatgtaagactctcccatacagccccccgaggaaaatggacccatggacacgtgtgcatgctcttatttaaggaagcctttgaaaggcattaacgcgacttcgaatacagaaaatgcaatacacacaaattacaagtggaggtagcttagtctgaggtcctctttgagggggtgacgggaagggtctctgggatactggctgtgttctgcctcctcggtgcaggttacatcaggcgttctgcccccgggaagcatgttgctggctcatggtgccttcacattcctgcctgtgcgccccgcctccacaatgagtttctaaagaacaacggggcaaaggccgccaaggataagggccaaaaatagatctaggaacagggccaaggaggcagcctagcaccgggcatgtttgctaaaggtggctgcacttctgggtctgagcttttcagcaatccatgtgaagagggaaacctgcttagctgcagcattcgttgtggccaggagataaaggctatcttagtctccagaagcaataaagctacatggaagggagaagggccaggactccttctggggtggctccttggggtcaaagagcgaccccttggaggccatcagagttttcttggggccagtgctgttaagaccccactaaggtaaggctcacccaaaatgctattccatgaagacgccactccctggtgatccaacttggcccagtatgtgtgagaacttgtagaagaacagagctgttccaaaatgccagtggagtctgatcaaaaagagaaaaagaaagaaattgggaagccttagcctggccctccagtaggtggctaaactccaccaggtgccctggggcgagtccgtgacacacagcctcctgggcctggctggggctggcaggtgcgtcttctagccacactgcactgtgatctcatgacccctccttccacagggctggcgggctcctgcctggcgcggttcagcaccatgcccttcctgtactgcaaccctggtgatgtctgctactatgccagccggaacgacaagtcctactggctctctaccactgcgccgctgcccatgatgcccgtggccgaggacgagatcaagccctacatcagccgctgttctgtgtgtgaggccccggccatcgccatcgcggtccacagtcaggatgtctccatcccacactgcccagctgggtggcggagtttgtggatcggatattccttcctcatggtatgtggtatttgcccagttcccctccccaaccacaccctgctggggacacagcaagaacagctgcctttgtgagaagaatcagacacggcagtccagggtgtgcactgcacaagggtagttggcccaggaagcgagcgagagctggaacacagcttacacttggctaactgagccacatgctgggcacagggcttcctccacccagaaagggctcattaatttgccaccaggcctttgtaaggagtgtaaccaggacgaacttgcctgttatccgtcttactaggtacaacaccaacaccaaaggtgcagctgctttgggtttaccagaagtctaaatata

SEQ ID NO: 60088 - DNA, 1769 bp, Homo sapiens
gagggacctgtgtgctggagggacctacgtgctggggggatccatgtactggggagacccgtgtgctggggagatccgtgtgctggggagggaagccgtgtgccggggagggaacccgtgtgctggggagaacctgtgtgctggggggacctatgtgctggggggatccatgtgctggtggtatccatgtactgggggaatccacgtgctggggagagaacccgtgtgctggggagggaacccgtgtgctggggagaacctgggtgctggggggacccatgtgctggcggaacccgtgtgctggggagggaacccgtgtgctggggagatccgtgtgctggtgggggagcccgtgtgctgggggtatccatgtgctggggggggcccatgtactggggggcacccgtgtgctggggtgatctatgtgctgggaacattcatgtgaggttgttttcctggcacagcagggctgtttaaaccaggaagttgggtccagaaatggcaacgtcatactctttaagaaactaggcctgggagcctggggaaggggacattctgactgacagcacccagattaccacatacccaaccccaggactccctgacaccactgccaggcacgaggctttaagggcactaggaaatacctggttatgaggtgtcattgaggaaagggttctcatctgcatggggacatggacagctggaaagtgcagaagggagctccaagaccacacacagccatgaaccctggaccgtcacttgctcatctcctccctggagtggccgctttgtacaaaggaaagacggatgctcgaggtcacgagctcaaacccacacccagtggggaaatctgcgccaacagctgagttgcccaaccgagggatttcaagctttccaagaactgacgtggtttctggaaggaaacagaggccacatgagatgagggtgggggagtaggacccaagaccaggctccccagcgaggagccaggctggtatccaaggtccacttggaatgcagcccaggacacagggtgccagggggcctgtggcggcactgtcattgaaactgtcccaatagctcagctccaggaagggccgtggagagtgctcagtgagatgtgctgaattaatgagcccctcatgcccttacaaaagcacttgtaagggcagctggaagttgctagcataggagagactgcagcgccgactgcccagaggaactcatttaaaaggagcccacagggatgcttatttttaggacaacacatataggatgaaatgcttaaacagagttgatggagaatgtgccacccatgggcaccatccccggagcacgcggccactcgaggaaacaagctgttgggtgcccggagcagatgggaaatcgaatccaagactgttcaggaagaacgggcctcaggcattcatacagccctccctgccttcaagcaccaactgcaaaaacagtgccatatgatactttctctcccttcacagccttcaaagaaagactctggccagggccagagctcatgcttatgatccccgcactttgggaggctgaggcaggaggattgcgtgagcccaggagttccagaccagcctgggaaacacagcaagacctcatctctacaaaaaataaaaataaaaaattagctaggcatactgacacacccctgtagtcccagctactcgggtgactgaggtgggtggatcacttgtgttcaggagttcgaggctgcagtgagtgagctgagattgtgc

SEQ ID NO: 60089 - DNA, 4452 bp, Homo sapiens
tcaaagagggtctcaaacaggaggtccacattgtagccggtcttggcgctggtctcaaagcacatttgctcagcggccggcacatcctgctcatccagcatcttgtacttgaggatctttttataaagggccaccgcatcctccagctgcacctgcttaggtgcccttggggagacacggtccccagcgtccatattgggactgcactcttccttctcctggcccgccaaggccccctcctcagtgaggtccactttgttccccacgatggcaaagaggcagtctttgctggctgtgtctgtcaggcccaggaaccggtcctccagctccaccaggctctgccggtgattcacatcataggtgaggatgatggcggccgccccccggcagtacatggagcccaggccgtggaactgctcccgccctggtgggaagagagggacagaaagagtggttatctctcatctcagaacatagccaccagccacactgcaagggaacgtcccacagggatgtttatttttagggcaacacacacaggatgaaatgcttaaacatagttgatggagaatgtgccacccatgggcaccatccccaaagcaggcagcccctcgagaaaacaagctgttgggtgcccagactagatgggaaacagaatccaagaatgttcaggaagaacgggcctcaggcattcacacagccctccctgccttcaagcaccaactccaaaggagtcctggccccagccatggctggagatggaaggaatcaagaactgatgtccagaaaaaagcagcgactgccaaggcccttgctgagatagaagctgactcgggaatgcagactccggaagcaaagtgtgcccatgtcccttcaccctcctcctttacaccccctgggtgctcccagctgccctgtgctgccctgcccaggaagtgctgcggggagggcttctgagttcataacagcagttgtaaaccacacctgcccttatctgcccagaatcacacagcaccctgcggtgctcacgatatttttaggacacagtggacatctcccctcccacgctggaatcggaatccctgaggagccaggccccagcattcgcacttcttgtgggtgccgcagccccgcctgccctccaggtttaaaacagacagaggtgcgggcaattgcaggcaagccgggaacctgctcccaaaacatttccaggttgagatcaaaccctcgggacacagctcaacgtcaacacattggctactgacaaggtgctgtctgtcactgggtctggcggggaacagggccagctggcatgcacccctgcagtgcctggagtgtgggcatctgctctccccgtgcccccagcacttcagcctcacgaggtcgatgtgggcacacacactttccatgaggaaactgaagtgtgggggagtcaggcatagcagcgctagagggaggctgggccagggcactggaacacccgccaccgtcctacatttaaacgcagagacccccgaactgatggctaaaaaggaagattaaaaggtccccagctctgtgtacttttacaatgcagtcatctaatcaaatcaacccgggtcagaatacactccccacaggtaacacctgcacatccgtactgttctgttcccaacgtctgccccaggaccacctttctatcccaccaacagtgcacagatccccaagggggcccgctcacctccccaccagcaggcggctccctgccagtccactcaagggctacctaggaactttctggcagaattctgaacccctgtctgtagcacaagctttctgcatactcagatgtggaggacagactcccacaaggggagcagatctggccaaggcaggtgttcctgggacaggtgcagtgcacgcagcaggtgagagcccccagcagggagggccgagccgagcacgcctgctggtatgtcctcccagccttggcgtgcttttcatcgttggacacatctgccgcactggggggacgagctctcaggaagcagctgtgggagaggcagcagcatgcaccttggcccccacctgcctctcgaggaccgagcaggctgtgcatggcatgggccctccctgctggcaggaaggggcttcacagacgctcctggtgatgcatttgtttcaatcaccaacaagcaaaccccaagtgagatcttccaaccacaaagcacctgctcccaaccacacctgccgggggcacgctttcgaagaggaatgagactgagacctgtgctcagacgccatcccaaggagcctctgcagacaggcctggaagctcccatagcacctgctgcaggccagctcatcccctcctccctggggcatgtgtggcctcccgggccatgcccttaggccaagaggagggagagctgggaacgactgacagcactggcctccactctcgagctcagaacgccaaggtcaagtgcctctgaacaaggatgaggctgctggggcactggcgcagagagaggtggcacccagggagtgtccaggccccattccaatccctcgcctgggagaagtaagcctggttctgattttttaaaaagaagctaacaatgtggattttaatctcccaagttttaagcactcaaaactaattcaaaattttctaaagatcacatttaggcaaaccaaaatgcaacagtggcccatcattggcagcttctaaattataaatggtcccatgtcactctgagggcaacttcccctgagtgtgtggacagtgtcgaccactagcaagggctcttaaccactggggtcataaaccaaattcacagggtccatgaccttgaatgagggagaaaacatcatctttgttttcaccaccctctacctgaaatttaccatttcctttcaccacaaatattggcagcaaactgcagaaatggcagtaaggggcactcatcaccaacagggccagcaggtgcttccatccgcatgccagatgcctcagacactccagcgtgatgcccacgacccttcagacctgccatgccttcattcattaatatgtggaccatgaaccacatatcaatcataatttaaaaaggctcaagacgactgtacttaaggacagctggttacctttgtatgtgactgcacgcacttgggcatagtgttctgagaaggggtcctgggcttgtacccctcgggggccgaggggtcttgacacaaatgaagttaaggccccttggtctgtggggctttggagcatggactgaacgcatgacacctgcacacatgtggctctctaaggcagactgtcctttgccaataaaccactgtttagagccaaatagccaagaagcacaaccaaatttcatcccattcccatccccaatctttctgaaatggccacacattctgatgacgccaagtcctcaaaccttgctgggcgatgctgcctggattttgaggcaggctggtcaccccttgggcaaccctggagagaggcgcccacagagacacacactcatgtcctgtgagaagagccagacagacctgtctactgaccactgtggtctcccaggccccgagcgtggactccagctcccccttcagcaaagccgacagtgtgccctttggggatgtggagggaaagcgagctgggagctgagcccagaccagctccggtaggagtcagaagaatgtgccctgctgccagtctgagggtcaaagtgcgagagctacccgggtcacctccctcttctgggaaaagccagcctgggaatgctgttgtttgggcgacagagccaccctgttggcaagcagcttgtgctctggaattcagcacctgaagggcaacattcctcccttccgcacgcctaccaggggtcagcttcagactgagaagtcaatccgtttccagtcaagctggactggaccccagcaggcagaaatcagacagtgtccccggaatccacagtcattctcccactacagaagatgatgatcaaaagcctttaaaacccaatacagcaggcattagcttcaaaaagaacaggctagggcaggaggattgcttgaggccaggagttggagcccagcttgggcagcatagcaaggctcctatctctacaaatacacacacacacacacacacacacacacacacacacacacacatacactttaattagccaggcatggtgacgcatgcctgtagtcccagctactcgggaggctgaggagggaagactgcttgagccaaggagttcgaggctgcaataagctatgatcatgccactgcactccagcctgagcaacagtgagaccccatatctaaaataaatttaaaatggtaataataaaggaaagaaaaaggccggagactcatgcctggaatcccagcactttgggacgccggggtgggcggatcacctgagttcgggagttcgagaccagcct

SEQ ID NO: 60090 - DNA, 1158 bp, Homo sapiens
ctctctcacgcaaaatagtgtctacaaagaaggcgaggagctggaagagcatgctctccactgccccgaccctcacggctggtctctgctgggctgcagcaagccccgcgcagctgcccatgcccctggaatgggagttacctggctgttgggttaaagtacagaatctggctcaggaggcctggctgggtcctgggttctgctgctgccagcccgaggaccttgccgaggaggagacggccacgcttcagcctctcatcaacccaaggtgagagccgaccacccctcactctaagtaaaacctgacagctgatcttttcacacctcaccactctcctgccttcctctgatactctccacctggtcacggtcacggcgcagcaacagattcctcaagcagtgaaagctgacccccaggcctcaggaacatcactcctgcctgggtctgtggcacagggtaacaggccagagttaatcagatttggaattagttaggtttagaatgtgcttttgcaactgctgtagaaaagtgcctggctaagtaaacaataggccaccagctttagcacatgggaacgaagtgtcttcaaacaatccagaaattgttatcagcccaggcacaatagcaatacaactgccacatgaaagctcacctcgttcttatcttctcattaacacaagattcgctagaagatttccagtgacaatgtcaatttggaaagtatttaaaacttcctccattccttctgacttctcatttttcaggaaaagcagccaagttagcagggaactgcctgccctaatcttggtattagtggaattctctgggccagagcccttcgcctgcctggggctcagcttcctcagtgtccctgcaccaactggatctgatccctttaaccaaatcagtgttccttccagggacttccctaagggctagctgactgcgagtttacttcaagtgccaggcggagtgtccagccacacacacacacacacacacacactctcacatacatgcacgtacatgccatgcacacatacacatactcacagttgcatttctttctccccactgtgtccacatttcacacatctggaatcagagaccccagatgctcacacacggagacagtaaccagtggccaccatcagcag

SEQ ID NO: 60091 - DNA, 571 bp, Homo sapiens
cgactccaaacagcaaaggaagaaattcaatatggccaggtctcccaggttgctgagcccttgggtggcagatggcgacttttattctcactctttaccacggccaccgcgagtgcccccagccttccctcctctcgccgtggcctccccatttattagagacttgtttgctaggggcccagctgagcctccctcctccctttgtaacatgcctgctggtgtaacctcagtgacaggcacccaaggccaggagacaatgtttgtttagcaaaactcacatggtacttcctcattctggccactgttctgagaaccttgccagtgttaactggctgactcctaacaaagctcagacaggtgcccctttcttcccttattacacaggaggagcctgatgcaaaaggaggtgacacagccacagccacagctgtggtcggcagatgccctgatctccagaacctgtgccctcatcacatgggtgagggacgctgagcctgccagtcaaccaccctgaaaacaagggccaggatggatcccacaaaatcacaggggtcctttaaacccttagaag

SEQ ID NO: 60092 - DNA, 3167 bp, Homo sapiens
ccaccccagcccaccctgccttgtgtggctaaaagcaactttcaaaatggttcctcctccggctggtccttaccattctgcctcggttatgacaattacaacaaaaacaacttgaaaagcaatgtctgtggggtggagagaaagtttaggagctcagcaaaagaaggaaaagaacagggtcccctaaatgttaaattctgaatttccaacaattatagaaaaggtatctgttcctacctctcttttcccttcaagtacccggtcaggccacaggccaccgaggaggcaggcaagggtgccctgtgtccctgccaactctgggcaagggccgcctgagtgtgtacacaggaagtcaggaatgtggagaaggggcctggccactctctgttctgaggagctctagtaattcacccttaggatctttcgaacaagcagcagcagcctcggatgccaggaaatgagctgctgccccccagtaacgcttcaagacatctggggcgtcacatcagcacaactgcaaaatctctggtgatcaggattccggctgcatcacgtccttggtgctgaagaagcaagaggccagtggaaacgaaactgctgcttcattccctccgatgcaggggccgttccagcactgcagggcagctcttgttccagaaacacaccgtgtgttaagagtctgcctccaacggtggccactacaggggtttcggttagggtcccccaataacactcctgcattaaccttgctacttgtaaaccaagggcagcagtaaatcccagccaaccagcaaaagcagcagaggggcaaagctttgtacaaaaccaaattgggttcaatttgactttgtacagaagcaaattgggttcgtgaattgggttcgatttgacttctagagcgtgtgttccatcgttaccaaatgctcagtgtgagggagtcagctcagtaaacctcatcctgcagcctgaggcagaagacagagttggagcaaagatcagggaaatgcacctctttacctgggggacattgttttcacaagatgattgccaataaattagtcacgatgttaactgggataataataaaaaagcatcaaagaaggcaaaagggagggggagaactggaagtacctctgtgagcttcgttaattcagttttaaagagagaattcattatcatcttgtttattcagcatactgatacacccaagatggcaatttaagaattctggacggggcctttgggtatatgactttttaagatgctaacataaaagaagtcagaactttcagagtttcaggcttctaaaaactcacactcattgaaaatgtgtcacactatttccagtttcttcattcacttacaatatcttattcttttgtaaggagaaggaaatatattccattgcaatgctacaatcaccagtgttattttccaaagttaaacagaaagcctgaattgagatcctctaagttgtacttttgaaaagtcacaaatactacacaataaaaataactcattacctatcttaaaaatgcttccaccggaagtcactccaacccaaacccatatgacgtatctgagccaagatcaagcagaagattaactgtaaaaggcagatatgctccgggctaagaggtccggaggctccagttttatttcctctctcctgactaaacccaacaggggggaacactctgtgcctcattttactttttcttagaaaggggctaataacaccagctctgctcacccctcaagtgaatctcaaaggatatcatgttcctacgggtacgtgaaaactgaaaatacctaacaaagcagccacagaggagcgtctctggttcccagggcggcagagcaggaacgcggggctcgggagcaaaggcagcttaggtacacaaatgaccagcgggttctctgcaacttgggttgtccctgaggtcactgagtggctgagaggcagcgctcagcccaaccagcaagggaggacgagtgggaaaccccgagaaggaggcatttgctgtccgaggccgggaccctgtgcgcggccgggtgccctgctggaagccccgcgccccccgtccccggcggagccccagggcggtgtggctcatgcggcgccggcctcacctgcggtgtcccagatggagatgttgtaggagcgccactgcttcaggtagaaggcgccgcccaccgtgctgaccgtgtccgggaagcgccgctccatataccgctgcagcagcgacgtcttccccacgttcatgtcccccaggagcacgatcttgctgtcgggcttcctcatcttcccgtaagaacccccagcgcccccgcgccctctccccgaggctggccggctcgtgcgccctgggcgcagctggaggagcggaccccggactcgccgggacccggattctcgtgaacgctccgggaccttcgcctccggacgcccgggagctcaagagaggaagcgcgtgtgcgcgcccgggaaggagctgggtgcagagcacggagcccacgtcgggggcccggaccgcggcggcctcgcctcgccccgcccccgcccccgcccccgggccctttcaccgccgcggccccgccctatcctcctccgcccaccgcccccgtcccgcccctgctggacctcgccgtttcgcaagcatccgagttctccagccgaggctcgggactgctgcagggtggaaaatgaaagttctgagagcaccttccgcccctccgcttctgcacagccggggctgcggtgcgaggagcttggccgcggggcccgaacgaggcgaaggggccggggcccttggggaacccccttctctcttccactctcccttaggtaaaacccgtgttcctctcacgctcgacccagcgcctttccagctgcggtcgatttgcttctccgcgtgtaagtacagccaccctcaaggtcattgaaaaagtttgctttaaatgagcgtctgcggaactcgtcctgaggctctcactgttacagattagagatgggggcgctttctagtggaggattttgcttttgctcttctacttttgcaagaagctttttgtcctgaaaagtggacagtcatctccatttatagcttggaatgaaaatttgactatggaagttgcagtcgctacttgagaaatatttcctcctt

SEQ ID NO: 60093 - DNA, 1162 bp, Homo sapiens
tcgctggacaggatgccttccccaggggctaccatctgcccttccagcctctccctgacacacatggaacttctgggtggctcccaaacgcaggctgacgtcaccagatgctgattctgatcctcacccttccaccccccatgtcagccctgacctcagagccttgttgcccagcaagccacttcattctgtgcagcctctggggaagctccgtggtgacctccgctggcaggatcatctggccctggctcctttttcatccttcattggttagcaggtcagtttctcccgctggatggagaacttctgcagagacggccaagctgagccctcccctcaccgcagggaagagctgagtcagatgagagcagggaggccaatgtcacttccccaatgtcaccaaacgtcaaatagaaaagttcacctggaaggaagcagtggggacaaaaccaccacagggcgacttgtgggctcacagacagaggccccgcttccccaacacaaccacctctctccttccctccctcccacacaccccagaggtcatcacagcagctgggcgtcccgcagcccatttgtccatcccccacccgctctgggggacctgctcctacacagcagaccctgaaaccaacatcacctgcgacttcgtcgtggcccaatctcgcagtcgctttagcctttcaatctacttgtcttgcaccctgttccccacttccttctttttgaaaatcgatcctggaccttcccaacccacctgaccacagggccctttacctccccagggatctccctttgatcaagtgggtttgctctttaaataaactccacaaacacctgccaggtgccttgccagttttcatctctgtgctggttacgtagaaaattgtccacatttcccccagtgattcaggaggctgaagggggagaatcacttgaaactagcctgggcaacatagcaagatgcagtcttcacaaaaaatgtaaaaactagccaggcatgggagcatctgcctgtggtcccagctactccagaggctgaggcaggagggtcacttgagcccttgagtttgaggctgcagtgagccaagaacacaccactgcgatgttgtgatctcggctcactgcaacctctgcctcctgggttcaagcaattctcttg

SEQ ID NO: 60094 - DNA, 607 bp, Homo sapiens
aagtagctgggactacaggcgtgcaccaccacgcccagctaatttttttgtatttttagtagagactgggtttcaccatgttggtcaggctggtcttgaacttttgacctcatgtgatcctcccacctcagcctcccaaagtgctgggattacaggtatgagccaccatgcacagccaataaaaaattttttaaataaatagatttttttagcagttttaggtgtgcaaaaacgagtggaaaatacagcgttcccatgccccgctcacactccctctgttccggttttccctatgactaacagcttggcattcgtgtggtacagttgttacaatggaggagtcaatattgcattagtattggcacaagtattacaatggaagcattgatattgatacataattattaactaaagtccacagtttaagttagggttcattcttcatgttgtaccttctatgagtttggacaaatgtataatgacatgtatccaccattatagtctcacccaagatagtttggttttttcttttctttttttcctttttttttttctttcaaggcagagtctcactctgctgcacaggctgaagtgcagtggtgacatc

SEQ ID NO: 60095 - DNA, 3229 bp, Homo sapiens
ccagtccctattcaagatggaatcgctctggttaaaaggcctctgacatgttgagccatcctttcacctcagcctctcaagtagctggactacaggtgtgccacaccatcccctgctaattttccaaaaaaattttggtagagaagggggtctccttatgttgtccaggctggtctcaaactcctgggctcaaacgatccttccatcttggcctcccaaagcattgggatcacacgcgcgagccaccgcacctggccccacaagtttcttttagcaccatgacggtggcttcaaatagggcggcagtggaggtaagaggccatcagccacaggaggagcgtgggtgggagggcaggagaggtcagaatgccttccaggggtttgggcctcagcgttggagtgatggagctgccctgacctgagacggtggaaagcgaaggggcctcgcagcgagctggtttggggttcagggcagaggttgcgcctggagcagaaaggcacctgactgctatactgggggcacatagtgggcctcggcactccacctgccagcaaaatcattttctataacgccgcaagcctaaaaatgggccgataaacacaaaccagaccctgaaccagatcgttgttaactcttcaacctgccttccagccgaacctcttaggccagagctgggaccaggccgggttgggcgtcgcgcttgtcaatcatctagaaccgggtgtgattgagcgagttgggatcccactgccgacagccgcgcggaggcggtcgggaaaccggaaaacgcttccaatggctgtgtttccggcgacggcgcgggggcagctgggaatccggaatgctgcccgatggccctgggtcctcgctgtggggcaatccgggcttgcagacgaggtaaggtcgattccatttggcccggggatggtcacacgcgcgggggccggaactgccgtcgccggcgcggtcgttgtcgcattgctctcggccgcactcgcgctgtacgggccgccactggacgcaggtacccgaccgctgaccgcctctgctggctcgcgggggggaagcgccgccgaggggcagcccgcgcgcggggccggggcgccgtgtggcctgcggggcggagtagggagaggacggaggcctcctggaacggcgcggcgacggctgggcgcggcttgggtgatgggagcctccgtgcggggtgacagaggggcagagggtggcgccgggccggagccagtgcgcgtcccaggagcggcggagcccgcgcggtggccggggaacggggggccgagggccgaggacggtaggagggccctggggcgccgtggtgcgctggtcggatccgtctgctctgctctgtccccgctcccggtctgggaaagatgctcgccaactgcgggcttgctgtttggtcggagctggatacgggggccctcctggggcccagggacgcggcgggcgtgcaggcgagctggccggctgagcgggcttcgcgcacaccaggagcagggccgtgtctgcatccccaatttgaagtcccagtgcgactgggcaagtacagaccctgcacgtccttggacgagagggactggatattgcgacgcctgggccgcagaaaaggactccaccagccaggcctccttcgcccgcccccggttcggggtgtgtgtgtgcgtgtaggaggtcccttggggagggaggctcacctgagtcatccccagaacctgaagtgctggccagatgtccccgagggccctgccctggccttggctggtccttgcacgctgagatgccttttcaaatagaacggataaggtagaaagaatttaaacaggagctgagcaagtgcttggagccccatctcttcatagggtttttttgtctttctgtttgccttgttggtattggtgtatctaacatattttatacaggaagtagttcgtgtatatctcatttctcataaggagagattgctgttatccaccttggtatagaagataaatagaagctcagagaaagtgacttagccaggattctccagccagtgagtggccgaaatggttaaacgcaccatttgttgctgtagtcattagatagattttaccttgtgtgtatgttgggcatcgtcagagagtttggctttttgttttcatcagcacacactgagaatgcactgggtggcgctgagagggtactctacactgcacctcactcacaccagcagggaggcttcttaacactttatttagagatttatttgtagctctttaccttaaattcacacaccgtgattagtagcaagatttttcattgcgcttggttgaggatttattatcagactgcctaaacttttacgaaaagccaggtagagttgtatattactgaggctttaggaaatatttcagttaacttagggattgtggttaaatgctctaaattagttataactcacattaacttaaagtatttttgtttttttaagtagaattttccagtactaaaagcacttttagcacaaagcagcagtgatagtcttccccagacacgcttccttaaaacaaaagccaaacaaatttaacctgttcttccagactcagaattgtctgaagagttaccgaatgggatacatcttaagtcgcctattgtcaaggcctttttatccttcagaactttgatctttatatgtaaatgtttctgtgttaacatttgaaatgttaagttcaaatggtgacgtcagtaagccagctggaacttgcttcactgccaagtgctgggaagtttagttgacctgctttggcccttttgctaacagaagctgtttatcttaggtgaatgctggtgagcagcctggattttactttgtgttaatacaattctattcaagtgaaaatgctatacttcttattttgccttaaaatggcagcattttacacctactgtgtgcccacaaaaataaaaacaaaaacatggcagcactttggtaaaatagtgtcttgtggcctggcttgtccattactaaccacagcatctgcacaggtttctctctgggccccagtttccttatctgtaaaagaaagataaagtgctagtgaggagagtgaatcacgatgtcttgacttcatcgaacatgtatcaagtgtcttgttctgtgccaggctgtgttcgaggtgattgagtcccacatggaagcagtcagtgctgcagcttgcggatggtgccaca

SEQ ID NO: 60096 - DNA, 2015 bp, Homo sapiens
caagaaaaaaaaaaagtatacagagtaaatgtaactttttacttttagtctaggactgaacaatactaagttttaaaaaatctataatatgtcatttttgtacattatattttggaaatgtacaaaatattaggaaaagtggtaattttggcaaatgtaggaggcagtacatcttacagttaaagaggtcaagagagcaaccacttcgcagtcagagaaaccaagcctcaccccagttccaatacctcttcaatgtgtcatcttaggaaagttactcaatcactattgagccccgtgacatctcacatgtgaggtacagtgttaagcagcattttatgggcattatttactaaaattgttataagatccaagttatcattcccatctcaaagatgaagaaaccaggactcaaagcaataaagtgacctgctcagtgctgtgaagctaagaagtggtggggcccaggaatgactgatcagcaggaccccgggaccccgcaaaggcctcttgatgtcactaaacccagcaaaaaacatctagttccaaaacgggtcatttttcagtgctccattgtctccctgagtttcctcacctgtaaaacgggtgtaagtgctcagaatccctataagaaccaaatgaggttgtaacatttcccacaatgcctggaatgtaggaattattctgcatccctaagttgccacttaagagataaaagaaatcagcaaaaggctttcaaaaataaatggtcctttgaagtatgaaaattcaaatccaggaaactcaccaagcatggccaaggtgcgcatgatcatatacagttggtccacagctatacctggaaacaaagttaaaatccatcgtgtggaacatatttgcaagaaaggacattcgattctgagttataatgatcatataatttttaaagtaatcacttctgggggatgaatagccggggttttcatacttgctcaattcacacccaaacctgcaaaagcaccgcgcacccccagcttctagaacggcgccctccatgcagcttcctaaacgccctccccgagcccagatcccgttcagccgtgggaagtctccgccacgatcggcccccgcccgtgccccagtcccgcgcggcccaccaggaggcggcttcggcgtgcgccacgattaggggttccttcctcccggtgaggctgttgtacacctgcacacccgtctcccggcccgtgggctgcagccaggcccgcccgcgccccccgctcgccgcccggcccgcaggccagtgccacccagcccgcccaaggcccagcgcggcctggagcagcggggggcccaggcctgggccgcgcgtagtcctcaacatgtcagcggccagcgcctacgactgggcggagacgggagccacgccgggtacgctgccggtcgctcaagagcagcacggccccgccccgccccgcccacgcccttggggccacgcccactcccggaagcagtcctcaggtagcgcctccctttggcctggctcgagtcgcccgcggcaagggtggagaaccagggcccgaagaggttggggcggggaaggcccggggtggagggaggagggcggtgccgcgccgggaggccgtgggaagaggcggtaccgtgccgatctcctctccttattagcccaggtcctgcgaggcgtccgtgtgcgcgcggtaccagcctggagctgtgtccgccgcgcgggaggagcgtttacagtgcaagcttctgttgccgggccctggcctgttagcgaagcacgtgtgcatcccagcacagcccacgtcagcacgctaatacacagtgtccaccccagaacacacgtcagcaccccaatacagtgtgcaccccaatacagtgtgcaccccaaacacacatctgcgccccaatacagtgtgcactgcagcacaccgttagcatcccaacacagtgcaccccgatacacaatgtgcaacccaacacacagtctgcaccccaagaagtgtgcaccccaatac

SEQ ID NO: 60097 - DNA, 2890 bp, Homo sapiens
cctgatctcaggcaattcgcccgcctcggcctcccaaagtggtaggattacaggcgtgagccaccgcgtccggccaagtgttatagtcttttgtgcagaccaagtagtggccaataaatcttgtagaaactaaagtactcatttgcttttaactaggccaagactagaatagcgtgatctgtaagtaaaataacagccatttccccaaatatcaaagccaaagctctcctgctgtgtaggtgagatgaaggggcttaaaagtgaagattaaatccacttcaaagtgtaaagagtatccatccatttatcattgcagcaacgttgcaacgtgaacaatccgattccaaatacaaaacagcttaattcagtctctttgccgtactcacatccatagcacaaaatacccggcagggccctggaatgagcaccactgcggttaataatctactctataaatactggacgaatccaaatttttactggattacacagaatacgtttttaaaaaatccaaagagttttagatgttacaacagggttccatcaaataccacgtttccaaatcttaccaccagaatgtgtatccatttcaactgcaattattttgtgtctaaaactgtgtactctgctttgcaacaggataaacccggtggataaaagctgaaatccgaccctgtcctaattaagaggctaagaaaaatggagaaccgcgctggcgtggagttgatacagaaacactgcaagggctggggacagggcttagttcgtggaatacacaggcagcaccaccaacccggctctccggaaaagagaaagtccagtgagaaaggtgaaaactgacaaggcaccgttctccgacttgctgaaaaaaagacaatgcaaatagagcagggtccaaggcggaagaaaatcagagaaaagcaggcagccaagcgtggcgaacacagctctcggggccaccccggaggggacccgcggcggccgcagcggggcggaggccgaagccgaggccgccccggaaccagagagccaggcgggaagtgcacaaaggcacgaggccacgcccaggaggggcgggccctttggccggaagggggggggccggcgcgcggggccggtcgcctaggcaacgggctcgcgtggcgtccaggcttctcagaaagcccaaaatccgggagctttgggagggtagaggggcgacgcgggggagggcggtccggggagctgaatggcctcaggacgccggccgaccgggtgtctgcatactgtgggcggcctttccaagtgtggggagcggcctccgagaacggtgtccatgacacagggcgggaagagataaggcctagggaaggcgcccctcgggcctatccacctcttctggggctcggcactaggaagcagcttccctctcaggcccctttgtctccaagccgttccaaactgagtaccgggagacgacacaaagggagggcggtgacggatggcgcaggcgcgggagccgcctaggctgctgggagtggtggtccggccgcggaatgggtaggtctcccgcgcactctgcggccgcagctcaaaggacaccgagagggtgccagtgcgcatgcgccgccacttccgcccgtgcccggccctccccttccttccgcctcccggaggacttgggtttctagtagtaagagtccggggggcattactcacggtctccccgcctcctcttcatcgtgattgggctgtcaaagtgatgttggcaagtagattggctactgcggttgccagttctgtttcgggccctacttatactgctctgtggggcggggacgaagagtcaggggctgaggagcgagttgcggtagttgctgtgtaccatggtctcggaggtttctgtcccgcggcccgttaggtcctggtcgggttttcagcgaagcaggccgctcccctgcgtttcccagcgggcgtgctgtgccgcccaacaggctctgcctccaagtgccaaaaactcctagtaaagtttgcgcctcgcccgccgtccacaccccagcggccctgacgctgtcccctccgcgaccctcgcctctggaaaaagtgacaggcaaggccacgcccccgcgagggccggcctggagcccgcagcccccagggcctgggacggtgaggggcgtgaatgcggcggggggcggggccgttgccgggggagggggccggggcgcatgcgcgctgcgcagcggggctgaatgtttcccaagtgtttgaaactggtatttgggttttccacgttggacaagtgcggctcggcggccagcggagcgcgccccttcccgctgcccgctccgctcctctcttctacccagcccagtgggcgagtgggcagcggcggccgcggcgctgggccctctcccgccggtgtgtgcgcgctcgtacgcgcggcccccggcgccagccccgccgcctgagagggggcctgcgccgccggccggggcgtgcgcccgggagccaccgccaccgcggcccgcgccctcaggcgctggggtccccgcggacccggaggcggcggacgggctcggcagatgtagccgccgggccgaagcaggagccggcgggggggcgccgggagagcgagggctttgcattttgcagtgctattttttgaggggggcggggggtggaggaagcggaaagccgcgccgagtcgccggggacctccggggtgaaccatgttgagtcctgccaacggggagcagctccacctggtgaactatgtggaggactacctggactccatcgagtccctgcctttcgacttgcagagaaatgtctcgctgatgcgggagatcgacgcgaaataccaaggtacggccgggtgatggatgggcgggggcggccgcctccttcc

SEQ ID NO: 60098 - DNA, 1570 bp, Homo sapiens
ctgcagacctggccgccccgggtgtcagagagaggtggcgagttcgtgtccgccgggaattgttggctgttggggaaactttcctgcgaggtcagtcaaggctttgggggctctgttttgaatgtggatcaccactcggagtttactaatgtttacaaggctgcgcagtagggaaacggaagagttgggtgggggcaaaaaaaaaaattgaccgctatccccgaaagtactagacgcctctgccgggaaggcgcccctgcgcgttctatccgagacgtagcttcgcagcgaattttataggaacttcattagcatattatggaacgtcccgcctcagccccccagtagttggctgtgatgtccttcgtggaatgtccttatcattcccctgcggaacgattggtcgctgaggcggatgaaggcgggcctagcgcaataactggtatgggtctgtgtttccgctgtcttcttttttctttttcggggaggagcggggtggagggtggacgagttgatttgaacgtcttcgggtcgctcggcctccagccttggattggttcttctcgctgctggggcgggccgtgctcttccgccctgcggtgtggttggttctcctcctggcctccgccctccaaatcggcgattcccataggcggcggctctcggggtgcggggcgagtctcccgctggcctcctccccattggctggaggcctggcgggtgtcgcccctgcccctctccccgctcagcccggccactttcgggcgcggatttatagcagtagcagtgatcccgggcctgtgggctcggggccggggctgcagttcggaccgcctcccgcgacccgcggggccggctcggagacagtttcaggccgcatctctgctgacccgagggtggggccgcgcgtggccgtggaaacgtgagtgactggggctgcgtccacgagggggaccctcggcgcagaaacttttctggaaggtgctgtcctcgggccggacgggccccgtggggtgaccctggggctccggacggaaggaaggcaggggctgagaccactttgatcgttcgacgatagaaaaaagtagcgcggggcggggtgcagggttccagctgtccagacagcaaagttcatggagccactttgtcctcctgtcgttgctggggagagcctggcttgctgcttgcttcatgttcacctagggtgatgaactttttggcttcaggaaagatcacagtcctgcccccccgggagtactggagcggcgcagctgggagcgccgagaagcgagcgaatctgtcgcaagggtcacagctccttggacttcggtgtaaatgctgagctctgccgcgtagttctgaaagacttccacagacctactctgtaggaagtcaaacgtcttttgcttagtaggcatcagttgtatgttaattcataaacttggattataattagtttgtcgatttaaaatggtgtttgaggttgcttgaattatttttcaaacattatcataaaaatacccacccaccccctgggaagttcgcttcataaagaacttcagtgcaaccc

SEQ ID NO: 60099 - DNA, 878 bp, Homo sapiens
taacagaaaaaactgggagaattattaaataatctctgattcagaaaggacctttttaattctgacacaaaatctttaagccagaaaagaaaagattgagaaatttgatcaactccccacccctcaaactaagatattcctgaatggcaaacatcaccagaaacaaaattaaatgataataaattaggaaaaattcatgtacttcacatcaaaggaaaacggccaaaacagttaattgtgttgtgtgttttaaatattgattcctaaaaatcaatatttaaaaaggacagtaacttaatttaaaaagtacctgaaaactgtacacacatacataaccagttccttggtgctcaaactccttacaataagaacgcaaactaaaacaacactgaaatacaattttgtttgcttatcagattggcaaggaatagtacaaataaagtttgttcccacactgtatttgtaaagatggttggggcgggggggtggggggaaatgcgcagtttatctttgctgctggaactgtaaacaggtaaaatttccatggaaggttctttgacgacagctaacaaaatttaatacgcatgacgtcttcaacccagcaactctaggtgtttagcctatggatctaccccaagggtgcagaacgactcctgcacaagtgcactgagcacggtggtatttgtcaaagcaagataacggaaataatttaatgtctgttagtggggatggttcaacaaatatttgtactgccatacaataaaatgctatgaagccatttcaaagagtgaggatgcgctatatgtgctgaaatgaaacaatttccaatatagaaagttaaaaaaactaatgtgaagaagtaaaaagaaaaaaaaaag

SEQ ID NO: 60100 - DNA, 803 bp, Homo sapiens
aagctggttcccgcacagcagccgccctgggccccggcagacacgacagaatgggtttccttacacaaaccgcgcttggcagatgttgcctgaaagacaggaactccgaaattccaacagaacggccagcgggtggctctctgctctggcaggctgcaggctctcagggacgccatgtctccggaaggtcagcgtcaaatgctggtgagaactcactcactcctcacctccgtgacaggcacgtgtgttggctccaccagggtgcagaagccacacgagctgctttaacagaagacattcatgtaaagcacagctctcgggccgtggggctgttaaccaggagggtgcacagtgcatgcaccgcccaggttccggtcagttttgctcccacagtcatcaccctggagggcgtttcatgttgttgctgtgagaatttgccgttgcttgagtgagtcatgctgacgtggcccctactccagggtttccagtctttctgctcctagactgactcagcgctggtcattaggtgctgtccatcaaggggaacttgccctgggcatggaaaatgctgaccagctccctgttttggaaaatgacctcatccccaggctgcccacaggaggcggagcatgccaatgccgttccttactggtgtgtatattactgtttttgtccttttcatgcagcctgcggagtgtacctctatagctgtcatttcactcctgtgttttctcggccttgggcgaggatcccatgctgctggtaatgaaagctgcctgttccctcggttgttttcacagtcc

SEQ ID NO: 60101 - DNA, 4462 bp, Homo sapiens
ttagcactttcaggctttcagtaaacactcctgtgagatgaagagtacacagattcaaaacaccctcttcaaccaacttggacctgggagtaaaggctgatgtctatttattgcctttattaattcactgggtgaaaatgaaagtattaattagcgataagatgaacaggttgcaaatccaataaaaataaaacggatgaaaatcacttggcgtaccaaaaatcagctattcagggctcgctggctttaaacctgttacccttgggttcaatttagaaacttggatttggaattctggaaagatactgttcaatatggtataaaagctacaacagagattttaaacaactcgtttagtcctctggcaacaaacgagtcttaccaacggttaggggatcttgtgcaccactagcacatttctaagaacacgagcctgaaacctgtgtaagagggcagccgttagcagggctggggagaaagcctggacttcgcaagcggtagccctgagtcctggcctgatttctgtcctaacggcttcttctcagaagggaatgtttggacactggacaggggctttctaaggccccttccgtatctaagaccaaagagccctatgattcagacagctggaaacaatgaagtaactgcttcttgttacaacatttgatgaccaaggtaaagctactactcaaagtcccatggaagtagacttttgaaaagtgatttcagtcggtgttttttaaaaaactgtgataaaatacacattaaaaattaccattttaaagtaactattttaatccccagagacaagtggaggcaccactggattaaattttctaagtgaccatctgtaatgaggctttaagcattctacagatcgttgttcactgactatcacccagtattgtgtcgttctcaaccagggtagaaaggacagaatcctaaagtttagtgtaaaaataaaccacagcaagagacactctggagggaggaaatcctcagattactgactgcctcgggaaatctatttaaggctgcacgcagaagcgcagggaggaggctttattacttttgtttgttaagaaactcatttcccctgggcacctgttttctccagcaggtactacggttgcacaacttcagagacagtgccacaggaacctaacagcccttgaggactgattaacttgcttgtcccaccccgatcgtcaaaactccttttcatttcttttattgaaagaaaagtgacttttccactttaaaagaatcagaaactgctttccaaaagacacagctgctttgtgaatgtagcaccaggggcagcaaggtaaaccgcaacttcatcagctggtaacgacattaccagggccaggccttcttaaagtaacttatttcacattacctctcacatatttctgcaaaaccatttaaccccatctcatcacttacgagaaaaacactatacacatccctgaatttcagtgaattaagaaatattaattaaaaccagtcacttctgaaatgcacggtgaaatcttatttaagatttctgagagcaagtaccccaacgacttcacagatgaggaaacggtagctatccaaccttttaaaaccttaaagcagcactgtgttcccccagaattttcagtttaagaaaaaagaggggaacgtaaagcctccacgggaagagaattctgcttaatttaaccacttctgcagtaatttagatccaagataaacacagccgtcactaattttgctgaagcggggccagctacaagccttaaagcaaacccagaagctggagagccggcctccatcccacacagctgccggggccttccagtcccgccggggcgcttgctcctcggctgagctcgtccgcagcgcggccctcggctactggcgaggctgtgcggaaccagaaggtcgaccgcgcccgggcattccccgcgcgcctctgaccccagctcggctccccggaagccgcctgggcgacttcgcggcctaatacccggctctgcgaaatcgctcgcgcctccggcccggcctggagggccccgcaccatccgcgcgcgcgcgcgctcgcacaggatccggccaacaggcgccgggacccttggagcccgccttgttagaaacttgctacgcgcgccgccgcacatgcgccctaggcccctccggacgcaggcgccaccgacctcgcttccgccccgcgccccccggctgccccgccgcgactccgggccgcgagcgctgccgcacaggcgccctaggcccctcggggcacaggcgccgtcgatcccgcttccgccccgcgatcccggcacgccccacgtcccccgcacctcagacccgctttccccgactcccactggacagccggggaaaatggcgccttaaagcgttcgcacccaccttgccgaaatgcgcggcccagtgcacgggcgtccagccatagaaggagtcctcagaggccaggtgggcgtggggtgtctgctgcagcagcgagcagagcgtggccaggtccccgtcgcggcaggcgcggtgcagcgggaaacggagcgagagcagctcctcgctggagaagcccgcctctacgcccgcgcccgctcccgccgccgacatggtccgtcaccggagagcgcggggctcgctggcctagaggacgcgtcggggaggactcgagaagccgccgccgcagcacaaaggaacgagactagcgccgcggtcgcgtcccacaggctgccgagcggagcgcgcacagagggggcggggcggggcctggagcggccgggctgggggcggggcctggcccagaggacgccttgtgcagccgggcaggggtcggggcctggagccgcggacctctggagccgccgggcagggggcggggcttgagccggaggccgcctggagcagccgggcggagggcggggcttggagctgcggacgcctggagcggccggtaggtggcggggtctagcctagaggatgcctggagcagccgggtagggagcggagcctggaccagaggacgccagcagcagccgattaggaggcggggcatggggctgtcgacgtctggagcagccgggcattgggcttgggctagaggacgcctggggcggtgggcgcctggagtagccaggcagagggcggggcctggcttgggtccacgcctggggcggccgggggcggggcctggctggaattgacgcgtggagctccggtggagggggcggggcctggctgggccgctgcctacagcggcttccggggcttggaggtcacggggctcggaggtcacggggctcggaggtcacggggctggctgtgtggggggctcaggggcgtagagtggccaagcagcggtctgagcgggtcccggggcctccggcgcggtgggtctcggctgcgccccgggtgcggaccatgatgtttccagcctgggagccggtccgggcggggaatcccggctgccgggggcgcgggttgaggctctgcgggcccgcgcccagagcgggtgggagtcacgggtctcccggaggcccagtagcgcgcggtgaagttgtccagtaaaaatttatggagcgcctacggggagcagggattctcgttaaaatctgggaatcagcaagccctagttccttacagagcaggacagattcctcggttttgtccgagggacgccttcttcggaaccgagtgcggtgggctaggactatacgtttgcaagtttaagagataagcgagaagaccagacagagcaaacaataaaaggctttttgttgagaactgtataaatgtaagggagtaccaaatcccctattttgaatgacagtatcacggactttattacatatgtaattttattctgattatgaaagcatcagtaatttcactattgaggaataaccacaatgtttatgaatatttcctttgcttctaaatatgcggtctttttaaatcatgtattttatttcatttgtatatatagtttttcgctgtgtaaacttcctttttgcaaaattctacgtcacaaattgaacaaggcaattagatgtctagggaagtactgatgcacgagaaagcatattgcagcattggttaataaaacgaaaaaatagaaacctaagatttaacaaagggaagttgttaactagtggtgtaaacactcaacacagacatgtcttcatacagcaaacatttgttgagtacaatgctgaatgaaacacattgagaaacactctatagtggggaagtagcaaatatttcaattcagtgagcaattgctaatgaatggaaaatatgacacatagaatctatcttctcccagggagtttgtaatctgttagtgaagcaggaaagaataatcaagcaatacttttttgtttggaccaaaagggtgagaatagactataaactcatttcaggttttgtttactctagaacgtaatca

SEQ ID NO: 60102 - DNA, 586 bp, Homo sapiens
catgtgtcacctctgacttcagcctcacggtttaagatgaaccatgatgttcatcttaatgatgaatgctgtgtaatcatgatgttaaatatgagttataaatttctcttcaaagaattaatatgacagtatgttcaattctttgccttctacttttaaacttaacttccttgtaaagcaaccttttctgattatctactccaccctgactcattctccaccttgactcattctgattacctactccatcctgactcattctccaccctgactcattctgattacttactccaccctgactcattttccaccctgactcattccgattacctgctccaccctgactcattctccaccttgactcatttcataaccgtttttccctccaaacaactcaccctgtcactctctttaaattactcaatcagaattagtttagcctgtacggtctaaccctagccaataggggaatgacaaagcagtagggaccatgtgcataaggaaaaataacccctttccctcctttgtccaggtgtgcactcaccagtcctccatctgtaagggcatacccttctatagaagtacc

SEQ ID NO: 60103 - DNA, 1080 bp, Homo sapiens
cagagcgagtctccgtctcaaaaaaaaaaaaaaaaaaaaaaaaaaaaaaaaaaaaaaggagagaggaaaaaagcaaactgtgcctttaaaccagggcgaccttcattcccacaagaaggactccgccttggtccccttgggtgaaagctgccgctgctgagcgcctctgcggcccggtgagatcggggttcacaggctgacccagcgttaggaggtgccgggctgatcacgaccgccagagctgctgaggtcggagccccgaccctgggaacgcagcacggagcctggccgcgggccgtgaacaaagcggtgtgcaggggacccaggttcacagcgcaggtgcgcggctccccggcggctctgccgtcctagctcacgcggtcccggggcagctgctttgcgccgagccccagagacgtggcggcgggtcccgactgcgctgccgcccgtgagaggcaccggacctgccctccagggcggggaaagggaggactctgatcccatgagaacccagacagttccatgtccaaggaggcacccggaatgttctgaaacaaacctgcgattatgacagctccgtatcatgtactagacgaaattcttacagctccaacctctttttttacattttctattaaattttaataccggtttctcgcgcctatgagcaaaaagacaagtgttaaagctagcaatcgtttgtgcaatttcatcgattggttccaccgctgcacttgctgctggtgaccaatagggggtgttaattgttaattataatcaatattctgcccactgacaacagcaaatcctaaaagctcaagtttcaactcaattcttaaaacgaagatttaactagctccttgaatcttataggacttttatcactctcagtgcttccagttacaggttctagtctcaaaactagttgacctaaatgtcttcaaataaactttaaaggatatggatggagttttaagccaacttttaactgaaagtatagcatatatatagaaaagctcacaaatcataaatgttcagctggatatacattttttacaaaggctcacacatccatggggc

SEQ ID NO: 60104 - DNA, 2249 bp, Homo sapiens
tgtcaacgcttaatgtcttcacatgtaatttggaacataagttttcttacagttaaaataatccttagagcaaaaaacaaaataaagtttttcgtatgcctcaggcttcttaaaattttctagtaattggtactgtttctggtttccttagtttcttgccgtgggtaaggtccaaacaccttacatgtgttgctggtggccctcacaattctaccttggactaaagcactagggagtctgtaggcgccttcctgcgctcctccactgcggtggatccacaatttcttctcagctgacttactggttttcatgttaactatttcggttaatcattcatgaagcgcgtggcttatatttgggaaaacattgcaccttaatcccaacatgcataatttatgttgcttaattattttaagtcattgcattagaatagtaactgcgctctccatgagcctaggctagaaagaagggaaaaaatcccaggttctctcccaacgatcaggggttactcaagccgcccgagttctctggggcccctctgggccaggctgcgtccacttgggagaggccgaggacctggcgccaagaggcggcggtgtctgcgctaggggccgagcgggtgcgctgtgtctgcggggccaggccaaggacctggagcagggaggaggccgagcgcggagccgggccttgtcggctgcgtccgcggggctagggtagagaccgaagactggacaggaggaggcggcggtggccgcgcgcggggccaaccggtgggctccctctaccggaccgaggcccagcactgggccagaggaggtggcagctcgccggcaaagcagggtgggctgcgtccgcgggggcgaacacccgacgctatccgaagacgtcccgcgcgggccggcgggggcgcggtctgaggacgtcacttccggcgccggggctcacttcctggtgcgggaaggggcagagattggtgcagccccggaggaagaaaaaagggtgaggagaagcagcggctgagcgggttggcatctggggcagcgggctcgctccaggccgtcgggggccgctcgccagcgtcgcccgctgtgttgggagcgcgggccgtgggcgtcgctcggccttgtccgcggcgtccccgctgccggccacggcgctcagcgcttgtgctctgtattgcaggtctaccccgagccccggagcgagagcgagtgcctgagcaacatccgcgagttcctgcgcggctgcggggcttccctgcggctggaggtgagcgcgggcggccacgggccgagggaggggccgggaagacggggttgggcccggggtgggtgcttcgctccagccggacctcctgcctcctccgcgcccggatccgaccctccccggctgctcgagagtccgggatgtgtggaacggggcgttgcgggtttgggtaatggccgggaggtggcggcgcgcgggccacccccagggcagggtggagtctgcgtgtggaaccccagacattgctctcgttccagtgaggaagagtggttctggtcgctggtggtgcaggtgacacacattttcaacaaccgtttatcaggggtgtgaaccgatttcttggcacctgcctcagcatgaactctgcttttagagattgtcatctaagggctggcatctaggtctgggtcaggccttagaatcctcagcaggtgatcaggcaaagtcgtgcagaaataaaatgggccagccctccgcctgcttctcccagccgcactcctttctctgctttttcttcctgagaccagaaattcggtggtttttccgtaccctcaacacttaatgtccagagaattcacattaaccagtatgtgacgtttataaaacatgctgtcggggaacatactgggcggggtctcgattccctgttgtaaaatgttgtgtcactttactaaacattgtcttttcagtctttcagtggcagtttctgggaatttaactctttcattttattttgctattgcgattcttcctacacttggggtagcactttaaatacagaaatctagctttgcttttcttgggatctgcttaagtggttgcagtcagtcctgtacttaagtcctgccgtttatgttgccactttgtcactcttaaccttagttttcttatctgtaaactgagatgggcaatatcaagctcccagataagagtacagtcggccctccgtatccaaggttacccacccgtgtattcagccaacc

SEQ ID NO: 60105 - DNA, 986 bp, Homo sapiens
ttccccggtgaggggatgcctcaccctgcttcggctcacactcagtgcactgcactcactgtcctgcacccactgtctgacaagccccagtgagatgaacccggtacctcagctggaaatgcagaaatcacccatcttctgcattgctcacgctgggagctgtagactggagctgttcctatttggccatcttggaactgccccccctccccccacaaagaattattaacccaaaatgtcagtggtgccaaggttgagaaaccctgaaagcctgatcagttaggtcataacttttggcaggacgggtttgtaagtggtgaggtatttttctggcgctgggtgcatactatctgactgtctctgtgtattgcattcatttcttcccaatgcctagattcattaggggttacgaaatggtgatgttctgagtctgtctatactgtttcctttttgtgtctggaatacttccataaagaggatgctcctgctcctaaacctttggaatgttcccttaatcaatattgtacattcatgttacacctccaagactggttcttgtattcagaaacggtgtgagcatcctctgttggatcatctgttcctggtacagtttgggttagagccagggtcaccaaaattatgggaatacatggcattttctctttccttgccctccaggtgatttctaataatgatagggagatgaggtctacaatgtcagttatgtagcaataacatgcttaacaatgtaagataaaatagtgatgccacgcagtgaactgcaaggggatgtaccatcatggaagccagagtttgctgaagagatggagctggatgctgtgggaggcctgactcaggcagggtggggagtggtggtcttggaacctgcatctggtttggggagggagttgtcctggggttaaaagcatggattgtggaagtgactctggctggaatcccatcttttccgtgtcctggacccacag

SEQ ID NO: 60106 - DNA, 919 bp, Homo sapiens
agaggaaaaataattttgtatctgtgcctcagataataattccactcaacaagcaaagggttgataattaagtcaaaagggcactttctgaatgacaaggactctgctagagtctgggctggaagctctaacttcagaaatgccataataacagtttgctttcaagcgatgtatttgagctgtgtagagagcagcccttgttattgattaaatccatataaataaacacatctactgcttgtgtgagaccaaaacaagattaggttcaaaatatgatactgtgtacacatacacttggtcattaggagggaattctcaactctgtgcaaacagatgcagcccagagaggtttgctcacagcaaaacttccttctctctaaatcagtggttttaatgaagacttcgtgacggaactggcatttcaaaatgcaaagacatttaactctgacaaaaaaaaagtttatttagcttggaatggatttttttctgctttgaagagcttgtttttttctaaacattaaattattaatgaaagattgaaagcaataaatggggataataataaatgttacggtcgtggtgctgggtagaggaaaatttccagcgattctgtagggattttccttcattcctgagagccaggcatagatccagtaagcgtggttttgtgtaaacttcccacctggcattatgctgggacagaccgtgacgtgttcagtgatgttaaggagaatcaattcagtaacagagatacccagtgtatgatttgaatctattaaataaatgtcattcaaataccattatatatattaaaaaacacacttaacgttgatgagaaatccaggtatggtgttctaccagggtgaagtgattgaactgggaagtataccgctggagcagcattattaagtagtttcca

SEQ ID NO: 60107 - DNA, 1260 bp, Homo sapiens
ggtctttttctctgctttgcttctataagagatttaggaaggtcagtcctctttcctagttccctgttgactaagtttttttgaaggagcaaaccagtattaatcataagaaatgagcaagattaaatgaagtgtgacataatctggagaattagtactcactgttcaaaatgaactcatcctgttatgtttatgagatttttagtgatatattgagagggtagatttggtttgagagtggaatctacatgtatgcatgtgtgtatgtgtgcattcgtttctgtgtacatgtgtgtgtatgtttatatgcacgtgcatgtatgggtacacgtgtgtgtgtgtgtgtgtgtgtgtgtgtgtatggatgaaggaataacaaagaggaatccatgtctgggttacattggcatgtgaatcattgtttggagtccaccgtgcagggaagccccctgccctggcgatgtactcttacatgctgagacagtttgttgccaagtgctgtcatcatcttggcaggtagaatgtcctggcaaggctgagtggcctgcatgaggttaaggtgcaaggccagctcagcatggggatggccagccccgtctgctccaggcctatctgcagaggccttctgcccggccagcggtgtgacctctgctctgtgacattgcccatttggaagaacactgtctgcagacttgctagtctaaaggtagctaactgctgcctgctcaccagtggccaaatggagcttgttgagatgtggtgcccacataggtgccatgtgagctgctcctgcctccgagcagtgggatagacaaggggcaggctcagggcagacgcaggccttctggggaggggtggcggaagtcacgtgcttggaacatcagggaagttcctccgaaagcgtggggctggggagggcttcagtcaggggagagatgtgagtttgagcaacagaaagtgctagattcatgaaaaacaactgctcttttttctctggaacgtggatcagaattaagtcttcttctggtaaataacacatgtagaatttcatgatgaaatattttgggcagatatacaaaaaagaagacatcgtgttacaaatacccctgtccccatcacagagcttaacagggaagccgcaacagacccctctcgccacgcccaccctccctcccagaggtgagtgctgtgctgcgttggttgttttgaagactaatatgtagcataaatttgctacatattagtaaatattagtatata

SEQ ID NO: 60108 - DNA, 850 bp, Homo sapiens
ctgtcctcagagtatctttcaatacacactggaccttgtcaccccccatgctgtcctcagagtatctttcaacacactggaccttgtcgcccccacactgtcctcggagtatctttcaacacacactgtaccttgtcaccccccacgctgtcctcggagtatctttcaacacattggaccttgtcaccacccatgctgtccttggagtatctttcaatacacactggaccttgtcaccccccacactgtccttggtgtatctttcaatacacactggaccttgtcaccccccacgctgccctcggagtatctttcaacacactggaccttgtcacccccacgctgtccttggagtatctttcaacacattggaccttgtcaccccccatgctgtcctcagagtatctttcaacacactggaccttgtcacccgcatgctgccctcagtatctttcaacacactggactttgtcacccccacgctgcccttggagtatcttttgatacattgaaccctgttgccagcttgtttcaacttttcccctggttcctggaggccagtgtgaaaaataacactcgcaggttggcaaaaaggccctttaatatgtgaccacagtcaacgtttctgggccctttctccacggggtgcttttcaacactgtggataaattagaatcatccaggagtcttttcagccactgcagccccggccccagccctaccctgacccagaaccacaccctttctgagacagagcctgcctgttcctcctggtgcaggcacagggacagtctctgaggctgtcctcttctgtccacctcgaaagttccagtcctaatgtcagctcctc

SEQ ID NO: 60109 - DNA, 604 bp, Homo sapiens
ctgccactgcctcttgtagacagagcgtcagcagctgttattatggaatttgggatgttggcatatataggtttaggtttactgaccttaattttaaattgacacttgcaaagcccatttttggtagggacaattttcaatacatatacatttgtcacagctatggtttgggtaggaagcggggatgtgtccttcctgagtccccaacacataatgtacatcccttgggcgacgtcctgatatttaccataaactgtcaaggtgagtatgatatcacctttttctcccagttgaaactgaaacacagaagttaaatatttaccagctcagggtgaataaactctgagttcagctcctgcgtggtaccagccatgttgcagcattttctgactccttacttgtccttaacaaacatgacaatattctgctctgacaaggctaggaatacaaatgctttgtgtgggaaaaagttacactttaaattattcaggtagaaattatacagttgtgaattgcacatcgatttccattcctttctgacttgtcagtattttcaccaagtttattcgttagcaactttacccaaataagaacagcagctgga

SEQ ID NO: 60110 - DNA, 808 bp, Homo sapiens
ccttagatgccttccagccaaacatcatcaaagtcttgagaattgttcaggaacatttgggtcaaaacccagtcacaggtcccagcccagctgcaagggggttagggtgcagtagtatcctgtgtggggaagaggcatggatttggtggatgtcctgcctgtccttgccacacccaagagtgggccctattacccaagggcagttgggggataggaggtgcggggctttcctgggtgaggtgaggtcacagaatgtgggcgaggagagggcttcaaaaagggaggggcaggcagctcagaggtcaggacaagggcagatacacatccaggggttttcatggaaaaatcaatcttttgcaatttcaaactggacagtacctacgcaaagctaccctttcacatactgcatttgtttactctcccagcctggtgtggactaaacagagtcggttagaaaagtgttctgatgcagtcacagctttcaaggcctcagcttgcataattacaaggggcaggagctgaaatttcatctgtgcgacatcagctcaaaaggagccgagactggaagaaaccgggagctatgatttgcactttgataacttaagtgaaataaatcgatgattccaaatggaaaaaaatgaccaggtctatttctatagactttaaagattatccaggttagaaatttccgcaaatgggacaaagataaaatcagttgttcactagtacctattttaacacctataagacagtgtaaaaattggctttatcatgttaatatcttgctataaattttgacattagtatt

SEQ ID NO: 60111 - DNA, 890 bp, Homo sapiens
ataaaaaccatctccctctctccctctctcaacacatgcacacacacactcaaagaaaacaaaagacttcgttagcaggtctttgcaaagttcacagaatgccagcggggagatcctttccacacacaccgagtctttgtttccttaggtgcattctgtacaggggggcgggggtacgggcagaaagtaccagggagaagggctctggagcggcggatggagttgtcctaggctctcggaagcgagacacgttgtcgatttaaaaacaaatattgggtttccatttttttctgaacgggataaggcaatttcttttagattgtttaaactctccccgctagattgaagggggcggtgggtattatttctagatttagacgccgtacgggtgataatgcagcgactcccgtctgtggctgggagctgtggctgcacgagacccggaattcgaaaggctctgcctccccatggacggagacttccgttgttttctttcctttctctccgcagcggagagggctggagcggatttgggttcacatgaaagtgtgcagtgttaactaggtggcatatgggtggggggacattcctgcctgtccactgcagccggggggcgcgtctccatggagataagaagcgaaagtgctccgtggagcctaattggtatgcatccctggttcacgttcattgtgctcctgctaatgacagggttgtctcagtaataaggatggtgcactggagaaatttgctgccttggtatatttttccctggcagaaaactacttagagactgtagtcagtaagaagagtgactggcaggctcaagggctgcccgcagcatatgggggaaggctgctgctccgtgccacatgcatatgctgccattagac

SEQ ID NO: 60112 - DNA, 1401 bp, Homo sapiens
ccctatttgctttagggaaaggaacctggattaggtgggtccttgggaaattttcatacctgagattccaatttgacaggtgccggtgattaggcagcggtttccttgttagaagcaactttgaaggacggacactggatcctgaaacgttttcccctgtggctgcacgactcacctcccacagcacctgcagccatgtccacctggcacctgctccattccagggtgggagcagggcagcaggaggtcaagtctgagaatcactttacccagcaacacatctttagccaggggagaaatgcagagaaaacagccggtcaggtccatgaccattcgcaggtgaatgtctgtagctttgagtgctccctggcacggaggcaccctcaacaccagccagcgacctctttcacagcaccacactcatgtggattcaggggaaacagaaggtgctgttattttgctgcttgagaagggctgacgttttccttccaatcattagcccttcctggatagcacaagggaaatgtgcccacacatccctcaacagcagtgtgcgatgtgtgtaaatataatagcattaactggaatttgatctcaaatgaatgacgccatcaaggttgacataaggcgctcctgcctcatgtcagtcactgccccctgcaggtgtggggcacctgccaacaatgacctcagtcctgccgggccctgcggctgccaccacccactgtgtctgatgggaatgtcctagacggagcctccctcatggcacatcatccattgcctcgccccacatgtgccacagactgcattcggccccaaagaccacagagcaggacgaaagaccgccgctcctgccttccttgcctggccacagccagccaggggcttcagggccactgcgatggcggggctgggttccatcaggctctcctcgcaggccctgccattgctttctccatgcctcctttccccgtgcagacgagggcgaggtggggtccaggctcatgccctgcgtgcgcccacactgtcacattctggatgcaacctccgcacttccgcggggtatttctgagctcccatgaaaagatgggcacaggtgtgccttccttagctccacagggagatgggcccatgggctcacggactcagtggcagagctgggacttagccctggtgggctgactcaggcacctgtggtctgagctccttccccaaatacacacctgatccaaacatgtagacatataaccccagtcctcaccttcaccagcactccgtttaaacccctctgtgcagaagattctccaatgtccacagagtttaacttaattgcattgttcctgagtcagctgcacaaataaagtaaaagataaaatcaagttctgcagagctgaggcctgt

SEQ ID NO: 60113 - DNA, 1181 bp, Homo sapiens
cacagccaaaacgccttacttgaaatttttagcttaatgaaaggaaacatagttgtatggtaagtggtttgttttattgtattttaacgaaacatgtaataaacataactatgttttcattgttagaccaaaagaatcaatcatatatacatatctttctgggtgaatttttctctgacaagattagacagcagccacctagaatgcccttgacatgtgactttggcctccggctggaaaggagcattgctcctgcagaagttcaagggctccgtgagctttcccgagggctccccctactcctgagttcacgtcatttcctttcgcaactcctgggtctacctgcgtgaccaatttttgctaatcagttcacctctgaccagatcacttctggccaataactctacaagcgtcatcaaccccaaaattctctgcctgcttcacaatttccaccttccttctaccaacgtgctttgtattcgcttgtgtctaagcaaccctgaccaaaggccgtgtggttgtgacagtgacagccgagagctactgctgtccagggggaagggcatttgagtggaccacacttttgtaagtggtcagtccataagtaatcattttatgtgtgacagtatttacttcccttcacaatcttcaagtaacaaggactagggtaattgacgttacacagtgagaaatgcgtgcaacctagattgacaggatctgctcattcagaacctagattcagttgctgggagaggaaacagccagacatgagacactccctctagaattacagaacatgaaaggcaggtctagctgcagaagaacatgctccaaagggcagagggcatgagttctgttttccaaacgtcatcagatgaaattggaaatgctgggtcacacagattacagaggacaattttctttgtgtgggtttttgttattgttgtttaaatgcagaggttctcggagaccttttacacattaatacagagcgtttaaggagacatagtctgaacgttccccattaatttgaccacaaaatcttttgttggtggtatctcatgatgttccccagaaacttggaaatgctgaactagatacaaacacacaaaccagttggagagcacgtaaacatttgactgctgtgtctgaggccagaagatagtatctgcagcttcatt

SEQ ID NO: 60114 - DNA, 947 bp, Homo sapiens
cctgctggcccaggctcaggagccggctcagagccagaagggaaaaacccacaaccctcagggacagaaagccaggacaccaggagaagagagaggatccccctggacgctgcaaagacctctagtggcccctgaggtcccatgaccgtagccaggccaatcagagctgcccaggaaggccctgcctggccctgtccctcccacctggctgcatcggcctctccagaactcactgaggaagattggaggaaggaggcccccagggacagtcaggactgccagatcagcacgtggccccacaagccaccagaacggagcctggacacagagccagcaggctgggcagccacccagtccccagggcactgagctgggcctgcatctggacacctggagggtgtgagctgggccttaataagggaggctgccccctctgccttcatagaaggctggttgttccaggtttcttaattacttggctacaaatctcccctctagagaaaaaggctagaatgggcactaaggcttcagtgcaaccacaaatattgatttttcgagggccaatgcaaataccaggcaagagcaagcccttcaccggggcggtcactggcctgccctctctggccagggacaggggctccgccaggagcagcatgatgtgccatgcggagcactctcgagcacgcccatcatgcttctgtctttccacaaacccgggggttgccagcttgttgtaggagaggaggagtgctttttcatttctttctcccttcccctccttttttttttctttttgtgaaaaatggaattttaaaacagccagcaactaaggcaaactcccaggataacagtcttaacaatttacataatgcaagcgttgaagaggaggacgtaaagcaggccttttaagtcgcgtgacacagtttaaaacagtgaaccctggctgg

SEQ ID NO: 60115 - DNA, 788 bp, Homo sapiens
atacacgtttgctaaccataacatttttaaaaaaacataaatatagatagatctatattgaaacttaaaatgtctgttcaagaaaggacaacacaaagaaagttaaaatcttgctagaaattgaaagatatgtggaatatatgtaaccaacaaaagaccggtatataaaatacataagtaacccctacaaatcaataacaaccctccaaaaagtggaaaacacttgaaccagaaattcaaaaataaaaagttcaagtggccagtgaatatataaaaacatgtccaaccgcattagtatttaataagtaaaaattaaagccacaatgagataccatcatgcagtagccagattagcaaaacttttaaagcctggcaatgccgaatgttccaggatgctgcgcactggtaactttcaggaactggtggtaggaatgtaacttggcactttgtaaaatagcttggcactgtgcagtaaagttgacgatatcctatgacctagcaattctacccatgggtatttaccctagaaaaactcttgcgtatatgcccaagaaatgttcacactgcaacacttgtaacaggcaaacattgccaataatccaaatatccattaacagtagaatggctgaagaagttatggtatgataaaaaaaaaaacagaatagtacatatcaatgagtgaatgtcagttatagctgacatgatatcaatgtgataccttcaaattataggtatcagtatgacctcacttataaaatatgaaggatggcactaacataaaattcaag

SEQ ID NO: 60116 - DNA, 951 bp, Homo sapiens
gaaaaactcggagttataagaaaggaaataataaagatgagagcagaaatccatgagatataaagcagaaaacaatacagaaaaatcaatgacaacaagagccactgctttgagatgaggaaaagtgattaatctgtatccaggccaatcaaggagaaaagtcacaatttactaataccagaaatgaggttacagtaatgccattacagtttctatagatattaaatgaataagaaaataccacaaacaacactctgcccattgatttgacaacttagatgaaatggaccaattccctgaaagatacagctaccataattcacgaacaattcagaaccatttgagcaacaaaataaaggattggactataacgcaaaatagacaataaatctccatacgtccacaatgagataacaaatgcttgaatcaatacacgggggaaagacaccgtctcccatgtagaatttcaaataatgtatgtagatattctactctcaagaagctcctggcccttcaagttggggctgcgcaatggtcccctcctaaagagaacaataggaaaaggaggagaaaagcagcgagtctgcagtggagaaaacacgacctcagccaggcaggggtcaaggtcaacaccaacagtgaagtcatgctttacaacatgtgatgagaatggcactttgccctggtctttctcccaaaaacctatactctccagtctaatcatgagaaaaatatcagacaaaacccaactgaaggatattctatagaatatcctcaaaattgttggtgtcatcaaaaacaaaaatctgagaaatgtcaaaacttaaaggggcctaaggagataaaacaaccaaatgtaatgtggtgtcctggatggaatctgggaagggagaaaggtcatgttgaaaaagcaccatctggccgggtgcggtggctcacgcctggagtccc

SEQ ID NO: 60117 - DNA, 1973 bp, Homo sapiens
tataggattagttttgcttattagtaacaatattcgccatgtgaactttcccagaatagttttatatcaaatccaaccttcaaccctttaaacagtaggaaaacacggcagttacagtcgttaacaccctcttcccataatactcaagcctgttaaactttcctaacgaaaagggacgatgatgtgacactccagcaccccgcatccacctccgcggcgcagccgctctctccaccccacaggatgaacccaaaggcgcgcagaggcgccctcccacggcgcgtgacaccagagaagggggataaattggcgagctggcattcctcccgtcctcactgacggacccgcgagcggagtgagcggtgactcagcccgctccggctcggctccgccctcccgcctcccgccccggcgttctcgccccggccttggcctctccactccctccgccccggtcctggcccccagccctccgctgtcctccccggctccctgaccctcgaaccccagccctccgctccctcgtccgggccccacgtcctcggcccgtcccccagccctctgcccggccctgcatcctcgttcctccagccccggaacgtattagggctgcacgcgcagggagcagcccccgggacgggtctgcgggcttcgcgtcgcccggccactctaccttcgctcctgcccaggatcctgcagcacaggttctgcagcagaacgttcggcgacttctggtccggggtcgccatcctcgcccggagccgtgcacggtggtccgggcagagccgccactgccgccgcacgcgcagggaccgcggcccgcgcccttcctgcgccccgcaagctccctgctcctgacaggctaaggcgcgggcgccgccggccaccagggcgccattttaacggaacccgccgaaagcgcgggcgcttcccacaatgccccgcttcttccctgcgccgcggccgcgcgtgcggctgcctaagcgttcccggccctgtctggtgcattccccctgctgctgcccggtcggccgagaaagttccgggcgacaggtggcccgaggccctcgagctgcgcggacagagcggccccggagtcgcgagcgtgacgggcttgcttggagggcacttggtggccggtagcaccataaaggccataatttggtgtgtgggtgtgggggtgtgtgtgttaacggcattggtttgattcacacttctgatgaaagaagcctgtttaaaaaagaaaagaaaaaagaagcctgtttaaagggtgcagggtgttacgattgttaacgtgcagtgggcagttcacctgctacgctatccaacaggcgccctgctcaggcccgacctcgcactgccgcgcgggccggtcccccccggcccgggtaactgggacgtcctgggaaaataaattaatcacgtacggagtgagagaacaggaaacctgccgagaaaaagatcgataagcagacaattacaccaagccaacttcagtgcaatcgttaaagcttacacatgggtgcacgcttgggagccgtgagctaccatgttaaaaggccaacttcctaaggaaaaatgatggaaagagatcccgagatcctatgaaatggaagagggaggacaacccagctatcccaacatcccagctgaggccagccacacacgtgactgtctgcaaagcccgtcgggcctgggtccagctcaggttgcagaattgttggcaagtaaaacgtttgttgtcgttctgactcaaaaacatggagacaaagcagacttgtagggtattacagtcaacaactagaccctacagctaaaggactgtctccttgcatgatgcaacaaccatcacagctctgcaagagcaaccaaaccaccaaggatgcgatcacccctcactgccttcgatacgcattctgtggaaacgcttctaaacttgcatcacactcaacacgatcagttagtaactggct

SEQ ID NO: 60118 - DNA, 1624 bp, Homo sapiens
ccttgaggaagagctagagatgaggcatctttcctcacggaacagccgacacagatattacagcctggctttgggcttcaggagacgggctcagagacatcaagtgctctgcccaagatcacacagcagtgagtggctgagcagaggccagacccctcccgcagccactttgtaatggcggctacaatcaccgagacgggctgaatttcaaagcctctatttaaacaatgatgagctacaaaatgcattcttacttcttaggttaacactttactcataaattaggagattaaaaagtcgatataaaatgtataaaaaatcttcaccagatgacttccaccgtgtcaggaagctgctatttctgttacgttttactgttctcttccccaaatccctggcgtgttgcctggaaattcgcgattttctgtaactcttcttctagctccgaggatttcgtttgaaattcctgccgcagtcggaaacattttggaagaccgcatttgagcatttgatgcagaaaaaacacactcccggttaccagcaagatcgctgtggggaatgaggcactcgagaaaatctacatttggctctgaattttctcaacttctttccttcctctagggaaacagaagcgcggaaaggcgccctctccttccctcagtctgaggctcttgcccgccaggcccttcccgactccgcccaggccacgggctgccccacccacaccggccgcctgaggggaagcggcggcaccgcccgcgcgggtccggccctgaggcggcctggtgctgccccctgccgtccagcgggaatcgcaaccgatttcagagacgaaatctaagagtaactgtcagatgattaggagggttctcccagttctacaaatgagtctatttgatcgtggtccacaatctttgcctgactgaaaaaggcggttttcagaatgcggaggagctcgttccaccctgcacgagcaagagaacgttggaggctgcaaggtgccctgcaaagcccttcagaaagtcctggtgaaatcccagtgccagagacgactccgagcgagatactgctttggacttccgtgttccaatcctcaaagtagatttcacttgcaggattttgagaggtttaaaaaatacctggcaggcatgtaaaaatggcagcagtaaaagagggtatggaatttttatttgtagatttcaatatatgaactttttcaagattacatgaataagatcaatagagagattcactttagcatactgagtctgtttttaaatgaaccttaatttagcattatacatatgtcaggattgcattattttatatattaaaactaatccaagattaatgggaaaatagagaatctaaatttatccaattatttcaatagtagtacttaataaagctccggctgtagagatttattgattcggcaaacagagatggtctcatctccacagcacaagaaaccctgtgcatcacaaatgagtttcacgggtttaaagtaaaatttctagtagctgttttttaaaagtgtaaaattaattaattaagattgttttatcttgtatcttactttgcaaccagtaacattgtggcttcagagccacaagtcctaaat

SEQ ID NO: 60119 - DNA, 671 bp, Homo sapiens
gttggtggcgtgagccaccatacctgacctagaaaaataatttactctttaaatttgattggattttaacaaaagtatgttcatgcctcctcaatacatcttctatgagaactgcatacagacattcacctgttcacaagaaactttagtaaattatttaaatgttactgtgccctccctggattggactttggaatttgcctttcattaacacactacagtctgacatggggctaaaatataaacactgtctctattttaaaataagtgatcctacttaaaattagcaaaatggaaccctgttaggctgtgaaatgaagtgcccagttggacgtcaagcaagtgcggcctccccattgcctgaccatccaccagtctccctggagtggtggctgctgcatctgaccctgactcagatgttagttgactccagagtgtccggagtttgccagcttcctgtgtagagccagagtgagacgggcaggcagccaggaacgcacctgcaacagatgcccattggatggagtttctctcccggcttccctgccctgctcccggagtctcccaggtcctaggccctcactgcctgaggccacagccctgagtatgcatcagcttttcctccctgagctgtgccagagccctgagcccacctcgtacccccaggatcc

SEQ ID NO: 60120 - DNA, 2759 bp, Homo sapiens
gagaagttctgttcgtagagcctagaggagttgtgcaatggaaagggcacccaggaagaatcgtagccacagagtgaaaccaacactggtgggtgtggggccaggccaggaaggagaggggaagaggcccctgcctccctcctacccggtctgcagcaggttgtccctgtgggtgaagatccactgagggggaccgccagcttcctgagcacagggcaggccagagcaggacaggctgggatggaaaatgaagaatcagtgctttagccgacaacaaatgggagccgtttactgtttagtcactatgattagtgttcactagtactcatttctcttcgtctaaaaagtggccaacaccatctcttttccacaagcactcgggagaacattcatattcaattgccttcctaagacccagacggggcagcgctctccacaggccaccaaaaggtgttgcctgtttggtttcatcagtgattatctgtggcagcaagacaggaagttggaaatcaagtacctcaattaagtcaaggctgaccgtggaattagagaacaagtgtttgttaccccggccaggtcaccctagggaaaacaggcattctccgggattgaaatggtggtgtttgtgtggtaaatagttctcagtccagttcaaagccagcagcattaaggacacgccaccgccaccgggagctggagaccaggcgaagctgagctcctctgtggttcaccaacccctcaggccgcctaagtgtcttctgctgtcgcagctttggggacagaggggtttcggaaacaggggcctcttgtctgcaccctcccctcccactgacaggctggcagcccagggcagccacctgaggagcgtccctgtgtctctccatctgcagagcaggaaaagcctgcgggtcggtggcgccacgctggggcgagacccagcttcggctcaggagatctcccacccagccggactcccgctctctgcccgcggccccctcccacactcccacctcgccccgcgatctcactgccccatcgaggcttccgggcggaggagaaaagttttccggcaggaacccgggaaggaagccctgggaccctggctgaaactccgggtttccccagtgccgagtcccttccccgccgcgcccagcgcctgcgccccgggaggcggaagcaacaggggggttcctccccgcggcctctgacctctgccctctgccctctgcccccagggtctggggcccgggcggaggcgcgagggggcagggccggcgcgcgggtgcgagcgcgggtgtgggcgcggggccggcgggggctgcggccgcggggcgcatgctcacttgcgccggtgacgtgcgcgcccggagcaggggcaggagccagcggggcccggaggctccagagggcggcgggcaggggaggaggagactcgggaggagcagagcgcaggctccgccgcggccggggtgctccagccgagcccaaccgagcgggcggaccgacggggagagagaaggcgccagagcgcgcgcgcgcggccccgagcagcagccttgccgccagtggagcagctgccgacgcgcggggccgcggacccagcattcgccggccgggccgggcatgagcgcggaggggccgcggccgccccctgcaccgcccggcgcgccgaggccgtgaccggagcggggggcgcggccgcactagtaccccggagcccatgggcgcgccgagccgggcgcgggggcgctgaacggcggagcgggagcggccggaggagccatggactgcagcctcgtgcggacgctcgtgcacagatacgtgagtgctcccggcgcgggctgggggacccggggaccagacagacgcgggccggccccgcagcccggaccctgtggccggtccagccccggggtcccgggaggtctccgatgtctgggactcggaccgcccccggggacgagcgggatgctggggaggggcctcggagttgacaccctggggcttccgacggggtctaggtgggcacagcgcggggccccagccccgggcggccacctgctccctggccgcggccgcctggcgcccccttcccgcccgcagcgccctgggggtccctcggagaggctggctggggttcgagctgtcccggcggaccgggcgcccggagggagccaacttcgaccccgccggggcccgggtctggggaggaaccttcagatgcggcttccgcgcagccgtgtctgtaagattaagggattgggaggaagcgttacacttctgcagaaaaaggtagcaattgtgtttgttctttaacacccctgggggattcagaagcggagtttggaatctttttattttttaccttaaagtaaccaattagatcagaagtccggggtcttcttgggttcctctggaatttgccccttcagtgataagcaagtgaagagctcaggagggaagactcggaaggggaaaagttgattttgttttacaccagaggaggggaaaccggaatccctggcgttaggtgtaaaaaggggtgtgtggccgggcgcggtggctcacgcctgtaatcccagcacttttggaggccgaggcgggcggatcacgaggtcaggagtttgagaccagccggaccgacatggtgaaaccccgtctctgctaaaaaatacgaaaattagccgggcgtggtggtaggcgcctgggatcccagctactcaggaggctgaggcaggagaatcgcttgaacccgggag

SEQ ID NO: 60121 - DNA, 1036 bp, Homo sapiens
tgtgccacgacgcccggccagttttttttttttttttttttttttttagtagagatggggtttcaccatattggccaggctggtctcgaactcctgacctcagatgatccgcccacctctgcttcccaaagtgctgggattgcaggtatgtgccaccacgcccagccctgaaactactttcattttaaaacgatgagttcctaagaactagactctgatccctggaaacaacatgccaacctctggcatgcaggacctttgctttccaggcaggcatttcccaattttgttagattctcaagggagcccctgcccctgctaaagttaagactcctgtgctgggacaggcaggctcctctgatgtggctgcacgggcgcactcagcagcctcgatacaatttgaacttcttgctgacatttgaacacagaggacggcacatacatccccacatttccccacttttttggaagtctcgtgactcctggcctgctggtttcccgaggaccgcttctgctggagcgatggccacttggggagggtcggtgctctccactggcctgagttgctgggcccatcactgctgcgtcgaagcctgagaccaccccacccggtcccaaggaggacacaggcttttctggtttggttgagacttgcagagcctaaagaaaactgctgagttgtttttgcgagttacctaatggtgctttagctgctgcatgcttttgtcccatggtgcgtttgtttgtaattcaccacagctgtaattgcagcagagccagagagctttctccttattacatatcctgagaaggaagccctggcagcccgacctgagagagggtgatgtggctcactcatgcagggatgctgggacatcaggctgggagtcaagagatggaattttaggctttctctgccaccttttacctttgtaactagggttgatgtgtgaaccctttgggcagattaatcattagttgcctctttaaaccaatcttttatttatttatctttatttatttatttttgagacaa

SEQ ID NO: 60122 - DNA, 1634 bp, Homo sapiens
tgggaggatcagatcccctgagcccaggagttcgaagccaacctgggcaacatagcaagaccctgtctctgatacatacgtaaataaaataaaagttaaaactcaaaggggaggaacctgagatccaattttaaatccacctgatgagaaaaaaaaaaaagcagcccagggacgtcaccgtaaacaggcaccgcatccaccaggggtcaggagtcaggtcagggctctggactgggaggggcactgcagggacatcccgtcagcgggcaccgtgcgttgagccaggggtcagggctttggaccgggcaagactctgttttgcttccattttttaagcctctggaagtcctggctgttcagaattccaggcttgaattgctagtgttcccgggactgggaaacagcccggatgtgtggagtaagaggcagctcttggattgctgtgaacgtaggggagcaaggctccacgccctctcccagcctctctgccttctgaatacagcccaggagcctggatgactcactttctggagcacatagataaggagcgggtggaggggagaggccttagttaattaacattcctaggaatctgaggctccttctcccagccctgttgtctgggtagcaacgtgctgaacccagagtgagaacagctggctgcagtgtcaggggcaggaccttttgtcgatgagtttaaaaaacaaagcagaagctgccaggtgcctccttcgcatgttggctcccacgtgttttccccgttctccctccccaccctgagtgacacacgctatgctgcttgaaaatagcacagatgcattttgcttcacggtgaaatgtggccggtagttccccaggagtaaacaatgtggtggtgcccacgggggaagagcagcttaattatgcacccagccccgcatacaaaacgctccctccatggttagaatttgctggggctaagggagtcagggctggttttctccagcagccttggagctaggtggtgtcatttaaatggccctcaaagccctacctggatgtcttcattgtgccacaccagcctttatccaagctcactgggccccacagtgtggctgatagtgagggtctgggggtgggggatcgtgaggtgagggacagcaaccccgtcctgtccttgtctaggcctctgagacaggcccgaaggacaggcttttctctctactgtgggtgatggtcccggctggtcagctagcgtccacagcccctcgactccctgcgcagagcccctctcactggaccggcgtcagtgccccacagagactggaaacctgtttccaaggtgtggctctatggccggaccacagtcggtgaggtgagggccagttccagccagggtgccacctctgccttttcttatgtccactggaaaaaataaagagggtgtttgtcatcccctgtcttttgggactcggggttcagtgcaggccaggggaggttgtgtctctggtgtttgctgaacacaaagcgtatgaaagtggtaacacctcggaggtgagggctttctttttatagcagccatgctggaactcagtgtctgaggagacctagagtatttgtttgaatgtttgaaagagacgtatctggttaatgtg

SEQ ID NO: 60123 - DNA, 897 bp, Homo sapiens
gacagttggttgaaagacttatcagtagaaaggaatgtctgggttggggtaaagaggttgtggagacagggctttatcagggtagcgagtttcagggagaatgaatagattgtaaatgtttctcagtggacttcaggtctgtgccagcgtttgtgctggtcagcctttcctgaattccaaaaggaaggagggggtgaggaggcatccgagtcccatcagggccggaagcaggttttcaggataactttggagtgcccttggcggagaggagggctccattcagatgggtgagggcccttcaaatttacttttggtttacatacgtaaaatactttagaaagatttattctgagacaatatgagtggccgtggcttggaaaaacacaaacctgagaaccatcgaggaagtggtccaaggtggtggggctggttggatgttacacatttcagggaggcaggagtcataggaaagacgtaaatcaatgagtggaaggtcgacgtggctcagccggaaaggcaggatgacttgaagtaaagtaggcggattcagaaatgctttacttttttctttttaagtattttttttcagagattctttaatttgcagttgattaaaggagtaaggttctatctaaaacttggagtcaacagaaaggaatgtttaagataaggaggccctgtcagagtcagccacagggtcaaagagccctgtttagcaggtctgacgcccgcaggcgggacttaaccctcatctgtaatggcactgggccctgtttataatttggcatcttagtgccacagagtctggttttttttcttcgatcctgtgagcgtgggttgaggtaaagaggttgtggagaccagggctttatcacgcagatgatgtcttattggtgt

SEQ ID NO: 60124 - DNA, 1200 bp, Homo sapiens
ggtggggtcttttatagtttttttgttttgttttgtttgttttgcaaacaacttctgctgcactgttaggtaccaaagtgaggccgcgctgacaggggccagcgtcctgtaccgcgacccacagaccagcggctccttacccactccagtactgaggagtgaggtgggttcttgtccctttttaccctaggacctaaacatgggaaaccctagcccttctgatacgtaacaggggcagccctgatttctgctgctaacctagttaactggtaatctgtctgctctttggcatgctgggagctctgtgtgcactaacccgtggaccccaggacgctctgggacggctgcacagatgagaacacaggccagaagggtttgttagtgacttctctgatgtcacaggctggtcagctcagctgggccacattccagcggccccagccctgtcccacgtgccccagctttctcctgggaagctgcagggaagggtccagctagggcgatcccagctagggcgatcccagctgggtccctgtggggcttcagagtggacacaacttccctgccagctggctcggatccaggggggcaggtgggaccccgttttacatgtgagcccaaggaagtgaggcctgggccccagaagacctccgacccgtccccttgtccagccctctcccctctggaaggggccgagggtgaccccaggtggcaggaactgcacccattaggcacgaccccgccccgctgcccgccccggtcacacctccccctgtcgccccctcccccgcctcgggcacggcggggaggagggggaagagggggatgggtgaggagagcaatgggtgggagagggggagagggggagaggggcaggctgttcccatcgccccgcctcgccgcccttccccctccgctctgggctctggcccccgccccgcccccgcccccgggcccctctccgcccctccccctccggcccgcccccgccccgccccgccccttctctctccccgcccagtgtcggcgcagccctgggaggaggcgtcaggacgcgcggacacctgcggggcgcggagctcggcggacgcgggagggcagcaccacgggcggcaggtgcgcgcggggcgggggcctggagggggcgcgggggtgacgggagggggcgcggggcggagccgggcaggaagcgtcgcggtc

SEQ ID NO: 60125 - DNA, 674 bp, Homo sapiens
taattagctcgatttagcctttccactgtgcatacatacttcagaccatcatgtagtgtgctataaatacagtttttgtcaatttaaaagaaaaaagatgctaaatcacacttacagagaaatatgaattaaaagcacactggcatactgcctcttgctaatcagaagtttagctggagaagtggggagggctgaactctcccgtggcatggctgcggcaaatggcatgacctcatcatgtgaacttggcagtatctagcgaggtcatagacacgtttgccctttgaccagcaattccacttctaggaatctgtcccaaaagtactctggcagaaatagagttatttgcaattttttaatagtcttctagtcttgatgttgaactggaagcatctgtataagtccagtgtcttttatcgtaaaatacatggtttctagacctgtccatggaaaaaactgaacacagagagcccagttgtggtctcctcatgtcattcccactgagaagatctggaggtctttggataaatgaccgggtctggggaaaaatgtttccaacgagcctacaacatcttgttctaccagcaagtgcaagactaaaaggtaatgaatgactctttataaaacatcaacacaatacagtcaattccacagcctctgatcaggaagctgct

SEQ ID NO: 60126 - DNA, 820 bp, Homo sapiens
tggtcttggcacggggaaaggaccatatgttttttaaaaacagtctccagcagctctgacgcttccctgcaggggagagggatgtgcgtgctcctcagaccctccttgagaggacttcccggccgagggccttttctggccacatacatggatggaggtctgcgcctcctcccagctgacagtctgtggcatctgcagtggggctgtctgtggctggcacctgtggacacagaaccaggagacacaagccagcctttactggagcatgttagagccaggacgtgcctctcacctgagctactcagcgtgcagatgacaaacagaggttcagagtcctcctggctgtgtcttctggggcctcccagcggggagggagtggcactcggtgtttccacatccctttctcctgcctgcacagggagctccagctgttggctcattttgccttttcctgccatggagaaatcagggacttacctgatcagttttatattggttccataaatggccactgggtctccctcttcaaaggggtgtttgctctttattcctggattcgtggttgtccttaatgtgaatctctttccccgattcctgcgcggctgcagcaacgctgcggtttgttcaacttcgtggctgcaggacgctgtcagcagtttggtcttcttggcacactgccacttataggccaggaaatgggataaagccatttatcttttatcgggatgggagcctgccctttccgccttctcttaaatgcattagtaaaaccacttgggaaaaacaacagggagttcatttgaaactcatttccaggtta

SEQ ID NO: 60127 - DNA, 1612 bp, Homo sapiens
ctcaaatgatcctcctgcttctgcctcagcttctgcctcggcctccggagtagctgggactacaggcctgaaatactgtttctttaaggaagggcatgttacctataataccaaaccacaaaaggatagctgcggttttgggcgaggagagctcagagagtttcttgcatatggccctgtgatggcggccatggccctgcatagacacgagctggaatctgcaggtggcagccaggacgctgcgtgtgtcgagtgcacagtgtggcttggtgccaaccatggcgagggtggagagccccgtgcctgcagcgcgcgcttccctcactgggtcctgcgtccttgggcaggcgatgcccctgcggggaggggctggtccatccccggccagccacggacccacgcatggacccagcgacccacggacctgcttacctgggcgcggcgcgggtggcatgcggccacacggaaggggcgcgctgggctgctgcggcctctgcagcttctacacctgccacggggcggccggaggtaaagggaggcggcggccaggcgcggccccgcggaggcagctgcactcgctcggtccactcgcggcttcgcggctgcccgcaaaccaggagggcgtggagacccggaaccggggggaagggcgggggcacttgtgcggcacccgcggggctcccaggggacctcggcggtgacacgaatttctaggtgaccttggcggtgacacgaatttctaggtgacctgtgtgatacactaggtgacctagtgacacaggtgacacttccaggtgaccgcggcggtgacccgcggggctcccaggtgacctcgttggtgagccccggggctccccgacgaccgcggcggtgacacgcggggctcccaggtgaccccggcggtgcactcacaggactcccaggtgacccgcggtggtgacacaccggggcgggcgcgcgccgcttccgcttccgccgagccgccccccgccccccgcggcgcagcgcgcgcccccctcccggtggcgcggaaccaatcctgggcagggaggcggcggctggaggctgaaagcgctgccgtggccccctccccgcctccgccgcgccccctccgcactcgcacggccccacccgcaggcgccccccgtgcggaggaagcggatctgccaggatcatttttgttgtgtcggaggatgaggttttggctgaggactgaagagatggccttggaagaaatggtgcagagattaaatgcggtttccaagcacacgggtaggaggagctgctggccgtcagtgatctgtgcttaagcttgacatcatgggctgaaatgtggggaaatgcgtctgatttttgtaagccgccctcgtgttcctttctagccgtggtagctgtgacatggggggcactggttggcagctggtgtgttttcagaggctgtcggcgatcgtatgctgcccgggatagtcaaaatgactgcacgttggtgacactggctctctcagggttgctgggtctgcatgcggagccatttgtgtgtctgaagtctgcccatcaacctgcctgtccgcagccctcgcaatggagaatgcattgcgaatggagaatgatc

SEQ ID NO: 60128 - DNA, 1368 bp, Homo sapiens
tgagccattgcgcccggcctagaaattctcttcataaaacgtgtttgagattggcacaggaagtttcaaacagaatcaggattcaccataagaagcagataaatacatttgaggcacccagggtgagtgatctcagcggaattcccctttaagcttcctagtagcgcgtgcaaaaaggaaaacgtgtggatctaagactgtgcacaaacaaaagctgttcttctgggaggaaccaatccctcagcaatcacacttgactccctcgaaggaaagctggaaggggagagggcgtcaggatgcaggtcccggtgtctctgtgcagctcatcctccttcagaggccgctctgcttctgtccatccctccaattgccagtggtgtcagcatttggggccgtgatcagatggaggaagactggcaagcagtcacccccgacaggactctctggctcagcctccccaggaatatgctgctccccaggcacagcggaagacctgctgcgtttcatcttccggctgcctgtttaaagcaagggaggccatgcccccagcggggtcccttgtgcctggacccaaggcaagaatagctcaggcttgttcctttttcctcaagttcctctcgggcgggcacggtgtgtcgcctggacctgcatgtaaacatcagggcggagcaggaatcggcctccaggagggtaattgcctggcgtactctgtcccaggtagtgggtgaaatgaaagtaaaaagccagctggtccctcatgcagattttaggggacaaagttcagcatagaaaggtcctgttacaaggagagggttgtggcgagcccagggcagcgcgcgtcctccccggcagctgatcctcgccatgggggacggaaaggctgtccggatttccgtggcggaaatgaaaagctactacctgtattctgagtggtgctcctggctgctgtccgtggctgagggtgagtctcctcgtcccctgtgagtccctcgcaggtggtgtgctcggagcagtcgaggcggcctctgggtgaggcagcatggaggtgccctctgtggatgccccgtgctccacagggcagtctgtgtcccctgtggaatttgcagtagctcagggagtggggatgagaagcaaatgagcttttcaccctaaagttatcatctgatcctaatttatgtcacagttaccaaaagcaaataacctccttttgtctggcaagcctgagcctcacaaactgtgcaaacagctgggggctcagcctgcaccaggctgccccgcgtcttgagagctctgatgtcccggggccatggctgcaggtgcaggacagagacaaggccgtgaccgaacactttgctggtccccttgacc

SEQ ID NO: 60129 - DNA, 1430 bp, Homo sapiens
ccagcctggcaacagagcaagactctgtctcaaacaaacaaaacaaaacaaacaaaaagacgtaagatgtggaccgctggagaatgggggtgctgcctgcagtcaaaacggagtgggggtgcccagctcagggccagaatgatcctattcccggcacttctcagtgaggctctgtggctcacctaagaaaccagcctcccttgcaggcaacggcctagctggcctggtctggaggctctcttcaaatatttacatccacacccaagatacagtcttgagatttgactcgcatgattgctatgggacaagttttcatctgcagtttaaatctgtttcccaacttacattaggggtttggaattctagatcgtatttgaagtgttggtgccacacacaccttaacacctgcacgctggcaacaaaaccgtccgctctgcagcacagctggggtcacctgacctttctcctgtcccccccacttgagctcagtggctgggcagcaggggatgcatggccactggccggccaggtgcagctctcagctggggtgttcagaggacgcctgtgtcctcccctcccccatccctctgtcacccttggaggcagagaactttgcccgtcagtcccatggggaatgtcaacaggcaggggcagcactgcagagatttcatcatggtctcccaggccctcaggctcctctgccttctgcttgggcttcagggctgcctggctgcaggtgcgtccggggaggttttctccataaacttggtggaagggcagtgggcaaatccaggagccagcccgggcttcccaaaccccgcccttgctccggacacccccatccaccaggagggttttctggcggctcctgttcaatttctttccttctagaaaccagcatccaggcacaggaggggaggcccttcttggtggcccaggctttggcgggattatttttcaaagaactttaggagtgggtggtgctttcctggcccccatgggcccctgcctgtgaggtcggacaagcgcagggagtctggggcctctcagagtgcaggaagtgcgcacagggtgctcccaggctggggagcacaggtaggggacggtgcgtgggggatggcgcctggggcatgggggatggggtgtgggaaacggcatgtggggcgtaggggatggggtgtggaggatcgggggtggggatggcgtgtggggtgtgggggatgggccgtgggggggtggggcctgggaaacagcatgtggggcatggggtgtgggggtgaggtgtgggaaagtgtgtggggtgtgggggatggggcatggaaagggcgtgtggggtgcaggggatggggcatggaggtgtgggggatggggtgtgtggggtgtcggggatggggcatgtggggtgtgggggatggggcatggaaagggcg

SEQ ID NO: 60130 - DNA, 1592 bp, Homo sapiens
tccagatggtcacgggaaggtcactccccacagaagtacgttttggggccatgcgggcacagaaggtttgggggtgggtggggcaggtgccagcctggcctgtgggaggccatggtgcagatgccaagccccccccgtgacatgagaccacctgataccacccagagagtggctgtgagcggaagggcccgcccagaaacaagcagggccttggggcagaagtcctgggctcagatcccacgctcactgccagcggcctcggctcaggcttctgcgctctctaaacttagttttctcttctggaaaaatgatggggaaaatgatatttgtatgtgaggactgagagttaaatgtaaacatctggaaactacaaaatgagcacgaaatgatgtttttattcttagaacagaaagtccccacacccgcggccctggtgactgatgaggatgaggttctgcggggcctctctggccgcccagctctgcctggggaaggtggggccagagtggatgtgttcccagcgtggtcactcccctgcctcgccagcaggtctcggctccaatcaggaggcctaagccaagtgataagcagccagacaacagccatcccagctggggcgtggactttgctccagcagcctgtcccagtgaggacagggacacagtactcggccacaccatggggcgcccactgcacctcgtcctgctcagtgcctccctggctggcctcctgctgctcggggaaagtcgtaagtgcccctcgcccttcagacccaaaagcagcgccagggagcagggaggggcggcagttggggaaaccctctcatctctgcagcctggacggtgggtgccttgagtgctgccagaggctgggctcggatggctgggcttggcctttccagccaacggcatcctcaaggccagctgtggctccctggggctgagagtcagacgggcggatcagaggtcacagagacaaaaacacaaggacagagtcagagagagaaagggagagggaaggagaaacggagacacagtgagatgggaggccaagaggcagagacagaggtagaaagacggagacagagagagagggaggggttggggcaggcagagacaggacagttagccatctgccaccacagggaggcacaggacgaggggcacagcagaggagctcccagggaggaggaggctgagccgagccagtgccaccactctcggactggctccgtcggggaaggagctgcctaatgcacagctggacaggtgggggcagcagggctgtccaggacccccgggtctgtccaaaagcagaggcccagacaggacagaagccaggcaagcctggggacagcggaggaagaggaggcccctctggtggggacacgagagacagggaccctagacttgtttgcatcctggacaaagtggacaggcaggggcaccaaggggacccaggcctgggaagggaatgtgtgagggagagacggagcagggggagaccctcgtggggtggaaaggggagacccctgggaaggctgagtggatcctcagtgcatcactgacctaaacggcccctccgcctggtga

SEQ ID NO: 60131 - DNA, 888 bp, Homo sapiens
aaaagtaagaagatagtgtatttgcttcctagggcaaccataacaaagcactacaaacgccttaaaataacagggatttattgtcgcagctttggagacaagtctgaaattagggtgtcagcagtgttggttccttctggaggctctgggagagtctctgtcccaggctctctgctcgcttccaggagcacccggcaatcatgggcatccttgggctgcggacgcgtcgctcctgtctctgctttcatcttcgcatggccttctctctctgtgcctctgtgtgactttttctgtctcttataaggactttctcctttatttagggcccacactgacccagcatgatctcttctacagccttggcttagttaacatctgcaaagacccgatttccaattaaggttctattctgaggctgcaggtggacctgaattagcagggagggcactattcaaccaactgtagagagttaaaaaacaataagcctgtggacattttttagcgtaatctaggctcttgatgacctgttttaaactaatcagcaatgaatatttttcagctaacgtaatgactattgacaagcacgtgacccttgtctgaatgttaactcaggcatagcaactaaaaaccatccattgaccagctcgggagtagcaaacagagcaagccattcttggtgcaacctgtttctaggtaattaacttgaaaatattttcaatattcaacaaagatggttcatttaagatgactgaagccacatcttcacagatgcagaagatctgaatagctttcctctttagattgaatagttctagaacaattcattcctaaaagtgacttccattggggaaaatatcctattcagcttgagtcacttaattatggttg

SEQ ID NO: 60132 - DNA, 1450 bp, Homo sapiens
ctgtgggggcaggatggaggctccagggatgatactgtgccatgactgccatgggcattcctttccccagataccttcctgcatctgggtcacgcccagaggcagatgggagcctgtgcaggccccgtggcgtcgggaggggcccacacgttggcgcagcctccccaagaccccccacttggcctggtctctcttgttcctcttgggaattggacacctccccggtgactgcctatgacccgcagactccctgggagggaaacgtccagaaagcttctcattggggcggacattttacattaacttaaacaaccaggtgctcttcaactgcacggtgccaggccccaccccagctcaggcttgtgtggtgggggccacaggcatcccccgggcaggtgacctgctcaccaggcagcgacctgacctggcacagttggcccccaccgtggccacccttagaaccccctgtgggctttagcatgcctgcatccaggccacagcctggccactgaaatcagtctctggagtgaagctggccaggagcttctggaagcttctggagctcctcaggtgctgagtggtggtggcgtggcaggcggggcttcggggggctcctcctctcctagggtccagatgtttagtccttgccctgctgcaatccggcactgtccctaggcctcaagttaactggccatgaaaatcaaatgaactttcggtaaacagaaaagattccggacaaggcctgccgtgtgtctcccaaacgtctcctgcagtttgcgtcttgtgtaatgtccctaagcaaagttcaacagttctagtacaaaaactccccaaaaaagtcatgagctgggcaaaaccgttcgtaaacagatgttgcgaagtcagggaaaatcaaagtggacaggtgttcgacctcccagaaacggtctgaggaggggccggtctcccagggtgggcgggagggcattcctggcctgcccgctctgaggccttctccgtggagctggctgtcgggctcctcgccggcccttcctggagaaaaggcttctgcctcggagctagcctgctgttgggctgcgtttcctaggcagccacgtggtccccagggccccagaggtaaaccctggacttggattcccgtttctggaaatcaaaggttgagtggggtccagagagaactctgggaaaataattacaattgaaaccccccatcgccatcactgtctgcaccctggttcctgccgcactgggtgtctggtgcccgtgcccgtctcaggatagaaaggaaactggaggctgcagagagaaggacctgatgggtcgtagctcagcatctgccgaagccccatctagaaataggttctcgtcctgggaggtgtgggagggagcctcgggagggagacagcaggaggagaggccccagtcctggacacgcgctgggggttgaagt

SEQ ID NO: 60133 - DNA, 2486 bp, Homo sapiens
ggaaaagtgattccgcctgagagtgagggagagagaacagaggtgagaccctgaggaccgagagcagcaggaggtcacggtggggagcgaaggtgggagaagtgattccgcctgagagtgagggagagagaacctgcagcagccccatcgcctcccccagtgacacctcccctccccctgagcaggaaggggagctttggggcgtccacctctggaggacgaaggtgagagcgggtgtcgggggcctggtggggcagggaggcccttgtgggtgctgggagaccagcctgtgtgggtccagagctgcgcttggatggggagatgggcctgccgtctgggaacacgcagcccaggctgtgaggaagaggaagcaggaatgagagcttcagccaggacagctggtggacggcagacctcggccccaccatcactgtcatggagccatctcagcagggctgggggttaagctcccgtttagaaggaccccactccacagccacggggtagccactgatgtgggcaagcgcccgccatgaagaccccaccttggtggaagggcactgagaaactggacaccctcgagactcagaggatcacctcagaactggcctgttaactatgccaggaaagcatgcctttagcgtggcaaaacctggggacccagcctcctcctgagccgaaggcagggggctgccaaaacactgtctaagcagagcccgatcctgagtcaggcaagtccagatggaggaaaccatagactcttaaaaaacgtcagcgtcagcaaagaccagaaacagccagtgactctgcagtcagtgagaccagaggagtctgcaggctgccaggagagcgagggagactgctgggggttcccgtcagacagcgctcagcgggggcgaggggagagggagagaggcagagccagagagacaaaaagaaagagagacagagacagagagaaagagagagacagagacagagagaaagagagagacagagacagagagaaagagagagacagagacagagagaaagagagagacagagacaaagagaaagagagagacagagaaagagaaacagaggggagggagtaagtccaggtaaaaaacaaacaaaaaaattgagaatagaacaagagagaaacagagacatggagacacagagaaagacacagtgagacacaggagacagagacagagagagatgctgagagacagacagggagagggagagagagaggagacaccaagacacaaagagggcggagagacagacacagaaagagggagacagcggggctggatggacgtgtggccgggccagtggggaggagagacgagtccgcagacagcgttcagaggccgcgctgcctgggtgctgagccgtcccggggttcacggtcgcagtttgtccttacaaaacgcccagccgccccgacctgtggtgcttagggaggacctacctggctgtgccggtctgagaaggggccagtgaggcccggtgcgggtacgggcgggtgcagatgcagccaggaggacgggcgggagcgggggcctgtcccacacgggggcctcggcagcaccggcatggctggaggccagtacggccaggtgtggcgggagggagcgccgtctggcttgggtcgtccatcctgacaggacgctgcaagggcaggagccccgcgccccgtgtcctgcgcccccgctcgaggacaagccccagccgccggtctccgctgggttccgacaggccttgctgggaggccttgctgggagctgggggtcgaggctcacagactgcgctgaccccagcaggcacagctgggtccagggactcgggaactcgcagcctgacgcgggccggacccccggggtgggtgctgagggcctcggatgccctccctggctggacgttgtggctgtgctgatactgagcggtaaccctaggaaggagagtcccctgggctcagctacccgggacaaggtcaacagggacaccggccccagttccaggagaaaaacaagcacggccagcggcgagtgtgggcgacagcagctcagggagaagcagattatcaacagcgaattcactcagggtcagccaactgtacgcttaaaaaaagattcctgcggtaaactgtatgtctattttaccacaataaaaaacttattgtttttaattaccaatgacttctaaaaaatgtttttaaaacccagatcacaaatcctgaacatagggcctgaaaggcgaattcagccaccacggaggactcccgcaccgtggagccgggacgcagggactccatgctgcgcggagggcaggggcacgtgacgcagggcgtgggggaggcggggcgtggaggaggcggggcgcggggggcggggcgtgggggaggcggggcgtgggggcggggcgtggggggcggggcgtgggggagggcaggggcacgtgacgcagggcgtgggggaggcggggcgcggggg

SEQ ID NO: 60134 - DNA, 2033 bp, Homo sapiens
cttcagtcattctctctgctgccaccctgtgaagaggtgccttctgccataattataagtttcctgaggcctccccagccatgtggaactgggagtcaactaaacctcttttcttaaattacccagtcttggctatttcttcataacagtgtaagaagggactaatacacagggcctacatctgaaagcagcaaacgacaaccctggggccaaatctggccccttaatagctcttataaataaagctttattggcacacagccaagtgttcattcatgattgtctatgctgcctctgctacaatggtgctgagctgtagtgacagacactatttggcccttccccgctttctccctcctccctccctcccttccttttctccccttccttctttccatcctcctgctttccctccctcactccctcctgtctctttccctcgttcttttctgtgtattccacacacacctagaacgtaagctgcatgtgactttgtctgtcccgcccagtgctgtgtccccagggcctatctcacctccattgaccacacacgggcatgggtgccaccttccaccttgcacctgctgcctttaccttctgttctctgtctccctaaatatctcccagggtcctctgagccttcaccgttcatttctctgcctggcctcaaacagaaaacgtcaggagggaagcacacagctgcacaggtcgtgccccgaggctcctgctgccggcacctcccccagcctggactttggctgtgtttgtagccctgtcccagcgctccgggtgggaatggcaggctgcgtcccactgctccagggcctggtcctggtcctcgccctccatcgtgtggagccctcaggtaggcatctggcttacctgtctgttgtgcctgtgctgtgtctttcttgactcggtccatggtggatttgtagatgaggctttttccaggagccagaggagccctgagtgcccagactagtcttaattcccctgaaaaagctgtttggatctttatcatttggtgacaagtatttgggacatgatagtgtcacttggggtcctcccaagagatgcccaaatggaaagaagcctgtgtgcaggggattcagccgggaaaggccggggagaggggagggggaaagggggaggagtggggggaggcctgggttgggcattggacgaggggagggggtggggcaggctgagcccagactgcaatgtgggcagagagagccttggccaggccagccaggaatgcccagtcttgagtcaggagacatagccagggagcagccaccctgcctgcctgccacccttctaccaccagccacttcactgaaggaacgacatggactccattctgactctgcctgcacaggcgtccaggaaagctgcaagtcaaaacacccagcatccccgctggccccatggtctcccgctggccccatggtctcccaccctgagagggtgatccccccgccctgccctgcccagcacttaccgtagccggacttagctgagccccccctgctgtaaccctcagcaccgagagaaaaggagggaggatgggaagggcctgggctttgaccctcccggagagggagagaacatgctttgggaccctcaggtgggaagaggctccagagaccactgccgcgggtcaactcatttgccttctcctcctggaaatcgcagagcctgctgcaatgtataagtttcttctttatgtgttttatcaagatgttaaatgctgcgcacagaggcagcacaggagctgatggctcttggtccccagttctcagtacggggacctttgaccccagctcagccttccttcgcactcagacccaaaacccagttggagccctccctcctccactttcctgactgaggcccgtggcctctctgcagaaccttagtgtatccgcactgatcctggggctgatccattcgcccagaggatgaagtgcttgcctacctcgggggagggagtagcggggtggccctgaggccctcgcaggctgaga

SEQ ID NO: 60135 - DNA, 2231 bp, Homo sapiens
cgttttcctcatctgaaaacggagacaaataataatactgttctatgacttcaaagagctatggaaaaaccaaacaaaacacacaagtactccgtaactcacgtaaaacgctacacgcatggtaatatcgtagctggtctggcaccaggaatgatgacctctattggagactgtgacaaaagcaaaccccaacgggaaagagatgtcactggggatctgccctgtcttctgagtgtcccctcagggtggaaatgctgggtcacatggtagctctacgtcccactttcaggaactgccttcccatttccgcacagcagctgcactgtttttgttcccctggcgatgtgtacgaggctccagtctccctgcatcctcactggcgccgcccgtctttctgattacagtcatcccactgggtgtggcctggcagctctcagaggttctgatgtgcatttcaagtgactgatgcattagtcattggtgactaagtcactggtgattaatgaccttgagcatcttttcatgcacttactggtcacttgcgtattttgtttggaagatttttcaaattctttaaacattttaaagaatttgaattggattgtctttttactgttgaattgtaataattctttatatattctggatattaggcccttatcagatgtattatttgctaggttatggttgttttttacttttttgagaatgtcctttgaagtctaaagtttttaattttgatgaagtccaattaattttttcctttggttgcttatgcttttgttgtcgtatctgagaagccactgcctaatcaaaggtcgtgaagatcactgctgtgcaaaaatatacgatcaagcgaaatgtcaagtattcatttaggaaacacggattgagctcctggggtgcaaggaacgctagtgatggagaaggcccacgccctgacgcacttcgccatcaaatcgtttggtaaacgcagtgaaagaaatgtacagtctgctatgaatgtttataaaagggaaatctgatccaccgtgaagtccagcagtgagaggctttagagaaggcggaaacctttaaatgagtatagactgccaggagtcgaggagaaccttccagcaaaggaaacggcacccatgggaggcctcagtgggaaagtgccatggcataggaaggacttttctacagtccagccttggtacgaaagttctgaagcgaggctgggtagggaggccatgttacccccacagcactatacatcttgtaggcttggctgaacagttgcacaactcaaactctgcctatcttcagcaataggatgcctgaggtcagaggctcccctcttggttaaaccagctaagaccagcaggatgctaagtggaagtccacctggcctttgcagggcctccaacttcattacaacctcatttgcatgctccgtgacactcccaccagtgccacagcggctgacaatcaccatgacaatgacgggaagacgccgtaaaaggacaaaaagatggcagtgcttcagctcccagaagttcaccgtccatttccagaaaagccatgaatattcttccccttgctttcaatgtccaaccccttcattcaagaaaccctctatttcaatcccctcacccctcaggagtagagaagttgatttgtgagccacactcctgcttcttcattccttggcctttacatacagcttgctctgctcaacacttactttcggtttcatggatgggatccacaacacccaaaaggaaaagttcccatcttttgaggctacagagtttattggcaacaaacacaatgagtgaaaagagaagctgggctactgctatggtttggatgtggttttttggccacatcaagcctcatgttaaaacctgatccccgttgttggaggaggaacctaatgggaggtttttgggtcatgggggtggacccctcatgaatggcttggtgctgtccttgccataatgaatgagttctcgctctgagctcctgtgagcgttcccagacagctggttgtggaagagcctggcgcctccccttctatctcctgcctcctctcttgccatgtagtgggctcctctttgtcttccagcatgagtggaagcagcctgaggcctcaccagaagcagatacgagcaccatgcttcttgtgcaacctgcagaactgtgagccaaataaacctcttttcttacattccccagcctcaggtatt

SEQ ID NO: 60136 - DNA, 2999 bp, Homo sapiens
atttcttcgtgattcctgttttaaccagttttctcaattaaccaagcaactgctgggcccaatcatgtcagacttttcagctatcaagtacgtatctttacccagttgtcaacagacacctcaaactcaacatgcccaaaactttatttctccctccaaatccactctattcatctttttcccagattacaagcctgggaatcattcttaactcctccgtgtccctcagcccacccattcttattcaccacgtcttggtaatgtttccttcaaatattttaaaaatccattccctatatttcctatccctgttaccacagtgctggttctgaagacaggcatagtttagtggaaagaatatgcgttgaatctttacaagtgtccatcttttaactgtgcttctgctacttacaagctgttgaacaacatctgtcagacgcatgtaccgagcgatatgaagtgtgcattgtgctcggagagtgaagggcgttaaacgacagcgaggacgaggggcacgagcccggcctgcagcacggccacagcctcgcgcttactcctccatcgcctcctggagtccccgaattcatcccgcatcctgctgggaaacagcgtccatccgacacagcaccgcccacagcgggccctcggcgtggcccgcaggcccttcggaccgcctgggagcgcggccacacgtgccagcaagtgagggcagcgacctgggaccgccgcgtctacttacaccgcgacgactccgcgatccacggacaccgcccggcccccacggcggccctgcaggggagaactcgggccgccttcccgagtcccggccgccgctgttcggctcgcgcggctgcccgccggggacccgaacggaagaagggtggcgaggcgggaaaggaaaaggcctgagggtccaaggcaggaggggacacacggaacacgccgagggccaaccacgccgccgcgcgctccccggctaggacccacctgctgcaggtactggttaatggtaatgtgcgccatgggagcgccgccgaacggagagcgccaccccctacgcctcaagcgggccagctggcgtcacttccggccctcggtccgtctgggtcctggcgcccccggccccgccgcgggtgcgcaggttggttccggagggagaacctggggaccggctcggcgacgcgctcgggctgagggggcccggggtctttctgccggggccccgtcctctcagccgggacgccagcggctctgattgtgtgttcgggcccgcccgggctgaggggtttggggtccagtggcgaggacagccccacggctaaactgcctttcactgcgctgacccttcgtctgccccttgtgaaaaccaggccgcggaggaccctccgcgcctggctgggccagggcctcggggcgcgcgcgcccgaggagggggagggggagggacatggcgcgcgctcccgagctctcataaggtgcctccgccgcgcgctcccgagcctgcaggagttagggcacgtcccggcgcgcacccctgagccctcgaggtggtctcacgcccggggtgggggtgccgagccctcaggaggcgcgcgccccggggccctcaggagggtgtcccggctcccgatcccctcaggaggggtgcccgcggcacgcatccccgagccaggagggggtgcccggagccctgggggcagggtctcggtgcgccccccggagccgggggtgagggtcccgatccctcaggacgggagtcccggcgcgcgccctcgagccaggagggggtgtccgaatctcttagggggagtccgatccctcaggagggattcccggcgcgcgttcctaagccctcaggagtagccgggcgcggcggcggttgggctcgggcacgcgggcggggcggggcggggcgcgcgaggaggacggggcggaggccgcgcggaccggggcgggcggagcggagctcggcgggcggcggcgctcggggcggggcgcggcggttccggcccagccatggcggacgaggccccgcggaagggcagcttctcggcgctcgtgggccgcaccaacggcctcaccaagcccgcggccctggccgccgcgcccgccaagccggggggcgcgggcggctccaagaagctggtcatcaagaacttccgaggtgggtgcggcggccgggtcgagggccaggcgccccgggcggggaccccacgagaccccgcccgacttggggggaaggccccgagatccgtgcgggccccgggagcgggggcgccggggcgccggccgggtcgggggtggctacgcggggcgcttcgcggcgcgccctgagccgcccgctctccctccgccctgcagacagacctcggctgcccgacaactacacgcaggacacgtggcggaagctgcacgaggcggtgcgggccgtgcagagcagcacctccatcaggtacaacctcgaggagctctaccaggtgaggcggcggccggggctggggacgccgctcctgccccgcgtgacgcagacgcggccgggcggccgctccgggtgcctcgcaggctctcgccggggagcggaaaggcagggcgtttgcctccactgcagggccgggagccccagaggcaacaagtggttttgtttattgccgtggtggaatttttgttttcaggcttaagctgcttagaaccatatttaaagttatcccattacggaagagaaggaggtgtgtttctaggagccacgtgactcatattttgcaagtatacggcaaattattttctcgttatatgtaaaactcatgactgtgtcacttgccacagtaataagagggtcttttctctgttgtgttttgtgattaatggttgcctttaagatattcaaacagattttgaaaaaattcaaaattcagaaaaagtggttttgttctctgttgtgttttgtgattagtggttgcctttaaggtattcaaacagatttggtagcatttaattcaaag

SEQ ID NO: 60137 - DNA, 1585 bp, Homo sapiens
tctattcattatctaagtcttttaaaactgaacattattatgataaagagctaatgagtatccttaatattaaaacaacagcttttaaagttctcttttatttgataggtttgtaagcgaaatttaccatttaaattattttgctgatttgaattaaagggaaaccgtgttcatttattgggtatggttgaagtatttaggaaatgttctgaaaaatgtcttcaagtttgagtatcctttattctaataaacaccatctgcattggctttctgtgataggcaacaaagtcccatcgacttggcgacttatggagacacccacttatcagcgcacagttgtgtctgtcaggaggccaggcaggattcagtggattctatgctcagtctcacgggcagagtcaaggtgtcagccaggttggggcctcacctgaggtctttgctagcacgggcaggcagttggcggaagccagttcctgtggtagtgggactgagggccctgccttctgtcccgtgttgcttggtgtcactctcagctccacatgcacaggtccttgcctctcctctcacagcacgactcttttctgcttctagaccagcaggagaatctgcctgtctgacctgctgagatagggccttatatgatgtaacccgtaacccagtcaaggaatgatgaccttcgtattcacagcctcgttcacagttgcgtgtgaggcatcctccacgtggggacagggcaggagcatctcagaattctgctgccacaccagctgtgactcagacgtctacaggggagtctctgggctccttggcatcctatagaaaatcctttaatctggactcaatctcattccccagcctcctcccagtactgtagctgtccatgtgtctcattgggtaggaattagaaagtagagtttataattgcagaaaatctacttgtggctgtacttttctaggcctccgtttcttcatgtgtaaaattaggtggtttgtgtttgcttatttctaagtgttcttctagttcaaggaaacttctgctcccccatctccctgatcttgggaaactaaaccattctgagttcattggaagggtcctcagggaatctgcagcagttggtgctgctgaagttgaagcacgtgacagggaagctgaaatgcagggtgagaggtctctgtttagacaatctccacagcaccccgcacagatgtgagtgaagtcggttccagctctgttgtgctggcttctgtaaatacgcctctgcagtgttttccagcaaagccctttcctaaagatcatgaggtcgttcaagagatcagtgaccgcacaccaccttttggaacctggccaaagtgcaccttatctcaggaggcgcctgtgagggcgcacagaagcaggccccgccccagtgccacggctcagcaatgcgcttccaggaacctacgttccagatgtttccatccaaaaagcggcctgactcctaggcttgggggaagtctttagcagatgcccaagccttctcccaaagacttaggcgtttatgagagtcagtaggcggtgattgttcctactctagttgctgtccca

SEQ ID NO: 60138 - DNA, 2515 bp, Homo sapiens
cgaggcgggtggattgcttgaggtcaggagttcgagaccagcctggccaactggtgaaaccccgtctctactcaacatacaaaatcagccgggcgtggtggcgcacgcctgtaatcccagctacttgggaggctgaggcaagagaatcgcttgaacccgggaggcggaggttacagcgagccgagatcgcgccactgcactccagcctgggcgacagagcgagactccgtctcaaaaaaaaaaacaaagtgctcgacaggaactttctgtaagccaaagagtatcgccatcgcaccttcaccttcaccttgggcagcctggtgccgtcttccctcagcccgcgattaacgagcggaaggccgcactgacccatttcagatcccttatttccttcctaaaaccactcaagagtttgggcacagtggcctccctgtgtgaggaacttgcttcccactcaccaaaagacaaacccttcgcccatccctggccgcgcacccggccggtcacccgcgctgccacccacaccaccctcctgtccataaagagcccgcgtttgggacgcctcgcaggctgaagggaggcctgggcgtccgcgatccgtctgccctttctcccctcgcgggcttcctctttcctcactttctcccgccactactcttcctcttccttttccgcgaacccagcccacttcccgtttcaggacctcggctcggccccagtcccccggaccaggccgggtcacgtgggtccagggtcacgtgccgctgcgggtcacgtgccgctgcgggtcacgtgtcggcctgcatcacgcgtgagggggcgcgcggtgctggaagctgccgcacctgcggggagccgagccgccggcgctcgacgcgcgcgctctcgcgagacccgcgggatcacgtgacgcccgggcgcggcgcagctcacgtgacaagcgctgccggccgcggtgtcttcttcgtgccggcgtcgcagtggccgggcctcttgcgtctggtaacgccgctgtctctaacgccagcccttggcgcccgcgccccgccaccgcagcgcccggcagtccgcggcccaaccgccgcccgcgcccccgctccccgcaccgtacccggccgcctcgcgccatggcggcccccggcagcgcccggcgacccctgctgctgctactgctgttgctgctgctcggtgagggggtcgaggcggggcctgggagcggcgggaccgggcggagccgaggtccctgggtcttgagggcgggggactgccgggtcgttgtcccgcgggtcgccccgcacccactgctcctggtcccggccggctctgcccgcgggcgggtgtttctctcggggtcgtagggtcggagcggagctcaatggcaggtgcttgggggaccaggaggtctcatcccaggacctggctcctctaaggtctgtctcactgaactcagtttttctgtggtggtgagtgcgaaagggaacttccgatggcttgctcggcggtctggtgctttcaggtcgttaagtttcctggcaagttgaggcggtgagatctagacgaggctgcgccgccgaaggtggcagggacgtctgtggtctcagctcccgggtgggtgacctagatcaagctcttcccaacatggatttcacccaggacagggagaagccggtgcgagcattccccacctttgtacttgaacctttctcctctttcagcggtgtggaggagatgcgagtgtatttatgttattgtgaattcacatgtatgttaaaataatttttaaagttatctttgggatttcacaagattccgtagtagacaagatgagggaaagctggcctcagactcacggtggcaatgttcatgtctagtaagtagtttaaagagcgccgttcctgtaggccgaaatgcgggaccagggaacacgtggggaagcacccttctcttctgtcagtttatagagctcagatgggcagtaggtgctcaatattgtattgactagtgaatttcgttctcatttattgtcttaataagaggatgtgtgctgtctctttaagacagtccggattgccccccgccaacactattctttcacctcctccccccgccgccctcccccgtaatatgagaagattatcttaaatgccaggatctgaaaggtgatgtagaatcaagctgggggagtgtgtgtgagttaagtagatatagaaatacactcctgtacacatctgccttgacttctttaaatccctcagtcccatccagctgtaaaactctgttactgtgagtgaatggatcttggcttcccttttttgttttgcctgttgtgtaaaatgaattctttgaactgcctgaatagccacagagatgaacttattccaatagtaagcctgaagccttgctcagctcctgcgacagggtcaggtgtagttaatgaaaggagttgcagaaacaagttttgtcatgtcacagcaactgcattgttctttgttacagatgctcacaagcctcataa

SEQ ID NO: 60139 - DNA, 840 bp, Homo sapiens
ccgttcactgcagcctccgcctcttgtgttcaagcagttctcctgcctcagcctccctagtagctgggactacaggtgcgcgccaccatgcctggctaatttttgtagttttagtagagatggggtttcaccatgctggccaggctggtctcgaactgacctcgtgatccacctgcctcagactcccaaagtgctgggattacagccatgagccaccgtgcctagccaaaatccaacttttaaaaaaggccttttaacaacttgcatttaaagatatttaaaatgtttattttaatgtgcgatttcaccaaaaatccttttttcttaaaaaaagaaactgctcaattacaaatttccactatattaataattaggcattgtttaaagctactgtgtttgaatacttagaaagctcaaacatgaactgaaacttgtcctgatagataggattagctgtgattgcgtaatgtgaccctttaaaccattgatgtcagcaggatgaccgccttaccctttccacttgaacaactgtcacttaggaggtttgaacaattttatactcggctgggtgcagtggttcacgcctgtaatctcagcactttgggaggcccaggtgggcggatcagctgaagtcaggggtttgagaccagcctggccaatgtggtgaaaccccgtctctactaagaatacaaaaattagccaggcgtggtgtggtggcaggcgcctgtaattccagctacgtgggaggctgaggcaggagaattgcttgaacctgggaggcaggggttgcagggagctgagatcgtgccattgcactccagcctgggcaacaaaatcgaa

SEQ ID NO: 60140 - DNA, 1321 bp, Homo sapiens
gaagggtttttgactccagcaggggctgtgctgggaaaggcagaaatgaggaggtgccctccgcacagggaagcctggggcgccccggaggagggggccctgcagctaaccccgaggcgggcgggcggtcaggccggtgctcaccgcagcagtaggaggcctggggtcgcggaggagcggcaggtcgagcagggccctgtgggtcccgtcacaaggacggagtctcgctctgtcgcccaggctggagtgcaatggcgcaatctcggctcactgcaacctccgcctactgggttcaagcgattctcctgcctcagcctccagagtagctgggactacaggcaggagccaccacgcccggctaattttgtatttttagtagagacggggtttcaccatgttggtcaggctggtctcaaactcctgacctcgtgatccgcccgcctcggcctcccaaagcgctgggattacaggcgtgagccaccgcgcccggcatggatcgagttttgatccatcccgatatggctccctgctgggagggacgggtctccttcgcgtccgacccgccggcccatctcaaagcgggaaaaccggtccctgcggctgccctagctcggagcccgcagcttcgtcccgacctgcccggaaaggttcctccccctccctccgctccgggagcccggactttgcccggcccgtcccagcccaacccacctgcgccctcgggacccacctgcgcccccgggacccacctgtccggctcctggggacgcccccgccctgcagcagccgggaccatttgatcgccctgcgggtgagcgtgaccaggtagctggagaaaaacttctcgtaggcggcgtcgtcgaagtcctcaggccgctcgaatccgtacgggtcgatcctgcaaaaccgagagaaggaggccggcgtccccgaagtttcctctggggggtcgcgggcccgcgcggggaccgcagccgccggggacgcccgcaccccgcgccacacacctggggacccgcgagcgctcggcgggctgcatgcggggagggaggcgcgcaccgagcgaggccagcgggtcccaagttcgcctcccggctccggggcgcttaagtccttccggcgggaccgcgggcgcgtgggggcggggcggggagcggagaggggcggggctggaggcgggggcgggggggggcagggcggggggaggggcggctgggggcggggaggacttggggagagaggaggggcaggagcgggggaggggcaggggagcacccagggcgggggaggggcggggctgggggcgggaggacctggggag

SEQ ID NO: 60141 - DNA, 1001 bp, Homo sapiens
ttttagggaagactgtggtacacgcacccggacacacagttgcacatatggccacacaggcctccacctctactacccagacaagtgccccagtgcgcatcacacatgcacatgggtgtgtacacagcctgcccagacacagccctccacaacacagggacccacccatgcacacacgcgtgtgcacacacaccaagcagacacggcccctacacaacacagggacccacccatgcacacacgcgtgtgcacacacaccaagcagacacagccctccacaacacagggacccacacatgtacacactaaggaaatgtggaaacactacgtgacctccggtggcaaggccatggctggaagccctgcagcctctccggcttccaggtcctgatgccaaggctgcccctcccagaatccacgaggaggtcaccgtccccgctccgcaccagggaggggctccagaagcccggaggccagcgccgaggtccccgcacgtacgcctgtgtccccggctctggggaaggcaaccgtcccttagggggccgggaacctgcgcgccgccccgactcccgcccaccccggcggctcccggcggctcccggcggcgtccggatgtggcagcagctcgcgggccggggcttcctcttgcagcagccgccgcccgggaggccggcagcgccccctggcggactcaggcaggaggcgtccggcgaggcgggcgcggggtaggcgggcgcgggacggtgcagcccgaggcctgtccctgcaggtgcaggagggacccgtcgctcccctgcgcaccgagggggcgacaacccctcccagagacctgctgcccgcggagcctcccccagtgactcgtgcggtccccaaaggagaggcgggaagccgagtcctggagaagcctggagacaatgggcaacaggggcattgggcctccgtccagcccccgccagcgccccagggtcacacataggcctttattttctgatcctgaaagt

SEQ ID NO: 60142 - DNA, 2129 bp, Homo sapiens
gtcacacccagcagcaccttgctggcctctgaaccgatgtggactgaataaatcccatccatcaccatttccaccacatttcaaagtaactgatgtgcacctccagcagcctccctcctgcgctgcggaactctaccagctccacagatgcacacctacagccacgctacagctcccggctagagcccgcgctagggccccgctgtgcctctccctcccctcccggcagcagggcctcccccgcgaatctgagcttctcgcggattccttccttgcgctgttttggtcaacagcctcagcatctgcacagacgcccgcaggagcagccgagccctcgcccgcctcgactgcccgtttcgaagccgccctgggaagcccccggcctgggttcccgctcggccccggcccctgccccaaggcccctacagttcctcccggcccccgccctccgctcactcccggtcgtccctcgcggctccgggtcaaacccgcgctccccgcggtcccgcgcctccgacgccaccgctccggctcgcgggcccgcggcgcgttcctccctcggatccacgcggaacgccccgcgcagctcgctgggctcggcctcccacatccagcgcgccgcctgcgccgaccttggggcccgaccccgaccccgaccccgacgggcagaggcgacgccgggccacctaccatctcccccgcgccgcccgcttctggccggccccggccttctgcgcaggcgcggcggcggctccgccctcgtcctcggacggccgcggccctcggctccggggcagtgccgggagccggccgcggggactcccactcccggcatgctcagcgccgcccgggggcccacgggagctcgcgccccacagcccctgcgcgtccagccctctgcgagggccttggctcgcccctgcggggtccaacgccagcctgcggctgccaggccccacgccggccaggaagtgctcgccgcccgcggccgacgggacccgcccacgccccgcctcttaaagggggcagtgactgcggctgggcgggagtccgggtcggcttggctgagcgggggcggtgctgggcagggcggcggccgctccctcccggactcccggcctcccggcctccctggtcccgcctgggaagggatgcaaggaagccctccggcgctgcgctccgaggcgggagacagcgtccccctccgcccctcgggtcctggcgcctcagagcccggcccaggccgcggaacggtgatgctcgggccggacgggcgggcgcggatccctgcgtcccggtgagcaccaggcccgtccatccggggctctttcccggggtccccttccttccctccctccctggggctcccctcccctctctccctccccggggctcaccttcccttcttcccttcccaagggtccccttccttccttccctccctccctggggctcccctctctccctccccggggctcccattcccttcttcccttcccaggggtccccttccttccttccctccctccctggggctcccctcctctctctccctccctggggctcacctcccctctctctctcctcggggctccccttttcttgcaggtattgtctcccggggtcgggtggtctgtgtggcctggggtcccgctcctccaggccttgcctaggcgctcttcgctgaggcccacgttctaacctggaatggaacctgcgttcccaccctggccgcccgggtggactcggggcctccagggccggccgcagagatgcagccctgtccctggcccccctcctgtgactcctaacggctcctcacggtgtccatgacccagggtgtggacgcctgcgcgggggaagcaagaccgctgcgtatcgggtccctattcactgcctgtttttctgattattctgtcttccaaatttatcttatttaccggctttttcaaaaggagtgtcttaatgattggattacttgtgaaatatttgtagtttttttctcctacaggcttgacttaaatattctaaagcttttttgtggttgttgagacagagttttgctgtcgcccaggctggagtgcagtggctggtcaaggctcaagcgattctcccgcctcagcctcccc

SEQ ID NO: 60143 - DNA, 2137 bp, Homo sapiens
gaccagcctggccaacatggcaaaacaccgtctctactaaaaatacaaaaattagctgggtgtggtggcgagcgcctgtaattccagctacttgggaggctgaggcaggagaattgcttgaacccgggaggcaaaggttgcagtgagctgagatcacaacactgcactccagcctgggtgacaagagcaaaactccgtctcaaacagcaacaacaacaaaaaaaacacattacaggaatccaaagtgtctttttaataactagaacagctaaagatgtttactaatttgctcaaaaaacatgctacaatttagtagtcagtaggattttggaggcaagtttgaagataaaatgaaatgagtttgaataaaggtgatttgtattttaagggtccataaataatttcagtttcatgttatgagtatgtttcagtgggaaattttagtataactacaactaaaatcctcaaaggtttctcataaaaattatagctcccttagagggacaactaattttaggaacctgattgaggaaggaaccagaaatgaacatagaggtgtcattcacacatgagctgtgttgaaacttatttttctgaagcataaaatccatcaaagaatcactttttgggatcttttggggaaactgggaagtgtaagcaaagcatctcagatttctgtcttggttctggaaaatactaaaagttcacttgtgaagtagctgttgatttatttagctccgttggaccaaccgagagaagcttagcagttgagtgagtcattaaaataacagctcagctatatggctaggcatgactaagtgattgcctcattgtttgtttttaaggtggtaaatgtgtacttaaagttgtacacgtgtacttaaagttgtattgaaactaacataaaattgagtgattggaacagcacattatcatttatcctatcttgttaggaagttacctgttctaggtaagtgaattctctgtggagtgtgcttctccttttgggagtcagtctccaagaatgttttgaattgaacactttctaaccagaatatagtcttttcttggtgacttttgcttgtaattctgatcagtactgttgtctaacacagtactgtcttcaggacctgctggggtgcagacagtcgctgagccttcaccgagtcatctggcctccaggcttttttagttctcctgtttgttttgcataaggtttgtctctttctgtggctgccatttcatggtttgggcagaatgctgcctccagaaatgctgcccttacttttgctgcatctaacctactttgcctgggaaactcgattaaaccaattagaatttgggttagcagtgaaatgaaagtatagatatatagatacatcttttagtaaccaggtttccaggtcggggaatctttgtaatatgtgatggttgagtaggaattcctgagtaacagtccattggatgctgctatgaagaatggttaggttaatattttgttgttgtttactttaaactgtaaatctgcgtaagtggtaggtgttggttttgttgccttttttgggatagctacttgtgactggtgatctcctagtggccaaattccacggactctacgtttattactccttccttccacggtctcggtttcccacctctcagctcgttctgccttagtgacctttgctggccgctgtctcatcctgctttctgaacagtgctcctgtctgggtgccttgccctacccctgctcatcaccacctggacaccacggctacagccgcactgaaaccgtcctcattcccccagcagtaatgttcagaaagcaggttcctgtctgtgctgtgccttgccaggataaattaatatacattgttttaggtattcctaaagaaaggaagagaaggagactgaattgggatgataacaaaaagttctagagatctaggtattgtggcatatatatatatatatttttaattcttgacatcttggtagcacttgactgtagactgactttggaaatgtggcaacatttcaaatgattttaagaagcctgcagagctaacagtagctcagaagatttcgtttctggagtgacgttgagcatggtgtccccaagcaacccagtgacctg

SEQ ID NO: 60144 - DNA, 815 bp, Homo sapiens
cactcggcccagggcagggaccccgccacggccgggaccgcccggcccggccccagcccgcgcctctccgcgccgccccgcgctccgcaccgcgccctctccgcgtccccgcccgcgcggccggaccgggcagccaggtgcgggtgggcaggggatgccgcgggagccgcgggcgggagccgggggtgcgggcgggacccccggccaccccatcccttgccccggccgcgtgtaggcgccgcgcggccccgacccgcgccctcccgcgccctgcgcgctcctgtgcctcggggaccccgcgcgctcggcgctggtaggggctccccaggtgaccgcggggcgggggtcccgggcccggccctcccggccgacagcagcgtccgcgccccacgctggaggtggggccggggccggggccggggctggggccagggtcggccggagcgcgcagggcgggggaggggaggccgccccacggcggcccgcggggacccggttccggcgcgcgcgggaggcgcctcgtgcggaggcggcccgaggcctagtgacaggcgcgcggcgcggaccccggaagcccacctgtcagagttaccggtcagccgggcgggcgccgccggggtctggggtggacgccgcgagcctgcacgttgcgccgggaccccggggctgtgcccaggtgggtggtggggcacccccctgcagcggcgggagggaggcgctgcgccctggctcctggggctcggccccaccctcggccgctgggcgggccgtcggggacctgggggtagtggtggtgaccctgcgggcccgcgggc

SEQ ID NO: 60145 - DNA, 769 bp, Homo sapiens
ttgctggagcccaggacatcaaggccagcctgggcagcatagagagaccctgcctctgaagaaagagtggggctctggtgtccatggagagtctggggagggaggaagaggctagggttctgagggcctggagatgggggctctgggtggccatgggacacgtggcaggcgtgttgggttccagctgggttggctttgagagtctggtgggatgaaccctcatggctccaccgtcactttgaggtggtgtcacctctgacctctgaccttcagcatggcatgacctcgctgaggtgaccctggtgtcccacatatcaccctgagtgttcttaatacacagtcgagggctgtgttcattggactattctggtgtcaccgcccacttcatttctgtgcctggcagcacttttactcctggttgggagcatgaccgcctcccagttcagcttcctcctgcgtcccaagtgagcggggcggctgtcctcgaggactccgggctcacagccaacctgctggcacggctcgaggactccgggctcacagccaacctgctggcacggccgccctttcccgccctgcctcgggtgagccaaggacttgtcttctgcttcctgggttcctgaaagagctctcctctgatttctcaaaggcaaaataaaactcagatttaagtctttggtgcgtagcccctaatttccttccctttctctgaatcctcactgcccagcatgatggaccggcctgggctcaggacctgattccacaggct

SEQ ID NO: 60146 - DNA, 1815 bp, Homo sapiens
cggggcaggggtccccgtcccccggagcatgaactaaacggggcaggggtccccgtcccccggagcatgaactaaacggggcaggggtccccgtcccccggagcatgaactaaacggggcaggggtccccgtcccccggagcatgaactaaacggggcaggggtccccgtcccccggagcatgaactaaacggggcaggggtccccgtcccccggagcatgaactaaacggggcaggggtccccgtctcccggagcatgaactaaacggggcaggggtccccgtcctgccggcacgcagcagatgcaggccccagagctcatctcctaacggttgcataagcgagtgacagctgagtctggctcagggagaaccccgtgaggcctggaaggggtggctgccgcacactcactgtctgccacatgccatggttgatgaccgggccgctgctggtgacacggccgacaccgttgtagcgcagctgcagctccagccggccggctctcagggccagcacgatccaggtgctgtcctggtggcctccggcaaagaggaggatgccctcggggtcaaaggtccggaagtcaaactcagctaccagcctgggcacccacaggagaaatgagtcagcactgggcacaggcagatgcccggcccctccctgctggccgaaccctggcccgggccctgtgaagccagtgtcttggccattctaagttgtgttgcctcctgtggacacctcctcacctggtgggctgcagcctcttgaagcgcagtcggatcacgggggtcccactgaacatccggcccaggtacaaggacttcacactcttggccacgctgaagggcacgcacggcaagatgtcctgccacggacgggggccacgccggtcggggatgtggccttcactcctgctcccctgagccccacgccccggccgcgcagcgggtccactgtccctcctgtgcctcgggagtggccaccccgcctctagctgctgagaccccagaggctgtcacacctgccccactgggactcccaggtgaagggcgggcttgcagcagccgcttcccacagggcttctcgggggtccccgtcatctccttccctgctcatttcccttgaccctttatttttaaattatgaaatatttcaagcatacaaaaattacagagaatcattaaaaagtatacactattatgaaatagatatggatgccttgaagatggctgtcctggaaagttccctgttctgggctgtggtttctccacgctgcccgaagggggacagaaccaaagccggtgtgagctgacacccctggaagatggaggggctggggctgagccaggcctgccctgcccaccgtgggcagccagggtgagctggacatctcgcaggggtccgacaccctctgcatgagtacatgaggcagcgaggcaaagaacctcaaggcgagggctggctggaagccctgaacgtcgcagcccagacccaagagccccacggctgcatcccaggtctgcgactccgagaagctgtcctggtgactctttccacctgtggttttgctttttaaataaatgctcactctcatcaacccccaggcacaggcccaggctgaagaggaaagacaagagccgccctgcccagaaacgtccacatgtgggtactgcattcctaccggtgtgacaggtcagtgtgacaggtcggtgtgacaggcaccggtgtgacaggtcggtgtgacaggcaccagtgtgacaggcaccagtgtgacaggtcggtgtgacagacaccggtgacaagtcagtgtgacag

SEQ ID NO: 60147 - DNA, 2410 bp, Homo sapiens
gggtaggaggggcaaccctgaaatgaagagccctttagtcaccagaggagagcaaaggcaggggcacggagaaaggtgggggaggagaagggggagtaggagtgggaggaggaaggggggaggggaaggaggaagaggaggaggaggagggggagaagggggagggggagaagggggagggggagaaggggagggggagaagaggagggggaggggaggaggggaggaggagggggtagggagaggatggagaggagggggaggagggggaggaggaggagggggaggaggagggggagggggaggagaatggggaagggaaggaggaggacggagggggaggaggacggagggggaggacgacggagggggaggaggaggagaagcagggaggaagaggagaaggtgagggaggggtgggggaggaggtgagggagggggtggggaggggtgagggagggggtggggaggggtgagggagggggtggggaggggtgggggaggaggaggagaggggaaataaggatgggggaggaggagggggaaaaagaggagggggaatgaggaggaagaagaggggaatgaggaggaagaagaggggaatgaggaggaggagggggaggaagaagatggggaggaagagggggagtggggggaggaggagaagaaagaggaggaggaagatgaggaggaggaggaagatggggaggaggagggggagtgggggggaggaggagggggagtggggagaggaggagggggagtggggaaaggaggagggggaatggtggggaggaagaggaagatggggaggaggaggagaggacgggaatgcctctgtcactgtgggcagtaactgtgagcctagactttgccgggagtgcccgactggtgcagggacccacgggagatgctttagacgtcatctctcaggatcggcctagtcttcacctctctttaaacctggggtgctgctgtcttccaggtcagggatagagcagtgatgggaggggctctgtcctcggcggggaaatgggtttatgtgttaagatgggaatcacgtcatctgcacacagggctaactcctgggtggtcagggaagggaaccaccaaagtggacagaaatagcagctgccttttgaaatcgggggatggggtgtggcccctcctgtctggtcagattcactctccagatcctggggctgtttctccctgagcaactgtctgtcctgtccacgcagttcggtgtcctggacagtcagcagcagcgctaagaactatgccagaaactctcagggacacgcctgggcatgtccagatacaacgtggggagggaggaggaaggtgctccccctgcaaagtggcaaagggccagtggcagcagcagcacctggaacagcgtcgggggcgcgcacattcacagtgactttctggggtgtcctggggctccccagctctggccctgggctgagggaaccccagactgaaatatgaaaggaagtggggagggcagggctatatttagtggacagagggagaccaacaacggggtgcttctggggatgctggggagagtggacggcggggggaccctagcctggagccctgacccacaagctcactacacaagtgcctggagcacttccaggctctgtgaggctctggggaatggacgaggccctacagccagcagtgtggcctcatgggctgggccggccccctgagtcctggccctcagatgccgggtgagtcatcctggtgtggtgccgagcagctccctgtgctgcggctggcctgggcttgtgtagtctctgcaggatgccccatcccatccagaaccacaggaacccagccagcagcagccgcttgcagaagagcagacatgaccgaaaatagaaggtggggagaggagagaggagagaggcctcaccccagggccttaccttggcaggtcctgccatcagaggagagctcgaagccgctgtggcaggaacagtggaagctacccggcttgttgtggcagatctggaggcagcccccgttctcctggctgcattcgttgacatctgggaacaagcacaggcctgaaggggagcccaagggtgcacagcccctggctacggtaggaagagatcccagaggtgcacagcccagccctggagcagggagggagcccagaggtgcacagcccagccctggagcagagagagatcccaaaggtgcacagcccagccctggagcagggagggagaccaggggtcacagcctagccccggagcaggaggaagggaccccgggggtgcacagcccagccctggagcagggagggagcccaggggtgcacagcccagccccggagcaggaggaggggaccccgggggtgcacagcccagccctggagcagggaggg

SEQ ID NO: 60148 - DNA, 2422 bp, Homo sapiens
agggaaggagccgggggggtgcacagcccagcactggagcaggaggaagggaccgcgggtgtgcacagcccagccctggagcagggagagagcctgggagtgcacagcccagcccccgagcagagagagatcctagaggtgcacagcccagccctggagcagagagggaccccagggcttggacctcacaccccactcagcagccctagcgtttcatggcccctggtcctggccttgcgtgtggaggtagatggtgggagggcatgggggatccccagctgcggtctcagcctggggagctgctggcagtcacagcccacagggctcagctccctggatgcccatgtgcttgcaggaggaggctgcaggccaggagtgacctctgggtgccgaggacagacaaggccaggccagagctggccactccttagcaaagccctcccaggccacctgtggggtaggatttgccaaaggggacaggctggcctgctgggctctccactatgggtctccaccaggccctggagctattcttcctccagggtcttcactgacaccacaggtctacactgaaggacggtcagaggtgaaatctccccccggcctttcaatcagtgggtgccactgacaccacaggtctgcactcaaggacggtcagaggtgaaatttcccccccgcctttcaatcagtgggtgccactgacaccacaggtctgcactcaaggacggtcagaggtgaaatttccccccccgcccttcaatcagtgggtgctgaggcatcacttggtgtttcctttccttccagccctgctcccagaaaggagactgcagctcctcccaattctcctggggctccaggatacctcagggctgcagcctccttggggctgtcggagagcagcctgaggatggccgtgccccggagtgggagtgaggagcggggatcagggcagggtcggagatggagggagaccccgcctttgtcttcagcctcacgtacctttgtcgcagagccggcccccccagccagctttacacaggcagaagaagttgcccatgaggtcctggcaggcttgggtccccttcctatcgcaggggttgggcgtgcactggtcaggcaggtctgattggggacacaaagtggaaaatcatgttcagctgccccacccctgcgcgcccaacgcagctgagatcggggcggctgtggggtctcgggtccagcccggaggagctctgaggggcgcaggctgaggcagcccctgggcacccgagccctctgtgctggcctagggctgacagaataggctggcgggccctggggccggctccaggaaaactcagatcaactgggagggagtgccagcaggcctggacgcaaggtgggaagggctgagggcaaaggagcaggaactgcctggcgtgaggcctgggagctcagacctcccagggagtaggcacacagaacccccagctgacctgggggcttccaggcagactcggaacattctgccttccctggccagcccctagcccatctctggtgaactctccctgctgggtgtggcggggaggaccccaggcccaggctgcactgccagaggggtcctccaggaagcccccctctttctgcttagctgccccctctccacgtgtcttgatggctttaggccaggtgtgttctgccctttctcagggtggtcacctgggctcagctcctgcagggccagaggtcaggggaacgggtgagggcctgagggtgggaacccgtgccagtgcagctgcttcccaagcagtcccccatccgagaagctgctcacaaacacattcatacgaggagctgctcacaaacacgcttccaggacacggacccaaaccacgtcccagaggcaggcagggaagcccccgacagtgcagttacgcaagcctgagccccgggaagttggcagaaagaacgacaattacacccggagctcaaagaatcctttcatggctgctggcagagcagaagcagctcggggctgagcatggcagtgctcaggggcgcggtccacactcagctcagccccacatgaggactcagccacgctcagcttagccacacagggctccgtggggaaccctgggtagggcccccctgctggctgagagagggctccggtccattgattccacacaagttcaataaggaccagtccctgggaaaagtgcaggccgggccagcagggccctagggcactgggccagcatcgtcctaaggggtcagccctggtgggggcacgtcgagtcttcagtgcatgggctctcactgccagcgtgtcgcttctgttcctgaggctcccaaggtgacgtttcccaccaggtctgtagaatgtggcgtttccaccagagggtctgggctcggctgtcagtgcaggagccgcttc

SEQ ID NO: 60149 - DNA, 1634 bp, Homo sapiens
agaaaatctcccaaatacccagcatatgaggacggcagcaggtgaggcactggggtgagacagactcaaatgtgtggtgttggggcaggaactgagcctgcagtctagatccccacctcatccatcacgtcaaaagaaattacgggcgggtcacagatgaaaacacctaacagcaggtaactgttttgtaatcttggggagaagcctaaagcccaggaactaagagagtataacaagtgtgaatacagaatttaaaagaagagactggtttagcaatcactaagataaaacacgcgtgacaggatctgcttgtctcctctgagcacgcaggagcctctgccccaaatgcagacattgggccctacgtggcacctggctactgtgcatggttgcaggtcagggcaggccgggccacagggcagggccaccctcccattcccatgtttacactgagcatttcctctgcctgtgtctcttgggctggggtctgtgatacaagtccgggaggccagagacgcccacggacagtgcgtggggcttggggagcgggactgagccacctctgactccttctgctgactgggatccagctccaaagccatgcctgggaagagactcctgcctctcccaggatgactccgtcccgccacgcctctgctctcagcgcccacagggactcaccaagctggactttcatctaaaactagacacacgtgacgccagcggaccacagacccagtgcaaggggagctgtgtgggttgtgctgaaggtatgttaaaattcatacaggacacccaaaacaatcaatcttattgcatgataattttaaaataataaaaaagacttgtggcaagctgaaaaaatttttgataactttactaccaatggctaatgtgcaaactcctacaaattgagaaaaacaggcaaaaaatataaacaacagtttataggaaaagaaatacacagtttttaaacctatgaaggacagctttactcattagttaaaaaaaaaaaaaaaaacctgaaatgactgatgtcatttctcgcctgttacattggaagagatcaaaagtttaaaaaaacagttcattcacccctgcaggggcggaggctaaggctggctctgggataatttggcagtatctgtatccaaaggaaacatgaggactgcctctgcgattccatccttgggaacgcatcccgcagacactcagacgtgtgggaggcaacaggtgcatgaggatgtcacgccagttttgtttaaatgatggaaattggaaataacctggacatcagccaatatgcatgggctaagttcatatgatgcaccggctggaaatgccagcgtgaaggtgagacacgctaagagagggtctcctgtgcagacagagttgcagaggcacgggacagaccgtgtgtgctaagccgccacgcgtgtgaagagcggaaggccgctcacacatgtttacatgtctaagcacaagattcttggaactgtaactacggtggtgtctgactggacgactcagaggcggggatgggctttcacatcacactctgtgaaacatttacattttgttccatgtgcatttattgcctattgctaaaaacgtcaaaatttacttgtttaaaa

SEQ ID NO: 60150 - DNA, 2119 bp, Homo sapiens
ccaggtgcgtcatctctgcagggatgagctatgtccacaagtgcacagtggccatctgacagcctcagagctttcagaaaggcagatctaagaggggtcaagtcaaccactagaaatgtaagcggaaacaggcctccatggttcatccagaaccactctttcatcccgggtgacatttattccaccccaggagaattctttaaaaggaacattccagcagaacggaaaacttcgctatgaaatcaccctgacttcagggcgggagggacgtcaacgggaatccacaccttctcggactttccaaagtcacccgctcccgagcccgcaggatagagtggccaggccgtcctcacacggcggctcctgcgggaggcggccccgggcgccccgccttctccaaggacattcctaaccgaggtgccggggccagcaccgtcgggctcctgaaagcacccgctgcctccaggagagcacctggcagaacggggccgcggagccgccctcccctcccgcatgcggccccgctcgattcctggaatcttatttttggacctgctgccgcaagcagttcccgccctcggccctttcaattcctctttcgggaggggactgctctccacccctctcaggaggacgaggcgcggcccgggggttcctcacctccagcccagcagagggagggccgcggggaagcggtttgggttttaaccattgtgtttctctcgcactttggaaacggactcccggcttccccgcggggaggcgtctgacagcgagcgtttcccggacagccccgcagcgtctcaccggcctgcgcggggatcccggggtcgccgggggatgggcgtgggggacgcggggcgggccggggctcctgggaccctgaggccaggcctcgccgcgcggagctggggggcggcagcagcgctgcctctcgggagcggttggaggcgcgcgggcgccaggggttcccccgcatcccgcccgccggctgctcaccgtctcggggtcgttctcgaacacctcccgcgcctcctcgcggctgcacagctcctccacgcactccctctccaggtggccctgcttggcctcctcgaagacctgaaaggcgcggcgctgcctgggccgcaggaactgcgtggcctcgcgcgccggcaacagcgcggctgcccggagggagagagggggacgcgtcaagccgcgcccggagcctcctcccgccgcccggggacggggtctcgggcccgcgggactcaccaagcgcgcactccgcggccagcagcagcagcagcagctgcggcgcgcggcgcagggcggcgggcccgggcgagagcgaaggggccatggcgggccggggacgcgcggtcagagcgcccgggaggccgaggcgagccgcgggcgccgcggggcggaggctccggtcatcccgtcctggcggccctgaaggtcacatcgcggcggcggcggcggcggcggctgcggcacctcaagcgctcggtctgggcgtgttcgggcggctgcgcgcggggaggcggcgggggcgggaccagcgcgcgggcggggcgcgggttcccgggaggatccgggcgcggggaaagcggagcgtccgggacgcggcgggactcgagtgtttcggaaaaggagcgtctccccaggcggtggttgtcttcactagcgatggggtaaaaggaggacgcaatacctggttcaacttgagcaggtacattttgaccatattccaggtgtcatgtgaagatttaagcctctttccaacccccactccccccgaatctactgcatcctttttggagtcttcattcttaggcacattttgtcaagacttaaaacctaccaaagaaaagatacactgaggtcagatccaatcccactgggggccagcgagtgaaatgcgacggtttccttttataatctctgtttttcataatgatgacattaaaaatcttgaggtttcccagtagatatttaagctgaaagcaacattgtgcttgtcttcagagaccaagactttctggctcttgtcttggaatatttcgcaaagtcataggcaaaacacacacaaacaaacagaaccaaaacacagcagaccactcacggggga

SEQ ID NO: 60151 - DNA, 1744 bp, Homo sapiens
  modified_base (1)..(262): a, c, t, g, unknown or other
nnnnnnnnnnnnnnnnnnnnnnnnnnnnnnnnnnnnnnnnnnnnnnnnnnnnnnnnnnnnnnnnnnnnnnnnnnnnnnnnnnnnnnnnnnnnnnnnnnnnnnnnnnnnnnnnnnnnnnnnnnnnnnnnnnnnnnnnnnnnnnnnnnnnnnnnnnnnnnnnnnnnnnnnnnnnnnnnnnnnnnnnnnnnnnnnnnnnnnnnnnnnnnnnnnnnnnnnnnnnnnnnnnnnnnnnnnnnnnnnnnnnnnnnnnnnnnnnnnnnnncggacctcttgaaactcctctttgtcctagcacagctggctggaggtagctgagcgggagggtgggagaagcccacaagacctgcccatgccggctactacccccaacccaggcttcctctcacggacaggtgggacttgaaaccccacttggcttgtccaggaaaatccaccaatccccagggtctctgggctccccgagaggcattgcgggatgtttctagcagtcttttttcgggaccactttatgtctcgtgaggatctttaccttgatgtgacagaggacaggggcccaggaacatcaactcgggtgagcggtgctctggtgctcccggcaggaacccaagcctggctgttggccaccggcttgcaccgagcacacactgctccctggcacacttggctaaaggtgttgactgacttggccaacgtgaaacattccattctagttaaacactgagttctccgttcccaggagcttgcaaaccagcacagccttgtgaggaagtcatgtggcagaggattctccaagccctaggtgctcaggagagccttggagtgagcggattccagatcccacagggcctccagccgcatcggagccgggaatgtttgcggagaccctggcttcccgcagctactccctcttcccacaacacccccttggcccgggattcaaatacaacagggatgattccaaagctttaaatgatgcttgtgatggaagagaccagacctcctcccagagctcggcagagtcacatgggccactccaggcaggtcactcagctcagcccacaggcccaaggggcagctggggaatggggctcttccagggaaatgagaccaatggccgaccacgaggggctgcccccaacagagaagccacgagtggggcccagaggtggagcgcagagcctttgcagaatcaacaggcgtccagggtgcatgtgggctcaaggcagggcctcagtgggtctggaacccagcggattctcactgtgctcttgccggcctctctgggctgccctccgtgagcgctggtctcctgtgctccgcatggcccaggcccagacacaccccactggtgcccccgtgaagtcggccaccccacgtctcccgcatcccggaggcctccctgtgaagtggacgcggcgtctcacacatccgggcacctgtgggtgcacgtggcactgggcatgtcatggagcccaccaagtctgcgaggggtgaggagctgagtccctgcagaaaccaaggccacgtcggactctaccagtggtcagcaaggcccggcccttctcctcgggtcacagggctggaaatgcctcctgctcttctccggcagaatctcagttgtctgggggcagccacaaagctccagggaggatgcgctcctgggccgtggtctcgaaccctgagggtgctggtgcctgggggaggctgtgcagggtggacatctttgccagacaggacaagcggc

SEQ ID NO: 60152 - DNA, 532 bp, Homo sapiens
ccagcacagctgtgcccagagtgtgaacggagccccctggctcccgacactgcctgaggccctgccgggaagtgtggctccaggaggacgggctggcctcccggggaggatgcccccacctgcaagggtttgtccaccacccatagccactcctggactggggcagaccccacacctcagcatggactaaggaggccggccaggctgaaccaagcctcacccttccctgggagaaaggcctgggttggtgtccccaaagccacacctcctcatttttctcataccagagctgactcacaatagaattaccaaaaaagaggaattcaaatggagcaaggaaaggaataaagaaatgaggcaacgtatcatggagtcttcacccagagccccccttaaccctctcctgcctggagggacagcagccacctgcctagaggcgcagtccgttctcttctcccagggcctccaagtggcctccccctctgcattcctggagatggcagcacgtggtggtctgtctgcccagcactcc

SEQ ID NO: 60153 - DNA, 2291 bp, Homo sapiens
tgttttctattagaatgaccatcttttcatgctcaggatttaaccctccgggaacttctgaatgtgtgttgcaacttaaaagacatattatttcacaacatttaaggaggatcttttttgaactaaaaaaacccccacaaatttgttaaatttgtcaccagtgggtgactatggacctgtgatcagccaactctgaaatgagctccagcagatggacacagcgtcccaggacctgcaggagcagaggctgcgaggccagccacgtccacctcgatcacgtcacctcgtgggcagaatggcctacgccccatgtcctcccagccccacccagaacccacggtgagcacccggcaggaagtggccacagcaccatcactggaggccacgcggagtctgaggacagcagctttcccccctatgctgttgtggggactccaggctcagcctgaggacagggtcagttccctccacacagcaccaacactcccaggtgcaaagcccaggcccacggacagccccccgctgtccgtgggtctcatggtgggggcacccattttctttcatcagcaggaaggtttgtgctttctccttcctgggcagcagagtttgaagcgtattccaaaagaaaaatgaaaccggctgaacgctagggcattcctcccatcccccatcctgttcggtggcctgtgccggacaatctcttctttctgatggactcaaaggggccacacagccaccaggtgccccccttcccatcagcagcttaacctcggggtatctcttggacaggccggctttgtctccagccgaggtcagcagcagtcagatgcgggatgaatgcctggcccaggcggcccccactcaccgcccgagggctctggaactctctttccaaataaagaaaaagtgcggcctgagaggaccaggctcgcctgaaatcctgccatgtggcctaaggaaattaacgcacgcagcagcctctccctctgaggcagagaccctggcaaagtctcctttccctcagtcatttctggaagaagtgcaaatgaagtttcacagaatcaagcaaactttcacggggaaaaaagaaaaaacctcttgcagaaaacagagttgacctttaagtagtggctctgatgaggggaaaccatctgaactgaattcctcctcctcctggagcctggagcaggggctcagctgggaccagcagagaaacccccgccttctcctccctgagtcacttcccagcatctgcgcaaggctggcgctgccccatcccgcctgcggctgctcccatcacgtgatcataagaaaataaacctggtttcccagctctgtgctctgccgcaggctcggggcccatttcccaaacgctggggggagccgggagctgccagggctgccccagcctcggggtagagggtaaaggctgcgtgaagaggaaccaaaccccaaaccgggtctgcgaagcagccctggggctcccaagccagcctctgggctgagctctgcggtcctgagtcactgcctgactcatcctcagaggcgccccacagagaaggggcaacttggccagggaaaatgctccatctccgcaaaggacaggaggcaaaacacacccatcagaagcacatggccagtgcagggccacacagccctggctcccacagaccgcaggctggagaatgggggtccgcggtcagctcatagcccacccgccacccagcactgcagggtcacacagccctggctcccagaggtcagaggctggagggcaggggtccgtggtcagctcacagcccactcaccacccagcacggcaggtctcagcggaagccccacacacactgggttgcagcctcctgtggttcaagatgggtggggttattttgaaatgttggcaaatagagctgtgagtcttcaaacggaacccaaagactcagtgaggaaagcaggcgggctgggctgagactcacagctgcagcggccgtggtgagccacctcacctccccgagcctcagtctccccatctgttcaggggcaccgaggagctgcccctcggctcatgggctctgtggtcgccaggcacgccacacaccacacgccacacaccactgcacgcagcaccccgggacactgtggcctcggctcccgcctctcctgcacatgaggctctttcctctctcccaccccataccccccaaaaaagaaccaccatccttacaaacaaatgaaaatcggctgggtctttagggcccggccacgatgtgtgactgcagcagtgactctca

SEQ ID NO: 60154 - DNA, 1472 bp, Homo sapiens
gctggtaagctgggaaattcccgggcacgacccctggccgtgggtgaaagcacccccagccccacccccagctgtgagatgctgcaggttccccagccccacccccagctgtgagatgctgcaggttccccagccccacccccagctgtgagatgctgcaggttccccagccccacccccagctgtgagatgctgcaggtcccggcaggagaaggcttctccacagagaggccgctgaacaaggcacagggccaggtctggccgtgtaaaaatacttggaacccatggggggctttgtgtgtggtgtcatcggcagcttccattatgtccagcggtaacatgtttacggtccctgtgccgccgtgcggtagcagttttcccgagtgtctcctggctgggacggctggtgaggatgtgagttcaatagatgaacaccccaccttggtgacacagaggctggacagtcacaccgacccttggcccgggcgaggccacgtgtcccacaaaacataaggcttgggttagtgtcgggcacgcgggggaggtgcctgcctgcgtgaagactggtcacaagacaacttcccagtttagaaaatggttaactgattcattaatactcacttcctgtcgcaagagactcatgccctagagataaagccgtcggaggcagagtgcaggcctcgaagcagctggtcatgtccacgccctctgcaggcctcgtgtccccctcgctgtcgcctgccgatttggtggctcctctcataacacacagcctcctgtgtatgtttttaccctacaaacgctctctaaccggtccagaggtcagaaacagccgcagtctcctacctctattgcttctcaagggaaaagcacagcctggaatgatgaggagcccccacgccttctcagtctcctgtaacgacgttgctacagatgtatgtgtttgtgtgaagctgtatttaaatgtgagattattcttcttggttaatattttactttctgtcataaccagcaggcttaaagaagaaacccaaacgctctgtgaatgggacatgtgctcagaggcgtctgcagttgaggcgggtgacgttctggggtccctgggaagttgtcatcaccctgctgacatgagtgtggatgttgaggcctggagggtgacaggtcacacagccagagcctggcagcagcgcaggggcggaaccccgggtcccctgtgggcctgtgccctctcggccagccttgcaacgcgcagctaacgctcttcaagaaaacattctctggaggaatcctgctggtcctgaagtttttggccttgagaaggtcatcacagacacccctcccctcgggccaggcctgctgtcttgtctaaggggccctattttatctgaggtgatttgcaactctgaaacacacatacataaaatagaaataccgtcctcactattaacctagagacccccatccctacccct

SEQ ID NO: 60155 - DNA, 1029 bp, Homo sapiens
accgatgtcaccgccacttttaagccacaggcattacactaaaatctggactagcgtctaagcaagtggcagcttttgagctccgcacactccgtgtgaccatccacaaatctatgatgaattattaaccagaccaggctagcccactgcctggccttctctgctgaaagtcagcagctgtatcctgcctgaaaaacaccagcattcttgtgttcataaaacccgctggttccagtgcagctacccagagggaagccttgggtgtgggcagcgacaggggtgtgggtgccaccgtggggtcccccagaaggaaaccaggggagcacagaactaaatggtcacccatgacaatgaatcgtgatctggtgggaagaaatcaaagtgcttttatttggagatgaaattggctgcctgcccctccctctccaccccccgctttcctcctgacccacccaccccagctcttttccccggcctgggaagggcacatggagggcagaaagggcttccctaaagaaaacacagaaatacactttataaagcaaaataaacttaaaaaaaggcacttagcaaaaatgtagtgagaagtgttttttcctttccagtctttcattttcactcagcatttccataaacacattcttgggtccaaatgctgagaaactctttctctaaatactggaggagcgctaaatggagcaggaaatgatggagagagaaaggaatgccactgattccagacggatgggaccagctggggaattcaggaagcggtacggaggtcccggagacaactgctcacgcctctgaggggccgatcgctcaggatcccccagcagcagcgagagaaccagcagggcccccctcccctctccagccaggcgtcgatcagtgcccccctcccctctccagccaggcgtcgatcagggcccctccctctctccagccaggtgtcgatcaagtcctcaccttctctccagccaggcgtcgatcagggcccctccctctctccagccaggcgtcgatcaa

SEQ ID NO: 60156 - DNA, 649 bp, Homo sapiens
tctaattctaggggggcaactgcacggtttgcccccgaccgtccagtgttagtgtccaaggaagcccctcagttccgaggtgaaccaacagaacagatcaccctgtgaggtatgaagtgttgtcctctgcattcgacagatgaggaggttacagctgcgagactgtaggcggttgcccgggcgctcttccaagtaggtagcagggccgagtgaatgagcctaggcaccgcccggtattgctgcaacagccaggcggcgctttgacttctgggtcagtgtcactgcctacctgaatcactcacttcctgtaaaatacttgattccaaattactttggtctgtattgaaaaataaaattcaagtttacctttaaagacaaagatttgccatatttaaggatattttagagaacgtgctactgactctgaagaagaggcataaaaccgccttgaggaacggcatcgtctgtgctgaagcaggcagcgcccagctgacgactgtcaatgcagccctagcaaacacggccacgctgccctccatccagggtcctgtccagtgctgtgctaagcacttcacgtggtgacagctagctgcacaccaggcacggtcaggtgcttagcgtttattaagtcgttcaattcttctgtaac

SEQ ID NO: 60157 - DNA, 1378 bp, Homo sapiens
attagatgatttcctgctttttttcagtgatatactgctgtcatttttaaaaattatcctcagcactatgtttcagacaataatgataacatgtcttggcataagcaagctgtgtgttaataaaatatttttgacactgagcaacacctgtaagcattgcaaactatccagaggcagttgtttttttcacacatcactgtaggaagcttttcctcattcatcttatgggccctcactcactgcgttccagccagactaggtttctttgcattccctgaatgccctgggccttctcccacctccactccctcccctatccactggttcaaccaaatccttcagttccatcttggcgtccgtttgaggaccgccactgtggcctccacaggcgtcaagcctgtgttcgcagggccctccacaatctgcactccgtcacccgctcctggcagaacactggcacaggagaccaaagtacacgtggatgagtcaatcagaagaacaacttgtactagaaagtgctttcccaaatttgacatcaaaattgagaccagtgaacactttcatggctcatgacaaagttcatatccacctaacacaaaacgagggcattattcagttaatttgatatactaaaaagataatcagataaccagctagagattatgacacttctgaattggctgttaccctcatgtcgacggggctggacccgtgtctgtggacagcagtctttgagaagctgcagcgggagcctgtgcaggatgactagtgttgcagtgtcctgggggtggtgggacaggatgctaggaagaaaaggcgtccggcacctcaggatgctctgtccgggtggctcagcttgcttcccgtagcctcccagtccttttactgaagtttcaggaggtgatgcttgggacgccaggcctggcagattcctctccaggcttcccttcaccccgcagagcttccccgcactggcagaactcgatcactgccacccagagggcattgtctctgaagaggcatggagagtggggaagctgcaaaccccaggctgatgttcttggtgtccccacagcctgcttttgccttaaaaccccaggtatactcacaaatgggtacaacacccaagaggccattgtcagctcagggacttggttttaggtgcggctttgggaacttgcttaggtaagttagccttgctgggtcttattttccacatcagtaagtgccacgaagcttaacatttataagccaacagaatgcctcaattttaattaacaaacattaattatcaatcattttttacctggatggaggttaattcaaaggaaaggtattaacccagagggtttttctttttaagagtgttattgtggtg

SEQ ID NO: 60158 - DNA, 1455 bp, Homo sapiens
cctaggttgtctttgacttcatttgctgtttgtgcacacaattttttttttttgtaatgagagtgcgttgctcttatttttaaaatgttgactacattctggggaaagaaggctcagcagccacctgcttttttgcccgggtgggtggtccggccccgagccctcctgactctctcgccaatgcccagaggcgccgcagcgattccagggaggccgcgctctcgccccaaggcaaccagaagcccacgtgccaggagaggcatcggaaccaacaactcgggtccgttttcccgcgccagatgggattcgtttgctgtggacttccggggcggggcctgcctggagcggaagagcctgggcagtgcacggggcctgggtggggggtgcgggtgtgggtggggacctgcggccttcgagtccgcggccttcgagtcctggggcggcggcggcggctgcaggcacgggcacgggcacggggcggggtgcttagggtgcaggaggcgcgcgcctagcggcggagtgtggcgtgaggccgggcccgcgccgccatgaacctagagcggctgcggaagcgcgtccggcagtacctcgaccaggtgggcggccccgactcggggtgcggggcccaggcctcgccgggtctttttccgcgcggcgtggggctggggtgactgttgtcggggctcttggtggggaaggactgggccggccctgggccttcatctggggccagcagcgctgtctccgcctcgcccagaagggagcggtccctgcagctgggaggggcacagcccggggagtggaggcccccgagcgcacggggcgcctcagtcgggtctgagcctcgttctgcacctggcgcggaggaggtgcccaggaaacactgactactcagtgcaagttgaaggacaatttttggaggaaagttgcagggctagctaataaaacatttttgagaggtttagttgtaatttttactgggctgaatttaagtgaataaagatgtgaagaagcctgttgtctcaaatcaatactttaaaaattctcgttaactatgtctgtgttctctgcactacctttgaatagcagagagcgtttaaggcaagaagtgtcttcgagaatcagcagcatcagttttatctatattgttgtttattttttgttgaaatgcttgctctttcaggaaattggaaagaaagggaaagaaaagccatggtaatgcagagttttcggaattgggtgctaactgacgtggccaaatgtttgcagtccatttggagggctgtgtttttatttaccatgagtcagttgaattcagtgttttctgatcactttttcttcggtacggagacgtagtgaggaatatgacaggcccggtttccagccagagacaccggtattgagcatatttataactatcccgttggcattcctcctgcctcgggctagcagcag

SEQ ID NO: 60159 - DNA, 2795 bp, Homo sapiens
ccatttggtaattttggaaaatttggcagagttaataaagaaatccccttggtgcaagattgctacaataagaatctattatagatggcagatgtgaagttcacagtcctttttattatcctaacctagtaacatgactagaggtaaaattaaatattgagttagatgattgtttaatattttaaaaccagagggaagacatacaaatagattgagagcagtttctttctaaagataatcagaatatatctcctatattttaaacactgcaggaacagtcaaaattttaaaataaatggtttccacatttttttatccccatctctccccctgactatatagtaaaatattttatttggcaaccacgttttcctacttttaatcacacatcatcagagcttttcatcagcctaactagtcttcctactcactgagttgtgacgaaagcctggtctaggcacttttaccacggccatgtttttgttaagatccctgcagactgtgaactatgaaaaccagcccctggccccgcttgtgggtgctgcagagccgcgtgtgaactgctcctaggaaaccgcgtctctgggcagggtggctctcgggccgtggatccgcctaaaagcttttctgccagtgacgcccttggtctctggatgtgttcacgcctcagtgattttactctctggtttcttgtgtgtgcttgagattcttgagagaaagcgtgctgcagatgaaaaatgcagcctacatgaaaaagagaaggggaaagccattttaaaataacttccatgtaagttactgtaatcaaagtgctgctgcctgtgtgttcataaaaaaatatgtgcaagggcccggagcggtggctcatgcctgtaatcccagcactttgggaggccgaggtgggcggatcacttgaggtcaggagttaccgagaccatcctggccaacaaggtgaaaccccgtctctactttaaaaaaacaaaaaaattagccaggggtggtggcgcgtgcctgtaggtcccagccactcaggaggctgaggcagaggctgcagtgagccgagatcgcgccactgcactccggtctgggcgacagagcgagactgtctccaaaaaaattaagaattcaaatgtgaacccggctttcatggcgccccggccacggagagcctgggggagtgggataaaaacggtgctgggatgggagggcggcttgtccgcgaactcctcccaccacgcccggaccaaagccgccggcgccccgcttccggggccgccctaaaccgcggccgccgctccctgaggggccgcctgacccggcggaaagccaggctgtgtggccggaggtcaccaccccgaccccgactagtcccgcagcgcctgaccccttcgtgggcggccccgaccgccgcggctcgaggaggggcggggctggggcggccgagctctcgcgaggtttcgtcgggggctggcggctgcggctcggcggagagtgcggcatgcgctcggaaaaggagggggccggaggccttcgggcggccgttgccgcgcggggcccgagcgggagggagaagctgtcggccctagaagtgcagttccaccgcgactcgcagcagcaggaggctgagacgccgccaacttcgtcctccggttgcgggggcggtgcgggcaaacctcgcgaggagaagaggacggccctgagcaaggtggggacgggggcggggcgcgcaaacctcgcgaggagaggacggccctgagtggagggaggggagggaggggagggaggggcgggggccgggcctcccagcgcggtacgcggtgccttttgagctccttgtccacgctccgccccggtgggaacggccgcgcgctccccgcaggtggtcatccgccgcctgcctccgggcctcaccaaggagcagctggaggagcagctgcgcccgctgccagcacacgactacttcgagttcttcgccgccgacctgaggtgaggcccgccccgaggggaggaagagagggcggaacccagagctcggcggcggtggccgtctcgttgccttacgttccttaccctgatttctcctatatgggagtcgtgtgagctttttgaataaatacatttcagtaaaacgtgtccgttccgtcaaagaaaaataccaccaacaaagaaacacagatgtggtttacatgaaaaatgcggatgattttcagacggctaacgcttaggaaagcgggtgcctttgaaaggaccagcgttgcccgcccggcgcctcccgggcttccctgctcgtccgcggacggggcgctgcggggccggggggcgccggctcttcctgtggcctccacgctggtgccgcagccagtgcggttttaaataccggagaaggtccccaagtcaggagagtctctcggcgccacgggttcctctgggagtgcgccctggccttgccttagggtttcagcctcggaggaccggttctgggcagtggagaagggacctgagttctgccttgtaaagttaacgttttgcgtttgtttttgctaaagaatatccaagttgttacaattaactgagatgatttggcacaaaagttttatctaaagtagtttgttgtgcccagaaaaggaaaaagaggctaaattaatggactattgtatttttcactgaccattttcactgttatctcttatttcagtctttatcctcatctctactcaagagcatacattaattttaggaatcctgatgacatccttctttttagagatcgttttgatggatatatcttccttgac

SEQ ID NO: 60160 - DNA, 1875 bp, Homo sapiens
tttttgagacagagtctcactctctcccccaggctggagtgcagtggcgcgatctcgctgtaacctccgcctccccggttctatgggattctcctgcctcagcctccctagtagctggggttacacgcgcccgccaccacgcctggctaatattgtatttttagcagagacaaggtttcaccaggttggacaggctggtctcgaactcctgacctcagatgattcacctgcctaggcctctcaaagtgctgggattacaagcgtgagccaccgcgcccggccattctatagttcattttcaccacaaaaacaaaaatgaaattcacaacaagcaaaacttcagaagggtacaaaggtagagagcagtgtgagctaattttacagtctttcaaagcatacagactgatggcatcagcattagaggtgcatgcattttaattagaattgtggtggtaacattcataaaactgaaaacaaaaaacgaagaagataacttctgggaatcgggactttcagtggaggcggggtgatgagaaaaggaatatttactgtcatccaacaactttgtcttgtacttttgtcataggtattatgccagtaatatccctgagaatgtatggggcaggtctagctctttttttcctaataaattcattcacacaacaatcaaaacagcaagaaaaggaagagatatccgcacggcggcggcaggccggggccgttccaagggcctggccggaggccacaggccagacgcggcggaaccctcccggagccgcgcccgggcgcgcgcgggaagcggaggcggagtgggcacgtgcggcacttccggggcggggcgggcacgcagcccttccgaaggcccgcgcgagccgctagttttgcccacgcacttttggcacagccgcgccacgcgatcggcgatctgattggcccgcgcgggagggcgcgcggcgccaaacttgcttcccgtcagcccccgcccgtcccgcgggagcgcgcacgctcgcgcacccggatcccggctcctgcatccagtcgccattcgggaggccgctgcgctgcagggcctcgcggagccgcccgcgaccgcgagccgggccctccgcgcggtccatcgcccactggacgccgcccgcggccggaccggtgaggagcgagagcgagcgggggaggggcgtggttggggcctgcatccccgagccccgtgtcggccgccgacctggcggggacggtcccgggaagccgcgggtccgagtgaagggggcctgcgctgcctcgcttcccacacggcccgagggaagggcccgcccccacaggccggggcgggagtgcgtctttgtgcagggagcggggaggcccggtgtcagtcgctgccgaggctggaaacattgcgtttgaaaccattgggaagttgagggcggcacaagacgaaagccattctttctgttttagttctagactgcctcctcttctgtcattattactgtttaaaaatccgctatacagcctccaaagtgggagaggacatttgtaaacctgataaagagttaatgtctagaatacaagaagagatgcaactgaccaacaaaaagcaacccagttcaagaatgggcaaggaatttgaatagatatttctccagagaagagagacaaatggccaataagcacgtgcagtgatgctcaacatcactaaccattaaggaaatgcagatgaaaaccacaatgagataccacctcacacctgttagggtggctattaaaaaaaagggaaattatgagtgttggggatgtggagaaattgaagctcgggtgcattgctggtgggaaagtagggtggtgcagcagctatggaaattggtagtcgttcctcag

SEQ ID NO: 60161 - DNA, 677 bp, Homo sapiens
acaacatgtgacagtagttcatgcagatctgccacacacatgtatatgctattcgctatggatgaatcgagaaaacaacgtcctctctaaaaatgtacatgaacagttaggagcaacaaatcttcttccatacaggactgaaattaaccgcagtcaggtcggcagcaggaggttccaacgaggctccctggctggctgcggctgcaccctcgagggttgttatagtaaccacacagacgcacgcagcttcgcgtgtgtgccgaggaattcacgggcagtacataaactggactccctgcttcattcggagtaacaaaaacacatacagaatttaatctacggccccacctgcaatttctgcaagatcggcttgacttcttcctcttcatcagccatcatctcccggccactccacccccaactttataaccacagagacgcacgccctctctcaccgcggaaccacagcgacatctggcgttctggaggcttttctgccccagaagggctttgcttcaaaccgacttaaccatttatttccacagagatgctctacaatcacttgtgagttcataaacttctttctttcccagatcctggaaacaaaatgtcctcagcttaatttctatattcttgtttcatgtcttcctacttatttatactaagattataatact

SEQ ID NO: 60162 - DNA, 1064 bp, Homo sapiens
ttacatgacaactcacaccagcatgttctataccaagtcacaagaaaatttagagtaaccgttcatcctttatttaactctccattcattaatataaattattgactcatctatttggagaatgtcaccaaatgcccaagctcaatatcaaatagggcaggatcaggagttcaaggttacagtgagctgtgatcgtgccactgtactccagcctaggcaacagagtaagaccccgtctcgaacaaaacaaaaaaaatttaacaacaacaacaaaaaaaaaccgagcaggacccctacacaagcttaattttgtataaatttacaagcttggataaaactgcacaatagtctaaccaacttctgaaaggctataaaggtcaacaacctcacagtaagaaaacagttatgcaagaggaaggagtcaagaacttttaagattcagataactgagaaaataatccaaaatagtcagttttttcaaagcatgtttcaatttcatttgagccaatgccggattgtatttaacctttactcttcgtaatcctttgtcaaaataatctgaagaaaatcttccctttatataggaaaattgaattagtaacatttgtaacccaagtctgccacaagatggcagtgtaagaaagagtcttgctttaatttcctcttccagcatttgcgtgtcatctgaactttcaggtcaaatacatactagatacgcagttcatctttgcaggcaaccttcacactattccctactcttcacctaattactagctagaaaattttttgtatttacttgtaatgatcatctaaaacttgttagctaaaaatactgcagttatactttcatcattatgttctttttcatgcagcagtgtggagatttaaaaatccataacctcagatacaatctagccagaaagacaagactcacagaaattaacataccaccaaataagtagtagaaagcaagtaaggttaagaaaagaagtaggattggtcaaggaaggcttcatgaagcaaaaagagtgggtcacaagtggaccttaaagttgcatgtccaa

SEQ ID NO: 60163 - DNA, 661 bp, Homo sapiens
actcacaaaacttccacctaaaaaaccggaactaagcctcttaagactaaaacagctttggagaaattcccaaaggcttccttttttattttgcatgtttacatcctaaaatacatttcagcttttcctaacttaatactaaaatatgccctcaacaccatgagttcaggggcatatccagcacacattttctaagtaaacactgaaagcatgccctttctgcccctgtgaatacaaagatgacttggttgttctgggccactgctgtcactccttcccagcattaaacacatgctcataacaagataaaccatccccactcaaaccaaagtgggcaaagatatattcacataaaagccatcaagatgattttcctttcggtagaaaatcctttattgctcaatcaagtttagagtattgattggtttctaatcaccaccgtgtacaaaataaatataaataggaagcactgcaaaatatctagagtccttttaaacaagaatataccaaaacccaattgaaatgcctttatgccaactgactgatttacaaggttattcatttgagggggaaatatcaagatcataaactatctgaatacctactgataaaagctaaataaattatagtaggtacataaattagaatactgagttaccat

SEQ ID NO: 60164 - DNA, 2111 bp, Homo sapiens
ccaaaaaataaattttaacaatgcttgagaattataaaaattatgggaggcctacaaatacctattactacattcgattaactggtttattatttgtctttctcacactttctgcctataagaatatccaacacaaacatcacattaaaattaacatgtaccaaaagaaaggaattcagtgaaatgacattgaaggtcactaagcaaactttttatgagaaaacagatatccaaaatacttgctgtaaataaataagtactgcttacttctaaaggtacctaacatttattacacaccaactagagcctagtttttatatattttatctgatcttggaaagctaagcctcggaatggctcactgcttctcccaaggtcaccagagctgtaaactgtggcgctggaatttaaatctagaggcttgccctgaactaaggtccctaatctttttccatagcttttaaggacacaatcaccacagtggcaacattaaaaattaggagctccttttaaggcttatctgtcttcagagtttgctgcccaggttcaccaagaaagccgaaatgatctgagcgaaggccaggagaaagacaaggtacgctgcagcttccacaaacccagtaaggacctgggccctctagacactcaccggagaattaaactctactgagctgaacgccttctcccgaaatctgacctcacccagggagatataaatcaaaacagcattaggatgataatatctttcccgccaagcaaaatgaagccggcgttttccaagaacacacgcactgtgcacatgaagcacagtctattgttcctgggtcaccaggactcggagacggaaggcaaacccagtactgcagaggcccacgtggaaacaagccaggaagagcatttcactgccttctcccaacctccacacagccgaaattaatctccttgcgactcacacacactcctatgccgacttgaaataaaggcctgccacctgggtatataactcaaatggaagagaaattcaaaacaattagagagcaaaattaagcgcacactcaccagcccaccaaaacggagagggaaagaaagtggagagacaggaagtcgccttgggaagtgtcttcagaacctgattggctaatgagttcaagaggattccctcctcctttaccttaaaaggtgctgaaatgacgtaacccactccacccctctttatggaccagtgatgcttcttgcactatttttggagtgaacttcttaaaccgagtttccttttgagttaatgtacttaggcaaaaacaggctaatttaagctatttatacacgttgttgtttgcgtgggcctactgcattctattctaaagaattttcatcccttaagggtaatttcttatcctttgtgacctcaacatgcttaacttatgctaggcaacagattccattataaacagtctagatcgattcaagttaaaatttaccttcattttttccccccagatccaaagctggcctgataaaatttaccttcaggtaatctttgaactaacaggcttagtagataaaaggtaggtgggttaagtgttttaggcttcaaataaaatttagctgattttgaatctgaaccttgccacttatttgcacacatctaagcctcagttccaactataaaaagagggaaaaaagatgaaatcttcctactctgatggttatgaggattaagtaaaataatttatataatgtactcagtacaatgcccggtacacagtactcaacaatgttagctgttattattgttattacatatttcttgttagatttatattcccaagtagactataaacaactggagatcaaagtgtacgttttacacatctccagacaaaaacaatgactttcaatgctgaggacataattgattaatcaattattttgactcctcacatcgccctccagttaaagtataggttcttactctgttaaattttttttttttttgaaacagggtctcacttcgtgtcccaggctggagtgcagtggtgaaatctcgactcactgtagccttgacctcccaggttcaagcgatctcctgcctcagtaagtagctgggacta

SEQ ID NO: 60165 - DNA, 2723 bp, Homo sapiens
gctttggtgttattgtaaatgctaccttatccaaaaattttatttatagttgtttgaagctcttttataagcatggaatttattttcacacgctattttctatcagtcttgctaggctttgtattaaggtaaaatttttatcctgtagtttcttctagcttttaaaatattcataatcaaattacatgcaaataatgagattttgggttttttctttctaaactttacatcttttgatgaacaaaaattaaaatgtatcaatttttttttctttgtttttttcagacggagtctcactctgtcacccaggctggagttcagtggcgggatctcggctcactgcaacctccgcctcccgggttcaagcgactctcgtgcctcagcctcccaagtagctgggattacaggcgcccgcgaccacgcctggctaatttttcactttttttttttttttttttgtaatagagacgaggtttcgctattttgctcaggttgctctataacagatactatgctatcctaacaatatgtttctaaatgatattagtgccaaaaccaggattacccagtgattttgttaatacaggcttattgaatcggagggtctggggtggggaatttgcttaagtatgcagtccccatactcggtgattctcatgaagccaaacatttgggcgcccctcacctgatgtcaccaagaaccagaagaccaattagaattttcgtgggcttcctgccccatggttccctctgttcccaaagggtttctgcagtttcacggagcttttcacattccactcggtttttttttttttgagactcgctctgtcgcccaggctggaatgcagtggcgcgatctcggctcactgcaagctccgcctcccgggttcacgccattctgcttcagcctcccaagtagctgggattataggcgcccgccaccacgcccggctaatggctaattttttgtattttttttttttagtagagatgggggggggtttcaccgtgttagcctggatggtctcgacctcctgaccttgtgatccgcccgcctcggcctcccaaagtgctgggattataggcgtgaaccaccgcgcccggcccggtttcgttttgttttttttttttttttttttttccaaaaatgggcggaggagagtagtctgaattgggttatgaggtcccctgcggggtacctcacctcagccattgaactcacttcgctggccgtgagtctgttccaagctccggcaaaggaggcatccgccgggcccctccccgaagggcggggtccacggcatctcctgcccagtctgacctcgcgcggagccccgttctctgggaactcacctccccgaagctcagggagagccctgttagggccgcctctggccctagtctcagaccttcccaagggacatgggagtggagtgacaggacgcactcagctcgtggccccactgatgagcttccctccgccctatgggaaaaagtggtctcatacagaacttataagattcccaaatccaaagacatttcacgtttatggtgatttcccagaacacatagcgacatgcaaatattgcagggcgccactcccctgtccctcacagccatcttcctgccagggcgcacgcgcgctgggtgttcccgcctagtgacactgggcccgcgattccttggagcgggttgatgacgtcagcgttcgaattccatggcggcgcggcggcgacggagcaccggcggcggcagggcgagaggttcggagctcaatatcgcgggacggcatgcggggggcgggcagtcagaaaggaacgatgccacctactgtgacccccttccccttccagctccctataacctgcacttggctaccaaaccagttggggtgctaaattttgtaaatttcggttttcagagctttggggattacataattgtgcataaagccttgcggagctgtaacaactaatgtgccagtactgttgttaatacctaatgtcatccaatttacaaaaagtaattgtaaggcacaccattattttatacacaacaaaggataagcactgaaaatggtgaactgtgattcactgcttatgtcatccattgtaagatgcatcccagttccagagagtaaaatgcgagtcttagacctattgagatacggtattatgtgtataatgttcttaaatgcataggtgcaccctataaattaggttctattgtacttctctagaagtacagtattgtacaatattctaatattggagtaagtgaagtaggaagagatcaaatacttctccaagtttccacagagaaaagcagcagagctaggctctaaattaggcacagacccttgagcacttaactaacctttatcccatacggcctcatgtatgaggtgggtatttgggggacattgggacacaagtaaaacagataagcaggcctcaatctatgagcttacaagactcctgggactcccttttattttgttttatttcatttggctagaatagcaatttaggaagaattacacagactgttacacaaaagtagtgtgggacagttgttattgcctctgtaaacttagaaaattatcttaaaccggcggggtgaggtggctcacgcctgtaatcccttgggaggccgaggagggcagatcacttgaggtcacgagttcgagaccagcctggccaacatggtgaaaccctgtctct

SEQ ID NO: 60166 - DNA, 2177 bp, Homo sapiens
agttgcagtgagccaagattgcgccattgcattccggcctgggcaaaaagagcaaaactccgtctcaaaaaaaaaaaaaaaaaaaaaaaaagaattatctacatataccggcttctatccaggcccctttattctactccaccccaagtggtttcaaccatcagggaagaagaggctgtcaactgggggcaggtgtgtgtgtgtatgtgtgtttgtgtgtgggtgcgtgtgtgtgtgtgtgcagtggctcatgcctataattccagcactttgggaggccaaggtaggagaaatgcttgaggccatgagtttgagaccagcctgggcaacattacaaagaccttgtctctaaaatttaaaaagaaaagtaataattttataaagtaaaaaacgaaagaaagagcctgctataggtaaaagtagaccaaaaaaaaaaaaaaaaaaaaaaaaacagagaaagagaaaactgaagataacttgatcctcctctatttgactttttttttttctgtatcaatgtgggcaaattacctaaaacttccatgtcctaaatacaatatgaggttctgtacagattccaatatgccatgtgccagtcctaccttttttggaatgagttacagagatatcgatatgagtacaatgagagagaaggtacttttgtcatatgttgataaaaacttgtacatcacctaactacatctggtataatgatctatgatgccaacattactcaaagcaggtaccactgtttactttggtgtagtcaatggcagaccttataaatcaaatacaacaaccaggcaaagtaataacttcatcattccacagaaatcttctagtgaggatctaaaatgtggaggcataaatggggaagagaaggagggaatgtgatggtcaaggtcactctaccaatgagttcctcccagaccgacgctttgttcccccgtaggctcagctcccgctcccaggtctctggcctagacagcttcatcctcttcccagctctgctagaatcccaaggcccaggaaggcgacttcgagaaaagagctgtaggttggaggggtatctgaggataggtaagaaagaggtctatcatttcagagtcagcaagaaaataactcagaaaaggaaaggtgagtcatgtttacagggcatgtctgcccaaatatgcctaaaaataactcagaaaaggaaaggtgagtcatgtttacaggtgagtcagaaaaggaaaggcagcaattggaaaggcagtcatgtctacagggcatgtctgtctaaagtcatgttgctgggtttgagaactactgggatgggggccacggatgttgaaaagttaaggaattacttagatggaatgcatgctcagggtgcagcttctcacctgtaacccagcagggcttgaacgtgctgggcaggcttgtggatgtgcagtcgctgaaccagcttcttcagggtgaaccttggaggattctttttctctgacactgtatcaccggccttctcaaactgtggaaacatccccaagtcccacaggggtcctttcatccatgaccatgggaactttcttcaataaagcagattgtaagaccatccgatccctatgtggtaatttctttcttcaaaatagatttggccaaggagcaggaatagagggtacaaatctctggcaacaagagctcccatggtaagcagcacaggatggcaactctttggggtcactgtttcattcacacaagcagttaacatgggttgactggcttgtgagaaacaaggtggggatagaatgaacacaggacagctttgtttgtagaggaggggaaagggaaaatcagctccgatttaaatcactaagactcttaatagataaatagagaaacgagcacaatgcaggctacgaggagtttaaaaactaaaagtaggcagggcgtggtggctcatgcctataaacctaacactttgggaggccaaggcaggtggatcatttgaatcccagctactcgggagggaggagtaggaggtcaggagtttgagaccagtctgaccaacatggtgaaaccccgtctctactaaaactacaaaaaaattagctgggcatggtggtggatgtctgtactcccagctactcgggaggctgaggcaggagaattgcttgaacccaggaggtggggattgc

SEQ ID NO: 60167 - DNA, 1049 bp, Homo sapiens
ggtaaggcagaggcttaagagcagagaaattaagaaaaggccaggtgcagtggctcatgcctgtaatcccaacactttgggagctgaggcaagaggattccttgagcccaagagtttgaggcaagcctgggcaacacggtgaaacctcatctctacaaagttttaaaaaataaaaaatatttcttaaaaaaaaaaacaacaaaaaggaatggctggagaggaagggacatgccttctcataagaaggtaaaggagacccaacccccctgacccccgctgcaggactatcagtttgatccctacttagtagagaggcctcgcaatataatctggactgtgggttcatagctccagagaaacaggtactttaatcaagttgtcaatattcaccaccccagcttccttgcctcctattcactctttaaccaactaaatgggattctgtccccaccagtccacaagtcctcttaggtaaccaaggaactttttcttactcccataaataaatatatcttggcctttatcttatttcacccctcaagtagaatatgacattgttgattactctctcattaaaactctctcttcctttgctttccatgatgctactgtcctgattttcttcttaaaactattctgactagatcttctgagggattctttctctgccatttcttaacatcaatgctccttgcagttctattctaatccttttacatactttcctggagtggtctcacccactatgtggctccaaatgacatttctatgctggcgactcacagatctattcctggacctagatctcccttctgagcttcatattcacttatccatttccccgttggacatccccactggatgactcaaaggtgctccaaattccacagatcctaaatgtatcatctttctccttctcatatctctgccccaaatccattccccttcctttgccccctttgcccactggagttggaagtgagacagactttactttgaatcctcctttaccttgggatcttggttggataagatacttaaattctctg

SEQ ID NO: 60168 - DNA, 3325 bp, Homo sapiens
ctctacagacttcagtttcatcaactcctccaaaaagcctgtgctgacaccaagccccagtctgatttaggtggccttctccttgttttcacaacacccatatgtcccctatcatagagcacatcacctgtttgtctttcttcccaatagaccattaagttcctgaggagagagacccttttagccttgttcccacaattgctggtcagcgggattcagaggcttttgagaatctggtaaaagctatggagctttttcacagaaaaaaaaaaagtatatactgttttgtgctcaattttcagagtgtctatgaagcccatttatggacctcccaggatctccataaactgaaaattagaaacctctgcctaacagaatgcttgaattataccatcaggaacctattttctggctgggtgtggtggctcacacctgtaatcctagcattttgggaggctgaggtgggagaatcacttgaggtcaggagttcaagaccagcctgggcaacatagtgagacctctatttaaaaaaaaaaaggaatgtattttcttacttatttggacaaaggctaatctctcattcatatgtaaatattttgggaataatattgttaagtcaaccacctaaacttagtgtgaaaaagcttagggacaaaagtacagaacacttccaagaagacctgaatgactaacaatccagggccaaaaaggacaacaatatctcactggacgtcagtgtgacaaacacgtaaaaaatgatggcttctgtgcccaatacactttgctcatgtcgttgccctatataagcccccaaggaaaggagtggggaaactcagaattgactcagattttttttaaaagagatctcaagccaaaaataaacagaaaaataaggacagtttatttgagcaacatagtgagactgtcctatccttaaaaggacagtctcactattttgctcattttattgttttgcaccctggagtttttgaaaggagattcggctgaaccacaaatggaaagttaaagttccgtccccacttccatctctagttcccttctctggaagtaaacattgctcacagttttatactaacagtttcacagtttctatgcatatgcaaatacatgccttcaccatcaccactgcttttgcttttgctttacacaaacaggatcataagttagatgctattctgcacttagtatatctcagagaccttgccctgttaacacattaatacccacctcactctttccttttttttttttttttttttttgaggcggagtctggctctgttgttcagctcactgcaatctctgcctgccgagttcaagcgattctcctgccttagccttccgagtaactgggattacaggcgcccaccaccatgcccggctaatttttttgtattttcagtagagagggttttcaccatgttggtcaggctggtctcaaactcctgacctcaggtgatccccaacctccgcctcccaaagtgctgggattacaggcgtgaaccaccgcgcccggcctccacctcactcttcaagtggctgtatggtagtctagcacatttaagcacagtctgggtttctattatcacaaacggttctcatactaccatttgttggtgacagccactgtcccctttcgatgggcacacagggcaaggaagtaagaggggatgattcttacgtggtctctcttcctgtccctccctctccttcagccttctcctcctcctttctcacctcccctttcacgcagtatacactccctccccttcccggagccgccgggaggagcagggtggatgcacccctagctgagtctcgggtggttcctaaccggccccgccaggcacttcccacccagctctcagcctcagagcccagcgccctagacccagggccagggcaagttctgcctgcgctcggaccctaccttagactggggctggaaaccctgggtgcctgacctggggcgtccgattcccgcagcaggaagcagaaacttcgctctggattctgccggtgggaagggtggcagccgggggaggagccggatgcggatctgagaagagacggtgcgggcggagactctcgggcccgggcggggcgcagcagctgctggaagggcagcgagccgagggccgggcaagacgacatgccagggctgcgacgcgaatgcccaggacccctgccgccttttctggggcccgagtttagtttgttattgtttctattttttttccctttctggtcctattttctcctgtccctagggcttccccctctaccaaattcgtctcctctggctaattttcgtctttttttctcccattaactcttcaaacaccgtttcctggaaaagattttagcatgctcgctgcctagctgtacacctctccttcctaatatcaaagacggtcagactcaattcatcctaaagttcctttgaggaactccttaaaaggagacggaaagcggaaagcaaccgcctgtaaccaagtgtagacatcagtcaatcaaagttcgctgaactgagagcaagtgcctcccctcctgttgatcagaagagagatccgtggatcacacagaatctatctggagccatcctgaatgattaatgctgaaccctttccaggaagatggaaccaggcttaggaaagagacaagtgacccttaggttaataatcctagcttcataaagagaggaccaaacatagtagcaggagaaatatgctttctgcctttatataaagcagattagctgtcttctggaaaatatcattgctttccttagagaggtacccttgagtctcaggtaacagctgagcttccgctcagaattgagggcattctgtcctctattaactgagccagtacccctttccttccttagaaacctctattgccaccagtcccaacactccctgcaatggtctttatgtttgtgtctccccaaaatttatatattgaaaccctaatcccaatgcgatggtatttagggtgggatctctgggaggtcattaggtcatggagtttagaatactcataaatgggattggtggcctcataaggagagacggaagagctagctagctctttttccacgatatgaggatacaagaaaacagccatctgcaatcccaaggaagaccctcatcttcagaggcagaccatgctggcaatctgatcttggacttccattctctagaactgtgagaaataatatttgttgtttaagccacccggtctacggtaatttgttatagcaacctgaactaaaacatttcctttttataacaaatatttta

SEQ ID NO: 60169 - DNA, 2648 bp, Homo sapiens
tagctacttgggaggctggggtagaagaatcgcttgaacctggaaggcagagattgcagtgagccgagatcgtgccactgcattccagcctgggcgacagagcaagactctgtctcaaaaaaataaaataaaataaaaaataaagaccaaatgtccaaaacaaaaatatttaatatgaatatagcaaagccagccagttctgtctgacatgtaagccgggagtctttccactctcatctctctactcatcctagaatatttcaaaaaataatttttttttaaaaagggagtgtatattcagggcaactggaatctatactcctgctaagcgttttttaaacagaatatttcgagtccatctctattatactgtttatcatgctgtagtataaacatctatttatatgtctgactccacagcagtataacatctatttctgaatacttagcacataaaatgcgctcagtaaaaggtaaatgaactcatcagatccacgtccaagtgcctgtaactcttctagtcatcagccttgtgacgttaataatgtcacataatttcaatgagactcggatcgaaagctgcacctcactagtatttaggaagatggaaggctgattctgtgcggggaagtgcgcggaaaactcttaagtcccctactcaccaacctgtgccaggaggcgtgacgtaagtccgccgcgggttcgccagcaccttgccatcccgcaccacgcccacgccaatcttattggcgctgccttcaaaacccagcaccgccggcatggcggaggctgggagaaaacgccgacaggactcctggcaatgtcaggagctgtggaggtcctcactagtccgcgctgggccgcagctttccggagcgcagaggaagctggccagcctgcagatagcactgggaaagacaccgcggaactcccgcgagcggagacccgccaaggcccctccagggacctgtcttcctaactgccagggacgccgagccaactctgtgccttacattcgtatccgttttcctatctctttcccgtggtccagcccagccttctccactgtttttttccctcttgcacatagttagaatcttaagtcagtgtcacacaatgtgctgtgcatctggcacaacgataaacagcccgagggagggttggggacctaagtgtcctagagaattagaggagggaggcgaggctaagcgtctccgtcacgtggtgtcagacagaccaatcacgcgcattcttcggccacgacaagcgcgcctctgatcacgtgaccaggtccgctacccacgtgggggctcagcgtgcacccttctttgtgctcgggttaggaggagctaggctgccatcgggccggtgcagatacggggttgctcttttgctcataagaggggcttcgctggcagtctgaacggcaagcttgagtcaggacccttaattaagatcctcaattggctggagggcagatctcgcgagtagggtacaaggcactatgaaatgatctagtttcgtgggtgaggggctgaagggcctatgatgcacggaggcggggaaaggatttagagataacgtggtttgaaaggcgggacctggtgcggggacgctcttgggaggagtcttctccccagccttagctggtttcatgatttctttgcgtctgtaggcaacgcggtaaaaatattgcttcggtgggtgacgcggtacagctgcccaagggcgttcgtaacgggaatgccgaagcgtgggaaaaagggagcggtggcggaagacggggatgagctcaggacaggtaagggaatgaaatcagcccttcttcctagaagctgcggcgggggtgtttgtcattcccttgatgtacggtaagtacgggccgactcatttttgcaggggtttgtgaagaagtcgcaggaaccgtaggctttcgttgggtctatagttaacgccggatcgcagttggaaaccaccagctttttgtcagtatatattactcattttatagagccagaggccaagaagagtaagacggccgcaaagaaaaatgacaaagaggcagcaggagagggcccagccctgtatgaggaccccccagatcagaaaacctcacccagtggcaaacctgccacactcaagatctgctcttggaatgtggatgggcttcgagcctggattaagaagaaaggattagatgtgagtggaatttgagggaaagagacattttttagtattgaatggtcttagggtttagtcaccccttttctccgtttagccttcaggctgttttatttttctcctgcccgtagttttctgtggggcttccccagtcttgccagttgtatttcctaaatgtctgttccttcacttccattgccattttcttttttagtgttctctcctcttcccagaatgttgcaaaaacctcttcactatacttcctccattttatcttcctgcattgcattccatatgaagcatgtcctccattccattaaccatagcttaaaaatcttagcttgctatccactgcctatagaaaaaacacatctccttggcatagcatgtaagactttcttacctctctatatttgttttcatttatctagcttagaattgtttgaatattgtgctgcttgactcga

SEQ ID NO: 60170 - DNA, 1576 bp, Homo sapiens
cttccacgttgatgagagattggcagactcggcaggtgatcataggggcactcccactgtccgggctagttaagggtgaataggggggtgggtcctccccaggcaacacggctggatgcccctcgggaaacgggggaaatgctggagaggaagcaaatagaagggctgggatcacttacacccccactgatgctccacggtggtagggaagtccttctgatcttcaaccctctgaccaagctcggagggcttctcataattggcacttctatcaggttgctcagaacccccttccgtccctaggctgtggtcgcgattacggagggaaggaagcctcgcccagtcacaggtgcagcagtcccgcacctggcgactgggacccgcctccgccctcggtcccgccccctccccggctttcagagtaccccggggagcacctcggacccgccccggcttaccctggggcggggcatgtttaccggctccgtacggtggtgcggagggggtcaggcctcccccgggcccagccccactcccgccgggccccactaaaccgttgccgcccgcgccaccgtcgatgggctcagacagcagcggggaacgctctccatctgccgccatggccgccaccgccgcctcccgctcaggtcggcgatccggctcccttcgcctctgccgtcgccgcagccaccgccaccgccgccaccgccaccgccgctaccgggtccccagggcgcctgcgcgccgcgcgcccagctcactccgcaaccagtggcctgccccgccccgttccgtctagcagcacgtgataggctatccccgcccgggtcatgctattattcgcgtagataaaccaattcctggtcctgtgaaggcagctctccttttccattggggagcgacgcacaaacgtcaactgtcacatgacctgccagatgctgctgggcttgcaaaacctgcacgtgactagaggttctgcaagctattgggagcgacgcccatcgcgctacctccagaccaggaggtagggctaggctgcgtctgctcaactggtcacgtgtttctggaagctgcacggtccctgttgctctgctcctcattggttcaaagacaccactaaaacacttttctccggctttgcgttgtagctggtttcctattggctggtgactttacttctttcgtcctgtgatcctagcggcgcaactgcattggcccgaacttagcgccagaacatggggggcgtggcttatgcattttaaaggaggctgggcgggtgcaataaaggagtgcggaagcttgggatcttctgagcggggagaaaatggacggtggggaacagtagacaaagttagctgttctactcaaagaagtacctttaaaaagtcagagtaatgaggtaccagaaggaaatggattaaaaagttaagattatcactccagcctttgtcgctagagtcactttcaggacaggacacaagactgggttttcctggaagctgtccttacagagccccgtctttccccattgctgatcaaattgttaaattatcttttcattagtgtctccactact

SEQ ID NO: 60171 - DNA, 2519 bp, Homo sapiens
tgtaaattaaatgtaaaaattaaattgtaaatgtgggcagaagtaatagttgtattctaccaaagacacgctatttatgttatattctggtacccgtgtattccgataacagaattttcttcgtgggaggagtcctctagttacctgaattgcttggatcaatattgcgcagatcaagggattatctgtgtccctacccaccaaatccatccttatcctttctgtcggcatctaggaccccggaattcttgcctgagaactttttcttctcccggtctgggcctggatgtgctctcctaaaccctgtatcctccaagttagcactgttgccgggggcgacccagcttcccttgtccagggagcaactcagacacagtctcgcttcatttttattctggggttgtacaatctaaggtatgaaatttttcctttttgaatctctcacggtttgctattgacacagctggaatgaggttgcaaggagagggctgggggctctcctccctacttctagccctatttccgcataggccttcttgctgggaactcctgccctgcggactggaatgggtaccgagatgaaatgctgggtgcgctccggctccccccgcccgccccggggcagaaggtttagggctgggaagaactctgattaggtttacagcccaggttcagccgattgaattagggtgtgtcaccatggagacagggccggcccgcgtgctcgcttgccattggctggggactccagggcaagggatataagccagagcctagaccagtgagccaactgtgcgaaccagacccggcagccttgctcagttcagcatagcggagcggatccgatcggatcggagcggatcggagcacaccggagcaggctcatcgagaaggcgtctgcgagaccatggagaacgggtgaggagggcaccaggcccgcaggacccttggggaggggcaggtgctgtgacccgggaacctggcacactgggcccagagggagctggcggagggagcgagcgcccaggggatgcagagaggcctggcactgagcctagtgtcgggagcaaggcggcagagtcatgcggcagccagcgcgggcagggacgcacgcgggaatcgagctggggtggcgccaccggagcaggaaggggacaggtcggtgcggtctaagctactccgtaaaagcagccgttgtgtgtctccgtgtgtgtgttaggggaacaagtggagagtgagtatatgtatatatccctcactccataccaggaggaggtctcctcaccccctgcgctcttcataaattcccatgctagggtctgggtaaagctgcgaggtacttttggtgctcaaattcggagttcctcctttagaggcaagattactcacctcctttgccagttgcactcctcccttccttccagactggcagtatgattaactcggtgggaagtgactgctaagtggagacggaaatcagtcaccgaactgagcaacagtcctgtgctcacttcccccaccccacgcctttgaaaactcttctctcggcttgggtcctggatatcccagtccaagtgacctgcattaggcatcacagttgcttttggatgcccagggagccagggtgttcttgaggggactgatagccaatgaggaagtgctgtgagatgtggctagacatgccatgtggcggcagcttcacacattcatttcctttgcaccttttggggatgccatttgattaacattttaccagcttaattgcttctctccattgtcctgtggctccgttgaccagcccccaacctacctgatccaactgcttccctgagggtagcctggtgtattgtgcaatcatgtctggtttcccgggctctgctttccaagtaaaaaatttcctgtgaaagcttggttagttgtgttcagctctgtcacacctcattgccacctctgaaagcaacgtttggtcttcccagatggatgtgagagaactggacttggaactgggagaaaagtaacacgggttgattcttgctagtgtaggggttctgggtaagtgccctgaggtttctgaagagcaaagatcctcggtggagagaaaggaaactgggaggaggcagggagggggaaggacaggaagaagaccacaggcaggtggaaagcaggagaaagattcaaatactttgtgtaacagagccataggtctttggaagttgttagcaagtattcaattcattttcagattgagcctataagatagatggggccaatttacatcccttgtttatacctgagaaaataatttaaagcacaaattacatgcctaaaaagacaatattgggactagaatctaggtcgaattctgcttccctccagaccagcaattcctaaacctggttttattttattttatttttatttatttattttggagtcggagtctcgctctgtctcccaggctggagttcagtggagcgatcttggctcactgcaacctctgcctcccgggttcacaccat

SEQ ID NO: 60172 - DNA, 691 bp, Homo sapiens
cagatctttgactacggtgaaatccccaactttccccgaagtacaggtactggcaagggaaagtggggaatgggactgagggatgttcttggaattctgtggaacacaaccaaggaggccaatgtttctactccttgacctagcatttcactgaagacaaatgttgtaagagaggagaaaagcccaccatgagtcagagtgactttaggagatgcctctagcagacatcccataagagacaggacatgtgtgtgtcagtggactgaggctaagactcagaagagggccaggtgacaggggccaagtaaagggcaagggttgtttatttggtttacgtaatttctcaaataactaacttctgttggtttatttattaatttttaagatttctatcttcttttccctggagagttaagaatttttttttaagacctgtcagcaggaaaagacctttaatagctatttttttaaactctttaacacaagactggaagagcagagggagaaggtgagggaaatattaacagagggtgtgtgaagggcatacttctctaagggagatagtagtgacgctggctccactggccactcctacccccagtgagaagggcactgcattaaatgataagtgggttagtttttttaagcttatcaacatgtttattttttatactccacttgggtttccttt

SEQ ID NO: 60173 - DNA, 1783 bp, Homo sapiens
caaagaactgcaaaagtaaaaagctggttgatttaaaataatgattatgtaaaagaaatgtacatgatatgtggtagcacctggtatttatcctcataatgtaataccatgacaaagagcatttttgcctaaagatgaaatacatatatttgaaataatggagcattacatagtactcacatactaacttcagacggtgcttactttgtgtgatggtgtttaacgtgaataaacctgtggttttattgggatgtccactgacagaaaaatctgtgactttatgggggccagctaactgggagagaaagaaaaaaggaacagggctcgtccgggatttgaacccgggacctctcgcaccctaagcgagaatcatacccctagaccaacgagccacctatgaatttcggttgggttactaaactttaataaaactttcagccacgtctacagttggtcactgtcttcttttataactatgggcatgggtgacacctagtggataaagtaaaccactgcaggttttctcacctaaattccggaaggcggcgccttgtgactgcagatcccttttaggaaaaatgttcaggcgtcagtgggaataatttatgacatgaaattgcatgttataacatgaaattgcatgttttcacttccgagtgagccgaagatgctgttggacagggagcaggcaaatcagggaccgtcccgagttatccggtggtcggaaggcatctcgtccttaacaggtaccgaccgccgtgcgcgcggccggcgaaagctgtcgccgcagggcgccctccgtgaagagaccccgaggcagaagagggccccgacgctgcccggtgacccgccttgcctggcacggggctggcgctccaaaccgttagacctgacaaggttgccctccctctctcgcgacgcctttcacaacatgtattataactctttccaccaatttcaaatagtgcggcttaaaagatgaaggagagctaaacaaaccagaaagaaaagaaagaaaaaatccggtaaaactacaaatacaggatcatgaagttggcaggcggggagggtaaaagaggaaagggtagagaataggttcccaactgttagccagtaggtagcgtggccgagcggtctaaggcgctggattaaggctccagtctcttcgggggcgtgggttcgaatcccaccgctgccaggtgcttcccttttcttggggaaaccatccgtgtattccgattagtgtactggtgctcccacgttaacacagtctcttcacctttctctagcacccaatttcgtatctccagttggtaaagaatgtagctgtccgctattttggaacgtctcgtatttctgagtctttcacaatgtgaagtacttcataaagacagtaaaatcctctcaagatcataaagatgcttttgaatccatggtttcccaaaggagggaaagcgccaggacattaatataattcatgtgtagcctttgctttgcctttaagtggacgagcgtactttgagctctttgcctttaagtagacgagcgtaatttgcactgttctagttgttgaggagtacaaaaagaggaataaaacaatgcctgcccacaagagaaactcacggtctacactgcaaaaataaatcctacaattacaaaaaaaacggtcttgaaacattgtaaaacatcatcgagtagaaaacaaacgcggcataaggaaggtagtgcagtgatgtgggaaggatggtgaagggaccgtgggctgggctgttagaatgcaagg

SEQ ID NO: 60174 - DNA, 1229 bp, Homo sapiens
acaaacaaacaccagaaagggtggggaaaaaggaaagaaaggaaaaggagaagaaaaggcaatattatgtaataacatgtaaacccctttttaaaagataacacatcatacagttacacatggtgacaatgttagtatgtgtcagctcccaattcattcccaggaaagaaagcagctccttgtgtttaccaagggctaaaatttccgagcaactttgcatagactgttttatttgacttgacaggattgctagagataggcagggagaggaagatgtgttacagtttgtcagagagaataagaaggataacctggggttttctgtgctttgcttcttcacatccctggggagttaatagctgcaatttttcaaagaacggtatacagggacagcaaagtgcagtcgtgaagttttcaaacaagacacaccttgttgagttgaaaagagcgagggctcgtccgggatttgaacccgggacctctcgcaccctaagcgagaatcatacccctagaccaacgagccgcgatacagatactcttaagttttgcactaaggctcattcaaatcattaggcatttttctgataaactaggttcttgggtgccttctatcggcaagaatgcgtacttatttgaatagtagaggtaaaccacacgccccaagagtcattgagactggcagcttctgcagcaggcgtgaacccccgtagcctaaatgacagccgaagaggcgccgaagacatgcagatgtgccaagcggcagtcacgttgctgccgcgttgtccgaccccgcttacctcctgatgtggaaatccctgtgggtaggaggaaaaaacacacaggccccagcgagaattgaactcgcgacccctggtttacaagaccagcgctctaacccctgagctatggagccctcgtctgcttttagtttctcttcctttcatcttatagattgatgttatgctcctagcattccggctactgaataggatgttagcttgagtaaaattccaggatattctcctacaaaatgaaaacattttcgtgctctgtaaatccctcgaaaaggttctgctttgagcagagcaactatcaggctgtcttcccgttcctcaccgtgatactctcttgagactttgcctactgtgcctctgtggtgcatggaaacggtgttgatgtaagaatttcagatctttgggtacaagggcgaccccccccacacacacctc

SEQ ID NO: 60175 - DNA, 821 bp, Homo sapiens
agatggttctagtccctttgagtatacagacccttcctgtgcattgaccgacacagctcggcccggatcccgaaatgaacgtttctaccttcggaacgctgcgtctcggatccttctgaacccgcacgttgactttcctggagtctggagaaaatcactagattctaaaggaatcaaaactgttcaagtgttgtgctacaactaaaaaaataaatgaacactcttaaagaatagaatctctccagttctggctcgttggtctagtggtatgattctcgctttgggtgcgagaggtcccgggttcaaatcccggacgagcccctttactttcctttccgtttcatctttctctctttaaagtcagtagttaacaaatactgcaatcggcgctacggctaggtcacctagccctcttcaacctcgacctatgggggatgagattgttgagcaaattgcggctactttcgctgaaagaatcaaagacaacgaagacgctgcgaagggccaaggtcttcatcacagatcggggttccctgacgggctctgacaggatcttttgtcaggagcagagtgttcgggcagttcttacccagtattttgtgtggaacaaactagtgcacttttcactaggtcacttcgtatggaaaagattgctacctgaaggcgtgttagggtcacaatgtcccaatagaacccgctttctgagaccctgaccgcgcggtgatccagccgcgggatggagtctagcccctgccctggccttggcgcctgctccgcagcgcagtgttgcactcttggttgttgtagtgagactgcctttc

SEQ ID NO: 60176 - DNA, 907 bp, Homo sapiens
aggagatgagagagagacagcatagagagcattttttttttttcctgaggatgtcacagttgtctctgacccttttctcttccagcaggcttgatcttctaggagttgatggtgggcccactggtttaatagatcgagagatctatcaatggtgagcacacaatgttgctagagtccatggccctcagcacccagagcagtctgtggataaaagtgaaagagctctggatggtgggggtgcgaagggggttggggagaggggctgactgggtcacaaagcagaagcaaggggccctttgcgttgaagagtacctgtccctggactgtgggaagaatgagtgggcttacgggcgtgtttcctggccacagcacaggtgtggaaaccaggtgatcaggaaaggtttctctgggttttgactgggagggtgtgggtggatactagttggaggctgcagggcgtttgaccaggcaccaggtggcattgcatgcaaaagcatcgggcacttccttcgagccggaatcgaaccagcgacctaaggatgtccgcaaatgtctgtacaatctacagtcctccgctctaccagctgagctatcgaagggtgcacgctgcaagagctggatcactggactttccgcaaatggaggaagccaagtccttggaacgctggagtcaacacacttagagttgattggaacccgccttagaagagaaccttgcgctggttgccaccgcgcacctctcagggtggagcaaatcctccgagtgtggtttcctcgcgtcccagagcgctgatagccacaatccaggacgggaggctctcgcctgtggccttcctccacctgtgcatctctgtttttacaagtgaggatgacagccctcagcgaaagaaaacaagagggtgagagg

SEQ ID NO: 60177 - DNA, 8423 bp, Homo sapiens
tactaatcttctcacctgctgccccagccagtgttcccttgaatgtctcagtctttctctcggactttgctcgtaattttattctaccagggaccaccctgctcccatttttgtctaagtcttaacctcccttcatagtgcagctcaggccaatgccctcttgaagacacccccggatggttcactttgtaaatgtgtggaccttggcatggccaacgccccttcacacctggcacagctacttttcattgttttccttcatgaaaactaaagttcttttgttccacaaaactgtgacagtgacttcaggataaagatcatatctggatccctaattcttagtgcagagcctagtacagaactggaatgcagtgtttgttgaatgaaggaatgaattaaactgcaaattaacgaatgcctgctctggcactgagactcgcagctgtgagaaaggtctctggaggcagacagttgctggtacgaagtcctgagtcaagcaggaaacaaaatgcggatgtcagcagtttcaagtgagacctgtggtgagctccttcctctgccggttttcccttcttaattttcagtctgaagtgagggagtggagaatctttctgtgttagactgtgtcgcgttgggcagatttctccaatcttaggatagtagtggtccctctcactggccttcactttgtaccatccccagcaagaacactgagtctgtgaaccgaattctagtagtcgggaaatggattgaaaggacatccaggttttacttagtttctatgctcagatgctggcagaagccctgcaaatcttttccttttctgtgaaaggaagaggcggtttctgcgtgaggccctatagctcaggggttagagcactggtcttgtaaaccaggggtcgcgagttcaaatctcgctggggccttgcgaaactactttcttgattcaggtgttttttgaaaaactccccttctagtctttctgaactaagtcacagaaaatgtggcaaattagagcttctttcctctgttcagagcttccaaacactagctcagcagaacgtttcctttaggttccagtagtaatgctgctttagctcctggaatgcggcggaatccattacacaggcggtggaaatcaccgtcagcctctgcccacgccctggcttgcggactggcggcgagagccctgctgactgccgggcgggaaatggggacagctaggcgagacaatagccctttaagctattctcaagccccgggtctgggcatatttggagtagagatcaaggttccacttctgaaacgggaagagccagcaatggccgctccggccaggcgtccagaagagagatgcacgttgtgaggcaaggtttcatgtgccagtggggttttgggaaattaagggcccgactttaggggcgagacttgggtcactaaatttgattttaacgcagagaaatgtggccttccttttgaatgagctgcaaatattatctccaaaagcgaattcacacagaaacattgggtttgcccagatgtcctctatttcaggggttcccaacccttgggccgcgcacctgtccatggcctgttagggacccggctgtacagcaggaggtgaactccgggctagctaccagtaccgcctgagctccgcctcctgtgagatcagtggtggcattagaatctcacaggagcgcgaaccctattgggaactgcgcatgccagggatctaaactgcactccttatgagaatctaagtgatgcctgatgatctgaggtggaacagtttcatcccgaaaccatcccccaactcttccccccgcccccgcggtccgtggaaaaactgtcttccacgaaaccggtccctagtgccaaaaatgttggggaccactgctccattccacaccctctccctcccgtgtctgtggacgtgtaagcggaagagccgagattgggagggaagcgcaggaagtgaggacatcagggagcccgggcctaagcctggaggcccgccctctccggcgttcacagttgcgcagtcagaattgtgtgcgtcccaccgcctcagcccccagttctccgacgcccaggtgccggtccccaccctacacacaaacacacgcatccacgctcgcgaggcccctgggtccgcgcccagtgaggccaacagccctcgggcgcccagaggatgagcagcctcggtatgcccgagtttcaggggcgcctgctctgcttgggagcccctcagtgaggcaggggaatccagatttagaaaggttgtcctcagaacctcggacgcaggactgtcttacaagctggctttgtgactctgcagtaattactttccgggtataaagagatttctttctttcccgtctctggttaaggatgtctcgagtagggatttttaggagagttgtttccgtgcttccttcgatagctcagctggtagagcggaggactgtagtacttaatgtgtggtcatccttaggtcgctggttcgattccggctcgaaggagacgctgctgttttggggtttacggttgctcttcgtttgtgcaaaaaatctctgtatcttgacgtgatcaaatctgtttctgtctctcacccttgtccgaaggaaacagcttagccgcgaggtgggctgcgttaatcgcgtcttgaaaagttggttacctttctgaaagatagtagacccgaatcgtcccaccgttgggggaaggcactgttgtcttaccgaagtgtgttatattttggcttctacgttaagtccaaaggccggcagatatatacgtatcgcgcgtctgtcctggggctcagtaccctacagccttgcaaccgagctcagctctggccctcgatctctatttcagccccctccaggttccctccaggccctagcgggcttaaatcgctccccgggctcagtgagacacaagcatgtgacctaaagtctaaaaagctgccttccttcaccccatcctgcatctggatcgaggagaataagccagagaataagccacacttgaaacttggtgaagatggaaggaataactaaataaggcctaagggaaatgtcacaacagaggaaaagaaacaaaacaaaaaaccttcagaacagcaggcggaaaagagaaattcagagtgataggaagcaccactcagctacagtggctcgttggtctaggggtatgattctcgctttgggtgcgagaggtcccgggttcaaatcccggacgagccctcgtggctactgtttttccacccccttttgtcaactactgaaaaaaagtctccgttaaatttgaaacacaaactgtctcgcgatgggctgtcctgccaaagaaagcagcagcgaataagtacgtggcagatggtgctgtcgaccagtgtcaagaccaagtttcatgggttcctggacgctcagccaggggtagtctctgaagggccgcctggcaattgggagcagaagccagtttcccgccatctgctctccgtggaggcagtgctctcgcggctgctgcccgttggggtccagctgaggaaggagcgcggatcccaggctcgttctttgcctgggctgcccctgcggcccctggggcgggtgctgctgcggcgccagctccaagggcggatccaggcgggaggggcctcctcggagaagcggggcgcggtcccaactacgcagaggctggcacgccgaccctccacacctcaccacgcccccatctccgtccgtgtacacacactcacacaaggacgccaaccccacctagatgcaaagcaggattcaaaagaacatctttgcgttttctaccggctccccatcatcgtactagggaggaagaagcgggtgagaaacaaaacttctttccattgtcctgcccgtttctgcggacttgttctgaggccgaggtaggttcacactcctgctcctcctcctcctctctggtagcttcataaggggcgtttaggccggggagtcctttcctagtagaggcagcttgggactccttggggaggagtttgcgggacggggctggagagggaggaatggggagggacgtgaaagtcccgtatttgtatgagttaacgactttacattcccactcaggtttactttgcgcagctgggcacagatgccagcttctattgattagtaggcttggagggggaccacagaatcgccgaacctaagggaagccctaggaggcctgcacttgcccacaactaagaaagctttgctagttattcaggctaatcaccagctttttgaagcaggccttagttttttgcaagcgtaactaacatttggggatcggtgttttctgtttactctcctctgcctcctcacccttaacccaccctcagccagtgttgtgcaattcttagagacacttgccaacagcctcttctctaagccttcctactggaaggttgggatcctccgttttctcgctctgagacagcacgtcaaatgctaatagcagcacatgagtaaagcgcaacatctttattaaaacaatttcagcaccactcagggggctagggaaatctcagatgagccaagaccctccctcgtgacagtaaaaatcttataatcaagtcataatgtaatcagtagaaacccaagggacatcattatctgtggcacaggaccaccttcccagaagcagcctcaggtattcaagacttacttaaccacagagccactaacaagttttgcaagaggataggtttattacatacgcttcaattcaagcaattcttttactgatgacaagcagagtaaaataatttttgaatttatggtaatagtcaatgtaggtttccttcgaacagcaactttcagtggcccctttaaagttagctctgattgtctagaaagtactagtatggaatataaaagttgtgtgggcccggcacggtggctcatgcctgtaatcccagcactttgggaggccgaggtgggtgcatcacaagatcaggagttcgagaccagcctggccaagatggtgaaacctcgtctctactaaaaatacaaaaattagccgggcacggtggtgagcacctgtaaccccagctactcgggaggctgagacaggagactctcttgaacctgggaggcggaggttacagtgaacagagattgcgtcactgcactctagcctgggtgacagagcaagactccgtcttaaaaaaaaaaaaaaaaaaaattgtgtggtgcattggaaagcttccaggccggcgaatgcaatgagttccttgggcaatacatgtctctttctctgttcctcagttggctcttctttaatatgaggggtggacagagtctcagaggcccctcccactcttgttctatgactccatggagtggtacgatgttagtaacaggacatgaggcactctagtaatgtggagatgaactatcgtttggcagagaggatggaaaaaatcattccaggaaaagaggaatggctttagctattgttgaaaacagataatcaggttataagcaggcaagagtaagaggtttgtcaagttattgttggaagcattggtcactgtgactcaaattaaagtagctggataaaaaagtggaccaatgaaggtcagtgaaacctttctttaggagtttttattgaatctgtatttaagcagattctctgtaattctctgtaaacagttattcccggaagaatgccatgaaatacttgggaaagagggaatgggaacaaagagtgagtgggcacaaagcccagagttggttgaaaagcaaatgtttaatttttgtctttgtttggaaatacaggcatgtcagcaggactttgtccccactgtccttcaatcagtagtgttgcctcttcctggagacgtggttcttcttgccacgtgtgcttttccttctttacctgttacttccgttattgaataagttcatgcttatagacctaaagtgttagaataataaagaaatatagaaattatttagtccattcttcccatcatctaattttataattagtcctaagacagaatgatacatatatactctgtatgaaggaggaaagtgctctaacactagggtccttggaaacaggacccgtgcatcccgtgtctgtgtgcagggacattattggcttgagggagagagagaaaaaaatctccaggaaaggggaatgactttcaagttaaagctgtctgaacatttaaaaaatatatgaggttttttgcaattggcgattccttcatttgtattaaaattactgacaaagatgtgatgttccttaatcatagaatataattccttgttgtattttaaacacaaatgactaagtgcttagatgcattctaatgaaatagtaatttttcccccaaaccctacttttcatttcaacaaaacttccttgtgccaagtttaaaagaaaaacataaaactgtctttttgcattgtgggcagattgtgtatcctccaaaggttgtccagtgaaggcccagaggcagagaagggacctaactatattcagaggctgctggttgccccacctcagcactactgcagaactctaaaatcagaggctgctctgtttgtgtgagtcggtgcttgaattggtgcttcaggccatggggctgtgtgtgtgcaggcgcatatgggttgtatgctgtggcagggtaccgcttttcgggactcagaggtggtgttgcttgagctaagcctggaaagacaggtcagttttctccttgcttatgaagggttcaaagtctgactccaccattcatctgctgtttgttcttggagtttcctcatgagcagagcatatttacataatgcctacctcacacagtcctggtgttggttgaatgtagtcatgtatgtgagagcttcacaaaatgaaagattgcactgaatattataattattgtgatttcaagtgcatttgttttactagcaggcagcctgtcttttcttgacaccttctcaagtgcagccagactgaatacttggcagctaggtgggtgacaacagaggattgaggatttttaaaaagataacactgtcctagatccaacaccactgtgggcaaatgctgggggtctgtgaaacagttggtaccctgctgctgtctgatattggaaactatgagatctataaggtgatcctggtgacctttggcccactgtttttacgcaagcaatggatctacagccctgctttgatgatggagataagcaattttgcaactacattacaaggatcagaagattgaatgttcagggttagtctcttgtggacaggtaaagatggaagaaggagaaacccaggaaacatggcaagcctgcttctgggggttagaagctgagaagttgagtgtagggggaggggcagtgtactaatagctgtcacacaaccttctctggaagtgctttcctggctgtatgaaatcgatggaataacgtgcttagcatccgttcatgaaaccaaatgatgtgatacgataaataggatgtgatatgataaatgataaatagtacagtggaaaagcatcctactggaagaccatatcttactctgtgacatcttccaaggcagttcttggagttggcccagggagatcagagatgctatcttatggatccagactattatgtgtgaatagggaaacctcagtcctgccatgaacaagagtaagcaccacagacagcagaaaagggcaacttttggacagaaggccatgtttctcaaactttgtcttccagaacaaatctctaatccattcaggtgggttaatatctaacccaatcatgcccagcgaaaaggtgaatgaccctcctcgtttgttcaagagcagtgtccttggttttcatgtccctgccaggactgggacactatatattaggaacactatataatcagaacctggagaggcctccaggttcacacaactggaacccatctccaggaacaaacagctggaacccatctcccgttgaagggaaactgccagatttttgtaagattcttcctcctgggtaaactattgttcaatttgttttatatattatttctagccatccatccattttaatgaaaccattttcctccctttaaagcctccaggctcaagctcatgaattaaaaagaaaatggatcagattctaaagtttaaaatgaaaacaggtttcttttgggatggcctatgtgtggataaagagaaattagtgagactgggaggaagtggaagtttaggagggatttctaaattgtgataaaatccccaaaggcctgggggagccatttgctgaaggccatcgggagtcctcccccgtcgtccacccctgttacaggcattacacgtggcttaacaaggaaagaaacagtatgtttttagcattgtttccttctaaccttccctgc

SEQ ID NO: 60178 - DNA, 884 bp, Homo sapiens
cctaggcctggagagaaaaatgaagtcaattacttaaaaaatattaagggttataataaggcaagcatgttgattcaaggtgaataatatgagttctgtggaatatacaccagtaagaaacactaacaagtaaatacttcattgttcatccacgatcacgtgggtaatggcatgtttggaaatggcacccgtgaaacctgacaacaggtcggtctttattttgtgatatccttatgggtagattctgaactttgtggcttttactttggcacttatatctaatgaggtgtccttggtcttaatatctaatgcagagcgagtttggacagagattctaaacaggttcaccagctcatactcccttctgtgaacagcaatatccccacaagttatacagcattggcacctcctgcaagtacggtatttcctagagaagacattagtaacattcctatccaccactgccacctaacgactcttttaggtactagcagctctggttccgtttcctgatttctgatttctgggattctggcaccaggcagaagaatgttgactgtgtaaggcagacctttgacattagaagtcagtatttgttcattacagagcaagagacttaattgattacaaatcaataaaactttaataagatcttccaaaaaactagaaacaggaaacacacccaggagactgaaaagcatgatgtaaatgtgaagaacgtggcaagtgggtggcttggcagcccagcagctatactggagcagctgcatgagtgaatacttgttactcctttagggctggctctccattctacaatcatgtacctctttcttgataaactcccaagaacacactttcagcatggaatttcagacttttagaga

SEQ ID NO: 60179 - DNA, 2098 bp, Homo sapiens
tagagtcggttcacctttttaatctttcctgtaatactgactgatatttttctggatgagtacagatttacagacaaaagtcctgatttagtattttaaagataagtgatttttgatcttctgtaatttgtttctttatctgtaaattaaagcaccttattcaaagggttattgtgtgaactaaataaaataacccaggtaaagcatctagaacagttcagccagctcagtgatcagagttgcagccttatttgcctgaataatgaaataattattgatttaagttcccagctatgaaaccatatgtcccagtttgcccaggatctgctctatgtatgctgctgtcctggcttaattactagtagtattccttctcactctcaaaagtatcacagttcagacagtaaattagatgggcaccctattcagagcacatagtaagctctccatagatatcattatattgttattattaccagtttaatatagcttctgaaaaggtcacaattaacaggtaagtttggctggcacggcggctcatgcctgtaatcccagcactttgggaggccaaggcaagtggatcacctgaggtcaggagttcgagaccagcctagccaacatggtgaaaccttgtctctactaaaaatatgacaattaaccgggtatagtggcatgcgcctgtaatcccagctactcgggaggctgaggcagaagaatcgcttgaacctgggaggcagaggctgcgatgagccgagattgagtcactgcactccagcctgggtgacagagcaaaactgtctcaaaaaagaaacagttaagtttacattctgaattagtaggagtgacaatgattgaagtttttgactgggcaggaaagatagactgacagttccctcattctatctttatatagaactggagagcagcacagaaggagggggacatgtcaaggaataccaggcgggcagagcctgctttaaggcatcttccaaaggttatgagtcactgcagacacactgagagtcacactgggggaaggtgcagcagacagggagaagttcaaagtggtgtttctgagagacttggggcactgtgtacaattaatcatctctccacatgggtgactgtgggagccacagcagtgcctgagtcttccaggggaaacactgaacatggaaatttgtggaaaggaaacgaaggaggtggatgaaagctggaggaacaagtgtttaaacaatgcagcttttcttgccctggaaggttctttgggtactaaccttctgtgtggtagacagagggcggccggggagaggaaggaaactaccaagagagagcagcagcagtcttgcctgtgctcccctgtggtgccctttcttttgaactctttcttgaacccttaatccctgtcaggctcctggaggagcctcactgggcagcctcaaatctccccagtttgccctgtcctcagaaaagcagaccattgaaattgctatttcagagctggaagctggtcagccagctcagatgaccggagttgcagctcttatttgcctgaataataaaatcattattgacttaagttctcagcaaacagtggggtatttgtttcacatttctgagctgctgctcaagttccaaaaaatgtccccttccaaagaaaagtatttaaaattggattgagagcgaagagtaggtggaataggctattgtgggggaggtcctggatttgcagtgaactttcactgacctttcagctccttagggcatgctccttgtcatctgtccatcatgcccaatggccagcctaaggggagaaaatagagtgctctctccatgatggccaaaactacctgcctggctggctgtccgtccgttatcatctcagtctctaacccacttcttgctgctcctgattctatgcccacttaacttgtcaactgtgactttgtggaacataatataacaaaaaaaggcatgggctttagggaaattggccccaatttaggcaggaatttgagccccagtgccactgcataacctaaagctaataacatcattttggttatctgttattgcataacacacttactaaacagta

SEQ ID NO: 60180 - DNA, 1068 bp, Homo sapiens
cctccaaaccccaagcctgcagcccgcggcagacaggccgagagtggggcagccgtctctccttcctcgccctgccctccttctgcacatccagccacctccgcaatggaaagctcgtggcatacagcaggcgctcattatttgaagcctcttcattctcctgcttcctcggtggttaaggaggcttttggaagttcaagtccgtctcagctaagaaccaggagacacggctttggtgcctctcggcccgctgggtctcggcggcgcagcgtcccctgccggccactgtggcggcggctggaatcagcctcagcacttaaggggccgcgcgggaggagttgccccacctccaggcagctctttccagagcagtgagggcaagtctggggattatctccataaaggaagcgaggtggctcggtggaggggcttcagatccccttcccaggaccctgtgacccgccatcggaagagagtggacctcattctatttcaatgtctgcatagtacagacatttgctgtgggcaaatcggacccatgagcccagagagcatcatcccgggaaagctttcccgaagcacaggcttccctgcaccaccatacacgcgcacacccgcacgcgctcactcccccagccctcctcccctccctcactcccgccctggaagaagcggggagctgaggggagaggtggaaccagcagagaaacgggccgggcaggagcccgcaccagcccggcttgggacaccgcagccgctcctgccctctgctggctggaaggcgcacttacacattgcggtcatcgcggatcgccgagggccgctggtgccgctctgccgccaaggacgctcagccattggagtagaagtgagagaggccgcgggctgagtagagaggggtgaggattccggaaaggaagcatcgtcaggaagcgctgaagttcctactgataaagagggggttgggccaccagcaacttgtcacatgaggagtgggggttttctgcataccttagtgaacctatcagtctaggactcgtggatggagactcggccacaccagcagct

SEQ ID NO: 60181 - DNA, 1800 bp, Homo sapiens
ctgggagaacatcctaaacctgtaacggaaattagggggccaggagcccacagaaatcacacactgggtgagctcaagtgttcggagactgaggtagcagttgtccactgtcaggtcccgaaagtagatatcgccttgcatatgccatttatccttctgatgctctagtgaatgaaggtgttgatgagcttgcagactctggagaccattcccctatgctatattatcacgtcacaatagtggctggacccacctgagattctgcacctcaggtaatcagacggctactgtctaagtcctgggcctgggggaaacactctgacgtagcagcagacacaggagggtccccgtcagaaccatgttttctgtgaagtggggatcagtccttttccctgaagtacctagcacataggtgttctcagtaagtgttatgttagcttactaagaagactggtctcatttgaagagaaattaacaaatgtaaaaaaataaataaacctattaactaggtttaatatttatcaaactattaactattcaataatcatttaactattaatttctgttttcttcagtcgcttaaatctgatttttctcttctttccgttactgcagtctccctttttcacacagggaaacaacccaagactcagagttctccgcggaggaatgcaaagaacacaggaagtcagtactcccagaaacagtctttgctggcgcgctcacacccaaccccatcccgcccccgtcccgtcccgccccgccccaccccaccctcttgatttctggggccggtgaccaggcccaacgcagccttcaagtcggcccaaacacggtttctgcctcaaggattatttatataaccattgcttattggctgctggcaaacactcgctcttctcgttggctgaaactgtcgggagaagttctgcgaaggctgctccttgcggcgttgggactgagggtcacaggcacctgtatttccgtttccggttcgcctccggagccatggcggcggcactgaagtgtctactgacattaggaagatggtgccccggccttggagtggctccccaggcccgggtgagtgcctacattccctgctgtcggagagactctggatctgcagagacatctccgcgcagaggaggagcgctcctggcagcccccgccctagcgattgccagcaactttcctttctgccaggaaatcaacctacctttctctgcctgcaggcgctcgccgccttagtacccggagtgacccaggtagataacaagtccggtttcctgcagaagaggcctcatcgccagcaccctggcatcctaaagctgccgcacgtgcggctgccacaggcactggctaacggtgcccagttattgctacttggtgagtaacggcgggaaagcgagaagaaacgggactggacctacatgcaagtgattccgcttttcgtctttggcccatagggagcgctgggcccactatggagaatcaggtgcaaacactgaccagttatctctggagcagacatttgcctgtagagccagaggagttgcaaagacgggctaggcatcttgagaaaaaattcctggaaaacccaggtaggacttaagaataattaaaaagtgggcgagattgaaatatcggttagaaatgaagagtaagaaataattctacaatctctcagatactgaagtctcttatttgactttctaaccagagcagcagttgttacaatgatgccttactaaaagaaggtagattattttagagattgcttaggtaaaggtcagaatg

SEQ ID NO: 60182 - DNA, 998 bp, Homo sapiens
agacaaaaagtagggagtctgtggttctgcttctgtaaaatcacctctcctctcctctgagaggagaccagctctgatcttgaaaattttgaaaatggtcaagatcaatggccaaccatgatattaggacctccttcctatagagctactacacagaaccacaaagcacaatggagctgtaagaccgaggaaacaccaagggacctgggaactggggaaagttattaagaaccatgtcaaccacaagggggcactgtgaccccatgggctaaactggaatgtttagctgattgacatggaaatgggacatggaatatgctcttgattcttgagcttttcgtcgctctccaacagagtagagaggtcagtcaaggacaaaacccccaccccacgactagctcccagcagagggcatctttctctctaccaaactcagatttcttatgcagagacatctatgggaaagacacacagtcatcacccatttgacacacccacctacatgatagatgtgtatgcacacactcacctatctacacatacatgtaatgtgctcccatttgtagagattgccctgctgacagtgttatctatgtaggcagatatgcagaaaagacttgccttcccatccataatacacaacagcagctattgccagtaaagattgatgctggttataggtttttgccttttccttgtgtttttccgagaagctagttggtccccactgattccaattatgccgcttcttttcttcagtgtggtgcttcgcactctgctgcctgccctgcgtgtggtcacccaacaccctcagcatccaatagcgagctccataaccctgtttgttacccaatacctccgcttccccttctgaccctggcctaccacatttaaaatagacccagttctatgaaggacagtgatgaaatgctcaagaatcaagggcatattccatatcctatttccatgtcaatcagtgtgtcagcaccagacatcaa

SEQ ID NO: 60183 - DNA, 2186 bp, Homo sapiens
ccttcaattaaagccccaaagtcggcagctcaaagggggctaaaaatgaccaaagcaacatgaccaatgggggaggtggggaaaacaacataaaagggacatctgtccaaccaacccaatgcctcccttcctcccaagacccttcctcccaactctgaataaactccgcaagttcaacattagtgggtgaggagcagagcacctggacagacctgcacaggaaggagcctgcagcctgcggggtggggtcacttactgggctcctattggctggatgcagtgggattaggggtcagggttctcactccttctgactctggggtctgagaaaacacagcaacgaggtgaatgacatgggagacagacctggggtctttcagggacggaaagcctcagccaagacccagactcccagggtcatcaacctcctcgggtcactaaccctccccagtgtctgtctacccctaagtccagagaacacgtcctctctaggctcgagccggaatcaatataggctacaagggcatcagttcaggctgcgcggaggagagaaggaagtgctgatgtggaggtaagagggtggccctgtcagaacctccggattcgaatcccggctctgccactcccagtgtgaccttgccccagttagttactacatttggcctcaattttctatctgcagggggactaaacgcgggggaataggggatccccaaaatttttgacagctctccagtaagaggagggtagcagagcatggctgtttccctccacaatttaaaaacaaacacaaagattggtgccgtcgcttctctcctctactcagtctccgtgtaggtcccacgagtggagaaagggagaggagagcggtcccacaatcttctcccgttctcccccgacggcccgcgaaggcaagcgccatcgggaagggatgggtaggacagaggagaccggccgggcccagcacccggaacccgtccctacgagtccctacgcagcccgtccgcgtggagactgacacccttgcgtggccggtgccaagcgccccggaccttgcacacaacctcgcgcgcaccccaaacacgccctgcagctcttggagcctcagcctttgtgcgcagcaaccgagcgcccgctccgtgctggccctttcccccgagcctccagctccaggggacgcggatcaatcacaccgcccgccggcccggctggcgccttccaggccctacggcccctcgcctgcccctccccctacctgctgccgccgcggccgcttccaccttcacttgcctttgactcgggcccgccccggctcgggcttcccgcagacccgcccccggcccgccccagcccgcccacgggcgctaggctccccgcagacccgccccagacccccagtaaacacgccccccctttcaccccgcccagactgccgctcaggaaagggttgtgctggggccggggggcgaggggcgggcggctggacgcttccaggctctgctcggctcaccaaaacattccaccaccccctccccgcattggggcggtgtggggagtgcggggatccctcagccctgagagggatccctcggctgccctcagcaccgccccatccacgacctggatctgcaattgcactctggctccttccttcgcccccagactcagtggtgggaaccggtagtggggagacgaacccgggatactgacaccccacgagttcgactccccccgcccgaacacagagaactagattaagaaaggaggaggtgggcgggaccgccgctgaggaggcgggggtctcgccggctggcaggggcaggtgtgctggcgccgaaagggggcacgggggaacgtcgagggcgcaggagttccgactccctcgtgcccagagtcctggtacctctcctctctttgctgcgtcccgacgcctgctctccggctgctccgggagaagttggacaacaaggcggggaggtgggggcggggaatgcggggggccgctataaatagagggcgatcgcgggcaggcggggggtggggagaggatggccaacagggactctggggtcaatgcctcaaggggcgcgggggaggggccggggacccccagaggctctgactcctgggtaaacaggcgcaggggcggagttaaccctgcgggggtggagtaggggcttggggag

SEQ ID NO: 60184 - DNA, 2203 bp, Homo sapiens
gaaagatgtctctgaattgggagggtcagagaaagttttcctgaagggtcaccctggcttggaaatggatctcatggtgaagttagaagttcagtggagataaagaggattatgaaagacatgcttgaaaaatggggggaaaccggtctggctggggttgaggcactcagtgggagaaaaatcagagataaagttagaaagacaggtttgcccgattgtgacagaccctgattaccaggctaaggaaatgatactttgctctgtagataaatggggagctgggagggcttgtgagacaaggccccagtgaacccccaaatcagtttcctctttcctccatcctggcttgtctaaacgcattggtctgggagccaaggattccaaatttctgtcagtgctgcctcctcctgacccacagctgttccaggaaaggtcatgggaattcaaggacctgaagaaagtcccacatctgacctcaacttgctgtatgtttcactttctcagtctacaaaaatgagcccattacctttatttatcaaaggaccaacaaaattaggataacagaacttggatctgcttttgcttggaagggaactctcacgggctttccattggtatccagaggctgtgtggaactccggaaggcagagaggcttggctctgaagggtaggcaccaatccaggcccggccctcctctctcccttcccccttcactccctcccagcacaggcgagaggaagcagcagctgttgtcctgtggggaagacaggcagaggtccacctggcactgttgggattttcacaacacccgccccaacttaaacacacacacaacagcctaaggagaagctgggccaacagaagtgacttcgacgatagaatgagaaggaagcaggggtagagattgctggtgtaagggactttttcttcccttctgtcttctctcccactgttttgtcttctgctcttgctctctctctcagagtctttcttctcctcctgtgaaactcctgaaccagtccctggcctgatgcctgaatctttttgttcttcctaaacttgtcccccttcctccatctttttctgttgccccatgaatgcagtgaagccaaaatagcaaaatcagcctaccaagtacaaggtgaagcagatcttggaagctggataatttgggcacacaaacaaaatcacctcccttatccaaataattgaggcaaaacaaagatttcagttgaattgcacgtatggtaggtacgactcaatttcgattttcatgtgcaaacttaaaaccttactctcttttccctttggactgaagcagcagggccatgtttatttcactttcacacagtcctaaggcagccttctacgcagcccagcatactcgagttgaagagcaaactaggataattataatatcaggaaaacacaagtgtagagggaaatttaaatcatggcttgaaaacatcccactctaggataatgagaagtagaaaggagaccaagctaggcattcaaatgagcttgcagccttccatccagcctccactccaaaggctagactggcctgtgctgatacacatttgatacacagcctggtttaaaccgtggattttatctcctaacattcatgtttctacggcagcaggggcataattctctatccagaacttctatccagaagttcagcctgcaaagtttgggataccttaacaaagaagtgaacagctgctcccccaaccaaggcctcgctgaggacaaaccagaagagccagaggcctgtgtgaacttgttcttgattctcttttgccatctagtggcatttctcatctccagcaccacttttgcttctaaagatccttcatcctgacccccaacccacagctgtgctgtccagctactaaaataatgtcctcctggcctcaaaacaaactccccatcctcctgacttagaatcataaattctggaccagaacacaaactttatgatcaggatgggttgtgcgacttctccacagttataatccacacaacagccaggtaatcctttaagctgacacgttctttattcatctacttagaacccttccagggttccctactgtgcttggagtaaaagccacaggccttcaaatggtccgtaagtcttcccaatgacctggtctctggtccctctctgaactctcagttacctgctccagc

SEQ ID NO: 60185 - DNA, 3740 bp, Homo sapiens
gtctcactctgtgacccaggctggagtgcagtggtgcaatcatgattttcactgcagattttatctctcaagctcaagcaatcctccctcctcagcctctggagtagctgggaccacaggcatgcaccaccatgcctggctaatttttcaaattttttatagagacagggtttcgccacattgcccaggctggtcttgaattcgtggccttaggcaatcctcctgccatggcctcccaaagtgctaggattacaggtgtgggccaccgtacctggccatttttgccttttttgttcagtgatatatcccaagtatcttgacacttagtagatgctcgataaatgtttgttgaccacatgaatgaagcatgcccaagattctgagattgcctactacttacaggtaaattctgaaaacaaaaatattcctcatctcagttttacaggccttctcacccacagagggtgatgcttctctgccttggtgtctcggttctcctgagtgtcatattccaagctcacaagagcttggagtagcactgacccagatgctccacacagctgtaaccaccacaaggaacaggacatacaaggtgaaggaagcactaaggcaggatgtcgagagcagcaacagcattttaaacacaaacatttgggcagtattaaatttttgcaattttcaataaaaaagggagggaacaagtgaaattgagaggtgttggctgccttctccagctaaagccatgtggccttggttggtacctggaactggagaggcctgtgaatcattgtggaatggcttcgctattggggatggtgccaggcctcgtgacagtgatgattcattcacccacttccctcgtgtctgttccatctcctccgaaagataaccagtatctccagatgacaaggaaccagacaaagcatctttctaggctgtcctatctgtgcctcaggtcagagaagaagcaacccttaacaccacagtgattgactcttcccaggatcaagggccagaagtgtatatgagaggatatgaatgacaactcttcctgaaattgatttcagttgacacctgggtcaggtgctctattaaagagtcattaaaatcatgtggccagggaacaaatacagtcttcgaatgtgacgattcaagcttcctcattgctgaacatgtttaggcaggtacaggcatccttaggtgtccacgtatttgggacatgtaagtggagaggcatgaacctgattcatttcctgatccagtgatgctcccagcccacccccaaacagacacagcgtagcccgggccagctcttaaggagttcaggagtgagaagaggccctcagagatctgacagcctaggagtgcgtggacaccacctcagcccactgagcaggagtcacagcacgaagaccaagcgcaaaggtgaggctgtggcaggatctggggaggagtgaggacagagaaggagggatgggttctgatcctgagagtacactcaggtgagcgataaaatggataaaggagggactggatttaggggagatgaggacacgcattggggaaaggggagagtgatgttggggatggaggcaaaaaatgaaaaagaatgggaacacagacgagatgggaatcgggagaggatgagacacagacacaggaacatggagacacaaaagggatgagacttaagggaaaggggagaggacaaagagtgacaggcaacagggacagaatgaagggaacagaaatacaagatgagagatggggccacagggttgttgttggggctgcagtggatgtggacacacagaagaagaggcagagatgagacacaaagtgaggaaaggagacaaccgagtagggagatgggtgactagctcatatgagcaggtataagaggactaatttctcaactgaacacctctgtcccagcgacccctgccctccatcctgactgctcctcctaagagagatggcaccggccagagcaggattctgcccccttctgctgcttctgctgctggggctgtgggtggcagagatcccagtcagtgccaagcccaagggcatgacctcatcacagtggtttaaaattcagcacatgcagcccagccctcaagcatgcaactcagccatgaaaaacattaacaagcacacaaaacggtgcaaagacctcaacaccttcctgcacgagcctttctccagtgtggccgccacctgccagacccccaaaatagcctgcaagaatggcgataaaaactgccaccagagccacggggccgtgtccctgaccatgtgtaagctcacctcagggaagcatccgaactgcaggtacaaagagaagcgacagaacaagtcttacgtagtggcctgtaagcctccccagaaaaaggactctcagcaattccacctggttcctgtacacttggacagagtcctttaggtttccagactggcttgctctttggctgaccttcaattccctctccaggactccgcaccactcccctacacccagagcattctcttcccctcatctcttggggctgttcctggttcagcctctgctgggaggctgaagctgacactctggtgagctgagctctagagggatggcttttcatctttttgttgctgttttcccagatgcttatccccaagaaacagcaagctcaggtctgtgggttccctggtctatgccattgcacatgtctcccctgccccctggcattagggcagcatgacaaggagaggaaataaatggaaagggggcatatgggatttgtggacacagctgtttctgttcctgaactagaagtcttccccagctctgacgtggcagtgaggtgacctgaaggaaagaaaaatataaataaataccacttcatatttgtatagaatcctctaatcccttgtgacatagacttgacagggattgtatgccttctttatggatgaggaaattaaggttttagaaagcttaatgaattaaagagcttgtctaattagttagtagcagaacctggacttgaacctaggtctccttgctctaaatacagtgtaccttctactctaccagttgcgcaagaaagaagtcactgttacagaggcaagcggtgaactaggtaagagttcactcatgaagaaacgagtgctctgaagagccagttaccctgtgttggctgcaataaaggtcattacctctctagccaagagattgtttatgaggtgctctggcattttattccttctctctcttcctctctaactgcccctcccgtttctctagaccactgctcttccaacctaggccctggacctggctctggccagatccccttggcctgaagacataaggtaaagggagtgtctgagcttcatcccccagatccaggatcacatttcctttgaccttaagggacttccgtggccctgagcctgcttgtcacaaacaggctggtgggagctgccagagcttccttcctcctgataatgatctcccctgcctcattgctaccctggctctccactctggcagtctgcccaggcctgaggggttgagatgcgaaaatgccatttccctgtccccctgggctacagataccatttctctcgttctggggactggagctggagaaggtatggcttggtattggccagtcctgatggtctctccaacattgcttgaccagcaccatccccttctttcttcctttatctcagtcccaaacaagctg

SEQ ID NO: 60186 - DNA, 589 bp, Homo sapiens
ttaagctcacaaggaaaatttcactccaggttacatctagagtactcaccaatatttggaagtaactattcagatattaacaataaatccaaatggcctggcctattcttattagtggtgccctacctgaatagatttgtcactcaatccttcgtgtgaccttgatcacagccaagttaaaggatgccaggaatagtgatgaaataggaatttgactattcagccttccaaaagccaaagctgagatacaagaagataataatttgggccaaataccaaggctggctgaactgtgatgcattcctacttgaaagctgaagaatgggaaaaggagaatgcttaattatgagatatttatgtttctagggctgggagcttggagagaggaggatggtgtccaggggagctttgcccagtcttgtgcagatggacttaaattgtttcaacatggagtaaaggagcggaaatggagttcagtaaagaaagtaaaccaagaactggagctagatgagctggctctcctagaagggagactatctgaggtagactggggaggagacttttctacatgactctggttcccagaagt

SEQ ID NO: 60187 - DNA, 1140 bp, Homo sapiens
ctagtgaagagccttgcccaaggtcatgcagctaattagtgaaagaggtgggaccagaattcagggctattcatgtctggttcagtattcttaccactagactattttaactttgattgtagtctgagttgtactctcaggggtgaccagaaaccccatataaaaacaagatcagtaaaaattggctctgaaatgaaacaaagctgcagcacggcctgacacagtgtacagagtgtaaatttgaggatcagatcgaagtggctctgtcactcactcctgtatggctgtgggcaagttactcaactcccacacacacagacattgtttccttacctacaaaataagcataaatatttctatctcatggggatgctgcaagataagtaaggagatgtttttagatagattgatcacaaaagagataatacacacacacacacacacacacacacactgctgagttcagtgtcaagaacatagtagacattagagatggcattcagtcttcttctcttgtgatctggtgggaacaggcattgaccaatcagagccaagactggctcatctccataccagtgcacacaaggtgactcttagcccacaagaggaggaaatgtttaggccagccctgggctcctgctgccatccccactctgtcacttcaaaggctggcagcttgggtctgtaactgttaatgaattatcaataaacaggaaagcagtgtggcaaggaaagataacatgaactttggagccaaacagaaccgaatttcaaatcccggccctgccacttactaaatctgtggatcttaacctgccagaaccttagtttccttttctgtaaaattgggataatattgtggaacacacaatacagtttatatataaagttgtacacaaagcacaatgctttggctcgtgaagcaccttttaaaatgaggttctttactttccaccaagaacctagaactgtaccgagcacattttagatgctaattaaatgatgcttggtagcatctctttcctcctgctgctgctgtacagccctgtgctgacctgaaccataagcaatgcggtgtatgttatcctggctgcctttagtaggtagtaaatagtatactctatcctaccatactcctaa

SEQ ID NO: 60188 - DNA, 3859 bp, Homo sapiens
ccctggcttcttcccagtgttgcgggcaggctccacttcctgcggctgcgccttaaatgacggtgtttcccagggtcctgttctgagctctcttttcttcccacactgtactctacttgagtgacttgatttacttccatggctccaaccaccattaacctactcccaaagacaggtatatctccagcccagagctcccaaagtccagtcatacatgtccatcttcatactgttactagcccagtcagtgtcccacaggcatctcaacccaaaacactcagaactaagttcataatctgcctggcttccaaacctgcccctcccttctcctgcagcctctcagtgttcgttagtggaaacatcatactcgatcattcaaagtcctaatctaagacacacctgtgtcaactcgtgcttgtttgtctgtttctccagtaattgcccaccttatcccaggaactacctcaagaggacataaaagttactgagttttattttcttttgtccaaatagcactgggttcctaacgtgtgctcaatacacattacggccttggagggggccgtgatttggagctaggcaaatatacctaggttggtacaaccgcagattcactaccttgttgagagggcgagattaaagagtacatacgaaactatcaagtaataagatagaaaagaagaagaaaccaaatggattctgtaacgtttttctcccatctcccctagggtttcattcatcccaaagttcattctctgttgaatgttaattttcccgttggatatttctggcacagcattaggtctgtagccagggttaggcaacaccaggagaagttcaaccattcaatatctgtaagagttgtggccccggaagctgggaagagtgtgaaaagcattcagagtagaatgaatcgttaaggagactaattatatccaaacaagtgggggtagcaacctgggtaggagtttctgacttccttgtgtaggctgaagaattagatggcgtgtaactggaatctaggggtcatgggctgtaaaactggcccactctgagggtaatgacacagcacccataaaacagggctcagtggtgaagctgggaccacagaagagctgcccaatagccttgggaccgaatctctactgggtgtgttctctgggcccctgagaacgtgtttccaaaaaatcacttgagaaggggctcctcagccatttgggaggacataaatattttccagtgggtaagtatgttctaacatccagaaaatttagaattaagtatagaaatgtttaaaagaatcaacacatagcgttaacatgtttgtattaaggaatttgtattaggcttgtcattctaatttaaaatgcacatggtttgaaatgaaactttcctttaaaattagttttggatcatgtaagaaaacatagaaattgaatcatcctatttagaaattgttagatttataaaggtttttaagtattcaggaatgttttgctggttagctcaaatgcccaaattactttataaggacatggaatatatattgaatttataaaatatctcttttaatgtttaaagagtttcattaactacttacaaataagatcaaatagtcggtgaatacaattctttaaagtgattattagaatttatttctatgtaagttaaacataaaagcttaaggaagctgatttataactttaacataggaaacataagtgttaaaaagccaagtagcctctaaatactctttgttggacacaaaagaaacattttaaaaactcacattgacactacaagaccgattcatgttctatgatattttcatctgtactgcacagtgggctttggtgattatattttccggtgttaatatgtttgttgattttgctggggcgtttagtagggagggaagctcaaggctcaggctcaagggcatgcgactggcagtggagccctcagagtggaacctggacctctgtctctcctcagcattctcctccctctgcactgtgctgccttcagttgggttatttttctgacttgggaatgggagtattatatcctagaaaaactgagaaaggtgagcagggtttgcctgaggcccgtgtaggggtggcagaggatttcagcaaaatatactcccagaaaaagtaaaactcaaaggctgtggtcaggtctccaccctttatagggacttttcctccttggccaaacttggagtttgagactacttttactaagtagagtagcttttaaaatgtaaacaaaacaggctgggcacagtgtgtgtgtgtgtgtgtgtgtgtgtgtgtgtgtgtgttttgttatttgagatggagcctcactctgttgtccaggctggagtagtgcagtggtgcgatctcagctcactgcaacctccacctcccaggttccagtggctcatgcctataattccaacactttgggaggctgaggcaggaggatcaatagagcccgggtgttcaagaccagcctgggcagtatagtgagaccttgtctctaaaaaaaaaaaaaaaaaaattgttttaattagccaggtgtaggggtgcacacctgcctgtagttccagctactggggatgctgaagtgggaggattgcttgagcccaggaggtggtggttgcagtcagctgagatttcaccactgtactccaggctgggcaacggagcgagaccctgtctcaaaaaggaaacaaaagcaaaaacaaaaaacggattttaagcaaccagtttcttcagtaaattagagtgcctgcctaaaagtggtgtgtatgtgtgtgtgtgtatgtgtgtgtgtgtatataaacacacacgtgttcagggtgaggaagtaaagttctgttaatggaattaggagtgctatattccgccaattacagatcttttgggattccaaactcctcatctgaagtgcaaatatctattggcacaaataagataatgtaacaattacttggaatcaatcacttaggtgttggatttggcttggggttatttggaggcaaggcaaggatataggttttgtaattggggggtcttatgcgtatgttcaacatgggcagagacctggaggtagacactaagtacaaaaaaaaaggaaatgtcaaggaactagagacaaagttttatccgctgcttggcagttctgaagtctggaggatgggaatgacttcacgctgttggaattcctagattgtctgctccagaagactgactctgctgggggtctgccaatgagagctgaggccactgctagctataacaggcacaggttatgtcttaataaatgttcatttaacaaaatgtggttttggagcaaagggctgggggtaggaaaatgtacagatcacaaatctggaaagcttataaacaatttctttaaaagctctctcattatgcttaaaatttttcagtgagagggaatttacctatggagatagcttgtcccattttcaggcaactctaagtattcaaaactcccttacatagaaccgaatctgcttctttataactgcaacaattcactgatgccctaccgctttgagccattcagagtaagcccaattcctcttcacaatcaacctttttaatattttaagagtgtttcatgacccctgccctccacatattgccacatctggcagtaacaaatgttataaaatggctcctaccatttgacccaataattccattttgtaaaatatgtcgaatgggaataattcaaagtgcggaggagtacatttctacaaatctttttataccttttcttcatacaatggagaaaagttaaacataatataaattccctaaaattgagagtgactaaatgaata

SEQ ID NO: 60189 - DNA, 2932 bp, Homo sapiens
aggcctggtgccttccctcttctagccgaatagagaggtagggatgcggaagggaagggccacggaggagagaactcagaaaatgtccggcgaaatgcacgcccctacataagcatcccgatccgggaaccctgcccccttggccaggatgtccgccccctatcccaagccttcgctgctccctaactcccgcacactcccgccttccccaggcaacacagaggagcccattgtcagcccagagattccaggcccgaggagatggagggaaaggagggcgggcaagcccccggggggttggggaatcccctgatttcccggccctccgctctctgctaggcaggcaggggcctgaaggtctcatttgagccctgggtcctgccaaagtctagaaaccgttgagagaagaggatcccgggcgagttagagcggggaggctttccagccgcaggaagaccccagttctgggaaggggcggcccaagggaattcacgcacgccccagcctttggagcatcccttgccgaggctaaactgatcccgcggggagcgaggccgtggcgggaaaagaggggcatcctcggctgggcgggcctccgagggtcagggtcgaggttacccgctggagggcggggcggagaagaaagaaggttgccggtgaacgggacggataggctggggacgcccggggaacggcagagatctcggcgcgggagacagagtcccggcaaggggtcccgcgcggaggcgggggcgggcgctgaagggcggggcggggaggggcggccgtctcggccctccctggcggggccccgcggcctggaagccggagcgggccgagccgccaccgcggccggagctgtcccttagccagacccggcgagacacgagcggcgggagggaggcggtggcgcgcccggccccgcccgcccgaccaagcgtcggacgcggcccggcgccgagccatggtgagtccagcgtcgcagccccctgggtcccctcggccttcgcgcagcccgctccgggcccccaagtcctcagcctggtgcctcccgagcctgcctcggactgttcggcccctctgggactctcctccctcccatccccccttcttcgatttgtctgtctgcccgactgtttagctctgtccccaccgggtattgccctcaccctttcttcctcctctcctccgcctcctcccccatcctcccttgggtctctcccctaatccacacacctccccgctccccgccctcctctgtcctgacctgtgccttcctttcctggagcttccctccccctcctggtccgagctccttacccgcgggagacccctgcgggttggtcctgcagcgaccctggaagaggcccggcccctcgggtcatgagaactgacctgcatggaaccaccattttccatccctgtccccaacccggtgaggcaggcccacccatccggccctaggggactggccacagctgtggctgggccgggtcccggggcatggccaaagagggaaattcccgcagagaaaaagagctgcctcaggatagttgggggtgcttgggggggagctcacagtaccagggggcgtgacactgccagagccgaccagagtttgcggaggaggaaagtgccccagagctcttgctgcagggaactgaagggctgcctcagggcactcctgctacagaggggagggaacacgagccggagctccctgcagggactaggggaccctggcagcagcaacttggggcgctggacgctggagggtacgctaaggagaagcccacaccaacaggagtgaacactgccctgggaactttcactgcagagtactctgaagcaccgctgcgagagtgggcactgccagagagagcgcccactgcaaagagggcgggggcatggccaaggggccgctcgctgcagagtggaggagggggagaggccttgccagggggagctcaccgcagggagtggaggaggggcaggggcactactggggccgcccctctacggagggaagggcaccctctggcagggaggctggaggaaaaagaaagaggaactgggccagggagagctgactcagtctctctggtctcctctctggtccccgccggcaggaggctgggtctccgtgctcccgcccgccgcctccctccccagacccctcctcccctcctgccgcggccgtttcctgtggctgagactctcgctcagccatgagctcaccgcccctaatgggttgcagctgcctcgctgctcaagccctagctccgcactccctgccttggagcagacggccccactctgcctcacccccgcccatctccaccttccccccacccacgcgcactgcgtccgcctggtcccgggaacactgggggtctgtctgctcgcccacacaccttggggccgggtctgcgcgctgacgcactgaatgtcccgtctctggagtggttgccctaacttcccagacggtcaagacaaacgggcaactctggatggagctcagagaaaaataagctattttgttttatggcaaaggcaaggtatgggggtagggaaggtagagaccaaggtaaaggctgcattgagtatccccttccccatttacagcaaaaaagaaaaaaaaattccagtaaaagggacttcaaagactgtcttgaaaaagaagtttgcaaaggaatagcccaaggggtggttgtttaggttaggagttggagaaagacgtctcattgactcacttagggaggggagtctggatgaagcagggctgagtctttttgagactcctagtggaggttggcagagagaggtcccactggaatcagaaaagatcagctcgaatgcgcaccatcaaggcctcctcctcccttcccacaagttcctcttgtgacttttttctctttcaactgcccccacc

SEQ ID NO: 60190 - DNA, 1177 bp, Homo sapiens
ctgtggccgaaagaagtgccttcgccatgtctttctcttcgagcatctcctcctgttcagcaagctcaagggccctgaaggggggtcagagatgtttgtttacaagcaggcctttaaggtacgattcctggagtgagtggtggaggtgacaggaagtcattctcttcttgagaactcaggatgttctggaaattcagccccaacagaggttcagaatctgcatcatctagaataggctttggcttgtaatcgactatcgagttagggtgtcaggggatgttagaagtccctgtctttggtctacctcatgaggttttccttatcattcatgcagaacacttaggaggcattccaaaccagactagaagagggactttcccactaaggacacacatgcctttggaattaggggtggttcctagggcatgaggagaaagcacactatactttgactaaagaatccaagaagagggaggccttgctttagggaaacagccttgatatccagataagcatttatagcaacctatggtcctggatcaggcagtgtggaatggattctaagggtttctagactttgtaccccctgcacagagggtaagcatagagtatagcatagaggaaaaggcctggatccaattccggctctaataagctgtgagaagcctttgtggaagttgcttcatgtttctggcctcatttccccttctgtaaattatgtttgttacgaagactaaacgtagagcacttggcacgtgataggtgttgagcaaacgtttactgaacatctatcagatgccaggcgaagcccagtgcttgccatgtggcgccacccagccaggactcactctgtcttcacccgctgccctctgctcttcctcagactgctgatatggggctgacagaaaacatcggggacagcggactctgctttgagttgtggtttcggcggcggcgtgcacgagaggcatacactctgcaggcaacctcaccagagatcaaactcaagtggacaagttctattgcccagctgctgtggagacaggcagcccacaacaagggtactgggcagagctgaggaagggggtgcttggagtcagggttatagcaggaagttttctggagagtgtgcgaactgcttgggaaaacagtttataggatgaagaaagaatggctt

SEQ ID NO: 60191 - DNA, 2216 bp, Homo sapiens
acacgatggttttccctcttgagaatcctagacctcccaaatctgctaacaattatgattaccactgcactagatggggttaaaaggaaagggagcttctagggcggtctacgttcaaaagactaccttgatcacacagacacaccagtagttcacttttatggtctcctctccatggccctctgaacctcactgctcagatagctcctcctaacccgctccactctgcagctcaccagcctttttagactgagatcttggtaaagcctccttccctctgtcctcactctcctgagttagggacatggaacctcagccatggacttcaaaggtacagcaggaggcgagaggaaggcacacctgctcacctgctgccatcccaccatggggaatcttatcccagaggcatgtcctaacgcaaccccgattttgattttgaaagttctggaagacctgggtttgggaaagaggggcatgtagccagccctaagtccctttaagtggagctgaccctagaaaagtcagtcttagcacccacgtgagcctcggtcctcagactgggaggtaggggcgatcaagggagcctctgggaaaatccccctcccagaaatagattgctaagtagggtaggacctgctatcctgccggagaggtttttccagcagcaccccagacccctccccaggaagataagccagaaggatgatggggggcagggttgggagatagggaggccaaggctcagctacccccggccaggagaacaaaagctgagttacagccgcctccgctgctgccgcgggccgagctctttgtgacactttgtttgggacgcaaagagggaagcaccccccatcctttcccctcccccgccaccccgtgcttccagagagtttgggctccttccccctcccccaccagccctacctgggccgggggttggggggtgcacatccactcaggctcgcggctctgccgcccctcacccccaggtccctcgcgccctgccttcgggcccctacaaagacacccgccacctcccccgccacatcccccccgttggcccttccctttggtgtctgctcccccagctcttccacctggccccccctcccttggggccccccagctctccaggcttccgaggccgccacccccaccccgcccccccaggagctctgggcgaagtttgcttggggccgagccggcgcccctcccccgcccccgccccctgcacctgctccgagccgggcgcgctgagcgggccccccctccgggaggggggagggggccgggggcgggggccgggtggcggacgggggggcccgggagtcgggggagcggctactcacgagccccgggcgggcggcggcggagcgggcggcggcggcggcggcggcggcgggcggcgggccggcggcgcgggcgtcagcgttacgtggggccgggggagatgcgccgggccccggcccccccgcccccggcccggcccccgccccctccccggtcccccgcccccggccctggcccgcattgtgtgcggcgggaggcggcccggccattagcatgcggggggcggcgcggcggggctgggagccgcgcgggagccgggctctggctccggggacagggagctggggaccccgggagccgcgagaggcggccgccaggggcggggtgcgggcggtttggagacggggggcgctgtcggagggagggaggaagggagggagcgggggtggggcgcacagaggattccaacaggagactggaagagattttgaaaggtcatctcgtccttcccccagcctccaagcagcactgcccctccctccctaaacccggacataccagggaaggagttggctctgccgctctttctgccccaacatgcacagactcgggaagttcttcctggggttttatctcaaagcctctcccttacaatttctgtctctcttttgggggaggaggaggggcgattatagagatagttaatgtcggccgtataagaaacattattaaagttactcttcggtcctttccgttcttgataaacaattcctgcgccttcctctcgaattctattttccattcctcaagtcactttaatggctcttcaatacaacaaatatttactgagtgcttactaagtgccaggcactgggctcagcgctgtgagggatgagaaagaagtggtaccttccttccaggcg

SEQ ID NO: 60192 - DNA, 2264 bp, Homo sapiens
cttccaccctgagagaatgctctccagacattcctgcatcccaccccaccaaactcagaagcttgctgggatccttcgagtccaataggaagtccgggagtgccttcagttttcactcaaagcaggcccttttttcgttccttccctgttaggggaagatacacctggacgagaatatatcctcacctcaccaccctgaaaagctgctttctcccttgcatccatatcctctcttcctgtcacctccccatacagcttcacatttgcctcatcgcacttttcttttctgtccacctttcataatcccatccactccaaatcccggaccctgcacacgccaactccctgaatccaattcaggagtgccccagttcccctttcgatccatctcctttctactgtagcggagactacaagtcccaggatgccccgctagcccgtgaccggctaggaaataaagagccttctctccgcggtaggggcgctgttggatgtgctgagtgacgcgaggcggggaagtcggggcctagcctggcgctttctcggacgcgaccactggccccgcgttcggggaggagccgggcgggcggtcctgcactggcgtgccgctcccccagccactgcaatagagagctggatctgggtccccagccctgcgctggcagcttcagagactggcgagggctcggagctgacgcttggcagagctggggcttcccagatgctgtcgccgcaccccctcgcaggagggcccaggtccgaagtcctgagacttggagcgcgcgcgagaaaggggttggagatgatgagtcagaagcgcggggcctttctcgtcccctcccctagggcctgggcgctgaagatggacaggctcgctgggcaggcgggtagatagggcaggcagagggagggaccctgcgacccgcgtctctccctaacgctttcccgcctcttgcgagcacgccggtgtaacgagcctgcgctgccgccaccctttatctccaacgcgggagcgggactgcgcaggcttggcctctgggctgacccgccgacctttgatctcggctgcggtcgggttgctgaagttctggctgcgttcacccccaccgtttacgacctttgcaagtgtgcaaagataacaggctcgcttgggcttgggaaaagcccgggagaactgggagtcccactagcagcagcagctgggcagcttgctggccgctagaaactagaaattgaccacagctggagtaccaagagaactcaccccaaattcacatagtgcccgggatggctgttcgcctcacactcatttttgttcccacttgagaaggcttctttccctagagaatgctgcttctcccggcctagccagggccaggcaccagtgaggatagagcgcagcctggctgccttgccttgacattgcagtggcgtccgctgcagctcttttctgtttgtgacaccttggaagagtggtaataatcttcctatgacaaggttaagtgtgagtactagtgggtggggacagttctgggatcaggctctggaatggagaaaagatctaggccttctgcatttcttcctctcccccagtctaattgccagaataatggagagctcatgtctgcagggccgatgaaacaatatttttcttgaaagtcagaaggtggtggtagatgaggaagctgagggaagaaaattaacaatttgttctgttttccaggttttagtgatgtgatcagattagatattgcattctagttccagagaagcttgatgaccatggaaattaacctctatcagtcagattaagctaggctctgctgtggtaaatgccaaatcacagtggcttaagaccacaaaggtttatttctcatactacgtgtccaaagtaggctggcaagggattctgttcattgcaaatgtttcctcccaagctcatggagcgccaccattttgagatcctaccctgtccctatgaaggttaaggttacccgccccgcgccccccgcctcagaatgtgaagtaagcatgaagaattgttcatggactcttaaatgctgccctgaagtgatacattcatgtcacttccacccattcaatggccaaagcaagtcatatagccacacccaacttaaggaaggccagaagggcaatgcctgcaaggagaggggaagcagaaatacttcattaaaagaaacatagttgggcgggctcggtggttcaggcctgtaatcccagcactttgggagaccaagacgggt

SEQ ID NO: 60193 - DNA, 1314 bp, Homo sapiens
cacgaggaagtagagaggtcagtttatgagaggctaaaaggctcctcctcctctaacccaactgctgcagaaaaaatagaaatagaaattttaaaaattacatcttaaatccaggtcccggttttggaaacaattaaaaaaaaaacacctgtacatttgctgtagtgcacaccaagttgcatcattatgtttaaaatgtctttataaaatcagttttggaatggaatgtgtgtgttctggaagggtggggaagggaggttaaaaatcaaagctgagctccagtgagtagggatggggttcgccttgctgccctgtgaaaggagaagggacagattgagtcagagttcctcagaaatgttgtgccctaaacccccaagacagaaacatctgtctactgcagctaacacattttggtaaagcattaacattccactgggatgggatagcctccatagaatcacctctaccagtgactgtcttcacaattcttcaacatcaatagatgactaaaattaactaaattcatgtcaatatgcccttgagggtctcaaaaagagtatatcccaaatgttcatcttgataatgagcagtttgggcaaagaaaatacagaaaaaccgggccaacaaatagagatgaaatagtgagcaaatgtcaaatactgagattataaaacctaagcagattcatgggttttaaacttaaaaaagtccgtggagtttttgctatgagtaatagactgaaggtgaatggcctaccatgaagatctatactagagatgactcatctattctcaaaaccagtgagtgatcaaaccacaagacctaataggttctactgttaggggaaaagatgttttaaataaggagcacattattccactcactgacaaaacgaaaatacagatggaattaaaaaaatactgaatatttaaggtcataaaataggtgaaaaaaattaaggtccttatgttaatacttttgtttctgtagtccactatttactatgtagcgtgtaaagctaatttcaagttatggattctaaaaatctggtacataataccacactaaaataatttccatgacaaactggttgtttcatcagctaaaataggaactgcaattagactgtagttccttgtgcaaacaatgaactagctgcactcactgttcaatttagccatgaggtcttattctcctttgtaaatttgaggaaattaaaatattttaaggccaagtgtggtggctcacacctgtaatcccaacactttgggaggccagggtagagcacggcttgagctcagtagtttgagacca

SEQ ID NO: 60194 - DNA, 3029 bp, Homo sapiens
cctggccatccttcttcaacttttccccctagccaatatgaaaatgttactaaacgcctatctagttgagaacacacctagaattgtgatataaataccgtggcaaacagtttcggatattaactcaaagaatttttggtgcgctgatatacatactgaccggaaggaacccattttcgaaaacctcaaagaaaagtgcccgtcaatcaatttcaactactattaacagttcttaaatactaatttctgacatttctccttgccaacatttttacttcatgatttcccatttttaccctaacctcatttctaacagttcagcacaatgataaactttagttttaagttcctgtaataatatacatgtttaagccttaagaaaggggtcgcgatgtttttgacccttattttacttcctatcaaatagattgccttacagatgaatttcttaccctgcagaatgggtttaaactgtgcttaacagctttagtttttgtgagattaacagattgtgaaaaataaacttagccaaatctcatgtgaggattaaaaaaagcgatgtcccagataagtcaatgtgacactaaagatctaaacaattttttttaacttttaagttttttatcaaatttcagcacccagcaaataataggcactgttaatatttgcttaatataacgtagctgtgaatttttgcccacatttaggcggacgggaaaattaacgccagaatatcccgaaagtcaaattttgtcatcttacacttaggaagttacgttaaaaaattctcaagtctcgtagtatttttcttaagcgcaatttgggaatttccagttacctcgtggtttccgtcatcaggttcttggcaaagattgcaatacagtagttttagaactatattaactaggtattccattaactaggtaaaaaccactcgactgacctcgtggtcaaattccttactagtgctgctactgacttaatatgaccctagcaaccaacacttttctgcctcagtttccgtctgagaaagagagttaatacctacctcaagcaaagttccactaacttatatatttcaagtgttttgtaacctgcagatgaaaagtcagctgtaaatattaatatagttatatcacaatatttccttttacaaatgtaagtgaaaataactacttcgagctccatcatttgctcatagagagaaataaaataaaaagttatcagtaaaatgctgaatcttttgttaaacctttctcgtaggccacgcggcacgatccaggatttaaaggctcgcgatacatctacttggtaaccttcccccttcccctcccccactttttacatgtaagaagaacggaggtaatagaaggcatcggcgctacgttaacttcgactatattaatgagcatcacgatcttcattttcatgatcccgtagtcctcgcggtcgtagaaaatgaaaggaaagcagccgttaacacaggaagagcgaaaaaaggacattttccctggcgatcgtggcctagaggacaccaggttaaacctatacagaggctgaggcctataaaactgcccccggcttcaacctaatcccccaaaacaagcagaataaatgagggcccggttagttagggggaaggattcccacatcttctctcccacaccccctctcgcttcccgaaaaacccagcgccttccctgcgtccgccctctccacttaccaagaaggggagggagaagagattcgattctgagtctcctactcccgggttctgcgtagagaagccgactgctgctggaggtcggcaacgcggccacaaccgctcagtcttcgtctcttcacaaaatggcccccgagtctcctctgccgccgaggcgaaggcctagtccccgccccattcctgagaatcttcctattggctgtgcgttttttcgctcccgctcctaattagacagttcaaccgctcctcacaatgatatccaatcacaattagcagtgggttagactaagcaggcgaatttccacatgcgtgagagaaactagtttataactggttagttttcctgtcatttattgcctggagaatgcttattggctattgcacgggacgaccctctgggtggaaactcgcctttgtatcgcgcaccgtctcacatccgggtatctgggaggcctgattggcggccgcggcgtcctatcgctgccccttagagtgcctagtagaagatccgcccagacctcggatttccggctgcgcgggggcggggaaagggttgaggggcgtagttaggtgacgggcgcaaaagacctgccccagccccgggcctagggaaaaaaaagcgcgaaatgaagcctccgttgtgcaatgtgaataaagaaaggacttttcttaaaatgaggagggagcagcagtgactaggccttgttaaagtgtgtagaaaactaaccagtcctgcagtttttccaaccccagaccctttctcagttccagattcgaatgtcagctacctcgtagacatctgcttcttggcctattaaacccttcttcagacaacacatgttccatcgaaaccaactgacttccttattcctctccaatataaaaaggaagtgcagaatcctggcctctggccccagggcatctaatatcttaagtgccagcaaaattggcccatccttccaaatctggtcccttaatttccctcctcttgaaatggcttgtctcctacctacccccgtcacctgccagtctctctggttacattataggaactgcgcacgcagtggggtagcatcagctctactaagccagcggtttcttttttcttttcttttttttttttttttttttttttttttgaggcagagtcactgtcgcccaggctggagtgcagtggcgcgatcttggctcactgcaacctccgcctcccgggttcaagcgattttcctgcctcagcctcctgagtagctggaactacaggtgcgcgccaccatgtccagctaatttttgtatttttagtacagat

SEQ ID NO: 60195 - DNA, 1803 bp, Homo sapiens
cattagttctctattaagaggaaggctcaagctctgcctgctaaggtgaaataaagtggagttaacttgtgtaagggttacggtcccctacgaagaccacaaccagaatgtgattaaattaggaagccaaaagcagtcacagggaagggaaggaaactagccttttaattagcactttctgtgagctgtactctgtcccagatatttacagtcatgatcttttttaagcctgacaacagccctcaaggtaagtatatttagcattagcacacattagaaactaacatctgattggtggaaatagagtatcaagggtcaaagtaaggtcagcaccatccttttattgaacaaatatttatccagtaccaggaattgcaaagcactgggatacaaagattccaagggtaagtaagaaaaaactgccttcaaggagtttataggagtgagaaaacaagtaaacaaattcaactatcctatgcagggtatgggcaggacacaaaagagagagtagtcagacccaccagtgggtgaggtgctgatatggctgataagtggaggaacaccagggctcttgtctcacgcgaattagataaaacgacacggacacaggtggagcggctttaaggagcggagagtttaataggcaagaaacaagggagaagaaagacggaagaagctcccctgtactgagacagagggagaaggactccaaagcagagaggggagacctcatgtgccgggaaaagtggctgcttatatgagtaggcaggaggaggtagtgtctgatttgcatagggctcaggggattggtttgaccaggcatgtcactcatgtagcctgtggaaaaaactggccctcctaccctagtcttttaatatgcaaatgaagggcgccatgatgttctacacacgtggggatatgtgggggtggccatgttgccaggtacaggtcggggaaaggacaggaagacaagggcgggaatcgccatgtttgggtggacccagtttctaaagacctgtatttgcatatcaaaggttgccttcccggctgtaagagccagggctttcctgctagacaaaaaacgtttctggagctgctttaaaggacgagaaaactttccaaggaccccttttcctctctatctgcctaaaattatttttaataactcctttaacagtgccagatcagaaaaggattaatgactgggtgcggtggctggagcctgtaatcccagcactttgggaggtcaaggagggaggatcacttgagctcaggaattcgagaccagcccagacaacatggcgaaaccccatctctatcaaaaatagaaaaattagacaggcatcgtgatgtgtgcctgtagtcctagctactatggaggctgaggcaggaggattgcttgagtgcttgagcccaggaggcagaggttgcagtgagccgagatcccgatacggcacctcagcgtgagactttgtctcaaaaaaagaaaaaagaaaaggattaataaaggaatagatttgtgagttaaatactgaaatactaaaagattagcttgtgttaataagtgtgtaagagaagagggggctttccatgagagcagaggtgagaaacatcaggtctggtcatgaaggacacactaagaattttttttctcgttgtcattaaagacagaacatgctaggaatttagactttatcctacaaacagcagagagctatgtgaaagggttttaagcaagttgatatgatcaatttttttctctctcaagattatttgaccttttttaaaaaataaaaaataaat

SEQ ID NO: 60196 - DNA, 478 bp, Homo sapiens
tatctctgattaagtgtatcagaatgaaagcactgtagggtgaaaagactgcatacacaaagaacttctacaggtgggttctggacacattaacacaaaagcagaaagtcttattcaagtaagtttttcataatagccacaggttttgttaactggtacatttttacatagatttggctcataactttacaccatcagtgtcttatcaatatctaacattctcccaagatgatgtcattaaggtagtaagagggccaagataaactttaaagatttttgagatacaaaaaaaaatggtgggtgggaaataactttcatggatttaaagactatcagttttattaggtttgccaacctgtcttcaggccacagttaatttgtcatgtagaggaagtgagagctatagattagttttcatgaatggtatagagagaatgaaattatttgatgaatctgaatcactgggactagaaacaat

SEQ ID NO: 60197 - DNA, 1765 bp, Homo sapiens
taatttacaatgctgaaatgagagctgatcatttttctcaaaacgtttttcaggttaaaaaaaaatctttattagctgtatcttcccttgatgacagggttcaggggcaagacttaagctagccaactcagactgcatcacagaatgcaaccaaatgtttgctcaattagtaagttaacatcataaaaataagttttaactgtggacgtttttagagcagcaaaactgccgaatctttaaaaaactgggaactgccacagctcttttaatgaacacgtgccccggatacgctaccaaggaactaataaggttttaggcatcgttttgttttgttttgttattactaatgcctgcaggctttcagcgttaggtccctctctgtaacccacagcagggcctagaacatgaggcggttgcgcgtgagcagtatttctttttttaactccagcaaaagccccgcaaacgataaacgctaaaagcccgattgacatcctccttgcccttccatctctcctttacgaagacggttataatcctggcgggaccaggggtggaatattgtggttctggagggacagagcgagtgcgtgagaacacggcaggggagggcagcaagacgtgaccacggagtaggagggaaggatgttgcctcttctagggcgggaagagactgcgagaggtgctgctatgcatgaccaaggctggcacgcggggaagatggtgatggccgcaggacagggtgaatgcgggggattccctgttaaggggcagcgttcgtggccgcctccggtgaatgattcgggagcaacgaaaagggtgaggcacagaacccgggaattcctgaccgaaagagaaaaaagggcgccgagaaacagggttattatgggatggctaagggggctccctaggaaaaattacaggatcttcctcacccgccaattgctgtacagtctcttcactcgccgataataagcgtctttgtccagagtcacagccatagccccggacgccgcttctcctcgggttccgagaatcacgcgaggtcccggctcagccacccgctctcggcccaggaatcccgcactctcccaatgacccggaagtatcgacctcaaagatgccctttccgcttccgggtcccaacagcgttaggttttttttttgtttgtttgtttgttttgtttttttccaaccctctttcggatggacgggggaaagagagaaagaaaaacgagggaaaatcaacaaaatgtgcgatgcaaagagtcgattttcgcggggtttgtcaacttcgccactgccgcacgcgaatcgacgtcgtcacgtgacggtctgcctccgcccttattaactctcagcccagcggcggtttccaggacctcagactttttgccgaggcggcagtccctagacgaagcgaaggaggcggcgcctgccccgcccacaagagctgccgcgcgcgggtgttatagctccaccccatctgcaaaggaagggggagcggaaagagcgggatctagcgtgggataaaagtgggactactacagtgtaactgggcatgcgcccctcctagaaatgatgggaatgcaaaagcccttgactgctccaggactcgagggatcctcggtgccaggatgctgggtcaagcgctccgccgggacagaggactcataccagggaaatggagcccagcctcgtgataaactacgacccaagctgggggaggaacctagttttcgaaaggaaaataatatgcgcaagcttt

SEQ ID NO: 60198 - DNA, 1774 bp, Homo sapiens
aataaacatccaaagtgaatgcaatcacaatttagggtcagcaaaggatcaggatggaaagacataggaccaaattggagccactcagatttcctaagtagatcaagatcctaggccattttctctgtcttcaccattctcactgccaaatgtgtggctactctgtttctgttttccaattactgaaagagaaagcactcacacctcaatcaagggtatggtcatttgggggaatataaggctggtaaagtaagaccttgtgaataaatcggaaaagcaaaataggcaactacgacagctaaagacatgtattttcagggggtaaagaagaaactagagagattctgcactcatgaaaaaagggaaagggcgaggtgaggaagtgaggggttgatggagaggaaaacgcgactggggtgggggtgggggggacccgggtacattacctgctcatactgccggggttggtgccagtaaggtccatacagcagaggcggaagatttctggtaactggagaccccaaaatggaaatgaggtacatgcacttgaggtaaggagctagcgggggtgccctccagggtggggatggccaagacgggaagatgcggggggtggggggtgtggatgcccgggataggagcaatgttagggcggaagctgcaggccgagaggcccgacaagccctgaaggagaaaacgagctgtgcctcaccccagtggaggagagaggtggctttacctgcagtggctgtggggggccggttcgcccctctccctgtctctccagcaccagttccccctcctcctgcgcaacctaacctgatgctcctgcccgccccgcgccatcattggctgaagcgcactgccactcaccaaaggcgaaaagacgcaaaacagcgcaaagggtgggactataaggagctcccttccccctcccccgcaggttaggttgagagcgcacggagaggcctatccggtttctagggccgaggcgaagcctgcagcttgcttgaaaaaagggggctggccagaggaacagtctcatagtacgcgaaaccagtcctggagattaaattccctaccatctactctgaattcttcaccctgaagagtataaacttgggagggagggttccgcgctaggccagctccgcctccctctgaatccccggccttctagcagccctgtcaacccctctcctgtagtgactacaccgtatcccactacctaataaaaggggccaaatcttcttccctccatcgtgggagtcagcccagctggaatatggggccttttaaagcactctttctgccacaacacataaggttgccgtgcatttttgacactgtgacccttcaataccaatacggctttttagacagtaattcctggggccctctaacaattcccgacccttagcccgctcaaaacaaacactcctcaccctctaaactcggtttcctgttctcccatctcttgaaactcagcccatttgaccttttaatcagtgtccactttgcgatgtcacttgaaatcactctaattcccagtgagactagacaaccccagaatgatggtgtgcaagcttaaatccaccaaagtaaacttgttttttccttttttgagacagagtctgactctgtcgcccaggctggagtgtagtggcgcaatcttggctcactgcaacctccgcctcgcgtgttcaagcgattctcttgcctcagcctcccgaatagctgggattacaggcgcctgccaccacacctagctaat

SEQ ID NO: 60199 - DNA, 2212 bp, Homo sapiens
acaggacacgattcaaatcacaaactcactttcgatatgtaatgtgccccacaccagatgacttcagcatatgctaacctaggctgagaatccttgactgagtcgacaaactcagaaaagcatggagatgaaacgatctgtagacgccgctgtgatggtaggatgcagcagacactgataaggcagctcccctggcttgtgtttggggcgctccgctgtttattctttaatagaaaaagacagagttctaaatctttgacttctggctcactttgcttagccatacgaaagagatgggtccactatataccttttctgtgaagaccctaaccgcttcaagactgtcccttaaaaagcaagaggctgctgcatttatacagctgctgcagggaaattccctgcgacactagagacaggtaaataaactgcattcgttccaaagcagggggaagggtcttctatcagtgacgagtttacataatgcaacggaaaaccagtgagctctgcagacctgtcaaggaggatgcaaggcttgagctcctctcttcccaccatctctaaacattctccaacagcctgctcttcactgccaggagacccacagaacttacacctgagaatgagtaacaatctgcttacgcttaccccatgctttcctacccacctttattattaaaatacagaagaaaaaaaaataaaaagaagtagaaaaccctaaccacctatttctgaatccaaagtatggagtaaccaaacggggccgaggagttttcccttctctgaagagaggagaacaaggcgccgcctccaatctacactacgcccagtaatgcaatgacaagccctgaaaactccacagcgtcccaagcagtccctcgcggctcggcccggctcggaccccgcggcccggcagccaccctctcccccggcctctcacaaaggagactggttcagtccggagcatcaccccgcacctgatccctcacaactggggggcgagcagggggtggaagagagaggagaaggagttacttaaatcaaatctctgagagcctcagcttttgctgactcctggcccagcactgaggagcgggtgcgagcgggaagcctacctgtgcaagtcctggtacttcctttccaggcagcgtttcaactcaccctctccgagaacaaggcgccttccggcggagcatggccagccctcgcctcaatctagcttgctagtagtccattctccctaggctccgcccccctgcgctcccatccgccaatggcagcaccgaagcccggcctcttccagcgagctagtgtgagcgccatccaggaagtctcttgagggtggaaggtcctaggaggatgagaagggtacgtaggcgaccacaaatatgcctgattgaaaataaaatctggcggcggctcgcctctgacgactcagttcacaggcggccaggcccctcggcatctttttttgacccccgccattgggggcgctgtgaactaaaacaacacttagttacctacttctgggaagccatcttggctcggactccgggactgggtgagagtgcttaaagaatgtgaagaccctgtcggtgttctgtccgactatctaggtccagcccgaacatactctgctgtatacacttaggaggcccctcagtcacgacgtgaaaccctggagtaatgccgtatgtggttacgggcaacaaccaccaccaccctctcacttaactgtaggagtaaagcaattttaacaaatcaaataagcaaaaattaattcttctaatgagagtgaaagttgcactttcctagggtaatcctttatggacacctcactcaaaatatcaggacatgtatctattataggtgctactaagctttaggattcactgcaaattttccagtaggggcactgtgaatcagttggaaatcaagaacaggacttaaggaggaattcctttttttttttaaaggcctaatttttttttttttttttgagatggagtctcgctcggtcacccaggctggagtgcagtggggcgatctcggctcactgcaacctctgcctcccgggttcaagcaattctcctgtctcagcttcctgagtagctgagactacaggctcccgccaccacgcccagctaatttttgtatttttagtagagacggggtttcgccatgttggtcaggctggtttcgaactccagacctc

SEQ ID NO: 60200 - DNA, 1718 bp, Homo sapiens
aggggtaactttttacttcgaacactgaaggctgctaactttccactttagcaatttagctagtcaggttttatcatctgttctggaacaagtagatgcacttacctattgtgaggtcgtggacaggctggaaccgcttatctgtaaactgcaggaggagacatgacttccccacacctgaaagagaaagcacactcccggaatcacgcagccctggaacaccttccagagtatggacttcccggaccagagaaggggggctcccgagccccgcccccggccgccccgaaccgccccgcccgtctcgaatcgcccagcccacaaagtgagccccgcccccgccacccaatttgggagcttcgaatgcccgcccgagccttgaaggcgaaccacctgagggttacctgtgtctccgatgatgatatacttgaagagataagcataagtcatggtgtcgcgtcctctgggttccgggtccgcccgacttctatagccacttacctccgacctctctagccactcaatctaccgatcttcttcttctcccccttccccccgctcccccgcccctccggctcctctagcccagatcacgtctctattgcactccccggaatcatccttaggtcgggagtaccctacgccacctccagggacgcttctagcacttctacatgcccttatccctccaaactccagggggcgatagcccagcgcctgactctctgcagccccacggcgctccttccaatcagcagagagaacacacgtccttgcggaagtgacggcagttccgagtccagtgggggcggtgggagcgatgagggtctgagacggtgggagcggttgtgtgaagatggaggtaggaacctgatagctaagaaggctggcgagagaacgcggccgaccgggttgaagcagggacgggaagccgggcggagaggcgactgacgggagaggagagagagcggggtttggggagtgttgtcagaatgtcagggtcaaaagccatcgctccaagctgactccctgctccccctaacttatccccgcgactttcttttggtttccagtttcccggaggaaatgacaattacctgacgatcacagggccttcgcaccccttcctgtcaggggccgaggtgagccagagctgccgacgccgcgggggtagggcctgaggcagcggtggggtagggtagtggggaggagagcacggactccggggacgggggctgggaaccaagggccgcaattggtgtttagagaaaagtggcggttgcttctagagcctgtggggactatctggggaagtcttgggaagttgctgtcatcagaaagcaaggtattggaaagagataacctgtttaaagagaaaagggattctggattagaagacagagtggaattgtctcctttctctggggagaaatagctacagtaatcttaggggatcgcagtggaaagaaaatgtttcagcagctgaagaaattggggttgaggggaggagcttattggttttcttttgttttgagacagagtctcgctttatcgcccaggttgaagtgcagtggtgcgatctcggctcactgcaacctctgtctcctgggttcaagcgattctcctgcctcagcctcccgagtagctgggattacaggcgtgcgccaccacgctcggctaatttttgtatatttagtagagatggcagtttcaccata

SEQ ID NO: 60201 - DNA, 2038 bp, Homo sapiens
ggatcctgccagtgcatcttctatttctaggggccagaatacgagcacatgaacctaacatgatctagacaagatttagagatgcagttgaagatactgacaaatattggaacaatctaccacaaaggtgatactgagtcactatttttgcagagctttgttactagtttgccttaaataattcagagtttgtcctgagggtagggagtggataacagtgaatttaatcttttaaatttccttcaagttttatgatcgtgacacgggggcaacaggagaagagaaaaagtttggaaaccaaacacaaatgttttcagattcctgctaggtatgtaaatggctaagtcaatgccggtaggggtactcattcagaaacacccagtgccactctgtacgggccactaaattgggcactgcggatataaaggttcattcctcgcttactgtacccacagctgccaagaaatgaccactacaaaagagtcgttataactgagggaacaaagcgccaaagcagcaacaaaaaggggttcttgctgcttcgcgggatagggggctgagcagcctcacaaaggcgacgtcctcgcagtctgaagaggagtgggcaaggcggacgagggtggggctcaagcgtccgtccggtaaaagtgagctggaagaaccgaggcccagcgtgaggaggaaccgcgaactacttgcagaagggcgaacgtctgctgctgaaggtggagagggagtaccaatgtacgaggctttatagaaatggccgtttggtaaagggcagtgactctggagctttttctctagggatcccgcccgtcctccccggttgagcctcggccccaacagcccagtgcctcacccaagtgccccgagtcctgcttccgcctccgctgcagcctctcccgcagagagtccagctgcttcttgtgggcctggatagagctccacgtgtccgacatcctagtctcccagccctgacacctctcgaataaggcgcggcggactagcacctcccagcactcgctccaggatatagccaattctcacgcggacaccccgaaggctaaccggaaaatgacccctggagctgagcaagacagaaaagtcatttccggtgtcgcgctttcttggaagctataaagagccacgttaggtgttggcagagcggccggtatagtcctcatacccgctctctcatgcttccggacacagtgaggctgtggttgccatgttggtgactggcagagcggccatgttgcttatagacgcgcatgcggccatgttgaatattcggagaggagtcctgagagttgacttgtgttaaagtagcactcgtagagagcaacaccatatagtacagttttgggggtttttttcttttttttttttttgagacggagtttcactctgtcgccctggctggagtgcaatggcgcgatctcggctcacagcaacctccacctcccgggttcaagtgattatcctgccgcagcctcccgagtagctggtattacaggcgcccgccaccacgcccggcagattttttgtatttttagtagagacggggtttcactgtgttggccaggccagtctcgaactcctcacctcgtgatccgccctccttggcctcccaaagtgctaggattacaggcgtgagccaccacacccggccatagtacagatttttaagatgaaggatcactagttccttttgacagtttggtactaacataccttttccactgaaggtggtgttggtttgtttccatgcgttcatttacaaaaaaataaaaaaataaaaaacacaacggtggtccccaatctgaggtgaggagggggcggtggtgggtgcgggcatgcttctttgtgttgacgaggcgtggggaagtggggagggctgatgaaggaaaaatccgagaggtcttcaaatacgtgatctctctcttaggctaaatttacaaagtacgtgtaatctattaaaatcgggttccgacactaagagggctttgaggtcctggttgcgttgtgttttttg

SEQ ID NO: 60202 - DNA, 771 bp, Homo sapiens
ggcctacgcagagaatcatgcattttctcccacccaccgaaagtcttcgccgcccctgcgcatccccctccgcccccacccctgcccagcccgaccgaccctaccgcacctccgagctctgccggctccccgcagggcaccccgagacgagagctcctctcggattcgtgcgccatggttgtgggggaagtggagggccaggtggggtgggagacaatggatattgggattgagggaggcgatggccgctgggtctgcggcagcctctgcacccagcggcccagactgcggagatggagatcggcagcggcgggggcagggagcagcggcggagggggaggggagcgaggaggcggggagaagctggagtgagaaagcggggagaggggagatctgggaggagctgatgaggaggggagtttatggggaggagctgctggggagggaggcgggagctagaggaggcgggagaagggagcgctagcgggggcgtgggggcgggagctcagagctcgggagagtttccggaggcgcagtgacaggtgctgtgaagcactgcgggggtccacctttcccggtccctggccagctccccccatctgcagatgcctttgcccaggcctaccctcctccccccgccctcccctcctaagctctaggggcacagtgggaaacgtagccctgctcagtggagcaaggcgataggcttctcttatttttctttggataaaggatccgctgagcttggaaaaagtggattccagagagggt

SEQ ID NO: 60203 - DNA, 1161 bp, Homo sapiens
tacaaggcccagagtgtgtcctaagatgatctatggggagagaacagagtatccctgactgaagagttttggaaactattttaatgttccccaattttatttgaactaaaaaacattgtctgcctttcacattccttcgtgcactccacctcaccactgctcccccggcacctgttggcctcttttgctatccaaatttaccaaataaatcttccccgcctttctacccatctgctgttcttcacagcttgtctctgggctcagccccaagcctggaggggcagtaaatggattcagagttgctgctcaaacatggattcccatggaaaccaaacgactaagaaaacaaatagggaggaagaggcagccactgcctgacctcttaccctccccctccaaattcttttcgcttttcagcatgaaagcaagcgcttatttgtataactagtagaaggacataacctgacccctccccccacccccaaattctttaagaatctctcgttcgacaatgagtaaatgaaagacagtgggacatcgccacctggtggtagaaatgccaaaatacttaagaagagagaactcaattaacaagtgaaagcctgcgatacaggccagtaagtatacaaagaagtaacattcagatacaaaaataagatacaaagaagtaacattcagaagccactcctaggaaactgtttaattgtgatgcagttagtacttgttccttctcacatatacagatttaaatatcatctttatgttggtgaatttttatttttattttttaaaaattttatttatttatgtatttatttttgcgacggagtctcaccctgtcgcccaggctggaacgcagtggcgcaatctcggctcactacaacctccgcttcctgggttcaagcgattctcatgtctcagcctcccgcgtagttggggattacaggcacctgcattatgcccggctaatttttgtagagacagggtttcaccatgttggccaggctggtcttgaattactgacctcaggtgcctcagcctcccaaagtgctgggattacaggcgcgagccaccacgcccggccgaatttttttttttttttttttgcatccaattcaaatatgggaacatgaggtttagtcttatctctcccaactccat

SEQ ID NO: 60204 - DNA, 3516 bp, Homo sapiens
aacctatatcttcatacattagaaatattgcctcttcctctcgtgaactattcacacccatgaatttggagagattgctgtgcagtctcactgggccactgtgggtggtttcctcttcagatgatttttaaaacttatgtttttaaacttaaaaacttttaaataaaagactgatcatgaacattgcaataaggcaagttgaagagtacctgaatccttcaaaaagtttagaaactctagtattgaaaattaatacattacaatttgaatatctgcaggtttcaaaatagaaattaaatctaagtgtagcagcttgatagaaaggaacattattttcatgcaaagttttgaatgacccagttatcgacatagaggctaattttcaaatcaatttttcttataattgaagatacaatgataggatgcacaaacaaacatagtgaatcatatacatatcatgaagccactttgttacttttttaaacaaattttttttttaagagaagtggtcttgctctgttgcccaagctcaagtgcagtggcacaattatagtttgctttagccttgaactcctgggcccaagtgatcttcctgtctaggtctcccaaagtgctgagatcacagaagaccctgtctctgcttctgaaggagcccaaggattggttagggtaagctcagacccactagattgcctgtgggtgtgaaaatggtcttgggagttccttgatgcaggataacttctgcctactcccatgctctatgctgtacacaatcagtcctcagtaaatatttgccttgttaaatagtataaaagaattttagacctataaaagcatttagaaaccttttagttcaacttcattttataaacacagaaactatatccaagatgccagtatgaaaccattagatagtaaatgatctagcagtagaaagaaactggatttcctcccttcctccttagcttcttgctcttgcctattcctgcaggcacatattgttgaacaaagagaaactatctaatggcagccctgccaggttgacctctgcattttggttccgggaaaggcttggttcaatcactttgaccatgagaacggagagttccagtttgtgtaaacatttaccactttgggcaagaaagatattcaggctgagccactgttattctaccaggaaatccagtccatgactcactggctgctgtaggagtgagccaaacatggtggtgccaccctcaacccccagaggtatttctaaggactttcctaaaaatagtaagatatattcattatgctgggtggatattccttgaaggaaggatgtggacatagtgagcattactctacattgtcaaaaaataataattagaatagggaagctaagggtaacatgtcctcaagtggttgatagttcataaaggtgtgagaaaatcttttctggaccaacacattgacaatgagttaggtaatattcaatgaaataatcatagggttgggaattttgtccaggggatggccatacctaaggcatagttaatatgtggaatactatgatccatatgagtggtcatatttagaccattacattcagttcttaatgctatactcaaaaggccaaatattgacctaaattatctgtcaccaaaaggagggaaactcatccaataaaggatttgagaattatattgtatgaggaatgagtgagaaaagagaaaatccttagaatggagaagttttacatatgtaaaaacacacattttatgtatacatatctatatttatatgttttagttgctatttttcatcataactgtccttacatacttaagggtgcaagatgtgaataagaaattatattcagtctttataattccaggggcctagtgagtacaagtcacaggaaatgcacttttcttctggaaaccagatagtcttggtatctgaggaaccatttcccatggtcacttatttagttttgcactctccctcctagcagacacaggcaatattttggcttccatagatttagttttatggaagtaatcagaacgtatcaaaaattaaagtagataagcaattttttttgcaagaagagataaacccagaaatgtacaagactgaaggactttatcaatatcttagggaagaacactgtagtggagtttgggagaaaaacggcagatatggaacctgagctagcaatggctaaggcaagagcagtccatgccagaggagttggctcatattttagaggcaagttccactgaagatatgagtcaatcattgtatttaaggacatgccatattgatatcattcattttggtatcagaaaataaaagcaccttaatagaaatttacatgtggtttcatttttggagcctgcagcctgatgttttctgagaatttctccttgttttttctgcactttgcagaatacaagccacatagcaataggaaaaggtttcttaaaacatgccagatttctccttgcaaaccagcccaatctatgggtcaaactttcctattgttggagtatttaataactcatggaacttgttcccttcctcctttatcattgtactttaattctttaccttttattaaagccatccttaccaaagaaagattccacatttcgactgttggtactgtcaagtctctgggaatagaaagtcatggggaagaccagtcttggagaagcagagcctgagataatatgcacgtgaaatattgagtagtcctctctctcttactcttatctttggcttacatattcctttaagaaagagtctttctccataacaaacaaatcatgatgaccgatttgactgcaagggaatgtattacttttgtttgtccaggacagtgaatcatggtgttttcctgatttcaaacatgtaaacttggtgcatcattgtataaacacctgcaacatctacctctttctaactttttaacaatgactcattagtttgcataaatatcaatcttgatatctacattcttactgtgaacttcatctcagagtgaagactttatttgtttgacctattgctccttttgtgcatctgagtccctcctagggttatagaaaaacattcaaactgcaagtttagtagctacgaatgtgaccacaagatggcagtgcttctctgctgatgcagaacacacagaggtttcattttagtggattctgattaaataggtttatggcagaagtagagcctttttctattggctgagtagacaatgtgagaaaccactatgattgttagaggaaagaaaggaatacccgatgatggaagtagctcttatggctggagattgcaggtttatgactgatcctatttgggaagaacaatgatggcaggcattcgagctttatttatgtacttgtggctgcagctggactgtaagtttagagttttgggtaacacagtatattagttgatgattttgagacatccagggggaagtcttgctttatttaggcttcctctagttactataga

SEQ ID NO: 60205 - DNA, 2011 bp, Homo sapiens
ggagttggtaaagtctaacagaaggtggaccaaaactgaaaagaaaaaccagaaaaagtgatcacagaattcacatataattgcgatctctcagcataagggtaagttatagccaactgacaataaaccttgcccttcagctaccaaatcccaatatgaaaccagctccttacctggagatggacccaagctgaagactgctgtctgccatcatggaagcagaaactaccagaaaaggagttttacagcagaataaacctcagatcccaattgaaaatttgggggagatcagggatctctggagggagaagttcccagaacttacatagcaaatcatccaatctgtaagagtaataaagagctccagccggtaccagggccccaataggagacctgctggaggccaagagccagactccactcagagtcccttcgtggtcaccaacatgtaaaccaaaaagtgactgaggcagatctctattgattagaggtttattttgccagtcgaggatatgcctgggaaatagaaacataagtcacagtaggatccttgacctgtgtttttccaaagagggttttggaaacttaactatttaaggtgtaagagcaagcaggagggaaaggggaaaaaaggagggacagtaggcaatgagacaagtggttacattcttataaggctttgattaacactcaatgaatccacattttgtgtgtgaaaaaaagagagtagaggaaaaaatcaattaagcattcatctcatcctcagtaaatctacattttacatacgatagagtaagcatgtgaaattagagttacctgtttgggaacagaaggaaggcagtgttttgtgtgactccgtttccaaccttaattttccccttggcataataactttgtggttttcagattttatttttctttccagattgagattcccatgaccccccatttgagttcaattaataattaatttgctagaacatctcatagaactcagagaaacacttacttacatttactagtttattataaaggcatacatatattacaaagcataaggatgaagagatgcaaagggcaaggtatgggggaaaggggtgcagagcgtcctcactgtcttggggcacaccgctctcaaggaacctccatgtgttcagctatctggaagctctctgaacctagtccttttaggtttttatggaagattcattaaacaggcataattgattaaatcattggccattggtagtcaaccttcagactctctccccttcccagatattggggatggagctgaaagtcccaactctctaatcatgcctttgtctctcccatcccccatcctgaagttacccaggggctgccagccatccgttcagtcaatcattaacaaagataagacatcgcttcagagtttctaagtattttaggagtcgtatgtcaggaaaaggggtcaaagattgaatatatacttcataatatcacaagtcataaaactgaatagtacttagcaaccaaaagaaataaagtactgattctttcaccaatatggataaattttaaagcattattctgaaagaaataagctagacacaaaagaatacctaccatataattgtatacatacgaaattttagaaaaaagcaaatctgatcgatggtgacaaaaatcagatcagtagtttccaggtattgggaatggaagaaggacattgacaacagtaagtcacataggaacttaaaaggtgataaaatattctatatgttgattaggatagtggttacacagatgtaaatgagggaagagagagaccctctcgtactgttttatattgttttatactcagtacctgttttaagaaaaaacaacaaggaagtaaaaccaaagacaggcagcctgacgccaggcccgaaaccaggtctgggcctgcctggcctaaacccagtagttaaaaatcaactcataacttagaaactgatgttattcatagattccagacattgtatagaag

SEQ ID NO: 60206 - DNA, 2072 bp, Homo sapiens
agaattgctcaacagaaaaattgagtctttttttattccctattgtcacctactaaaatgtaagttgcttgttgatctcatcacactgagctatgtttcagggaagtgttgaaaaggcccagcctgcgcatattcttgaaattttgaaataatggctcagtgaacagatgtatactttctcccaatggctctttgtggaaatgaattttttatgagcccaaagtatctttgattcatccctgattaaaagtcaggttaaaactaaataccatatactttttgaaagacattttaggaagttattgacacaaggacttttgagactgaaaatcatgggttaacaataaacctttgtttggtgaaacaaaagaacagtacaggacagaggtgaaaagcacaggctccagggccagagtccctgggctcagattcttcacatttcagctctgtaaccttgaacaaactactccagttaatcataacttcagtcttttttaaaaaatgggatattaaataatgggtattaaataatagggttgccatagaggaaaatataaggtaatatttatatgcacataaaacagtgcctggcacagagccagtgttcaattagtactagctattttttggatacatgtagataaaagaagcatttaatgaatagttacatgcccattaacataaaatgtaagccacttccatattctgtagcttatggtgacaaagttttctgctcacgtattaactaaaaggagcgaagagcttccctataatattgaaaattttatcctaatggttccaaaggactgttttctaggaatgtttgctacagaaacctcactggttagatgtttgttggagcacactgtgattattcattgtcactgcaaactgtgtttaccacgggaggctgttctgactcaccactttgtgactcaccgattagtaaacagctaaatgtcgcattgctgatttaggtgtaatttactgcgtcaatataaaaggactctgcagattctactaaaatcaagaacatagctaaaggcattcttcatcgtaaaaacgaattttagaaaacaagatgactctaacagagttactttaaaatacaatgcaatatgtctattttaaatgacaacaatatctcctgtctgacagcattcaacttactttcagatttattcggtgttttctcaacttcacgagaaattgaaaatccataaaggagggaaatatgtcttgtttcattttcaatagttatatcaagaatacttttcaaaagtatttcatatttaccatgttttcagcaagtaactcttaacaatactctgagagtatgatcgtgatgataggtaaaaatcaggatcactcccttttcatctttacctgtgtagagcaatgtaatgtgcccttttcccaaaccctctgactccatgagggatgagacacagagggtgtggctgagggctcctaggaccgggactccttggctgatgtcctgtggcctgcagtccagggcttgcaggtgatcaaacaggaaaggagaaatgagggaggcacagtgctacgagcaggcctgtgttttcactgggaatggtggttagcagatgctcagatgtgtctcttctccctcacactcacctttggcttggctcttaactcctgcccacccctccctaaactctctgtggaggtccggaactaagcgagtcacagacacccagcaagcagtctccagagaggcctctgtgcatgaagacttccccagaaggatgcccactcttcctacctggcctgggaactcaaaatggacacaaaaactgaagactgtgagagagggtcagcttacaggccagaaactgacaataagattgatgttcaaatagctgaattattgattcttatcctgagatccactcctcattttcagtcttgcgataaaccttagtgaggggtgttttgtcttgtgttctatctattggtggatggattccaacttttctgaatatggggacgtaatttttaaagccaaaaattttgcagatagtaatggatttttaacatccattgat

SEQ ID NO: 60207 - DNA, 1729 bp, Homo sapiens
aaatatccaaggaaactgtgatagctgctggtttccaaagatggtcttccaatgaactatgtctctcagtattcggaattttgcataattccttccccttgatctggactggctctgtgacttggttataaccaacagaacatggtggtgggttaagcaatactcatttcatagggggcatttctggtcacatgatacttaatggtccatggtcaaatactaggatccagcaaagagccaagagctgtttctcaaaaaaaaaaaaaaaaaaaaagaaaaagaaaaagaaaaaaaaagaaaaaagaaaaaaaaagttatctgcagagtatggcatggctttgctcccagattctaaaagtctgttctggaatttacctaagaggcctgccaaaagctcagtaggcactttaagcaccactgaatcagatgtgtcatatgaccaaagtggcagggaagcttgccaccctctcacaagggcttgtctttcgccaggccttattcaaaactggaagcctttcagattactcattcagcaaataggtttagactataacaacacacccaaataagatatgttgcctccaaaatccaatgaggcacaccagaaattgggactctttctttatggtaggagagaccagatgtagcattgaacttcaccttgaaagagatatctcaactttccccagaccatgaaaccccaagaaagttcctgaaggagcaaacttctaaatttttctgggatttatttcacaacctcttgcctctatgggtcttaccaaggtgtctaaagtagttgcgatttcctggtccaccagtgtagaggatccatgtggtgtgttgtgaaatgaagaggcaatcaatttcctgtggaatagaataggccagggttggagagttgatataaccctgaggtgaaacaaggagggtaccttgtttcacccttccagatgaaagaaaaatgcttctgatagtctctactaacatgtatatagaggaaaaaatgacttcccatatcagtattcatatattagatgtacatatattgatttactatagcaatgaaaccacatctggaacagcagctgtgattgtactcaccacctgattaagtttacaataatcctttgtcattcttcaagatccatctgtcttctgcacaggccagatagttgagttgaatggaggtgtggtgaaaatcaccagccctgcatcttttaaatcttttatagaggcactaatctctacaagtctctacagaatgcagtgctgctgtggatttactagtttggaatacaaaggcagttctaatgccttctacttgtcctcactcctcagatcagataatcaatgtagttattctgcctttcctgagtgtgcctccttcagttaagcattctagaacttgggaaataaccatggggtaagttcagagctaactggatgcaatatgagatggacctgagccaaaataccattaatcattcagcttcaataaacccctactctggtaaataggcaatagtagcatattgtgtctccaaggactggtatcatttcagagccaatgtccagaaatcccccaaaggtctggttatttacccttcccaaatgcactatgaccttggcaaatggctttaggtcttttcagggaaggaaagaaagagaaattacagtctaaacttttggaatgtaaatataaattagaaaaaatcctgcagtccttttg

SEQ ID NO: 60208 - DNA, 844 bp, Homo sapiens
catgcacacagtgctacacacacacatgcagagttactataactgtggtgtcttccaagagccctgtcactaaggtatcctcagtgtcgtactctcagtcctcctgcacttgaaccacagtttgaattgtgcatagggtaaagactgaggtcttctacagaaaggcctaagctgcttgaactttacagacaattatgtgagcaattcaaccttttatacattatgctgtagttacccagctcctgaactagtcatcaggtattttatttgttttttaacgtgatcaggaagtttctctgactcatttctctatctttgcagaggaacaaggtaggagagcaacaggggcaggaacagagaggatgtcaagcttgatgaaggttcagtaagtcaagtcataggtcaactagaagaaataaagcaggggaagatttggggtggggctgaagctccattgtttccatgacaccataagataagtggtgatctaggtgatctaggtgtgcaaaggtgaaacaaaacgaaagacgcaaacattgtactagtttcaggttttgccaagagcagattggctgccaaggctacttcagccttgactcatatagatccatgatctgggaggcaagacagcgtcctgctgtgctggacatctcagtgacattgacccaactgggggaactccctgaggttaagaaaacctccctccaaggctgagttaatgaactacctagatgtaagacaggagactgaaaccatttaagtcccaggaaaaatgcagacttaccttcttatgacctagatctctttgcaaatctaatgaaaaaggtttgttatgcacaaatgt

SEQ ID NO: 60209 - DNA, 544 bp, Homo sapiens
aagtgcattggatgttagcaggggcaaaatgaagaaaatagtagctttctcttttctccaccttttctctcttttgagtcccaagggccccagccctgagtctgaggctgtcaaagaaaaagcgaaacacttctgttttatttcacaaaggaatttcgcaacgcttctctccaaacagactggctggggcatgctatttcacaatgaaaagccacgataacacagtttcctaaacaaaggggcgattcctaactccctctcactttatcaccactgccaccaaatgattttggtattcttcaagaatacagaatccactgggtctttttgggctttttagcaatttacacatccacaaacacataggtttatgagcggtaacagcgtacattccagtgcatgaaacactgcagggattctctgaaggcgtgccctggatgctgcaaggctccaaggcaacagtcagccagtggaacagtgtgccacccagcatgctcgacttgatagaaaaaagacccagtgacagggcaaaggaagtcaagcc

SEQ ID NO: 60210 - DNA, 759 bp, Homo sapiens
aggtgaaaaaaagaaatcaaacgggaaacctgcgggtctatgtgcacagtcttggtcttcccccacacaacaaaatctagggccactttagggttctatgcccttttgttcctaactcgacattgcccacttctggccagaatgtaaagcaacccccaacccagcatctaaacccacctggacctctgctgccccccaatgactggaaagaaactaggttttttaacacaggtatcagtagcttcttcccccaaactcaactcctcatgttttgtagtagccgctcaacacatgaaacataccatccactaggtggcagcaaagcccacagaataacatcaagttccccttcccgaggtaattttctagattactatactttaactgaattcgaaaagccaacataatttcatgtttgtaaacagtgctgccagtcagagtttaaaatgttctgcccaaccctgtagcccccttgttccagctaggatcaaacactgaattttttaagacttgtgagagaatggtctccattataaaaacaaaacaatgctaacaaggcacaggcatttggcaactatctccctgggagctgagcacattttcaagcaaggttttgtccctttgggcccagttcacccttccttctgacccagggcccaattcatcaggaactttaattctcaaactgtgatccaatacagttctgtccttcttttcctcattacccttcagaacacctgagatggactgagatttttt

SEQ ID NO: 60211 - DNA, 526 bp, Homo sapiens
ccagctgagcaggtggtcctaggttgttaatatggtctgcagtacacagtttctgctgagactgcttttttgtctttgcttttgtcataattttgaaatactaagctctctgcagtagagtcctcctccaatcatgacagccctaagaaataattttccatgatttggtatctccctgagcctagaaaacatccttggaatgtttgctgtgtccccttcctaagtacacaccatgactcatctagaaaaaaagaacttcagaaatctagagtaagcaatcagaagacatgacctttccagaaggctctatcaggaagcccaagggttactcatatttgcaagcgtgagaaggtcaatgttggtgggtcagttttctacctgcattcaaggttatccactggtaacagttcattttaactagcaatagctgttatccattgctcagataactcatctgctgtccctgctcccagatggtacagctgctctcttctctggatttttgcagcactttgttcaaacctat

SEQ ID NO: 60212 - DNA, 2147 bp, Homo sapiens
ctgtgccaggcctccagacaattccaatgctgtattttgtctgtaccccaactagaccataaactctttacggataaagaacatgtgccaaagcttttaccataatgcctcatattggactgaaaatacaactgatgacctgactgatgatcacactgaaaagaaaccatgaatgctggcatgttttcaaagtcaaagtagcaggtgataccagtgatagaggccacgcctgttttcagtattcactgaatccccgttgggcaagaaaagtcagattttaacaaaaattgatggagactgttctcgctaaatatagcagtctacaaggttaccaaatcctggaatcaaaaggaaaaataaggctaaaatagagttatgtgaacaaaaattgggttcaggacagtgaaataacagcttcctcaacaagaaaaaaagtagtagcagctaaaaggcaaaatcaagtaaaggatgattcaacaagaaaagcaccagtatttatattctttgcactttcattgaaacgtttcaccggagattggtaatgattaggccaagatgacagagatgattcaaggttgggtttttcatttgaaaagtctactaattttagagttgtgttaaacctaagttaaagttggaatagggttttccccggaccaatattaagtgaagtggatcaccaagtggagtagcggcacgaaggtggtttctttagacttttaagtccaactcctacggagccgtttggtattaggcatataatctaagctttctgagcctcaatttccccattcacaacaaaagggcaatgcaggctcttctcataacttcaaggggcggtggtctgatatagagtactatgaaaacaaaagcagcacaccaaagtaacacattattattatgatcacttatagaaccattacccgctaggatgaaactccccacacaagagatgaagcccgagagaaaagagttgaaggggaaggtccccacgaggagacagtaaccgaactgcagcgccccggtcagcagtatatacagcaggtacgcgtccagcaacttcagacgctgcggagtggagctcaagtactcttctaagaaccgcgaaatgacagacactaccgacgccgacataactgcacgcaaggtactccagtccgcgccccaaactcttggaggacccgtcgaccacaccggatgtgctgtttgcgcatgcgcaccctcgtgacctaactccgccctccccggtgtgccaatttgcgcaggcgctgaggccggccagggcgcgtaacaactaatgcgcagacgcggactgcatcaacagactcaactacaactcagaaaagttaatgcgtctgcgcaatggccctatcaatgagctggggacgtgtactctttctgttctgtttccgcccgtcagctcggtgacgcccacagttgctctggcaacaagacacactgggaggaagaggggaataagctttactggggaccgcgtagctaaccagaggtatccggctctctctggtccttctgagtcctggaagatttaacggtttgcatctactttgaggcaatgcctggcgttcctggggtttgataccagcctgaccctaattctgttaagggcgctgtctgcagatgtctgtcacagatcattggaacaagtcaagttcatccgcagtgagacccggcgcggccaatcactgcacaggccccagtttagacttaattacttgggggagtgagtgggtgtggtgaggggcgggaggcagggaggaagcctgacctcagcagggttctgaactggaactcgggatctggccctgcaatgccaacatttattgggcgcctccttggggcctgacgttgtactaacttgtagggactctcacgtgaatcagatatatttgcagccttaaaagagctggtgaagggagggacagctgtcgaatgtcgtgcaaaaagcatatggtcaagtttagcagctctctttccgcaagctggtatcttgaacctggtgtaatatcccgggatgtcagcgtcgaaaggcccgaaagagcatgcctggttcaaccctactctctccaactcattttgcagaagaaactgaaatggtttcaggttttgtattttaacaagtggga

SEQ ID NO: 60213 - DNA, 2199 bp, Homo sapiens
acattaacaagggtcgatttcaggaggacacagttacaatgggaagcccaaagagtgggtgcgagcgtgcaggcgtagttctaccactttttagttatgagagaagggagggctgtcggagctcctgcaaggactcccccaaatgtgtgaccaggattactgtcccattctgagaccgtcagagacatctctgccgggacacatgccagtgattgaaaacacagcaagggccccactagctgaaaccaagttgcagagttttgagggtcccaccgccgaccgccggcccgccgcgagccctgccccctgcgcggccacgcccccttgctccccgcggcctcccgggtcagctggtgctggcgtcaggcgctgggcgggctcgccaggacctggcaaggcttgtttactatggccgatgatctggagcagcagtgagttaatcctgtccctttctctctttctctctctctctctgggccatgatcctgggactgtctgtggctgaggaacagttgtagacaccttcccgctcttccttttccaggtcggcctccggggagggcggggggtgggtgcgttgcttgctttgcatttgcccagaagaggcagcggctgagcctggggagccatgggagacgcgctcgcccgcagcccggggatcctggctttctaccttagtcctcgcgagtgcccctcattctcctctggcctctggagagattccatgttgatgtgtgagatccccgaaagcaagcttgtgggacgcgggtgcggaggtagcagccaggcgtgctcgtctcgacttgccccccagaacggcagtcgtggggatggagagagcctcctccctccgcccggcaaagagaagatgtggagagactggagaggtctccatcgcgctgaaattggtgtggaacaacgggcttgcaagtttctttagctgtcgcccaccgagacacgtagccgcatgtgatcctagttgataatgcttttaataatcgtaacaacatctttaatgcaatggtttcagatttagagctattgggatttgctaccactctttcaagggcatcaggtttgggataccacctgtaggtggtgtgactagcagttcgcaatctgacaggagtaagaaaaagttgctacgagaagaatgactcagctcccagccgagccttggtttcaccagaactgggcctttcctggacccagtaatcctgtttttcagacctgtagaactggaagtccggggaactaattaactttatgaccataattaatagcttgctgggcttgaaagaaatgtccaggggaatgttttactttctaagatgacttttccaagaggaaatttgcaatgctttaaaggacttagggaggcagaatattagagctggaggacatgcaggtagttcagctcctttttaaaaatgaagaagctggtgtccatagaaattaggagacttgcccaagatcacagaggtctagaacaggattctctcccagcacagaaccccttgtgcttcacccccatcaagttgacagagaccgtcctagccaggttaagttcatggctgaatgtcttttctgctccttgcctcaatttcccaccccagcccttacctcccgcatagttttgagcacatacagtgtgccaggcaccatttccagtgtttacttgtaacatttttggtgaagaaggaaagcaaagtaattctcccaccaaggactctctgctgagcagtctatgatgctgttccttgggtagcgtttctcctgaactctgctttgtacagtaacaggacaatgtgggatccaggtgttatgatctgacttgtcacagtctgtgatttagagagaaaatttgtctcttaaggctgacaaaatcctgtggtcttggtccccgtgcttcaagcctacaaggaattccagtagaatattaaaaggattctgagtctccctaggattagatcgattgatattgacaactctcatctggctaaaaccattgatgtatcactcccagctgcaaccccagtttttctttcaaacttcaaacatccactgagagttgctacttgcaaaacactgggaatgtagacaacttatgatttagctggggggaaagaaagttgattgggagtttgtgctaggcaatattctatgtgctttagatgcattaacacttttaatctttat

SEQ ID NO: 60214 - DNA, 1156 bp, Homo sapiens
taggggctaatggacacagagaggggaaaaatgcaaaagatgcttagatggtaaaatctaaaagacttaatatcaacactgcatgaccctaccaccctcttgaagaacgggccaagtgaggcagtggttaccaaacccagtcacataacaaaacaacctgggggtatttttttttaaatatagattcctgagctgtattccctagagtttgatctggttaacctgaatggagtctgaccgtgaaatctacatttaaacacattcctaggagattctggtgccctgtgtctgcaggaactggtctaagggactctgtctctgacatttgacccagaaggctgggtagagtagggcctgtgcccctgagagttcattctgcttgctccagaatcactttttttttttggaggtagcacaacatgctgatctgctttttccaactcaacacgaggcaaacacattcttcaggagcagacgcaagaagagtctgagaaaggtcacccagagtcccctgtttatactacatggtctgcacgcatgggcacaagccagcacgcagacacacaccccatctgacaggaacattcctaacattccactaggtgggactaagaaattactatgaacattctacccaatcagcacagtttctgggtgggcactaaggatttatggtgacagtttgaaccataaatccaggctcctcaaatgcctagcagtttaaaaggagagattccacagacagacattaaggactgtgactcaacttaagacccaggtggtactgcagtattcagcgactagcagaaaatgtgctaaatttaacttcctcctcggtatagacaccaaagtatgtgtgctaaaaatgtagtctggtttcattgccaaaacggtggtgaaatcttgatgagtacctctttccattctgatccatgaccctgcaggtacagttcatggccagatagaaaagactcctactctttttttttttttttttttttcactctgttgcccaggctggaatgcaatggtgcagtctcggctcgctgcaacctctgcctcccaggttcaagcaattctcctgcctcagcctcctgagtaactgggaccacaggcacccgccaccatgcccagctaatttttgtatttttagtag

SEQ ID NO: 60215 - DNA, 585 bp, Homo sapiens
aaataaataagtaaatgaataaataaaattatacaaaaaattgtgtgtttatgtagattgagagggagatgagaacagtcaaattctcaaatggctttttgacccagaaaaggttaagagcctcctagttgggaccatccatatccctcatttctaaattcttagcaactaccccagcacttactgacagcacctcttgggcatctctaaccttttgcagtgttcacagtgccttcctcaccagctcgtggcagactcctggtggaagaggagggaagcacacctcattgttgacattgcctcctagttcccggggagctccattccaggaaggaatttaaccagggagtggctgtccctctcttttggataactttgggcttatccagcggacaaaccactgcctattccctgacaggcagactgactcggggacattttttccctgccaaagtactgcttgcttcccaagacttctccagactaaacatccattgactgagatgaaatattacacttttcttttccaaagggtcaaagggatttcagcaaggttcagactaaggaaaagagggctgatttgtg

SEQ ID NO: 60216 - DNA, 1690 bp, Homo sapiens
cacctccagcactggggattacatttcaacatgagatttggaacacacgaaacatccaaaccatatcaacaccagtaagtttatggtgatttgctacataacaactgtaccaagaacaccccattttgcaaataaagaaactgaagcttaaagagtgacttgcccaaggcttaatcatcattttattctgctccaaatgtactaacaaattttataccatgcagaagaaatccttctcaaggttcatgtccatttcagcatatccatcagcagaacacactgtcaaaggaaatggacttcagtgaagtggaagcaatctattttacctgcattttgaatgaggccatattctatgtttccacctattgatccattaactaaaatatttaaaactgcttacaaattacttgcagtattacaacaaggataagtgcccccaaactactgtaggcaagcattctaataagagaaagtcccaggagatgacttagtcatctttctctaaaatcacttctagctggctgggttgaagtttcaaaggtcagttctttcagaatgttctcaaagcatgagctatatgactaatatcttgtgaaattttagagataagtttaaaacaaattttatagaacttggtttgaagaataaagtgtatgtgaaacataagtgagaaatgagtaaaacttaaagtttttgtgaagttttaaaatgcttgtgtggatgtatgaggccccagatttgatccccagcacctccacaaaaaaatagaaagaaaaaaagataagttaaaaaaataaagaaaaaataaaatgtttgtgtggaagatgtataagagaatgtacagtaaattaacccttctaagagctgaatctttaaataactttttaatgcaattcagctttatgctcttgagaagatgtcattgtggtttatcatcaaaataacagacacttaaagatgttttccagttcacagtccactccccattctctgggctgctgtggtcacatttttactacacgcctcttgaccccctttcctcagttaatcaaaccaggatagacaacagactctatctcttgagaatctggaattgggactcactgatcctagtcattctatgctcttcacttcaatagatatgaaaacccaggagatgtggctgccattgtgcagcagccatgtttgctgaggtctagctaagacagcaaaaggtggttcacagatagatgttcacagatatagagttcatagagcaaagtggaaggaagcataaacaaggtaccaaaaaaatcaaagggggagagatagacaaagagagagagagaaggacacagagagaaaagaaggcacaaagaaaggcaggcttcttgtcctccttcctttcaggtccaggacttcgtatgaaaccagacgcacctcctgcccatggaatccaggatacattctggtatcctgtggtggccagcctccaagatggcctccattaatgctaaccactggtattcatgcccttgtacagtgcctaccacattgaacagcctgggtaaccaatagaatacagtcttgcagaaatgacaatgcatgacttccaaggctaggtcataaaaccaacagcagtttccaccttgctgactccttgctcattctgggcatatcctacctggaaagaactggggcttcttgccaa

SEQ ID NO: 60217 - DNA, 1884 bp, Homo sapiens
agacggagtctcgctcttgttgcccaggctggagtgcagtggcacaatcccggctcactgcaacctctgcatcccgggttcaagtgattctcctgcctcagcctcccgagtagctgggattacaggcgcccaccaccacgcccggctaatttttgtatttttagtagaaatggggtttcaccatgttggccaggatggtctcgacctcctgatctcgtgatccacccacctcggcctcccaaagtactgggattacagacctgagccaccgcgcccggcctgcacgtgagcttttcatctggaaacttgtcccctcatggtcagtcctcacaccaccccacttacagaagaaaaaaatggaaaggtgaagtctcctctggaagcttcgtctttttatctgggaggaaaatatttcccagaagctgccttcttttaatttctgtcagactctagactaccctcaaatttcactggacctgcgattacaatattacctagcaataagaatcaaaagaatcgaacatcattgagtgggaaaaatcctctgcaagtacagccaagccttttctgaggctatttttaaacttacaaatcagaggacaatcgcgacattagaggaaaattacccaggtttacgccatcactaacgatgatagcttacgatgatagctaacccagctcttcaacttcctttcaatctccagaaaaggctctctgcgtgctaatggtaacgtggctttacagatttttacccacttcaaatatggccgccaagctccgttctcttttaccgcctgatctgcggctacaattctggcttcatgcccgcctccaaaagtgcttcctctcgaggggttgtggttcttactgcgcaggcgcaaaagcaagtcctcttccgggcaaaatggcgatgggactaatgtgcggacgccgggagcttctgcgcttgctacagtccgggcgtcgggtaaggatgccccggggcagagcaccgggatgctgccctgacccagtgaaccaggccccaggacagctcgtgctaggggtatcagcagacgctgacctgctcaccgggacctgaatgtcatgacctcgggtcatgtgaggacgcgctagggttagtccccgacactatgggcccagcagcccggtgtcagcttctggaattggcttggctcctggcgagagcacctcggcctcgttctcagggccctccgatgtgggtctgcgataactgagatgcggggaacccaggttcgagcttcgctctgcaggcaccacccgctgcatgccttcgggctagcggtctgcgcgcggtgatagcaatgtcctcccctgtagtggccgagctgcctgcttcttggggagttagcataatgaatcccgtttgcacccacgcgaggacttctgctcccggtaaaggggctccatcatccttttacacgctcaggtccacagcgtcgcagggccctcgcaatggcttgggaaaccgctgaccacacggctcctattcccagcagccccgtgctgctgtcgcccacactacctcttccttgcggcttccggcccccgcagcctcagtacctctgctatctcttttgcagaagtccaggtaagaggcctttcgttcctgcaatattaggagtggtgtttcctggttggtttcatattttgttttgtttgggagcagggggaatatggagcagagttcttgtccacgctccacacagctctccaaaatgatagcatctctgcttaggatggattttcaattcagtggggaaatgattgaaagtacaacaggagagatgttatatttggttttctgagctgttttaaagaaaagcaattgtttcatgttaatatatggcaaaaatcatgata

SEQ ID NO: 60218 - DNA, 1923 bp, Homo sapiens
tttactgggaggcctagaatgatttgaaacggacttttgtttcattaatgggaaaagcaaagcaaaacaaaaagcctatcatctaacactctttccctggatccaggaaattcttgtctgctctacctcacacccaagctcaggtgaccggtctgggtgcggcgtggagatggcgagagctaagtgctatggccgcgaaagggtgaagggcaggggaggaaaaggccgaggggaggcgaacgctcaggttcacacatatgcaagtgggctctacagcggacttcgaagcatacactcaactccccaccatgcgccggcccgctgctctacccctgaaaagctctcccctggcccgcgatccttgctggcctaccccttggtcgttcccatccccctctccgcccccgcccaacctgctggcctcactcacctttgtccctttctcccatccccacccccccaccaccctcgctttctccgggcccctccctgtcgtttgtctcccttttatttccctccttcctttgggcccccagtctgcggccctaggacaacgccttcccaagctcggacccagccaccgtccgccttcattacccctctgaagaacagggtggccccgaggcccaggtctggctgtgggggaccaggacctcaccccaacaggcgtcccttgcgttccctccacctggccaagcagcccccgcccttcccccgactctaggaagcgctagaagagggagttgtggtgggtgtaggcgaagggcgcgcaaaggtccaagcaccgagacctcgcaaaccgctccctgtccgctcctcgctcccgcacagctggattactgcggggaaatgaaaatgaccgcggatacccttagagactggtcctccaccccatgaacgctcagcttcctcttccctccctcccaaccctgcataagctggcggccagacaggagtctgggcgagcgccccaacccctgaccacaactgcctccggccccgagatgcttggctgaatctcggtagtgcccccagacgggaagccccttgttgggggggcgggggcgggaggcggggcgaggaatgtgcctcctcggagccggaggaggggtctcccgaaggccgtctcttccaccccgggttcccgactccccgccccctcggggtagctgttgcatcagcttccagattccaaaccaaagaaagtgggctccactaagctgggaaggcgtcgggcagcaaagccgccgccaggaggcagcgcttaatcaaaaatgtccgggccgagggggcccaggataccggagtccccggagcgtctttcatctgaagtcttagcagcagcgcggacctaacaaaaaagggagttgctgaattagttcaagaaaaggcaactggaaatgcttcatcacgttttaaggctaaaagatggcttgtaaataatataactaccttttatataccttttggataatctagctttggggttttttaagccaacgttggcgctctgcggagatccacagagagccaccgccttcaagagcagtctgatagaaacacacagagcttacggaatttcccagccgccaggcaaggaggaatgtagtccgaagtcatgatttgcccatcttgaagctcaatcatttaacacctaatttagccagtactgatatagcagagatttgacagctctgggaaaagaagcagaatatgtcgcaataaattatgtaaatagtaaggaaataatatgcaaagtagtgtattgagtaatttgtagccacagttctcacatttcttgcatgaggtgacagtgatttgttctttgtactgtcctaaaaagggagataatgaaagaattcccaaacagttcactcttctctccacaacttcttcaatcttagaatgttctcacaggcatgc

SEQ ID NO: 60219 - DNA, 735 bp, Homo sapiens
gtctctaaaaactacaaaaattagctgggcatggtggcatgtgcctgtaatcccagctactcgggaggctgaggcatgagaatcgtttgaacccaggaagcgggggttgcagtgagccgcgatcacgcagctgcactctagcctgggcgatggagtgagactctgtctcaaaagaaaaaaaagagagagagacaaagtcttgctgtgctgcctaggctgggataacaaaatgttaaagccaaatacagggcatgatgcccttgaaaagcaaagcagtttaagagaggaaacacaggaagcacagatgcctgatgcttcacattattcttaactccagtctttgccagttgaagtccagaggttaaaagacattcagtttaggatgacgaagctgctttcctgtggcttctgaggcagatgaagtcatagaggagtgctgtccaggtgccagacccctccctccaacagagttccatgaggtccctgagaatgctgatgatgttagttgtcagcgctctggggttctgtctgtctctctctctctctctatctatctatctctgtgtccaggtaggctgagatgagaggtagctgtttgggtgaggagcccttttctggtatttacaacccatggattgtccccctgctgtatcacactaaccacatcaaaggttaaatttagggaggcccagacaggaagattgcttgagcctaggaattcaagaccagcctagg

SEQ ID NO: 60220 - DNA, 1721 bp, Homo sapiens
ggtcaggctggtctcgaactcccaacctcaggtgatccgccagcctcagcctcccaaagtgctgggattacaagtgtgagccactgcacctggcctgtcttgtttcttttataccgagagctctatcaggatattgatgtctggttttgttctccataaaatctacgcctaatacagcacttatcacacagaattttttttgagacaaggtctcgctctgttacccagactggagtgcagtggcatgatctctgcttactgcagccttcggcctcccaggctcaagccatcctcccacctcagcctcccaagtagctgggaccacaggcatgcgccaccacacccagctaatttttcatttttttgtagagagggagtttcgccatgttgcccaggctggcccaatttccgattaactctagatttgattacttttcttagtctaggaaaactgtgttacagtgatgcgaggatctgtagaatgacgtggatgttacccctgagatcaaagttactattaatatcaatttcaatgaactagagaccgctgtagggaggttgtgggaactgttcagaacggcttaatctgggaggacacgacttccactgagaatgcatgcgctgaacgacaattcgttttcacctcaaaaacctgtactgcagttttgtctctccttccgtacgatgacccaagatggcggagccgtgattgaaaacccagattcaagatggcgacttcctgcttccccgatagcgtcgcgcgtggccaccgaggccacgcctacttccggctaccccggctactcctgctcagcatggctgctttagggactgttctcttcagtgagtgggtatagatagggaccgtggactcgggggccctttggggacgggcacaggacccctgatccggctgcgcggcctctcccccaactctgctctgttctcccagcaggtgtccggaggctgcactgcagcgtagccgcttgggcgggcggccagtggcgactacagtgagtcctgggatgagggcacctgggggaccagaagctgggctaggtcctcacagatctgtttttctccacacaggcagggactggctgccaacccctccggctacgggccccttaccgagctcccagactggtcatatgcgggtaagcgctgatctggcagttaactccactggggagattttcacctagagggaacgcccctggacggggagctgggggtatcaaggtgggggcgtgtaaaagtgtttaactttttatttggaaaacggaatttggggaaagaaaccctcttgtttattttgtagattgcatttcgactaaggaaggtaaagctaaacaggatcttggcttgtggagataagcagaagataattctgacttggggccgccagggtggaagggggtgacaagacttctgcgtttttcaaagggggacatttttttttaaccaagaaccacttttctctgtggttagtgaattttcagtatttggtaccaaatgcagggagagctctttgaaaagctgcagaaataagcgtctcagaggggtagaaggatgaagactatggatggcaggctcccttcagaaaattcttttacctttacttacaaaagagagagggagggagaataaatattagccctagaagggagaaccttagagaagttgaagctactccccattctccttatgagactccagtg

SEQ ID NO: 60221 - DNA, 1746 bp, Homo sapiens
ccctgctgtccatcgcggcctcaacccctgcagatggcagcctgcaccacaaaaaggcaacttagaggtgttttttttttttttccttccagttcttggttgtaattggattcaggctaaaacaaccacgtccccaaccaggaaaggagggcactggggcggggacggaggagaggctgtgggagaagggagggaccagaggagagagcgagagagggaaccagaccccagttcgccgactaagcagaagaaagatcaaaaaccggaaaagaggagaagagcaaacaggcactttgaggaacaatcccctttaactccaagccgacagcggtctaggaattcaagttcagtgcctaccgaagacaaaggcgccccgagggagtggcggtgcgaccccagggcgtgggcccggccgcggagcccacactgcccggctgacccggtggtctcggaccatgtctcccgccccaagacccccccgttgtctcctgctccccctgctcacgctcggcaccgcgctcgcctccctcggctcggcccaaagcagcagcttcagccccgaagtaagtgagcttcccggcccttcccggagtcgcgcccgccgggaggcgagcccgggggtctcctaggggacagcctctattcggagaggagggcttttgggatctccgctgctcaggcctgcaggattccccctccctttctttttcctcttcgtctccaaacttccagatcgatccaacttttgcccgcttccaaccagctgcccccaccccctgcgccgccgactctccttcccattccttcttttttcccagtccttggaagaactttacaactggggcgaactcccccttccccgattcccttgggctctgctctcagctctggaaccgcctgataaacatttggactccgctcaaaccccgcgctgtcccggctcctcgtcatgcgcgagagtttgttgtttcttcgacttcccagctctccagcgctctcccgccggcgcgccctccgatgggcgcttcggcctccccgggtggcccaggccttcagcggacgagtctgcggccaggtgggggtcgagggtggacggccgagcgtccagggccacagcccccgtctccccgagaggaccccgctgtgtccctacccgcatccctggcgtcgagggtcgcagcgccggcgcgctggccgcgtttccgtacacacaaagctctccttgtgagccgggcgatcggccgggtcgctgcctccccctatccccacccgcgtcggcgccttcaggccctttttgttgttaatagtttttctgtgttaattgcagggagcctgggggcgtcgcttggggaatggggagagggtctggtccggggtgccctcacgtcggggctggctcgggcgccccccaccctcaccccggcccagacggtggcccaccgggccccagaggaagctgcgtgggagttgtctgaggaggtttttcctctctctctcttattttggggtgaaggtgggagacggatttaatgagcttcttattttgggccatctcaacccactcagcctggcaagggcctgggtgcggttgggaggggccaggaagggccctagaagggggatgggatatgggtttggcttctcctccttggtcccaccccggagaaaactctttggaaagaatactgtcttctctctgcgtccctgaaagggtctggggccgactggaaaagtatggccccagga

SEQ ID NO: 60222 - DNA, 1190 bp, Homo sapiens
gataacacactaccttcagaccaaccatcacgtcaatctttaaaaggttttaaaaaagaaaaatatattgaggtaaagaggttcatacccccagaactcctactttgtccctgtaggccccatcccctcccgcttaggtgtcaactctccactccctgcctgcccttaatctgggagtggttggtatcagtttgtgttgacccaactcttctggaaatacccagcctttggcttgcactcccagcccagcccacacctagactctgacctggagggcccagccaggaggcctctcttccctctatccctctaagctctatgtcagattccccaaactctcctctgctttgctggcctgtgctccagaggtctccccacctcatccctgcacaagattgcatgtaggttctgagaggaggaaagctgggtaagggacttagaggaacacaccccactctctatggctgcgcccactccatgtgcaagacccgcggggcagggtttgcagggtggtagcgcccccttgtgctggatgttgggactgcaaaccgaacctagggaactgagaggcagaggcaaagccagtcccgccagggccacgggcactaccagcctcttccttcccctgttccactttccatgtttccaccctggacacctgtacttaaaggggtgggactcggcgagacgggcagacaagccgctcttagctttccagctgcagagagggaaatgtcagagtttccgtctgctgtccctgtgtggaggttggtgggcagccctcactaactccaggaaaggacagggagtgggggggcggcgggtggtacaggacagatggtccgcgggaggggagaaggttggcacttctgtgccctctccttggagcgcctctgagttgtcacactgcccccctgtgggcgcctcagacacgaatcactccaggatgcctgtccccggggtcccagggtaagagtccagatgagactctgcactcctggactgcagaatgctatcacagaactccttctgaccaagacaagcaggcccctgtgtcccctttatctaagagtgggacatttctgtgccaattccctgaggcttttggagataacacccatgcctcttgagggacctctaacctgcacccatgcccctgtcctcgtcctcaccctggtgccatgagaatc

SEQ ID NO: 60223 - DNA, 3099 bp, Homo sapiens
ggtggaggttgcagtgagagatcacgccactgcactccagcctaggcgacagagcaagactccgtctcaaaaaacaaacaaacaaacaaaaaaaaacagatgcaattccactcaattcccccaaccccacccctgataatattttccatctacgatcagttaaatctgcgaatgcagaacccaagatatggagggcccactgtactagatcttgggcaaaatacttaacttttctgtgcctgcatttctcggaataccttggaaattggaagtaataatagtatgtacctcacagggttgtttagaggattaaacccgcaaatgcttgtaaagtgttaatgtatttagtatatactaaaatagttcctaagtatttagtaaagtgcttacttagatctgtgcctgaaaagtggaaaaatctaaaattgtttgctatttgttgtgtttattttttcactgaaaattctgagcttcaatattgtttattaatgttatctatcagtgccacaggaaatcggtaacctccagctcacacaaattagaaacaccttctgtgactgataataatagttgctaccagatatggagcacttcctgtatgtcagggaacttgctctccttaaatgttagcaacaaccttaagaggaagttgcactatcataagcctcattttatacctgaggagaacagagaggttaagtaatttcctggaggtcacagccagcaaatggagaaggcgtacttattcatttatttaccatttattgagttcttcctgtgtctcagcaggagagaagccctgtaggtgcaaaggtaaacagtctaggccccagcctacgggaagtttcagtttgcagagaaggggcggggcgggggcgggaatgacgaataaatagttaccgtaccgtgtggtaatagctgtaataaagtctcactccgaaaagtgctgccggatctcagaccctgggacaagaaaagtactgagagcttagggcccaaaggaaagacatcacagttatggaataagcagacgtcctttgacaaacgtgtgacaaacatatgacaaacatgtcctgtaacgacaaacgtgttacaccccaaggattaaacaaagcagggttaaatgtggaagctgaagctgcaagtcaagggcccgtctgacaagtccggcagggccgggaaaggggttaaggcgagcaagtgggtgtggcccgtgcgttgattggcaggggtgggaccgggcttgtcacccgccccggctactccaacccctgggcgggcgggggtaccgcctgggcaagggccggggcgccgggccgagccacctcttcccctcccccgcttccctgtcgcgctccgctggctggacgcgctggaggagtggagcagcacccggccggccctgggggctgacagtcggcaaagtttggcccgaagaggaagtggtctcaaaccccggcaggtggcgaccaggccagaccaggggcgctcgctgcctgcgggcgggctgtaggcgagggcgcgccccagtgccgagacccggggcttcaggagccggccccgggagagaagagtgcggcggcggacggagaaaacaactccaaagttggcgaaaggcaccgcccctactcccgggctgccgccgcctccccgcccccagccctggcatccagagtacgggtcgagcccgggccatggagcccccctggggaggcggcaccagggagcctgggcgcccggggctccgccgcgaccccatcgggtagaccacagaagctccgggacccttccggcacctctggacagcccaggatgctgttggccaccctcctcctcctcctccttggtaagaaccgaaacgataccaacccccagccttctgtcaccgggccagcagctctaactccctccagtgcggccccgcactctatcctgcctgcccattccccccagcccctgccgccagccccagcactgccggccccaacccccaggaagtcttcagctgctccgctgggccctggtcctctctccggcttcccctagatcaccccaccaaccccacaaggccctgctgccggaccttccttccatggaagtcccacgccgcagccctctcccgccccccactccctcttccgattaactgcccggaagtcccggatggctcccttgagttgctcaggtgaagaagaaaactcctaaggagtgtctcacgctcctgccctttctcgttcctcctctaggaggcgctctggcccatccagaccggattatttttccaaatcatggtgagttgagggaacctctggggctccgtgggcttgggaatgagggagcagtcgagaaggactctctgttccctgaattccatgggacctaccaaagttttagaggggagataatttagcctttatttatagataaggaagctgaggctcggtgtggaccttcatctggtagttgctatgtactattttattttttctgggaatatctatgcttgatcgtcctaaccaggatgtagtctccctgagggtagaggcagtatttcctgctcctcctggttcagtggctggcacaaagcagacgtcagaattgttcgtgatattagtatttactggtgaagctatgaagaatgtggagagaaagagcgaagctagaaggctgtaactctaggctgtgtgtgggcaggggcagatactctgctcctccttgcagagcccagacttttggaaacctcaagcctccaagcggaaggggaagggtgggatgcaaaggggctgtctactacccgtgtcctaccttcctctctccagcttgtgaggaccccccagcagtgctcttagaagtgcagggcaccttacagaggcccctggtccgggacagccgcacctcccctgccaactgcacctggctcatcctgggcagcaaggaacagactgtcaccatcaggtgagaagcagaacaagagcaagaacccattcttctcccctgccccttcccctccattggaagtcttcagggatcacttctttttttttttttttgagacggagtttcactcttgtcacccgggctggagtgcaatggcgcgat

SEQ ID NO: 60224 - DNA, 1129 bp, Homo sapiens
cctcccaaactgctgggattacaggtgtgagccaccgcgcctggccaaattttagttaagtactaggaatctggaactcctaattccaggcttaagagggaacacaccctagtgctgacagcaaggcagaacccacacccccacatacacacaagagctgttgactaagtgacctgctgaccagaaggcctttactctctagtcccttttatcagcagcacccagcaacacactggtacaaagaggattcccagtctgctgtttgtttaagtgtcaaggttgttgacccaaaaggcaacaatgcaagggcaaaaatgccccacagaagcctttccatatctcagtcacacagagagcgagaaaaggttacaaaagttacttgccaccacagaattgtcaacaccacagctagcttgtttagctagctagcagcattacctgccttagggcctggcatgtggtactgacagttcctaggcaggtgttatacatggcttgcctttactggatatttttgaggtgagcaattccaatgacagaatacaacctactgccctctgccctgtgggtcactgtgggagtgtatgctgcctggtttaagcccagaaaatacaagcttctatcagactttgtggctggcagccagttctcagcctggagtcacatggggctggaagaaccagttataggaattggcaaccattttgttggaatgtcaggaaaaggtgaagcttgcccataattaggtggcctcactattctccccatagtgctacgttaataactgatccttctcggtgcagaaattgcttcaaatggggtagcaccagagggaagtataatttcctattcccatccctgttatgagaaacatcaattctataaagcatgtctttaaaagcccatacctaacctccctcacacccccaaccttttagctgcagcctggttactattacccaaagagccaagttgcagcaccagggaagctgggtgaactcctgaacacccccataccagggccactgacagagtgtaggagcaaagccaagatctcaagcaatgcactcatctcaaggggtagaaggctagtccaagcttcaggcaccagggtttatgggtcatttag

SEQ ID NO: 60225 - DNA, 2423 bp, Homo sapiens
aattttctgttatgaactattttttacaatctgctttttcccctccaaatgaaatgcttgatttcaagaactgctcattgttgagtgctaatgcggggtaagaacaacttaacacacacactaaaacttacacttaagtttacaagcctctacaaataaacctctacgtaaaaagttttcactcagaaacaaatatatccgtttaagcaaagccatatacaacacaatattttgaaacttgcaatctcactgggtttagtgtctttctagatgtgctaaaagcaataaggtagcaaacactatgcattttcaggctggtagttttttcttttttcttcttttttgttttttttttgtatttttagtagagacggggtttcgccgtgttagccaggatggtcgcgatctcctgacctcgtgatccgcccgcctcggccacccaaagtgctgggattacaggcgtgagccactgcacccggcccaggttggtagttttcaaacgctctcttcatgtcccaacttatgggtcaaggtccactcaatctcatccacatagagtatgttttcttccatcctgctccaaaaacagtattagagacccacaatcacgtcagttcctagacctcgtcatagcacaagccaacagatagaccccactgctaaaggagcagagagaaccactgtcagaccaattcgggaagaattcacgaaaagctggagccccaggggtgatggtagcgccatccccagggtctgatcacttagctgggcacaaacacctacaaactgaaggcagcttaacaaaagaggaacaatgagaacgataaaagctacttgaaggaccaccctccccatgttgtgtagctttaaaaaatggtcctataggccgggcgcggtggctcacgcctgtaatcccagcactttgggaggccgaggcgggtggatcacctgaggtcaggagttcgaggtcagcctggctaacatggcaaaaccccatctctattaaaaatacaaaaattagccgggcgttgtggcaggcgcctgtaatcccagctactcgggaggctgaggcaggggaatcgctagaacccgggagacaggatgcagtgagccgagatcgcgccactccactccagcctgggtgacaaagcgacactccgccttaaaaaaataaaaaaaaagaggtcctataggcaaccaactggcacaatctctgcgggagccagtgtcccagggctcaatcttcatatgtggcatcataatacgcctactggaatgagtgcttgaaaaagttaaatgggaaaagcccataaaggtcaacatagtgaacatgaatcttcgacagactagagattgaggaagaaagctcaattcccttctctctctctgaatggtggtgcgagtggctgaaactgatgatgcgtgtcctctcaggccgcggagggtcgatgctccctctccagtgtgggcgaccctaagtgtcacggctgcagagacccggaaagaaaaatcacaggattctagaaaccgcatctttatcggtgcaagatacagccacgagggtgcccaactctaaaatcgtggcagtgggctacatttaagtagctaacacttccaggtcaaaacaaacaaaggtttttttaatgttaaaagttcgcctgaatctcttcgtgacgccattttctgcccgtgacgtcaggggggaggcgccgtgcagcaacgtcacgcattggtgacgtctggtggggaccgggttttggggtttctcaccagttccgggtccccgcaggggggtcccggttctctccgttcctttgagtatgttgtggggagtggagctcggatagttcctagagtctaggcaagaaaagcagcactgcaggtacagagcctcctcttcccgcaaaatggcggcagctctgccgtcttccagaaccttccccaatctgcgcatgcgccaagactccccggctttggaaataacctcactggtttcgcggcaaccgtccaaagtacaggttctcattggctaaagtcctaagtatgggtggagcaaactcaaatgcgtcttagcaaccaccgagttcccattgattggctaacctcagagactccagaaaatggaagcgtcctttggtagccgcccatcactctctcattggttaaatgacttgcggagggcggggaaaacgggactgaaaacgggagtgaagaagccaccaaccccactcctggtgctcgcgtagactagaccagtgcgatgggcggagccaacgaggaggcacaatttacatccttggccgtccctactcggatttgctgaaggagtcacgtcggtcgttaaggttaagctttgtagagaacagcggcgtttgtttaacgtccggggatgctgaactcgaaatccccgttctgagccggct

SEQ ID NO: 60226 - DNA, 2661 bp, Homo sapiens
caaatatatccaagtcagaaaaggaggagaatgagggccccgataaagcagaagttgttattgcctctaataattaaggggcatatgggatggtccctaccccttcctgacagcagtaggtctgatcgtgtctggggaccgggccgattcttagcaggttcctgaatgaactccctcttgaaacgcggatggaagacaggcatgcagaggaaatcaaacctacaaccgcgacagacccagaatcatgtaaagacagcagcagtgccagagagccaagcaactggatttaggctatcttgattttgcacagccctttcagctgccatcagttcagcctactaggctgctgagttcagaccaccttgggggatatcaactctgctgtactgtgcctcaatttctccctaaaacacagccatgggacatatgagtaaggagaaaatgatggatatccacaagtagaatttttttctcctcaggtgtcagtatgtttccaagaccatcacatccagatttgccccagttctgcccatgcctcccccgtcaaaattagcctcttctctcccttgccccctaacacctcctcccactcccagacaataatcgcgacctccagggccctttagagtttacccaacaactctcccaactttgggactcagtgaccacaggcctcccacaagttattttcctcacgttactgggtccgaggctcctcccctccaaagagtaatagtctctcccctcctcatcctagccgaccccctcacccctgcttctccgggatgactagtctgcccttctccgtccccgagttcggaccccgcattccgctcgtggaggtccggccctcacccctgcttggccacagcccctagtgtgtcagctatttcggggacgcaattcaggtccctcccgctggacacgcggctcccaccagcacccccgaccgccatcgccgccatctttctcctcgcgctgtccacgccgggattccttgatactagtagccaatcacaaagtcaaactagtgccccagaaggcgggacgagtcgccttaacaaccagagcgtctgccacagctcccgaacaggagggatggggagtggcttttcctgccaatccgcgggctgcacagtggcgtacggcatggatccaccaatctcagggtctggttcctgacgaacttcaatctcccagaatgcttagtctatctgaagaacgccgttgagagactacaccgcccatgaaaccctgcagtataaccttgaagtaccatcacggagagaaacagtgccatctcagggccagtggcgcaatggataacgcgtctgactacggatcagaagattccaggttcgactcctggctggctcggtggggttcctcgcagcttcgctgcgtgagcattttgtaattttcctttcctttcgcagcttgatgcttctttattatcttcacgctttcattatcagatcctgagtcggttgggttatgcagccatgtaatgtcagcttttcccgtaactaccctcaaaagtgtttttcttgtgtcattatttacgtccatatgaacactgagaaaactgggttaatggctggtgctattaaaatgagctttgtcaccttactatgttacatattaaaataaactgctaactcagctactacttcctagtgattctaggaagtagtgttttgtgtttcaaacacaaaaggtgtaaataaacgcctaaacacacacacacacctcaagatagagaaaaggaattcattaattacagtgggcagcagtcatgaaattggctggcatggaggccagagagaatctacattttctcatgtcattagctgctagagatggaaaggaaggaagcaaggaaagacatagggaggtaaatgggaactccagaaggcagggggcccactggtgttgagggctcggcagcaaggatggagaggagaacacggtacaagagaccccacgcaggcgccgctggcagaacttagggaccgactggcaaggagtcctgagaaagcaaagtagggggtgatgcctaggattctgtccatgcagtgagcaagaaatgcggaaagagggtttgggaaatcagggtttgggtttggtcatgctgaattgaacgtctagggggcgctgtgtaatagaaagttggatggaggtcgctagaagaaaagaactgaggccatgcgactgagatcaccatagctcgttggggacagagccataggaaatacgaaaagggtgtggggtaggataagttctggggaaccctgggtgcaatgcaagtgccccaaaagaatgaaagccggaaaaccggccgggcgcggtggctcacgcctgtaatcccagcactttggaaagcggaggcgggtggatctcctgaggtcaggagttcgagaccagcctggccaacatgaaaactccccgtctctcctaaacgtggtagcaggcgcctgtaatcccagctactcggccagctactcgggaggctgaagcaggagaactgcttgaacccggcaggcggaggttgcagtgagccaagatcacgccactgcactccagcctgggcaacaagagcaaaataatgtcggggcagggggaggaggaaaggaaagtcggaaaaaccaaagcatttaaaaa

SEQ ID NO: 60227 - DNA, 1726 bp, Homo sapiens
caggaatgacaaatcattccacacttgaacaactggttttcacataacagcctaagaaaagagcacctggaggaaacagcgtgacaagaagactgacagtgaggtcagtggcaaaagagtaatgcaaaggtgtaatgtggctacaacgagaacgtgagctgtgggtgttttgccagaacatggagtgcgctgaaaggaatgacaccaacacaggggcagtaaagatgggcacagtttgacctcaggagacaaaaattttcccttgacattacttttcatgtttttgctctgcccctcctctctgcaaggtatcaaactccaaagggcaactgagcctcccaaagctgaacaggcattgaaggttattatgatttaacgcttcatgtttatagaacatttggtttactcgatcgttttatgagtaacatcaaagtaactactcatttgttttctaacatggtctagagggggacgcagctgaggaggcagaatgctgggacttaatttgcagctcggccggccgttgcttctgagaacttaaggaaaatgcttttttctgtgccaaacttttcccacctgcaaaactgagataacgattcctgccttggatgagacattaagaattaataacacaatcgacttgtcaacaaaagccactacttagttaagttcagtgttttaacaattctgtttatcgttgatctatgactgcaaataaaaagttttgcaggcaaatttcgcacttggaaatgaagaccaacccaaattccaaaaagctagctgttcgtccccccctagggtaagtgtccccttgcgttttttagggtgcctttctttacccttcttaaaggttacagggcgtgaacggcaatcaggctcgattctccaccctctgcactcagacgtgttaaaacgctgctacagggacccaagcatttaaatgttctgactcaggcgtcttttaaattcttagagctgtctttacacgctgcactgaacgttaaattgattttacaggttattttcacaagatatgacccttacagggcccgagatgaatcaaaatgcagaacgggctctccggcgcctacttcccttctgtctgggcggccaaggattcccaagagcgacgacggtctccggccactggccggaatgactctcccagagctcctcttccccgaagctccgcccgccgaccctctaaagcaaacctgcacaccctggggcagctgaagctctcaaggcggtgccgagaacctcggctggggcgggctggccagcagcgtctacaccccagaacccgcccgcgccggggctccggaacctctcgttcgggccgggcgcaggggctgggggaagcgaggcccggaaagaccaagctgaaaggcccgggaaggggaaggagccgaaagtgcactagaggccgcgacgaaggaggtggaggcggggccacactcgaggcgggaacggcaggccccgcccctcgacgggtgcgcgctgggttcccaacgccctgggttcgcatgctcgggtggtggaacccggactgggaaacaggatggtctcggaaaggcttttttgccccttctcattagtgcctccccagtgaagggcagatgctgagaaaatggtggtaattgctaacatttattgagggcctacgatgagtcaggcactacgccaagcattttgcttgccttgcctcgttttttttttgagacgg

SEQ ID NO: 60228 - DNA, 502 bp, Homo sapiens
tttcccactaaaagtttccctaattctctatcataatgaagtgcttatctcatttacaatacgtaaacctttacagtttacttgtgctgtgggaatccctatgaaagggggtggaagaagggaggaaggcaaacggccctttattggtcttcaaaagttggaaagtcattatccagctgtgtgaccttgggaaagtgacatcatcactcagtttctattcttcattcagtaaaatgaggtgactgggttatctcgaaaatcacatcccacttggtttgaaccgtctaagcctgactggtatcttttattaaccatcgctccctgcttggatggtaacctggttcccttcccgtggattagcactatgctttccaagtaaggtcaattgtaggtgaaatgacacccacagtaaacagaatttgtctctgatgactctcctatcatcacagttattctggtctaatctatatgtcccagtaaagatttgctcatgttttcaagg

SEQ ID NO: 60229 - DNA, 1178 bp, Homo sapiens
tctccagcaccgctgaaccccaacactcacctcacagtggtagcactcaaagtgataatcccggtccatggatatcaccctcacgatgtcctcacagccctgaaacatgcagacccccatggagatgagagcagcatgttgcctcacctccacctttccctcatatacaacccttcccaccccatgggaagatcatacaaatgcccccagagtctctctgcaatcacctgtagttttaagatgcttctgcaaatcctaccagaactctcatctccttcactgggctgcacccatggagcacactccctctgtacaacagccctggccttacctgcgtctctcagttgtgcaggaagcaaagggaagggaaggggacaggaggcctaaataaagtaggctaggctgggaacaaggggatccaataagatctggtcctcactggcttttggtttctctccataggcacatcccctacactcagcttaaatcatttctgaccccttcctaccagtgctgaggattcttcccacctttttccagcccctacatctgcagtctggtgacctcgacctcaaagaaagtctcctcctctggactgggatagaagagatggagcctgggcccagttaggctttcagacatgtccaggcccggatattagggtcagggtggtgaccccaagaggcagagtcacacgggaatcttcacagagtacattccttggcactaccacttctggcaggaggccaggcagcatgtccctatcccctccccaaaggcagtggcactggctgccctgaaggagaacccagacatactgacctcagaggggaggatgggttggccacaggctgcacacttaggagcataatttctgaaagagagagggaagagatgagctgaggctggggaatccctggacccagttccacactgcatcccaaggggcagactcacttgtggtagtcggtgacacagtatacttggttggagaagtccactgtgaaggggatgccatccaggcacttgttgcaaacaatgcatcggaaacagcctggatgataggacttccccattgcttgtaggatctggctcatggggtagcaagagaatcagtctccctccagtcccagctctccagctgcccattatgctccttattactcccattaacctca

SEQ ID NO: 60230 - DNA, 7762 bp, Homo sapiens
acttgaggccaggaattcgagaccagcctggccaacatggcaaaaccttttatctactaaacatacaaaaattagccaggcatggtggcgcatgcctgtagtcctagctacttgggaggctgaggcactagaatcacttgaacctgggaggcggaggttgcagtgagccgagatcattccactttgtcagagcgagactctgtctcaaaaaaaaaaaaaaaaaaaagactcaggaccccacactcctagctcaggctggaaggcctggctgtgcctgcagagttagggaggggctaggtcatagaagcctgggttgacaggcttttgagcccagacttgatcccataggcagagggaagccactgtaaacagttgctctggggaggaatgggatgaaagtgattcatctggtgacaggcttctttccccaaccttctctcaatatccatttagtccctgatcccgctcctcagcctcacagtgagacttctcagctgaaagcactttacttaccttctccaaaatcaagtgaccacagacacagcatttctcagctgcctcctgaaaccctgaaaactaaagtaaaagacaagacgaacggaggctgttatcaaactgagaatgatgggtggtactccaatgggccaccaagaagggggtcagtatggaaaccaattccaggtccaggtgacccttactcaccagataatcttcctcacagtacacagagccattgacactgtagaaagccttgcaacgcaaagttcgccctagaaacaatagagaaggggctggaacctatcccacagcccaggtgcaagacttctggggtcactgctccccgctgctgcataatatatttaaacctggactttgtgcttttcctcctaactgctgtctgtccttccccgcacaaaaattccatctgatgcaattccaatttgctttggcttcattccagccaacttcccctctcctctgcttgctgctcctccagctcctgcctccttaacagttttctagggcccctcccctaaacaaactgccttcctctccagtgcataggaagccacctgggagagtaaagccaactacgtgctggaatacgtgagctcttaataaggtgctatatgatttgcatagagagaaccacattgttaacaggcctttccctctgggacccttcaacctagaagcctctttgcctgagcatatctatcctgctctcaaatgcctgtctccttccagggacagactccatggaggtcaggactggagttactgcagaaggacaaagtgctttgtttggaagcaaagcaggtcccctctcctgtttgtataaggctgcttccctaagcttagagggacccagagtcactggggtaagagacaacccaggatcttcttccagcagacaaggcaggacaattccccatgtgaccaacccccaggaactgctcccaggtgtctacattatcagggatagggaaggagtgagaacaggtggagcatgagcaattttcccacctttgccttcttcccctcaaaatccctacttccaactctgtccagtgggttaggaaagctgacttagaagctcatgagacacaggggaggaaagatagggaaagagatatagccagaagaggccctgtaaacagaaggatagacagacagatgagcctaaagagaaccaggcagaaactgggggagtgagaaaagctgagtgctgaagtcagacaggcagagataggagattaaaggtttagcaaaggaatcagaatgggtaagcagtaaggagggggtaatgagggaggggaggggggcagttaaggccgctgggagcatcccccctttccaagtgggcctcctgagctaacagtggcaggcattcctggagcgtgatgtcatcagcttggcatggcccggtggcctgcactccagtgaggtggctgaactctgaccagccaagagaaaacccccctctccgccccaaacagctccccactcccccagcctgcccccaccctccccacattccagtctttcactgtcgccccaggcaacttggctgcccaagaccaagccccaccaagaagctggagggccaggcaagtccaggatgggcaagcagggaagcacgagagggagaaacagaggtgaggaaggaaggagggactccagaaaggggacccaccaggcggagggagagccaagtagaggacagacagggaagcaagagaggcagagcagctgcggacctccagacacttggtggggatccaacagctgctctgtgagcaaatgaagaggcacaagctctcctcctgttccccatagcacttgtaagtgtgtatgtgggcaggggaggggagtgcttgagtattggggctacactcaccacaagagcagcaaacaaagcactgggtgtggtagaggctgtccagggcctggcaggcattgctctgcccatagatgcctttgttgcacttgatacaggtgcctgagaagagaaaagtgtcacactctactcccccaggtcaaaaccagggattcccaagctttcctgactgccctttcctgatgtgccaggggtcacagtctccctttgatgggctcccttctgagtagagaagataacgagtaatgagatgcagcaagatcttggctgagcagatccattcttgtttatttaattactcaacagatattttctgagcatctgttttgtgcttaacacagcaccactacctaaggaaacctggagaaagtcgaagatatggtccctggcattcagatgcttagtttctgttggggagaaaagactacacaggcaaggtatgatctctgttgcagtgtgtaggatgaacggtcaaagatgccagtccacaggtgctcagcagcagacttgaaaatactttctagagaaagcaggctaggcccagaaatcgtctctgggacttcagtttcccatcagtcaaacgagctgttcagttatagaatgatttctctccactgcagacttccaaggatggagaaaaggatctggcttggcagagggctccgtgcagaggggaccatgtgagcatgattcctgtggggaggtggctgctgagaatgcagggtgtgttccaggaaccagggttgaacaggaaagcagggagagtagcagagcccctgatgcctcctagtcaccttctatcatgggaagaatacagaactgaactgcttgctattccccaaaatcccccactaagatatatacacctggctctgggacttgcctttcctgggtgtgttcttccctccctccactccccaattccaggcccatgagtgagggctagggcctgtctttggggagcagatcccaacgggcctgccccacctctccccctcggcacgctgccacactccctgcctgttggggcccatcccagtctttgcccaggggcttgggagcctgtgcagcagctgcagcaactgatgggcccaggcctgtcctgctcccaccctctggcagctgggcaaggctgaagccaaggaagagggcccctactaggggcaggaggagggtacagtcaagctggggctagcggcacaaggggtatgtaggggttctgtcaaaggaggcaacctgactcccaaggagaaggggcccccatctctgaattcaaaatgtggcttcctcatggaagtgaagatctgccccaagattgccatgccagggggtcctgtcggagccattctttaggaaaccttggacgttatgggaaaagcaaacgaaactgctcaggcacgttggcctcacctcctctaacccagcatatctatacctatgttcttcctgccattttattgcagtttctctgagttcctttcttccttttggctctgatggttcagccaaaaagacttctttactagccacctctcctgggcctcaaaatgaaactgctaaatgggccctgtcattcagtcttccttgatcaaagcggtttggcatcatctcctctgggctttcctctcggtggatttggaggtggggaaaagaatgggggtggaggctgggggttgagttatgcccttatagcctgccgccctgctacctctgaacctcctacccaaccatccctccctggccgcgttcctcttcctattcacttttctagccatagagttctacagcatggggtccaggagtggggcatgagtggtaagaagagatgcttagaaaagtgaaagaggcccacagcccttaggcggtaagcctgccacttctttccaatcacaatcagattcgaagttttttatgtgtgtagcagtgcctgtgaattttgactaaaagatctttcaagaccctaatgttcctcatagctgagacatataatcaatcaatacttcctgaacagagtaggggagggagacagcgaccaggtttccttaacagtgtcaggaagtaaggcgctacttctggcctgaattctgagaggttataagcagaattcaaggccaagttatttctggcaataacacagggtcgttatccatccagaggtaatggtgtcccagtagtcatgacttttaccctgacttccggaggatggggaaaatagaagctggtactactgggtctctgattaaatgcccacgcacgcacctagccaacaggactggggagggacagcagttgggtcccagggcgctccatcctgtctcccaggctccatttccccgacagccgccactactccgcgtatgctagggagcgtcccccgatccccgaaccccacccctccgccgcgcggcggcagccgccccgcccgcgggcacctggagcgcccgggcaggagtcggcacgcacgcggccagcctgccccgcccccccacccgcgcattctccgaattcctgcgggcggagcctgggcccgggtgggggcgcggcgcgcacaaacctccaggggcaccgccgtgaaaggggggagcaagttgggggggatgcgccttcactgccccacttggtcccttccctacgaggcctcctgccgcaaaaaaccgaggttcaaatgcttgagaaacggactcacgagataccaggggggttgaatttagcagaaataaggagccctggttcatctgaaaactagcaggaaggggacagtgctctggggccgcccccatccatccctcttgcttctttcctagtcccgcgtcttcacctcggaccccggggcaccggcactttgggccgtcggggcagtggagaaccgaataccgtgacgggtcccttcccgtccctaaccacttctctcactcaccgaagtagtcctccctggcctctggctcccgcatccgggcccgggcggcctccggaacgaaaggacctggtggctcctccagacccgacggctcaatccccgagggttctccgcgggctccggcttctcgcccaccggtgcccaccgtcaggcgaagcaaagctgttagctcgtcctggtaccgggcgcccacggcgcagtccccgtagccggtcacagagtgtcgtccgggttgcgccccccgtctctccaagggccccgccgctcccactccggccccggctagagctccagggctgcccagggccgggggatacgagtggcggctttcctggcagccgaaccccgcgggccgctgagcgtacaatcggtccagggcggcgtggagctccgggtaggcggacgggacccctccgggagaatagcctgccggtgctccggccaggggtgggccaaacaggcacggccccgctggcaaggggctcccgtggcgctggtcgtagcccatgctgatgccgctggtgcgattgctgcagggccggctacctccagctccgccagcccccgccccgtccagcagcaggctgccccgggggctggacggcttgctcgcgtcgctggccgagctactggcgaagctagagcgggggctgagggccggggccgtgggctccagccgaaaatcggggggcaacgactgaggtagaggcaaggcccgggtgggcggcggccccgcgggaaaagagccttcgtagcgcggcgcctcaaaggagccgcgctgatttcgctcagcgtccagggaaccttgctcccgggccggctccaacggctcatccccaggtcccccagtagctcctcggggccctgacttcctaggtccccccaacccacttaggcgccccttgcccggcccgggggtcccgtcagacccagaccggctagattcaccctttctgcggccgaacttctccagcaggcgactggctttctctcctaaccgctccatgccctcgggcctggggcctctcgccccctccccgcctggcaccctgcggcgtctcggcggccggttctctttccctgcagccggactctggttccccaggggcacaggggaggcacaggggcttagcgggcggcctggatgccctgcgccaggaatcccacagcatcccccagcgggaggggctgcgtccccccgcgcatctggggctgagcggggctagcagggtctctggccgcggctgtccagtccgcaggtctatctgttcacgcgtcgactcgcccgactgccccactctccccggcccccgcccccctagctctcacgctagccacagaccgaacttctctcccaaacttttgtctgcctggccggatctactttcctaggggggcggagcgcggtgtgtgcgagagcgccgggggtgtccgcgcagggatagctggtgtgcgtgcagcggaaggcgctaactgccctggatgtggagacccgcggactggacgtgagaggcgggcaggggcagttggggcagctgcccctacaacactgaagaattggaataggaaagagtgtgggggtaggggacggggactctttgtctgcagttggaatgcgcggaggggcatggtggaatgtgtcgcgtcccgggaccggacgacaggaggcatgttctgcgctagcaccgtgactttgttcccagcgtggggactgtgggagagatggagagagactggtacagaaatggtgagacaaggagagagccataaagaggaagacagagagaaagaagacaaatgcataaagaggttcagagacgtgtacgtaaagatagccctgaaaggcgacgaagcccacagagagaggtggaagagggaagaggtagcgaaagaaagggagagctgaggagcaaagaggagtgtggacgatgcagagaccgaagggtgcgcagacaaaggaaaggacaagcttgtccagagagaatgagagacaaacagataaactgcaataaaaaggcaccaccttctggacccaaaagttttgtgatttgtaaaagcagtgaaaaggagtcaggaaaatgggactaatctctactttgagagggagggaaagagatatagtgtgtatgtagaagcagtgaaaaggagtgaggaaaaggtttgggactaatctctaccttaagggtaggacagttagagggatagacaccccctggtgttgggaaatgagatttttctcatttcaggtgactgtggagatcgaaggcctggttttagggctagcgaacaccttctccctttggttttggtccacagaagactggtgatacagagtaagtattaagaggaagaaaagaaatgccgtgtagaggaaattgcaaatgaaaatgatcaggatggaaaagaggctgatattgactattttaaaaggatcaagaataagg

SEQ ID NO: 60231 - DNA, 2014 bp, Homo sapiens
cagggtcatgctagcaatagacttccttaaatgtgattactgaaagcatggcaattcatatcataatcttcattttaagaaataaataaggaaaacggccacttaaagctcctgctgtgttggtcagtcctactcctccacttcaaggtgcaaaatggctcacctgtcaaaaggttctctcaaaacctatttttatcagaaatgagctccttatcacacaagagcagctaagtaaataccacaaaatactattttcccacattttaaaagagtgactcgactaatggtctgcaaaaaatccaagaccttatttttaggggtaaaaaagagagctgtagacccagaaggccgaatgcggtctttaaaggattccacgtaatctgaaaattccacgtatatttctatagcaggatgagaatttttagcccagtatagcacagtcctttttatttacatttgctaagattacattggtaagattaatatttccgatttcaggtttgcctaaaggacccactgcatttatggagaaactgaaaaatgaaaaagtagctcctagaactcgtgccagcgagaacttggtaaatgttagttgattaaatattagtcaaggatgacaaggtggaccccagggagggcagaaccgtttccgatgggtcagtgtgattcagctacgggaaaggcgatcgcagcgacgcgggaagcagagatcggcgactgctcaagaggcctcaggggacagggtgactcgccactgtgccctaccatacagtgcgctctgggagtcccgggtaaagggggtcattcccgcgagggatgcggagagcagagcggccggaggagcggctagggatctcgccgggtcaccggggagggtagactacgtagccccgagagctttgagaacttgggctgaaggcggcgctcgccgtgagaactgacgcggaggtgcagctttgcagccctacagatgttctaccgcgtgtgcctggcgctaccgcacgggctgactcagctaggcagaggcggaggcgggcgcgcgggagacagaactatccgcggcgcctgcccgtgtacccggctaccgcgcgcacgcggggagacaccgccccgtttgccttctggctcccggtgattggcggttagacgatggctggggagcagggtcacggacactattggctgcaaacaacagtcactcaaaaagtcaggtaggggaggggcctcctcagggagggacaagactgtgaggctttttcaaggccgtcagacgccatctttagcttgtttttgtttacttgcttttgttctctgctgctcacaaacctgtgtgtacacgattataagcacagtggccacaaatcggcgtcacacgttgggtggtggccgacttttagttactgctggcctcggttacatttctttcacatgtcacctgcaaattagcagctcctcacagttcaaagaagtttccaatactaggggccccgaggattcccaggcaaaatcaacagagtttagttttgctttgctttggaaggccaagccaacgatatatatgtgcgaggaattctctcctttcttaggaagaaaaagcaagaacagtggatatgaccctacgttcctggatgtagaaatcaaatagcctaggaaatcagggatacgggctctgcactgttcagggagagctctccctattttttgagacgctaaaaagtaaggtaaaaagtatatgtgatgacctgtagtgatgtggaaaagagctaaaaagggtaaaactccattaaaaattcccgtaactggccgggcgcggtggctcacgcctgtaatcccagcactttgagaggcagaggcgggcggatcacctaaagtcaggagttggagaccagcctgaccaacatggtgaaaccccgtctctactaaaaatacaaaaatcagcccggcatggtggcacatgcctgtaatcccagctactcgggaggccgagacaggagaatcgcttgaacccaggagg

SEQ ID NO: 60232 - DNA, 1463 bp, Homo sapiens
tgtttcaagaaacacacacacacacacacaaatgttctaatgaaaatgtgtgtgaaagacacactgtaattaaggtctttcccccttccctagggaaatgaatgtctccattataatatcccaatattaacttattggccttggacaagtgccacatcccagccacttggttttggttctgggggggtgggtgtgtaaaaagcacgcaaacggctttatgagggagcctcaaatctctctgcttccttcgatgttgcctgtggcagaaatttacattatcccttcagcccgcttaaaaaattctgtacttcccaagcggctaaatttttaaagtccctcaaccacaaaaatctaccagttcttaaaatgtgatttaaaaaaaagaaaaaaaaactataaatttggccggaaacggttgtacacggccatcctgcttctcaacttcttggtatatttaaaaccttgaccaggaaaaagaaagaggaagagagacagaaaaagaaatgggggaaagagcaaattccccttagcaacagtttcctcaccccaacactgctacagatctctatttttaaaaaatttgaaaacacacacaagattaaggaggaaaaaaaatggaaaaaggatacccgaaggtcgtatggctctttgtattcgtgtgtgtgcaaaaaggaggactcgcggagcccgagccggcaagccccgcccctccccggacgccctcccggattggccgtccgcggccgcggggcgccccgcccgcaagcacacgcgccgcgcccgaggcgccaaccccggagttgggggcggggggggccctgagggccgccggacccccgacccccaacctcgcctggaccttggcagacccctttcccacctctctccctttcactttctcaccgtcctgtcaccctttcccatctttttttctcagtgaaacaaggcccagtcaccagcataacaatccagtgagcgacctccggacactttgttaaattgagtgaactagtcagtaacattctagactgcaattaaacatcagggacttggtgcgtgggccctactccggtttccaggtgaaatgtctctgggtcacgtgtgttgcttaacacccccacgtttaaatgaacattcacgtatggaacatctttctgaagtcttacacttcagcccgagctcccagtttatctacctggctcagaccacattctcaaaactaaagtggctcctctttatttccaggaagacagctggtatacctggattttaagccacccataatctggtcccacccacctatttgttatttatttatttatttagacagagtctcgctctgtcacccaggctggagtgcagtggtatgatcttcgctcactgtaaactccgcccctccgcccccacccccacccccacccccaccccgcccaagcgattctcctgcctcagcctcccaagaa

SEQ ID NO: 60233 - DNA, 2177 bp, Homo sapiens
accaaggcgggaggaccgcttgaggccaggtgctggagaccagcctgggcaacacagggagatccatctctacaaaaagtaaaaaaacttagcctgtcgtggtggtgtgtgcctatagtgtcagctactctggaggctgaggcgctggagccactgcactccagcctgagcgacagcgaaaagccctgtttcaaaaaaaaaaaaaaaacaaatcattttatagatgaggaaacaggttcaatgaaatcaaatgatttctcaatctagagctagttattgcagagctgggcaaggaaccccaaatgtctgattcttagtacaatgcttaccctcaccacgcttccccttcatgccagtttcagttacccctgccttgaggggccgcccagtttccaaaactttggtaaacgtttacaatagccttccctcggccaagattcattgttgttgcggcctttcccagctagaagatcctgaacagcagcaacctggggtcgcctaggaatcaacccaagaggcctcaccttcctcccccgacttacccccggccccaccgccaccctttccaaccagagcaaagacaggggcctcctgggccaatgagacagcaaaactgctgcggtccgaacgagaggacccagcctccgcctgggttggtggccaaggccaccgcaaactccggtcaggctgggaggccaggcaagtcgcgggcgttcagtactcagcctggcaagggggctggctccacaccttgaaggccagggtggttgttccatgaagcatttcgattcctggctcttctgggacaccccagcctggcgcggccaggctcagaccatcactgagactccctggacctagatccagcagatctgcacgacccccaagtccgaaaaacccgcgctggttcaccggtagcggtctctccaacacgctggcaagcgccatgtctagtgtgggcagaaagaactaattctgagaacgcctagcaaagataggccgggcaacgcctcgccgtcacagcttcacttcctattaaatctattccggaatggagccattttgactgctggcaagcacgcctccaaaaagaagggccagatgcgaaagaccattttcactgaagggggtcggggaaatagatggcttcactaaccttaaattctaaaaggacgtacctgccatcttggctttggtcatgcaagtagtcctggatcagaataacctcaaaatcacaggaagtgactgaaaacgtccatgttgcgtaagggaagtgaggtcggccatctttgagaagggcgtgactggttgaaaatcggttctgaacccttagcggtgagtcctcccactccagcctggtgtccaagcaacaggttacatcgctgctgcttcagcaccttgttaacgcgcctgaggttgccatcttgtttaagggcaccttctaaaattgggtaaaataatgatccattctgaggccatttccctatattagttaaaccacagcaattagtggtaaaacaacgcaacaaaataaaagtgctatacctcttgttgtcagtcgccatacagcaacccttctttaacagtaaccggttattaatatccaatattcgttctcttgactcctaccttctggtggaaattcgaataagtaatgaattgcctaaaaggcagatggaagaagaaaaagcaaagggtccagttaatccacaaactagattctcagttcagacctgaataagtgtcagtagtaatttaccatctcagagacgggaggacggttgagactgcataaatatgtaccaagagattctctaacttcaacttgctaagatgatgccttttattcaggaacatactatatttcattgcctcttcctccctccacccaccttcatttttcaaatcttttgggaactataacaaaccgggaagtgtgcatatgtatgaaatgttgcctcctgctttatggttctatgaagtcagtctctggccttccttgttggattctagcagcaacatctatcaacaccgaaattccactttcctctgatgcccagttcggccccatctttcccccagcagactctgcatatgctgtattgtttttgtttgtttgtttgtttgttttttgagaccaagtcttgctgtgtcccccaggctggaacacagtggca

SEQ ID NO: 60234 - DNA, 1093 bp, Homo sapiens
tggcactgccgaggggcccaggccggcgggaagcgcccccgcccgcccccgtcgccgggtcccgggggcacagccccgagccgattggagcgggcgccgcggctccgctgcaggtctgagcggccccggcgagaacaagggagcgagacggagggggcgggggaagaagactccgcctgcggaggagcgaggcggctccgcgccgcgcgggagaggagagcccagcctccgaccctccccggccagccgggcccgcgcggcgggggcgggggcggaggcggcgccgcgcgtccgccccctcggcgctcctgggctgcggggcgcatacagatgcggcgcccctcccggaccgggcccgcagcgcccggcagggcactcgggcgggaggacgtccaggccacggcgccaggccatttccgaagagctggcggggcgggtgcacccgggagcgcgaagctgccagtccccgcccgcagcggaaaacgggcgagcgcgcggtgaggtggggaattcggagcccactgcggagagacccggctccgggctcccggttcccggctggcttttgggactggtgtggatggaatcccagctgcaaggcggcggcgttttgagagcccatgcaaagcacggtagcaggtcagctgggggacacttaaggacggcagaagggtccagagagtccgaggcccgggcccagggagcgggtcgggaacagaggcacgacatcggcgggaggtcggaggcgggcagtggaacccttcttgggaagctcggttacaggggccaacagagcgaggagctgccgccccctggtggtagttgtgggaggcaccaaggtggcaggcaggtgaccaaacccctaatttaaccgtgcacaggaccaggaaccagaagaggacccaccctcctagccctgctggggtgccgccacggacacaggttgctccatgccttcccgaatgaggaaggtccacagctttgggttggtcagggccaaggcaggggataaaagacgtgggaagttcaataagcaggaagcagtcagcctaaaggaacacatggaatgagagcaactcctactccagatatc

SEQ ID NO: 60235 - DNA, 1246 bp, Homo sapiens
tacaaaaaaattagccgggcgtggtggcgggcgcctgtagtcccagctattcgggaggctgaggcaggagaatggcgtgaacccggaaggcggagcttgcagtgagctgagatcgcgccactgcactccagcctgggagacagcgagactctgtctcaaaaaaaaaaaaaaaaaaaaaaggagcccaggtaccactttgaagccccatggtacaattaaaggaaccaaagccagggaagaagagaaaagaacagaagctcagagactgcaggtctggcaaggatctcagctgaaatctagcagataatggcttcccctgcccctcctctctttcctctccctaggtttcttacctcatcttgctcggcatagtcagcacaaaggaatttgggattggactggggccatttgaccccgtgcagagctgtgcgggtggcaacagcttcctctactgttgagtactggtggaggaagggagaagatggagggtcacagtgtgtctgcaacccttcccacgtgctgcaacacccttaaacctgcccacactggtcacaaaaggaaatatatgccatgacctatagaatcagcttcttcccctcaccgttacaaagcaatgagatttgatcttgtcaatccagaaggcctcttccaccaaggttcctgtgcgccccaacaactcctttagctggcctaaagtgaaaggacggacctgccaatgaaaatagactttcagggtctagcagaaggcaagaccaccacccaatctttagatttcccgagctgctgtcacaggagtatagtttcaaggtttgggggagggcagagagtttaggaaccttgcagtaagaatgtgagaagagtggtggtgcttcccagcactaattgagacgttgtatgtgaggccttctgcaagtcctcaaaacaaccctgcagggcaacagcttttccccctcatttttagatgggtaaatatgttaagtaactcactcaagatcagtgagtaacttaatctattggtagaccagttcaactatgagtggaacctaggaggcataagcctaaagctcaaacttaaccactaagcaagctgggatggtgagaaacaatgacttaccaaattggagatatggacaatgttgctaatcttgccccggggtggggagggcacctgggcagttcggactgggtcatcaatggtaatggaaactccggacttctgctggctaatggaacgtcgagttaaggt

SEQ ID NO: 60236 - DNA, 1581 bp, Homo sapiens
ctgctcagaggtgtagaaactgttcctacattcggctttcacccagtttctcccactccctcattccaacttccaagagataaagagagcaggcctcctagtcaggacacaccctcccccacacaggcagcttcccccaagaacaccaaacccactctcccactcttaatctcacaagttagctcccatttcaggcaaagaatcccagagattcacttcagataaactatctttccacctttgatttctgtcttcgtccccaacttctatctcaaatctcaccccctctaccacccaaacaccaagcaaaaaaaatcaaatcaagatgatcagaggcctaaggctcaggagaggggaaaccaagcctcccaggccgataaccaccaccagaaaagtcagcattcccaacaggctgactgactgacactcagaggtcagaagaacctccctagagcagtcaagaagggatgcactaggggggttagggggaggggaaaatcggaactgtgcccccagctaaacaggcccccagagaaacacgagatttagctgcttacatctagagaaaaggcttatacaaaaaaaatatctatttcccatacagaaagggcatgtggggccaattagaaactgggcaggcaggacaaagggggaaggcagaatgactgaaaacaaaccaaaacgaaagacggaatgaaagccatgaggaagagaaggaagacgaagggagctagggcggcggggaaaaggcatacatggaaatgtgaagctctcacccttctttgctttctgataacatgattttttttctccccctggaagtgctgtttatccctttctggaatggaagaaataacaaaaaccaaacaaaaaaaatcctaaaaaaaataaagaaaaaaaaccacaccttccttgttccaagatcccaccacctcctccccagccacccgatccagagagagaaaattgagatgtagcaaccggggatccaaaaaatggtaaatggaaggggaggtggtggtggtgcggggaggctaaaacagatctggcttttaagagataagcgttaagtcctcacggcaaaccccgagttcggctggattggtctctctggagaaggaggaagagggccaggctgctggtagtggctggctctattgtattggcggagcggcagcgatcagccggagacatgcaggggagccatcttgccacttacccagcagcctgtgtgtgcggatgggggagggccttgctgcagcaggggaggggaaagaaaagagggagggagctgagtgagcaaggttcttatcctttggcaggccacagggagccgactgctggctccagaggcctggccttcttttctcaagttacagcagctacagaggcttaaccccccagggctggagtgctccctcctggtcttcccagggggcaggggagggggctgggtggaggacatgtaaagttacagctgcttgattggaagattctagaaaatagagagaatagaaggcaggcaaacagtagaggtgggagtgaaaaaggattaaataagaacgataaagccaaagttga

SEQ ID NO: 60237 - DNA, 1820 bp, Homo sapiens
tcctaggtaaacatgagttaaagattaagatgcccggagtcaattcccttacatggttttgagtgtggaagcagaagcttctattgcctaaatcttaaaggagttgactattttggctggatgatcccaggtgagttttccttgtgccctgacgaccacttttcaggttaccttaaaggtggcagctcccaacatagtaactgaagtctagcctttgtccagataaagctctgcctttatgttttaaaaggaaactaggactgcttagtcaaagaaccctagggagcgaagaactatcgcacactcatagttccctgttataccccggtcgagatatatcacttacacagtgtgatgaattctttctgattctggcagatgagaggtctgagtctctgaggtttggggctgtgtggcagctggtggctctgcctcttcagcttcacacttctttgggctcccctgtcaggagatagcaaaaacgaacagagcaaaacatttagatctgcttggttccttttcttctacctggagcctgaaaaaggcagggcaggacatacacagtaccagctccacacacggccctctgtatctgttatttcattttagaataaggaaaggaacatggcttaaaaataggtacttcaagaatatttatgccagtaatcattttatcagaatttttaatttttttccttttcctcagtgatccttgttctgacagaattcttttttgagagaactgagaaaaggctgacttccttttggcagataaaaggaggagttatgaggaagaattgaccctgggggccctggagataaccctgctgctcagcctcatgtagaacttctacgaaccagggagctggaaatgagttaagcaggattaacaggtatccaccacatttctactgaaccttgtccagacttaactttttagttttatagcaaagacaagagggaagatcttgcttaatcctccatctctgtgtagggaggggtcacaatagcctacccgctcaggctgtaacctctgggtcacatgcttttcagctgattcaggctgactcagacgccttgcttggacagaggatgaggaggtggaagtcctctcctttggctcacagacctgcagttgtggcactggtggagttgcaacctcctgaccagaagagggatctttggtttcagtatagctggtgctgctgtccctggagactccagggctcagagactaaaacaaaatgaaacacataacaaggaaaattattgtatatggtatatattcagtagattgctgagttttccagtttccatggaccaaattttatactctggacctttttgtctgtgtttactcccattttgtctgtgtttattcccatttagtggtctccttgaccacttatttaacaaattattaagttttaactagatgctagatcctgggacacacacgtaaaagggcatgcccacatcctcaagaagtttccatctagtggaggagatgagtacataaattcaacattctatcaagggactcaaaatgaaaaagaaccccatttcgggaatcagttaattgaaaatacgattctgaaatgaggagaaagtaatcagtgaaggagagtaaaggaggcttttcctattcctttcagaaatcatgacaggctctccaggggctgaaatgaaaaccactggaatatgacagaacattaatacacccgggattctctcatactcacttttctgctgttgcttgatgctgaacgagaacgtgaacgtgaccttgatctggactctgatgttgatctggagcccat

SEQ ID NO: 60238 - DNA, 2130 bp, Homo sapiens
cgcctctctcaccaatattcaccaaactcttaaccacccaaattgccactagatgccactaaattagagacctctctctcatcaagtcccttcaaataaaggtctctcttcatctcacctcctcatctaatcgagcagacattttaccctaccccagtcctattcgtgcagataccgataccaaccccatccaccccttcgcgcaactatacccctaactccgacccagcccaactcgcccccctcaggccagcaacgccgtaggttgtagtgggatttaactccttctgcagcgcatgcgccgaaaccacagatacaaacaaggagggggtgggggaaggaggaaggagcttaagacactcctggagagtagtgcacaccctcccatttgggctcgcgctgctgccgttaaggcgggaaccggcgcgatctccattccagcgcgaacctcatcaaccaccgtgcgcgcggatccagaggctcgcgctggcggcctgagcgagctcgcgccgagcccggatactgcgcctgcgccgcggcagaggctcgtctctaccgggtccgctctcctccgacaccccagcaacgccgactcctcacccctttgagccgcttgaccagggcactcttctgcccgctcttggctaggcctcgctgctccagtgcggccttcaggtcggtcacccgcagcgcctgaagaggcttcccgtccagagtcacctcctccagctccgccatcttgcgtgaggtactcgggtccgtcccgacggcttcgggcatcttcggtaatttccgccaacgcccttcgaacgtaccgagatgaccccgcccactgccatactctacccctcgattaccactcagaactccccgggttcctccggatgtcctcggatgtttccgtctccacatcgttaccaatcaattctttccatccgccctgcagcgccccttttctcgccctgctttcaggctcggttttcttcgtcttgccgaagctttgaatcgaatatattcggaaaccctcgaccctggtataaccataatcggagatgttcgtttatttccggacctagagatgaggcgctggggcgcttgggtgtttggggcgggtccgaggccggaagtgcgtgggctgccgggctggcccagcttagggttttcaggaaatttggaagctgccgcagtagttggagtctaaggactcgtgacaatcttcgggtgcccttcgagagaaaaggggaggtaagcggggtagaagtacctctatgggccgggtcagactcggtgtttgcggattaccttaatagggcaagccccccactccttaacgcaaacagcttctgccctctgtcctctgaatcatagccactcccatcttaggctttttttggggaggggcggggggctggtgcggaatcggaataacaagctccgtgggggtgcgcaagaagcatcgccgtgtcttcggacccagactatgaactgatctatgacgctgaacttgagtttgagtttgccttggaagccatgtggcaagattctgggaaagttcttccttgctccgcagaagagagtaagttcccttggaggaactgcttcctgtagggcaagaactggaaaatgcaagcgccctgaacttttttggtacttgaactaatattaattgtttaggggcttctttctttgtcactaccaatcctccaacttgatgcagaagaaacacaaacagtaaaataggtcacagacaaatagtttagagatttaagagatacgttagagatttaagagactgaaaactattaaagtcaaattggctgatctttccgttgcattcatgatgcaaaatcagtggcaaggtgccgggcgcggtggcttacgcctataatcccagcactttgggaggccgaggcgggcggatcacttgaggtcaggagttggagaccagtctggccaatatggtgaaaccccgtctctactaaaaatacaaacaaattagccgggcgtggtggcgtacgcctatagtcccagctactcgggaggctgaggcaggagaatcgcttgaacccaggaagcagtggttgagatcacgccattgcactacagcctgggtgacagagcaagactccg

SEQ ID NO: 60239 - DNA, 587 bp, Homo sapiens
ttttctaaacctcaagatgatccttagtcattttctggttgaagatttaatttttcttcagtgtcctgcctctcaatcctcactctagagatggagtaaggggaattaaggcttgctgcttgctgtctttagctgcttggttgagccatcatatttgacatacactatatttaacattataagtatattaaaatccagctgagactcaaggagaaatgtaaacaaggtcataggaacaagagaaagagcagacctttagttaataaataaacctaggcatagttaatgatcagtagagaaatcatatgtagtctgaatcctaacctgcctgatcatgggaccaattacacatggtcaagtatcaagataaaagaaatggaaagggtcagttaatcatcactttagtgaagggccaatttggtgaagtcagcaaagtctgaaaatgtgttttcctaatttgtgaagctgagtaactgatccaatacctagattgtttcattcaggcttctgctcaaaacattcttcttcagtcagtcctttagtgactctcatatttcaaatagtagccccaacattttctactcctt

SEQ ID NO: 60240 - DNA, 2001 bp, Homo sapiens
atctttaaaattcccaatctggctttttcaattactaccaactaaccgaatcatgtaatataaaagggcttcaagtgtatgatgggaaggaggttcacatgacaaaaaaaaaaaaaatctcctgataggggcccacattaccaaacaggtctcagcttgagtcttctttcagtttaggagtctcagaataggacgcaacactaggaaccccagaggactcaggttctcagtttcctggttggttctcttagtatggctgggtacgggagtcagaggggcagtttcttctaaacctttcattcccaaaggccactgatccccagaagcaaggccaggttctgcacgtgtgttgaggtcgccaggaggtagccgtgggggttgggggtttgtgtggcgggggggcctgggaaggaaatgtttctcctatcctccatttcacaggcagtccagaaggctccgaactgggtcagggaacaaaaagttattgcacttgggacgataagccccatgaggcaggcgaatctcaatcctactctcgccaagggcgccccaacccaaccttcttgccctcccctacacagacactcaccctcccctagttacaacaggggagggaaccgaaaagtccagaggagaaaaaagagagaaccgggccacttcgaacctagaattatccccccaccagcgcggggatggggctccagaggtgggagaccgtacacgagctgggaggggaagtccaaggggctggggatcactcaccgcagtccagcccgggcggcggctcccagcctcgcaccatgggccggggggaagtgggggagagggcagggggcctccgagtgggagtggggttgctgcccggtgcggccgctccgagcccaccccagcgatggccgaaaccgggactgccccccccaccgtccccgggagcgcgccggtctacccagccctgctcgagcaagttggaggcggggcggatgggtggggtgggcgtccagaggcggtgccaaggtggcccgagtcctgattggtaggcgcaggcgggcgggcacgggcgaagcgcactgggctggccattggctgcgtgggtctcggctgaagtcaggtattggctgcgtgggcctcagctggggtcatctattggatgcgtggggcagggaagatgtcccctggggccaagctgcagtgcatggtacctccccctaccgtcgacctatcggcgccggacctttggaatacaccggaccaggatccttccgaaattccccaaggagggatactgcactttgctgaactgtctggaccgccaacaactcccaatttgtttccttctgaaggaagccctccaggaagaccttttcagtgccccctccggagccatacaaacgagctgcgcctttcccagccgagagcccaaccgccaccagcagcgtcagctgtaacaaagcgcctaaagcaactgggaacttgttctcgagagggatcagatgtcttgccacccggaaagacgaggaccttaggagcctgcgggcgacttaggccgttccccgggtcaaactggcaccagacagatgttcccaaagacgaagtgctggagcagtcacctcattgggacctaccagaccctcaggctcccctccctgccctagaaaagaggacgcggagctctccatagtatttgtttttcgctagctagaaagggatgaagactgaggtgggagaatgacttgatttcaagagttcgaggccagtctgggcaacatagcgagaccttgtctcaaaaaaattttttttaacttacaaaaagaaagggatgccaataaaatggacttcaacaaagcagtatcccacacagtatgaagttatgggccaaaatttgtattttaggattccccatcttctgtgagacagagtaacaaatgtaagaagacaggcttgctcaattctgtttggcaacataatttcacaaagcctctgactctgacgtctctggaaaga

SEQ ID NO: 60241 - DNA, 1409 bp, Homo sapiens
gtgagaggtaactcgcccaaagttatatagctagtcagggacttcctcttcggagacaaaggaaatcagaatagtgattcttctgattcaccgtccctcgacaaacagtccacaaagtgcttggaggttattaaaaggcaccccagaaaagtaaggctggcattttcctggaagcccctgagtgtacaacccctgaggctcagtatttggctataaaaacaggtctggagttgctttggcctccgttttaatccctaaagctgcctggaggctggagctctgatagctacctgtcatcactccccagccagtccgcggacaccgcagccaggaactgtcagaggtgacaagggaatcccgtcataatgccaaggaccaaggagcagtggccaggttcctgggattaagcaaggcaattatggctgagttaaagctaggatgggtaggacagggggatctgaggtggaaaaggccggtaagaagagggaatgcgccagcaatgtaaatgccttcgactgggtgggctacttcacatcatacctcctccatctccaaaaggttcttaaccttcttcaaccgcctaggcctgatggacctcctccctttctcccagagcccactcactgaagggaaggccaccatcatccccattcttttcctttttttataatccctccggtgccgtttcgggtctccttcctcctatattctgagttccttccactcacatccaaccagcttttaacacccggatctcccggagcttctttggttccgctcactccccccgcccccacgcccccacgcccccacgcccctgatttccccacccttttcgccctccccggcttgactcccttggaccgctcccgccaatcctggtctctcctactcctccccgccacatcgggtcgccccgcccccgggtgcctttggtgttttccgccgtcggccgcaggcgcctcgtctcagataaagtggatccagccctgcggctccggagctccgccactgcccgggtgctcgggcccacgtagagcatagtcacggccgccgttgttgtcccagaactcgtgacctgtcacacggtagcgcaaggcgaagagcagggcgcccccaatcggcggcgcgggcaggcggaaggcgaagcggtcggcgcgcggcgggggcggggccggaccggcgtaggcggctggcgcctcgcgttggctccgccagccgtcggcgctccagcgcacgctcacgcgcttctcgtaggccaggtccaccacgcgcgcgctcccggccacgcccagcgggcccgcctcggcgcgttccaggcagatgcgctgcgtcagcaagcgggcggcgaagccgggctcgctggccggctccagggcggcgcgcgcctcctgggggaaagaagaagc

SEQ ID NO: 60242 - DNA, 1715 bp, Homo sapiens
gtgacctgccctgtataaatatactgccatgtataaataatggccccatatatatgtaatctggaaggataaacatcaagcttaacactggcaacctgcagggagggaagtggaattgggtgtgtatgtgtgtgtgtgtttgagaacctgtattttattactccgcacgtctttattgtttgatttttttcataatgagaatgagtttgtgtgttgggtaaaaaaaagaaaaagaaaaaaaccccactaaaatcaatctaattacaaaagaagatgaattaaagaaaagtaccgagagaaactgcttgtgatccaagtcctggctccctaatgcctggctgaagcccagcccacaaagagaacactgggttaaaggtcctggagaaaagatgggaaaggtttggtgtctatgtggtgtctgctagccccataagggtaaggcacctggtagacggttcccagcttaatgggaactgctcctgttttccaggcacacagttcagggctggaaaagttcaacaagtgcatggaacatcggaaacctcctgaaaatgctaaatttgccccgagatgtcccgaagtccggcatatttctctgggcagcctagaggctcaggagcccagcccagcccagcccaccgtgccctctcagccagcccttctttgccttcagcagccctccctcttcctgagtagtggccctttgcaggcctgcgtcccagccccgcccctctctctggacgcatctctgggccccatcatcacccggcgccgggccctccctctgcccccccctttctcctccctccttccttccctcccttcctccctctctccctccctcccagctcctgcaccaggaaacggcccggatcccggcagcggcctgacccgtgagatccctaacctggcaggcgggcggggttggagactggctgaggtgggggtaagggaggagctgggcctttgggctgcactagggggaaccgggaatagagatggtgtcggcaggaagcccttggccttgggtttcccgggaggacagtcattaaacatggattcggccacacagctggtagagcgttgggggcaggggcctaggcccagagctgcaaccctagcccttcccaggccagaacctgatccctggccttcccctcctggttctgatctccccctcccctttccagggctccacgctggccaggaggatgaaaggccccagctgggggctccttgccaccagtgctgtgtcttaagagctgccatcccggctgggtgagtgtctccttcctttctctgtctggagtaacccattgcgtctcccacctttctcttcagcccatctgctccccctcatcttgtgtctctgccaacatctttacatcttgcatttggggaggtcctaagacccttcctctagccaagaaggtgtggactaaggagacccgggggtgggggtgttgtaggggtgtcattgagctgacgttgtcttattgtgaaaagaatctaaagtatcctaaacagaaaatttacttgttttacatttaatttggcatattaggaatgtaatggccagccactcacagcctagtctcatatcatgacttaattcccttgttcttgcctctccctgtccagtgagtcctgagcatttcctctctcctcctcatctcactgggttggtcaaaccagaagtgctccttctgattctc

SEQ ID NO: 60243 - DNA, 2686 bp, Homo sapiens
ccccaatcaatgcctgttcaatcaacaaacatctaacaggacattatgtggtaggcatattgccaggccgtggagatgcgaatataaataggaaccggcccctcatctgcaggcgctcacaacctagttaggaaacagtaaaacaattaagcgcgccgtggagataggcccacttgtcctgggaaatgaggggaagctggggtttgcagtggtttgattgaagggggactacatgttagaggcacagactgggtgcaggtacacccaaaggaacgagaagagtggaaggaaacaacatccacaaagtaaccacatgctggcgtatcgaaggccgtgatttacggttttgagactttacctcgccagcaaaggggggccagtctgttagcggtgcagattggaggggtgacattggaagctgtccaggaaaaagaaaatggaactggggagcagaaggcctacgcaagagggcgggacagacaggacttgtgactagtagctctggactgaggaatcctccctgctttctggtgcgggagagctagtggatgatggtgccaataacctggatggggaaagtaagctccctcctggaatgcttcattcacaacctccattttcagcaacatcccatctactggtgcttcctggtcgagatacaagtttcctgaaactgctgctctgttttgggcctcacccggccaacagctcactagctggcaagcagtagtatcaagatggcggccccctaggactggctagtcatgtgacctcgggtttcccaagtttgaagcccggcagtcctttcgggggcaaggttcacctgtcacgaaacgagtgtcaccccttcgactctcgcaagccaatcggcatctgagactgggccactgcggtgaggcgatcggaagattggtcctttccagtcgcctagctagggccaatcacggagcgtcccatacttcgcgggcccgcccgtaggccggggagaagcaggaatatcgtcacagcgtggcggtattattacctaaggactcgataggaggtgggacgcgtgttgattgacaggcagatttcccctaccgggatttgagaatttggcgcagtgccccgccttagaggtggggccttatttgattgccaagtaatattccccaatggagtactagctcatggtgacgggcaggcagcttgactaatgagtcctcggcgtggccggcgcagctctccaatcgccgggcggcgggccccagtctgagcggcgatggcggcggcggcggcggcggcagcagcagcgggggctgcgggcggtcggggctccgggccggggcggcggcgccatcttgtgcccggggccggtggggaggccggggagggggccccggggggcgcaggggactacgggaacggcctggagtctgaggaactggagcctgaggagctgctgctggagcccgagccggagcccgagcccgaagaggagccgccccggccccgcgcccccccgggagctccgggccctgggcctggttcgggagcccccggcagccaagaggaggaggaggagccgggactggtcgagggtgacccgggggacggcgccattgaggacccggtgagggaaggagggcgagcgagcaggccggcggctggccggccgggtcactggaggcccagagctcgggcgagcgggtggcaggcggggggtggggttgggcggggaataacgtggctggggccgggtcgggccggggatgggtcagcgatcactacaaggggcccgactggcttgattcgggcgtcacggttgcctagtgttgttctagagagggtagcttttcttttatcacgaccctcgcatggggcgagggaaatggccgagcatggctgaggccgcgctctggccgagagcagggcacagcccctgcgttggttcctcttaagctgtcctccataccctccccacttatattaggagctggaagctatcaaagctcgagtcagggagatggaggaagaagctgagaagctaaaggagctacagaacgaggtagagaagcagatgaatatgagtccacctccaggcaatggtgagtaactggcggttgcacgcggagcccgggttctcgggttggaagggttgtggggaggatggggaatgtggggttagatactcggcaccctggagctgcttgtctgagctattatgactgtgccgcggtcatagtccgttgtgtgttcctctgacctttgtgaggcagaacgtatattttggtggtggtagccttgtgcctccctttgtgcctgttataattgtgttgctctttgttcttagtctacgtctatctttctttgtagaggttgcgtgctcgcatttgaccttcaaatctaatagtttttcctccaattggagacgctttaggattctaagagaaagcaagctgcaaggggtttcccctttaatctagaaatgtggagtctcagcccacttaattttgctcactcttaaaagcatttcaaccaaagccattcattagggatttgatttggaggcaggagggattcctatactgttttaagtgtgtattaattctttcaatttattgaatatttagtgagtacctgctatgcactaggcactattctcggttgtgggtacagcagggaacagcacagaccaaaatctttg

SEQ ID NO: 60244 - DNA, 1883 bp, Homo sapiens
ccagctctgttggacgagttgtgaacaaaaaattatacactatcattcaccctttcggtgctttatttcctaaggcatgggatgggaacaatgagtatccgtccaacctacttcaccagcttgtgaaaaaccagagtgagagaacacatctgaaagcactgggtaatgatgaggcaggttatactgaaacatgcactgccagagtttgaaccaagttctgctgaagacctgtgtgaccgcggtaagtcatgtaaatatgaaccgttccccaatttgtaaaacgtattcttttcatgtccccaaactggtaggagcgaagagtgtcggggcgttattggagccgtttctcagcgctccacagtgcacaccaagagggcaggtgtcctcgcactcggtttctaaactctggctctgggcttctctagcctcgctctcttatttacagatgaagaaggctcagagaccgagtgacttgtccacggtcacacaaggagtagtgttacagaatcgattccagggccaccgggtctgtaaggcatttggcgcggtggccgttggatgagcagccagcaatggcggctctgcaatgtcgacaccgcaaagccaagccaaggcccatcacctagcggccggttcacgcactacaagaaaagtgccgtgaaaaaagactctgggtgctgcggcagacgggagccaatacgcgctaagttcgctctgctaattccttttttctattggtccttccaactgtcaatcaattatttgactgtctcttattggcttgccgtcaatcattttactcagtctaccaatcacacgctctttgccaagtgctttttttcgtcctgacgactctttctgagtctgacgaatttagccagttcctttattccattggccagatcagactcctcctctcgtttatcctgttgggggcggaagtgagaaagcccttattcgtattggcttagatttgcaagcggcagttgtctatcaaatctatcaagtcgcccttagcgctcaggaagtacgacaccggaaggggtgggctttgcgaagatggcggcgctggtgagtttggtgtggtttcttcctcgcgtagctattgtggagttgtcctttgccttcagcggctggaggcaaactgttggtaccagggaagggtggtgatgaaagttgcttcagggaggcggcctccctagagttaccgttcctgtccggtaacccaaggggctggctttaaggcgagtctgtgaacccgagtgtgaaggccccgagtctgggtgtctgacggagagagggcagtttcccaccctagacgttccactttcctataatcctgaggaaagaatgacttttctttacgcctcctctcccttctgtagggggtgctggagtccgacctgccaagtgccgtgacacttctgaaaaatctccaggagcaagtgagtagtgtcgcctctggaataaattagtcacggattggctttgagtttgtgtacttcacctcaaaactttggtgattgagatacgtgaatgcttccaaaaaccttagagtaaaatgatgtaatcaaaaccttttcacgccagaattctaagtaattgattctgcacccaagggaatacaagaaactccaaaaagaaattatatgaatagttttcctttattcatatagctaaggaaaccagtgcttggaatggtaacatgacttgccctttgggtgcccaggtaatacacacttatatacagatgcttctcgacttaacgatggaggttatggcctgataaacccattgtaattcgaaaacctcataagtcgaaatttaggcttgatgccgctgcccagcatcacgagaaaaggacggtttctaccgaatgcata

SEQ ID NO: 60245 - DNA, 1756 bp, Homo sapiens
gggacacatggacagagatcagcggggctacaggcacagcgaggaagcgtggtcctgtgcttgaaaatgatagggctgctcagaggggcagacgagcggatgggggtggtaggatgggcgtgcaggacagacacgcttcaccttgaatgggcttatggcctcccctcacctactcaacactttcaaaaaaaggaatggaaagcccaacttcagccaaaaacgaacgaagactgagagtatccacgtcccctcccactccacgccccagcgcgctagcccatccatcagcccgccggccgcggttctcccatcccacagccggcggggggccgccgagacccaggaccctccaggctgacagctctgagccctcacactcaccgggcctccccttccccccgggatccccgctccctgcccaactcggcgcggtccgtctaggctttccatacccttcgtctgtccggcgggcctctgcctttcccgttcccgtttctccctccacccccgcatctctcttcccccatcctcgcgcacgccctcttcctcccacacccctgtctgctatctcccagggctctcggtctgtctgtccgtccgtccttgtcccctcccccagccccttcccgtccctctccgtcccctccagcggcagtctccaagcgcctcctctcccgtctcgagcttccaaagagcaaggaagggaagaagagagagagggagaggagaaaaaaaccaacccagcagcatcggaaatcgatgcacttacacctcagctggaagcagggacgggagtcgaaccgcggccaccgagcagcgcgaggcggggaggggagggggcggctcttggaagggacttctccgatgtgttgattcctcttttttcccctcctcctccctccctccagcgctcgctccggggcgtcagggacggagacggaaaaaaataaataaataaattcacggcggtgagggaagtgaaggaaaataatcaatgctatttggctgcggctgaagtgtttccccggcttcgtgagggggtttccattgattcaccctgggcactcgctcgctccctgcctcctcctcctcctcctccttctcctcctcgccctcctcctcctcctcctcctcgccctcactcctccgcctcattcactggctggagtctaggcgtcccacacaatggaataatcaatacccaggcgcccggggctgccccactgagcaggtgcagcgacccgcccgccgcggcgcatgccgggagttgtagtctgttcgcgcccgcccgcctgcctcgcgggacccagggccgggggcaggccggccagcccaccaggtcgcctccaggttcaagccggtgcctgcaaagagggcaggcccctttaaactcttttccgtctcctctcctcttcatcctgtggcctgcagaaaccatacatgtgttttgttgttttgttttaaatcagcttcagaacaagccctgagccgcccaaggcctccttttttcattctcttcttcctgccttattattccgcctcccccatctccccccgcgaaattgggtactagaaccttctctaccgcagcaattactctttagtctctgagagcttctgcctcctccacacggttacatagtcccctgagctgggttgggggaggttcgggctcctcctcatcttcagtttatcgcttattaagtgctcctgaattttttttttttttttttttctggagacggagtctcactca

SEQ ID NO: 60246 - DNA, 1914 bp, Homo sapiens
tcatatctttagttcctggccaaaataccactttattctctgacagaaagtttctcacccactcttaccctcaacgttcatgccaggaggtattagatcccctctaaaactccagagtagctaaactggactttattacgcgctgcccccgcccccttccctccccccaccccaacccccctcgccaccattgccactggcctgcgcttagctggctgctatagcagatatctgttggacggtgtgaatggcttgtattccaggcccatctgcctgcgttgggggtgcggcggggggtgttggagacgggactggggcttgagctccttgcacccgactctccccgccgccttgtagccccagttcagctttaggtagagtaccgcaggcaccaagtgcagctttcctgtcgccatagcgacgggcggggcgagatggcaaagtctccctttggaactacatctcccatcatgcatccgcgcctcggggtgcctggctcagcctcaggcatgagacctgtaccagcccccgggagccgtgcggggccaacaatgaggagcagaatgcaaggggcggcctcgctcccctggccaccgcgggggtcgcggcctcccattacatagcgcgtgtctcgagccctggcctgctctcggcaccgccacaacgggcgtaatatggccgctggtgccgggacctgccgggcgcgcggagggtcgggccgaggtccgggatccggaactgctcccggcattcctcgcgagtgtatggcgtgggctcccttccccctctgtgggtcccgcgaggagactctcgggctttgaggtgagacctgaagttccgctggccggtagtgtagcaggaaagggcaggtcctcccgggtcgtgagccagtagcctcctggggtggcaaggtgtagagaggggggcgttgaaaggacacccgctacccggcctgctttctaggggtctctttggattgaggacatcagcagcagtggaagggattttactggagacctgtcactgtcagagccttaaaatatcaccgacggggccttaatgtcaccgaggtagagagaaaagggcagtagccctagagactattgcgacacagtgtgcccctcataagtttttccagggaggggttctgtactgagttgacgccccaggagctgagcaccaggctttgcatccttgggaactcagcaaacgtttgttcagccaattgcaggtagcatggcccagggcttgattgaggtggagcgaaagttccttccagggcctggcacagaggagcggctgcaggagttggggggcaccctggagtaccgggtcaccttccgagacacctactatgacacccctgagctgagcctcatgcaggctgaccactggctgcgacgacgagaggatagtggatgggagctcaaatgtcctggagcagcaggtgtcttaggaccccacacggagtataaggaactcacagcggaacctacaattgtggcccaactctgtaaggtgctgcgggctgacggcctgggggctggagatgtggctgctgtgctgggcccactggggctgcaggaagtagctagttttgtgactaagcggagtgcctggaagctggtgctcttgggagctgatgaagaggagccacagctcagggtggacttggatacagccgactttggctacgctgtgggtgaggtagaggccctggtgcatgaggaggctgaagtaccaactgccctagagaagatccacaggctcagcagcatgcttggtgagggagacaggcccttttgtgcttttcctgctccccacttttctcttttggaggcacctgctggaccatgcagtgggggagggcctccggattaaaaattttttttttaatagagacaaggttttgcc

SEQ ID NO: 60247 - DNA, 1691 bp, Homo sapiens
agagagctgccttgcctcttctaccatgggaagacataatgagaaggtgccatctgtgaaccaggaagtgtgctctcaccagacacagagtctgctggcaacttgatcttggacttccagcctccagaactgtaagaaacaaatttctgttgtttgtaggccacccaatctgtgatacttggttatagcagactggacagactaagacactctgttaccctgtcaggaatatcttcctaatgacaccattctaccatctcctctgtccttgattctcagggggcatcctgctcctacccagtggatggaaggagcctacaggagtaatttgatagtttggcttcaaggccatgtggctgctggtcttgagatgatcctggggctcttttgtgccactgaatctgaccttgtggtttcatgctccagatcacataatgactgaggctcttgcttgtgggtccctgacatcaacagccagacctcttttgtactgacctcctgctcactggtattgacaggtctcttcctgcttgaccagcactctgcttatgctggcacaggagctgccctgaatacgttcagagtgactgtgggcattctttcctctggggtgcatgtctaaggtcatactcgcattcttggaggtgggcttcccttcaccttcaaccactactgtgtctccttgatgataagctacaggaaaagaagagtagggtaactttaactgcactaatatttagtggtgatcccggcacccctcccctgacagagcaaagtctcggggctgaactgaagaggtagtgtgaccctgttttatagcagaaagaacatgcaggcattacatgaatactgagacccagacaccacatgcagcagctcaggtgcctagtgaggctcccactgcaaaaggcgactgtttcatcttcaataaagcaaacattagataaagcacattagaaggccaagtgactcatttctatttctggccttcagacatcagtgaccatggtgacctcaggctgtggacaggaaggatggttgaggggttggcagtggtaggatgggccccaaaccctctgcaggagaccctgaacaactttggaaagacttctgaccatttttgccttgaatgatgacgcaccagggccctctggtccttgccctcgttcagatctgactcctgtgctctcgtctccgtgagcttacctgtgagtacccctctttcccaccacattctcaccagtttctggatcactctcccagcagaactagtggctctcccctttggaatcccacaggacttggttcctctgcatctcaggagtttcttacattgtctcatctgtggttgttctgcccgcacccgacccctaggccctagagggcagggacccattcccagtgctatgcaaaagcctgacagtgatgactaaaaagctacaggctgtcacgtaacactgggggctgctagccccacctgagaccccactgggttgccagagcctaggtattcgatccctggttttctagatttgtcctgaaattcaaagctcaagctactgtagccaaatggccacagtgggcagggaggaggccggcaggggagggtaggtggggtgcaggagctctgcagaactgtgctgggaccagaggactgttcctgacttgagccaggctctggaaagcggaat

SEQ ID NO: 60248 - DNA, 2295 bp, Homo sapiens
actcaaactccagtgtccatgaataaagttttattgcaatgtggtcatccttattcatttatatattgtttatgtctgctcttgcagtacaatggcagagttgaggagttataacagagaccatatggcctgcaaagcttaaactacttcatgtccagctctttacagaaaaagtttgctaagccctaggctagagtcctcctggagggacattgacaggagctggaaacaggaggaaaacccttctctcaccctatgtccttcagccacgtctcagtgcctcttagtagcagaattgaataggaagccagctggcaagagagagtctgggaaaggctgttggcagtcccttggccctcacaccacaggggagggtggcatgggcccaagaggcaacaggcaaacagcacaacttacaagtatcttatactggccttttcctcttctgtctctgccctccctcccttagtaatcctatccacagtcatggcttctatcacatctctgtagacaatgcacacatccatggctccatgcttgaattctgttatcagtcttgcatttctaactgccttcttgacaactccatttagaaggcttcccttcatctcaaagtcaccatgtcaataggtagaattcatattttctatcaagcttgtttcttctcctctgttacctatttttgttggcaatgccaccattgtccctggcttcatgtttggatcctctctgtctcttttctctcgtgtcaaagcatttagaaagaccagatctttctctgtaagacttcgcaactattctctactttcccttcccagcaccatcacctggggttgtgccaccattacctcttgcctggattatagatatgacctcataatgggtattaccctacacaagtttcattccaattcctctcacacatagttgccagattaatcttctgaatcatcagattcaaagtccttttggtttccctttgtttatgcattggccagaaattcaaaattttatacagttctgtattagttcattttcacgctgctgataaaacatacccaagactgggtgatttataaagaaaaagaggtttaatggactcacagttccatatggctggggaggcctcacagtcatggcagaagaccaaggaagagcaaagggacttcttacatggtggcaggcaagatagagagccatgcaaaaggggaagccccttataaaaacatcagatctcgtgagacttattcactatcatgagaacagtatggggacatagccaaaccatgtcattctactcctgcggttttgcaaggtacaaagtccctcccggctgcttttatgggctggtgttgagtgtctgcggcttttccaggtgcatggtgcaagctgttggtggatctaccattctagggtctggaggatggtgctccactaggcagtgccccagtggggactttgtgtgggggcttcaaccctacatttccaggccccgactgctgtgtatggaaatgcctggatgtccaggcagaagtttgctgcaggggcagggccctcatggagagcctctgctagggcagtgcagaagcgagatgtggggaggtacaattcaagatgagttttgggtggggacgcagccaaaccatatcaagtcccagtgactacagtttggttttccaaatttgtttcctatttctttctttcctgtcctcttcctttccaatactttcatatagcctcttgttccttcaggttctgtgcactttatttatactctcccctctgccagaaatgtttttggtactttttaggattaggttaagttatgagtgagagaaaacccagtgtaaggggcccattgaggttgcaccagagcccctgtgacccgtttaatcatctcccacagcttctgcacatcgagagaagcaggggcagcctttagctgaactaggtaacagcctagttccattgtctgaaatctgggcaaactgtgaggtgtagtttacactccagaactgacctttgggaccaggctaaggctggggctttgctgaaacattcccttgcttgtcctcctcccttccctgtcttactttccacactcccttactggtttctcctgggagcatttttttaatttttatttttgagacaaggtctcactttgccactaaggctggagtgcagtggcataatcatagctcactgtaacctcaaactactatgctcaaaggaacttcctgcctcagcttcctgagtagctgggactacaggcacacatgacctgatcagcta

SEQ ID NO: 60249 - DNA, 591 bp, Homo sapiens
ctgaggtgggagattgcatgaggccaggaattcgagattagcttgggcaacatagcaagaccctgtctctacagaaacttaaaaaattagccagttgtggtggtgcacgcccatagtcctagctacttgggaggctgaggcagaattgcttgaacccaggaattcgaggttgcactgagctatgatcatgccattgcgctctagcctgggtgacagagcgagacctcatctcaaaatgcaaacaaaaacaaatagggtagaattgaaccttgtattagataagtggctcacctccacaagctaatcattaaccattgttaaacaaagaaagaaagaaacacttgtcccctctggaatatactagagagatctgcccaattccacataatctcttccagaaaatggaagaggagggaatatttcccaattcattttataaaacttgttttatgctgatattaaaaccaaataaagacagtacaaaaaaagaaaaaggaaagctacagtcctatatccctcataaatgtagatgcagaaacccttaacaaaatattagcaaatagaattcagcagtttataaaaagcagtata

SEQ ID NO: 60250 - DNA, 994 bp, Homo sapiens
aatttgatgagtttagatctccctccttgtgtcttaatcattccatcagatttttgaacatatttttgctcttttctaaacgtgtagacaatgttacgtcatgcactgacaaataagggtcatcagcggacatatgtgatggcagggatcccacgacttccctgagaagatgagtctcctgccctttcctttgcactaccttccagatttcatttccactgtacttagaaatgatgtcctcagccctccactcatggcctccggtggattctggcagtcaggactgccccaggatccccacaaatctgacaaggatttgtgtgacgcctttgctaggtctcattggttggtagtgagtatgtggtgtgttatcttcccttcttttaactaccttgtctttgggggtaaatgcaaagcaattctgtacaccttgcctctctccatctaagccaagctgagggtcagagtcctggcatgactatcctgccctgtggtcaggcacaccttctggctctgctacaaggcaaacctggtcttctcgtttctgctagtctgcaaaaaaattaacactcaactaacatgacctttacaccacacttatcaactttggcaaagggaagcctgaactttggaaactgtttagtagggttggctgcccaagaagtcaaagaccagcctagccaatagtatcaaaattgactgtgttctttacagccataactaacacttgttgttgttgttgttgtttgttgttgttgttgttgtttttgagatggagccttgctctgtcacccaggctggactgtagcggcccgatctcagctcacggcaacctctgcctcccaggtccaagctattctcctgcctcagcctcctgagtagctgggactacaagcacatgccagcagacccagctaatttttttgtatttttttttttttggtagagatggggttttgccacattggtcaacctagtctcaaactcctgacct

SEQ ID NO: 60251 - DNA, 1245 bp, Homo sapiens
tggtggactccatggcgaccacaggcctcacctccatgggcagtctcaaaacatttgccctcctgtgggctgtcacacacatagacccagactttcttggagaaggaattctgaagaagcaaaagcaaccaactcaaaacccccacttcccagagaagaaaaggtgggcaagcagatgcagaaaggcagcagccaaagcctgcgggttcctgcaagggccaggggaggggcgagccctacaggcaacttgaacggagagctcacccgccagcccggaaaggcaagccccagtcaggcggaaggtagatggtggaggggcgccgcggcggatggaggtgcccagggccacagaccgctcacagcggtaccggggcggggagcagggcgggcagggaatcggcccgcccttcgtcctgcccctcgccctactctgtcaccgcccctgggaagagtggaacccatacttgctggtctgatccatgcacaaggcggggctgctaggcctctgtgcccgggcttggaattcggtgcggatggccagctccgggatgacccgccgggacccgctcgcaaataaggtggccctggtaacggcctccaccgacgggtgagtgctccggccggagtttctgaggccctggctgcctggaaacaggcactggcctctcatcctcggcctccggtgcccctgtcctcagaccttacacgctgccaaagtctggccctggaaaaaaggtagccacgtggtccgcctgaagccactccgaatcccctagccctggaccctcccttgccagccctcctgtccctgctacctctggcacaactgtgccacctctgtgcagccctatcgatctagtctccccagtgttctgggctgccccagtcaaccagcgccacctagcgtctgggaagaccagaaactggaaatccaaggaaatctggatttcaaaatactatcccacggcctccagcactttgaaaatgtaccagacattctatttgggcaccggaaagtcccccggaacccctcccccttacctagatgggacaccagagccatatgtcgagatttttgtttaggtcggtacatctgggccgaccttgcccagcctgtttctcacccaccattcttgtctatcctggtcctcatttctacaggactttgctagatgccagctcttcacaaaactaaaatacaaatgtaggtaaaatgctaatagctgacaaatgcaaaatgtgtaa

SEQ ID NO: 60252 - DNA, 1186 bp, Homo sapiens
ccctatcacgtctctctcccaggctgctccagcctcacctggtggactccatggggaccacaggcctcacctccatgggcagtctcaaaacatttgccctcctgtgggctgtcacatacatagacccagactttcttggagaaggaattctgaagaagcaaaagcaaccaactcaaaacccccacttccccaagaagaaaaggtgggcaagcagatgcagaaaggcagcagccaaaggctgcgggttcctgcgggggccaggggaggggcgagccctacaggcaacttgaacggagagcgctttgatcacccgccagcccgggaaggcaagccccagtcaggcggaaggtagctggctgcggggcgcggcgactggcgggcggcgggcggcgggaggcgccaaccgccacagacgactcccagctggctgagggcggggagggagcaggcagggaagcggcccgcccttcgtcctgccccttcgccctactctgtcacctcgctggaaggagtggaacccagacttgctggtctgatccatgcacaaggcgcggctacgaggccactgtgcccgggcagggaagtcggtgcggttggccagctccgggatgacccgccgggacccgctcacaaataaggtggccctggtaacggcctccaccgactggtgagtgttggtgccggagtttctgaggccctggctgcctggaaacaggcactggtgtctcgtcctttgcctccagtgcccctgtcctcagacctcacataccgccaaagtctggccatggaaaagaagtagccacgtggtccgcccgaagcccctccgaatcccctggccctggaccctcccttgcctgccttcgtgtccctgctgcctctggcacaactgtgcctcctctgtgaagtcccatcgatctagtccccccagtgttctgggctgcccccgtcaaccagcaccacctagcgtccgggaagaccagaaactagaaatccaagggaatctggatttcaaaatcatatcccaaggcctccagcactttgaaaatgtaccagacattctatttgggcaccggaaagtctcccggaacccctcccccttacctagatgggacaccagagccaagtgtcgagatttttgtttaggtcggtacatctgggccgaccttcgccagcctgtttctcaccc

SEQ ID NO: 60253 - DNA, 612 bp, Homo sapiens
ctcgcctcccagatccagccatgccctctcccagcatggccctaggtcccgagtcagcaaggacaagctggaggggtcctgagccggtggggaatagagaaaggccctgcaaggtgcccgggcccacaaacaaaagaaatggcttctgcccacgggcccgaggattgagtagatggaaagcggggacgctgccccccgccccgaaggcccggacaccgggcgacgcacaccggccagctcacgcgggagccagcgagaagggtcggcgcgagcgcgcgcggggtctcacgcggctcggcagcgcggagcgcatgctcagtccggcagctctccctgctgggcgggggagccggcgctccgaggcggggggaggagcgctcaagcagccgcccctgaccggagcgggctcggccgctgctgcagcgctcagcgcccgggccctgctgaagccgggtctagcatgtgccgcggctccccggcggcggcggcggctcctctgcagcagcctcagcagcagcggccgccatggccaagcccagcgtggagctcacccgcgagttgcaaggtacgaggctgcctcggtctctgggacgccccgtccgggagcatccc

SEQ ID NO: 60254 - DNA, 932 bp, Homo sapiens
gccaggaggacatgcagagttgagaccacccacgctcccactgtaccaaggcattgctgcaatatcaggcttggatttttttctgctagctttgatgttggtccctgaactctgacctccctgctctggatttggatccttggactgactgcccctgtctgtatggtagggtggaaggagcactgaccagaaagtggggaagccttagtgtccaaggctctgccactaacagttttgtgacttaggcaggtccctcagtctcagcaggaggggctggaatagataaagtctcttctgctgtggtgccagccctgatcctgtcccccttgggcctctggcctccctttcccccatactaggtgatcctggagtccatggtcagcctgacacaggagttatgccctgtggccatgcgggtggccgagggacacaacaagatgctgagcaatgtggcggagcgtgtcactgtgccccggaacttcatccgaggggcactgctggagcaagcaggacaggacattcagaacaagctggagtgagaggcaaagggcagggctggggctgagctggatttggcccagatcacttagggacttaggactggagagctatcagcaatgaataatgaatggcacaatctccattacaaggatcaatctttaaccaagtgcaaccttgctatttagggtctggctggtctttgccctagaaatctaagtgctgagctggggtttaggagccaagtttgtgcccacacaggtgtacacacacatacccacacaaatacaccaggaatgggatagcagggcctcctcggaggcatggacaaagaaaagtacctgagttgggtgcatggaagcactgtcttcctcccagttttcattgcccctagagttctttcattctgggtctgggtgccaccactcaccaaa

SEQ ID NO: 60255 - DNA, 570 bp, Homo sapiens
ccactgcactccagcctgggtgacagagcaagactccgtctcaaaaaaaaaaaaaaaaaagaaaaagaaacactgggtgaactgaagtctacatttccataaatgtccaagcccaaaggggaatgctctgagtggatgggaggtggggcttcctgacctagatgagatgtcccacgggactttcctcccagcagatgccagcacctgggactcgtcaggagaatgggatggccacccgcctggatgaagggctggaggacttcttcagccgaagggtcctggaggaaagttctaggtgtgatgcctaaacacactcccattttcagcaggccccaaggccctagaagggctgctgtgtcctcccagctcccatgggagtctccataacagcagtgcccaaagccagtctctgtgagaaatttccccacattctcatccttccccacccagccctcagggcccatgacctctgcgtcttcccaggacagctgggaagaatggggccagagtgaaccaccacagtggggttggagagcaggtgtggatgagagggaggtggggggcagccct

SEQ ID NO: 60256 - DNA, 1782 bp, Homo sapiens
ggcctcccactcaagacagatcccaggagcccaggcctgctctcttcccagtgggagcccatcccccaccctccttgcagctctcaccaacctcaagggccctttctcctgtatcttcaggatctgttcagcaagtctgaccctttcatggaaatctataagaccaacgaggaccaaagtgatcagctggtctggagaactgaggttggtgcctggggctatggggatgaagggagggagagtaaagtaagaagacacagacaggagctgaccagccacctggtgcctctccaaggtggtgaagaacaacctgaaccccagctgggagccgttccgcctgtccctgcattccctatgcagctgtgatgttcaccgacctctcaaggtgaagtcccagccaagccagcacagcctacttagagcaaccaatctgctatctaagacctttcccctgcatgtggcaagcctccctcctctcccccaagtgataatcacatcccactgtgggataaataataggtcacagctcaatgttaaacttcccacatgtgtgcattttatcagtggccaaagtccctagcagactgagccaaagaacaaagttcagcaggtggcctctccgggcaggctgaggatgtctgtttgggcatggagactctaaggcccaagtccccctactccaagtccccgagtccccctactcaccgtgaataccgcagagcatctccaacctgaccccacccctccccctgccttctcagttcctggtgtatgactatgactccagtgggaagcatgacttcatcggcgagttcaccagcactttccaggagatgcaggaagggacggcaaaccctgggcaggaggtgccacaaataccccacccccagaatcccacccagatccctgggagaatcctgagggtgatgctgaagagaccaccataggtgataggaagtggagagggtggaaagcacctgggctcagctgaaggacggaaccatgggggtcttgctctgggaggctctgctggaagggagaaagaggggtcacctgatggacttgtgaccctgagcttgtggggtggggtctagatgcagtgggactgtatcaaccccaagtatcgggacaagaagaagaattacaagagctcagggacggtagtgctggcccagtgcacggtaaatttcacttcctgcttcaagccttgccccagcccctgcccctaccacactctcaggttcaacccttcccttgtttcaaagaccagtttctctgcttctgggaactggaaaccacccccaactgcaacccaaaaaactctggctcccccatgttccccacagaagccctacccaagctccctcctcaaaggaccaccccatcccctcgccttacccctctccctacctccaggtggagaaggtgcacaccttcctggattacatcatgggtggctgccagatcagcttcacggtaaagactcagagggagggcacacaggcaagagggaggggctgagtccatagtgaaaggaaggagcccagaatctccactgccccaacttgggctgctcatgagccttcgcattgtcagcttatgcacccccacatcattatgtggctacctgtagcctccccaccactcatcttagtcctccctacagatcccagctctggcctaggcaatctggtggctctcatggttgcagcatgaccttcttcccacccccacccaggtggccattgacttcaccgcctccaatggggacccgaggagcag

SEQ ID NO: 60257 - DNA, 1183 bp, Homo sapiens
aaactgaggtgggagctgcaaccctcctccacctcccattcactgtgtcaccacacttccaccccccagtgcctggcactggtccctgcagagctcagcgtgctagtcatgtgggctgggtttctgtgttcgtaaggggaggggacccctctccagaaaatgaccagcatctaaattcgggcatgacttgaggacccaaaagctttggggatatttgcgcggtcatacagggcgtggctaggaccagaaggcgctctggtaacgatgcagagaaccgtgcagccgcctcctgggcggagccaccccacccagcccccactacaccacaaggtgctctgaacggctcagaggaagaggtgggaggggtccccggacccggggccgctcgaggttagccggtcacagcgagccttgtagagatcgcgctcccgggccaggcgggccacctcggcccgcagcgcgtccagctgggcggccaggcgggcgcgctcggcctccagcccgcgccgctgctgcagccgcttggagcgacaggcctgcgcgtagccgcggttcttcagcgtgcggcgcctctgcttcagccgcagcgcctcgtcgcgcccgcagccccgcagctgccggtttagctcccgcacagacatcgagaccagcgccgcgtcggaaaaccgctctgccagctgcggagggagaatgcagaaaccgggtcagcgccaggtcgcacccggctctgccctgagggcccgacgctacctggctccgccccgggacagccccgccccggctcccaccttcaccggaaggctcgcccttccacgcagtctgtttcggtccagagcccgccccaggccccgacgctccccgggccccccagctgaccgttgctccagtcaggcgggcgccccacggtgcagggccggccacggtcaggcgagcccgtcgcgcacctaaaccccgggctcgtctctgggatccccggcatccagctccaggcccgggtgtgtccagtggacccgcacccagacagcccccaaccctccaacgcgctgcgtttccctgtcctgaagcctgcaacccggtgaccctcacaggatttggattacatcctaatgcccgcaacacccccatctgtgtctgtaattaataggatgagtcccaatccttcctgagaaggttgggggctggg

SEQ ID NO: 60258 - DNA, 3568 bp, Homo sapiens
gaaatctgagaatcaagactgtttctgttgcaagtggcagaactccaattaaaattagcttgagcaagagaagaaatgcatcaattcctgtaactgaaatcaggaatccattgctcgccatctccctgctctgcttcctctaggctggcttctgtctcagccaggttcctgctttgcagtgccaagctaacactcagcagctccaggcttatattctaccagctcagcaactcagcagaaagagagctaacttccaaagttttagaaaaagtcccagagagggatctcatgcccatccttgaacatccttgattgctgtggccagagtgaggaacacaaaagttggctaagctgcaagcctacccccaagaggggtgacatcagacccacatgacaatacagactgaggagatggttccccaaaagaaaatcagggtgctattaccagaaaaggcgagtggatgctgagcagacacccatcatagatatgctgagtttgaggtgctatatagcattgtgggtgatatccagtggtctcaggttggagagagatgtcccaatggaggtatagcttgagaaatcacctgaggactttatgatggtagttgggtgggcagatgagtttcctcattggattgtggagagaaagaatgaccaggccgggcgtggtggctcacgcctgtaaattccagcactttgggaggccaaggcaggcggatcacgaggtcaggagttggagaccagcttggccagcatggagaaaccccgtctttacaaaaaatacaaaaaatcagccgagtgtggtggcaggcgcctgtaattccagctactctgcaggttgagacaggagaattgcttgaacccgggaggcggagtgtgcagtgagccgagatcgcgccactgcacgcactccagcctgggtgacagagtaagactccgtcaggggaagaggggatgtgccgggggaggagaatgaccagatcagaggaccaaggaagagacccaggggtagagagactccaccatttcatggcaaggcagaaaggagccttgatcaggaggagaaacggggatttaggagttggggactaagtggaccttagcattgggcacttggactacagaaaggcccaggactcagggtgtcgcgtccccaggaggaggaactggaaaggcaatgcccaaccccctaacttctagacgtctggcccctgtagtctcccgcccctggcctcgcccctcgttcctagcttgtttgccacctagtgtctctcccgggagcaagagtcctcaaagttacatcatgtgcggctgggagggcggtggcggatggggggcggggcctcgaagtcgggggccgaagagtggacccagtcctccaatgggagagatgggtttggcggtttggaggcaggggttggggcggcggctgggctgacctggagcctggagccccggggccgagggagctggcctgccagcggggcggaggaaagctagtgccagccctaccaggttccgcccccgcgcctgcccccctcctttttaagcgcctcccgccagcctctgctgtggctcgcttcgccgcgctccctccttccccgccttccatacctccccggctccgctcggttcctggccaccccgcagcccctgcccaggtgccatggccgcattgtaccgccctggcctgcggtgagtgacccccggcccggggcccacccgcaccttccgctgcgctcgccccctcggggctgccagtggcgctctcctgctctcagcctccgccaggtttcccatcctaggcggaggcgggcaggggcgactgctgtgggtccagcctcccgcgccgcgcgtctcttgggagggcagccggccggtgctcctcgtttccgcctgcacctccccttctctgcctcgctcgcctctgaccgcgcgatctctatctgccactctcagaacttcctctctctcctcgctcctctctgctgagccaggtctccgcatatcctcctttccttcccagatacctccctcggacctctaacgggctctcagccagcgccccagggtacttcgagaggcagcagggccctggggacaagggtacgtgagccccgggagactaagctcagagccccctaaagaaggtggaaggttaaatatccattcccggcctctcccggactggaaggactggaacctggcgggaagtccagagcagcccgagggacctgggcccaggggagggaggcaagcaaggtgggaggagggcgccaagttgccttcgtttcttacatagctggcttcttcctccgtccaggcctggagcccccaggctcgtcctgtttgtctgcctgtcctcttagtctcctatttattctctgaggcctctcttctcagcttttgtcccagagtcggaagtgacccacatctgtcgcacagcccgttccacttgggcagcccttgtgggtggtctctgaaggaaacgtcccacttagagggctgcaagagggtgtgggggcttcacaagagataacgtgagccaggctccagggagagagaggctgtcctcaagactgtgtgcttgaaaactgatgctcacggagaacttccctctgaggcaggaacagacccaggtcccagtagccctcctcccctgcccctggggccacactgatcatctatcctgctttagcggaaaccaccccagcttctaccccagacagactcaagctcccgtatccatgctctgagctttcttccttccccaggctaacaccctctgagtctgagctgccagcaagctgctgttccaccctcccaccaacaccaaagctctctaggcatgtggcctctaggaagaagagccaggggaagcacggggtcacgtggtcctgggtgtgggggcagtttctgatgggcgaggccttgatagaggaggagagtaacatccccttcatggtctttgctctctcgggtttactccaccttgagtccaggccaatcagagcagacgttgcttctctgtctcccagggccatgagaggacagacaacaggacgctgacctcctgagaattaagcccatgaaccccagccagtgacactcattccccagtggtcaaccttccgcagagttcagaaatacttacccgagggcaacattttatgcaaccattgttggtccaagtgggcagcagcagatcagggcctggaagcccagcatccagtcacctattctctgtgcaagagccctcatctagaaacctggcactggaaagactgtgacctttgcttggggctttcatagtcttacagcatacacaccagaaggaaagaataaacacagctgccattttaatttataaaaaactatacttgaaaatggaaataaaatggatgaggcttcaaataccagacatatgaaattgtcacctgggcccaacttcttgtcttgacacttgggccaaaggcccctactcatttcttttttttttttttttttttttttttttgagacagagtcttgctctgtcgcccaggttggagtgcagtgtcccgatctc

SEQ ID NO: 60259 - DNA, 672 bp, Homo sapiens
taaagggtatttacttatattacatctatagctcctaccctacacacagaaaaatctgattcttacagacacaagacatgagagtattagaacatcccatagttacttagtggctttctagtcaacacattttaagtccctaggtaaattattagcacactctccatttccatcgacacagagaatactataaggcaatgttcaaacacatgtatgagcatcagtcactccaaacacggaactgtcccaggagctctgtgtggtcaccaagctgggagctgcagtagaggagaggaggacagggttagctagagaatgaaaacactcctttccttctctcctcagcagcccagcctgccctctagtggagatgctaatgagcaggaaacaggccaagacaggtcaggcaggaagtcaactagctgacatttacttagcaattaccagaaattgtcctaaaatgggtgctgaaggtagaaaaacctctctgtggctttaagtgactttaagtgcaactggagagagtagaggttacccaaatgaaaagtgcttcacaaactgtaaccacgcaacgtaccaaatttcaaaatcaagacagcataggcaaaatttagtctatcaaaatgacttcaccataattatttttaaagatatgccattttatttatttca

SEQ ID NO: 60260 - DNA, 2849 bp, Homo sapiens
gaattgaacaatgagatcacatggacacaggaaggggaatatcacactctggggactgtggtggggtcgggggaggggggagggatagcattgggagatatacctaatgctagatgacacgttagtggtgcagcgcaccagcatggcacatgtatacatatgtaactaacctgcacaatgtgcacatgtaccctaaaacttagagtataataaaaaaaaaaaatgattccgtcacattctgggagaacgcaggtaaaatcaatcaataaataaagatcccgattttccaggctggataacccagaaaccacggaatcctaaagtctcaataaacgttaaagcacagatagtaagtaatctggcaatagaggatgggcgcccagcagaccgcctacataatcagtggagccgagtgcaagatgaaaataccaggcacttgctttaaaattactaataatttcaagaccgttaacactagaacattaaaccaaacattcaggacccttctaagcgcagaggccatcaaagctagccctggtgacaagctcaggtctccggatctagagactaggagacgtcgcccgaaagctggccaaaccctcgccctcactgggagaggccccaggagggcccaagaaggccacgagccctcgctcccatccctgccctcaggagcgggcggagggaagctcgcagctttcccaaggaagtgcaggctgcagggaatgaagttcagctcggaccctgagcctctgagcccgagacagcaaggtcattcaacccacacgtccccacccagccagggcgaggatcagagatgtggcaactcccggccttggactcaggcttgttactcataaacccgcaggagggggcaggagggggcaggaggcggcgagcgcgcaccctggacccgcggccgggggcggagaggcaccgcgaggacagagggactagcgaaggtctgcaaatcccggagggccaagggagcgtcaaaggggacagcggaaccggaaaagctttgacagaaagacgcgtgtattagggaacgtctgcaaagaccgcggcggaaagccagggattgtcttaaaaaattgtcagaccggataaagggaggtctaaaaggggaccgtcccaagagcaaggcttccaaaagctaagcccggaaggacggtatggaggtctactgggacgctgggcaccccttagggcagaaccgactggagctgcggccagcgacagaagaacggctccagctggacaggggaagcagtggggagaaaggaggcccttgggcactgtctgaaaagtgcgatgccaaatgatctttagggacagacagtaaattatatcccttgctaaaatacctctcggtagcgaaccaccaaacgtttcttttttaagccccgcctctcagccgttacgcctagttcggctgtctctgattcaggaagctggcagttcccacttactcctccccagcaagagctaacagccctccttgggtgtgcactttctcctcccctcaggcacctcgcgcattctcccgcctacctatcaatcatcgtgctccgctgtccagttggctggccaagggggcggggccgtcgtgtgacgtttgcagcccgccggccaggaagccgcgagatgcgtgacgagcgaagcgcgtgacggaggagcggttggccaacgcagtggcggcagtcggtgtaaacaaggcctcgcgccgctgcgggtcctgcgaccgctcctggctggtgggtggtctcgcgtggggcggttaccgccggcttcagtgggaggtgcttctcggcttcctccccctcatggcgtacacacccccggcgcaccacgtgggcgtgaggcgaggaaggaggggtgttaggccaaattctattttcattggctgtcactgctgccggcctttgtaagggggcgctctgattggtcgataaggtgggggcgtcgagggtctttgagtcctaaggcttctaattggttagatgagataagctagtgaagcgctttcttccgagagggatttcgattggtcggtcagagaggttacctggaaatccaacaccgcccaacacccctcccgctccccagtccggggacttcgataggtgagtttggtgtagaaaacaaatctttcttcagttggtgagctagggtagcgcactacggttcactcttgctttctttgcttcacaggattggagaaggtttgtgttcccgacgccttggtagttggcataggctaaagaaaagggatctcagccccgaggaagggtcaccctcctagagatagctactaccccgtctcaggagaccctggtatttctagagcacgctttgctttcaccaaacccaaggaggtgacaggaggagcccccgcacaggacctaagaatgctgtgaccagaagatgggatcgcggaacagcagcagtgcaggatccgggtccggagacccctccgagggcttgccccgaagaggggctggcctgcgtcggagtgaggaagaggaagaagaggatgaagatgtggatctggcccaggtactggcctatctcctccgcaggtaacttaccctctggtgtgacccccagcaggtgctaccacagtgccttgatcccaactccaggcaggaaaattacagaggttaggaaatgggattcgctcaggacagctgttctgtttgagctgaacagcctttccctgctgggcacccatggcactcagctccatacccagtaagagtggttcttacctagggagggtcaccaagaggacctgctcatgtgtttgaggggctattcaagggagcctgtctctgtgactacacaaa

SEQ ID NO: 60261 - DNA, 1823 bp, Homo sapiens
cccagggtaagggtgttttaggcaaagggattattagcaagggcaaaggccctgaggcagaaatgaacatgacacatctgagaaacaaatagcccaaatatttgcaagtgtaatgaatgaaggggcaagcagtagaaagtggacttaaaggggagacaggtgcgacagccttttggatttcattcaaaggtcaacaggcagctgagaaagggttttaagccagagagaggcatgaacccgctgctccgtgagagtgggttatagaatggcatctgcagccgtggtccaggagagagttggtccgggcttggatagggatgctgccagctctggtgccggtgttgctacaggtgcgcaggatgtcggcagagccagaggcccacgctagcaaggctaggaaagacaggccaggtcttattccatctctagggaaagacggaagagccctaagtaaagcttatctgtcccaggcggagcaggggaagaagagagcaggtggggagccagttgggaggcgggaggtggaggttgggacgcggagagactggcttgggcttggcgatgggaggacccggacccgccgtcctcaggcggcgggcggcaggtggcgggaggcgggaggcggggaccgggccagcggaggtggggagcctggaagctggccctcgcgaggcggcgcggggagggtgggtgaagagcgcctgtgcgcgctaggcggagcctcacccgccgccctcctctgcggcaccgccccttccatggcagggctgaccccgcctcctccatccgaccccgcctcctccagccctccccgccccactacccaggaaggcggagctgggtgcgagcgccctaccgctttcgctttcccttcgcggtgcccactccactccttgtgcggcgctaggccccccgtcccggtcatggccatgctcagggtccagcccgaggcccaagccaaggtgagcgccgcggggtctagaaagggcccactggggaggcgtggctggagcggccgggggcatccccgacccgccccccaggctcccacgcgagtcgggggcagtcggccgagctggcgcgcccggagcacctgcgccccggggagggcggcgactgctgcctgcggggagaggcgaggcggccgtggttctgcggggtgaggtgaagcggagagctggcgtggaggggaactccgctggcctggggccggggccacacacagactgggtgcgggactgccccagctaccttctggcctttccctcagggagggtcccggggcccaccccatccctgtcctacttgcagaggactctcagcacccctcctcacacctgccaggcgaccccagagatctgttctcacgtgaacactggcccttcaccgccaggaatgttctcatcccccatatccagccccagggatacccactccactttccgtagatccaggtctgcagagatccaccttctccaccaccccaacccaccctacaggcatccatctcgctttcttcaggtctggccttagagggatcccctccacccttccccaggtcaggccctacataaccctaagggaactgtcctcaaatgaactggccttaaagccaagtttctgaagggatgcgtgtgccccacaggtggatgtgtttcgtgaagacctctgtaccaaggtaagacatgccccatcagcgtggccccacccctgcccaactcctactgctcaaccctgcctcactacctaggacgggcatttgatgctgactcccatcctcctccacccccacctcacacacagacagagaacctgctcgggag

SEQ ID NO: 60262 - DNA, 1188 bp, Homo sapiens
cttcctctggctacgccactcacctctgatcgttcacagctgcattggcatggtagtaaccagccaccaccagaccggcctgtgctccccacacatccacctgtcgtaggaaaggggccatcagtaattaaattgtgccgctggctttgtggatgcgcactgctgccaagggaccggggatgaacttgggctggggtgttgggtgggttcgcggtgggggatgggcatccaacggaggcacctggttgagggcgacctccaacatgacggacagggccaggtggctgtggaagaggggcacacagtcggtgaggcacaggcattctccagaccgcggcgctggcgccaaaaacagcccgttgactgcggcgtgtgggtaccgggcagcatgcaggcacatcttcacgtaggccagggccgagatctccacctcccccatggcgagcgaggcctggacgggaagcagcaagccggattagtaccggattaggcgagccggtgcctagctcgcgtccgtgaagctccctccagcgcttcggcacgctctttgacccttccccgtgccctctcacttcggttcggcgacaacgctaactcgactcgcaggtagcccgccggctcccggcgccctgggtcccggagtccgcccccggcccagtccaggaggaggtcccgattgcatccgagccccgccttcccgcgcccctagctggcggccgcgactctgcgcctgcctgggagacagaccaaactgcagctccctgcagaactggctcctggagtcccgcccacgtggtgctccttgatagggctaaaggctttcaatttgtccaatcagcggccgcgccccaacgttgccccgcctttgtctccagcggactggaaagaacccaccattgtgaagcacagaaaattgcccgcactcttattggctaggttccccgacttccgctctcggttggtggttggctttgcctgttacctgtgttgcccactaccactcgctccgccgagccccaaggatggatcgctatcccgtagccgggtgttccggagcgctgcgggcaaagcagaccgccttgcgcctattatgggttgagtggctctgtactctagatcggctctgtcacttactaatgggccgtgttgccttcgcgactgcaggttttcttgcccttggtttatctt

SEQ ID NO: 60263 - DNA, 1407 bp, Homo sapiens
aggggaatcacagaatatgctcaatgagatgtctgacaaatggaactggaagggcctttggaaatcactgggtccaagacttgcaaatgaggaaactgaagacctgaaaatgaaaggacttgcccaagctggtaaatggcagaacgaaggttaggactgtgatattcctgctttggaagccatggtttttttcctccacatcaaaagacgggagaagtgccagaagtcgggagagtcataagaaaggtcagattaaaggtagctatcaataattccggggttactttgggtgaaggcttggtaagggaagtagggttaagtctagggtgacttgggggggtcattctgagaggctgttatcctcaagtattggtccaagattctgggtcaaatcgctcaaatccagagacttacctcctggaaaagattctgtctgaagacctccacctacacagagagcagtacccggatgttggttaagggtctgggttgtcaaaagcttccacccacaacagggtgccctcgaactgtggctcaggcctttctcaccacaaactagctttccctggaagctcctgctcactgcagtcagaaggcaggaatctgggaatccccgagaagtgaaggcactagcgagattgggggagttctctggcactgcttggtcccctgaaccacccagcttggcctccacccaagagggttctatgaccccttcctggcctccgattccccattacctgtttgcgggcttccccgctcaggcgcaccccacacggcttggccatgctgcttcagtcgctagatctctggtctcccggctagtcgcccgggctttcgctttcactccccaggtccaggcccgcccccctcaaccccgccccctttcttctttccgcccccctcctcccgctggcaggccgcaagcagtaggtagcccctcagccattcccagccagttgccactaggagaggcggtgctggctgggtcacagtccaggggctgcccgagggaggggctagggtaagtgggaccgcggagactggagcgggggctgtccctcggagaggggcggggcttatagctagggccaactggaagtccagggttggggtaagagaggtgggagtatggcaaagggggtattcagtggcggggctcccccaagaaggctcgaccgcaagtagcggacggagagagatcagagcgagtgggaggggcagccagagggagcgcctggggtggagaaggactagcagctcttagaagagagcgggcaggggttgggtgagggtcttccctctgccttcaggacagaccggagatggggcgggactcgctcgagaggggttagggccggccagagtcggttcccctgcagggtgggacttcctcggtgaggcccg

SEQ ID NO: 60264 - DNA, 1187 bp, Homo sapiens
agaaaggttttgagctgaataggataaccccgcgcctgcggctatccggaaggggtggaaccagattgggggaaggcggggaagagcgcttgactgagggaagatgctggcgcgctctgagggaggagccaggagccatttgccttctcattggttgggacctggccctccctcttggccgcgccccctggtttcctgacaccgctccaaccttaaccttaagccccgcccgttcctccgaaattgggtcgcagtcccaccctctctcctagtacttcctgttctcggctaaccctggcgctgggccgggggctggagagtgaccgtggtctgagtgacctggggcggctgcgtgggccggggtgggcctcaaagccgggcaccagacgggaggggcggcgctcgggccgcgcgctgcccgcgccgggtcctggcgggcggcgaggctggggctgactcctgcctcaggatgccgggggaggaagaggagcgggccttcctggtggcccgcgaggagctggcgagcgccctgaggagggattccgggcaggcgttttccctggagcagctccggccgctactagccagctctctgccgctagccgcccgctacctgcagctggacgccgcacgccttgtccgctgcaacgctcatggggaggtgaggcccggccccgcttggaagggggacaccagggcctgaggcccaggccacgctcacacctctctgctctccttgctcccagccccgaaactacctcaacaccctgtccacggctctgaacatcctggagaaatacggccgcaaccttctcagccctcagcggcctcggtactggcgtggtgtcaagtttaataaccctgtctttcgcagcacggtggatgctgtgcaggtgaatcccctggccttatgggagagggggctggggtttggctagaaaaggcctgaggttgtgctgaatgggaaggggtccagccctactaggcaggaaacctcctgggtggtgactcgtttgaatgtgtggcaggggggccgagatgtgctgcgattatatggctacacagaggagcaaccagatgggttgagcttccccgaagggcaggaggagccagatgagcaccaggttgctacagtcacactggaagtactgctgcttcggacagagctcagcctgctattgcaggtg

SEQ ID NO: 60265 - DNA, 1790 bp, Homo sapiens
ggggcaccagggaaagagcggggtgaacagagctttgctgaaaagggccccctgcaacctagtgcctgaccctccctggactcaggaccaggaaggagttgacaccctggatggtcaagggaggccctccccatccagcagcctggcctgggcttcctccctccctgcctccttttttcctttcatagaatttgactggtatttgaagtcacccaatatgtatcaggtgggcactgtgggggaatgcagatgcacaggtgtacacagcagtccagaggtcccaggcctgactccaggaaactggcctccctggggaagccacggtgtcacccagaggtcagatagaagcaagagtatctgagggaggcaggggaatgagccaggctggagctgagccagcagggcagggcccccctgctgcgacagtggcatcctgatagtgagatgctcagatgctgctgccctctagtggccgccagttccctgcaactcagaccacgtgatttctgggaaaaggccctccctggaggagaactgaaacttagggtggggactgtagaaaggggcggagagatcagccgcccagccaggagttaagctgaggtcgtctgagccctgcgacagcctggacagcaactcaggtaagatcagccaaggatgggagtcagcctgggatctagggctagaaagtccagccagattgagggcagggggtcctaggggtcgctctgttagactgagggatagacagaagatctcttaagtcaggaagtgggagattcagcctgagagtgagactgacaagggccagctccccagacccttgtaggcaaaggtcaggaggacctactgctggattgttcaaggaagaaggctcctggccccagcctcagtggaccatttgtttccttgccatctggccctgcccacttctgctgcagctccaaccccacccctacttcctgccccacctactcctggggccggcagggggtgggggtcaggctaggttgtgtaggctgtggggcggtgggtgaagagcctgatggatctcagcagaacctacctctgctgatgctcgggaatctagacagggcctgtcaccaggaacgatcaccaaaggaattcttttgtaaacaatacatctctgaaaagtcctaaaattaagaccagtgcccaaggtttccttccaggtatcacagcttagagtgctaaaaacaatgttttggggggttttgttgttgttgttgttgtttgtcactgctagtgatggcagaaaggaaacaattctgtcccatagagtgttgaaatgtgtttggagctaaaagaagatggatgggatctctgggacctgttgccagaatctagtctcaatggccagggtctcaggagatgttccctcccaaagtgtcagttctgatgcatcctgctcctattatcccccaggatggcatcaggcagggcacgctgcacccgaaaactccggaactgggtggtggagcaagtggagagtgggcagtttcccggagtgtgctgggatgatacagctaagaccatgttccggattccctggaaacatgcaggcaagcaggacttccgggaggaccaggatgctgccttcttcaaggtgaaagggcctggaaaccactgttcctctgtgtgtgggatggtgtatacacactggtacactcatcctcgagcacttgcgtctgcctgggtttcagataagggacagattggagaggaaaactagctgcatcatttgcagagtccagtacaaaatgaaaatg

SEQ ID NO: 60266 - DNA, 1002 bp, Homo sapiens
ctcgagctgctctcactggaagcagtgcacaggtaccagggaggtggcaccttgatggggtggacccgggctgaagcctctgctaatggttcttgatccctatagggcagtggcactggagctgcaggctaacagggagcccgacttcagcagcctggtgtcacctctcagcccccgcaggatggctgcccgggtcttctacctgctcctgggtgagtgtatgcatgtgtgtgtgtgtatgtggggcagggacacagagaccagaggcccgtacagggactcccccgacctgccctctcctcgcctcttgaccagtgctctcagcgcaacagattcttcacgtgaaacaagaaaagccatatggtcgcctcctgatccagccggggcccagattccactgaggttagagtccatttacaaagctgccaggaaaccggccacttctagtaaaccacgtcgtgcctcactgggtcctgcttacctcatttctgaatgtgcatttccagccttcttgctctcagagctattgttcaagcagaaaacaagctgcttttattacagtatgatgtcatgactcatttgtaacagatccagcctcagggacagccctgtaaggcagcaagtggggctggctccaaatgggtatgagtctcagaatctttggtaaggcagaactgaactgggctgagaggtggtcttaaggcctgggcaggctctattctctctggactggctgcagcctgcagtctaggagaggcccagtacagcctggagctcctgagccttgtcaacaggcagtgagcccagagctgcttgaaagctgtcggtgtgctgtttggccaggaacgtcaggagcagcaacagtgcggccttggtgtctgggtggagagggagggagaaaggtcggggctcctaaagcctcgctgccccaggctctctgagccctgccactcccagcctcccgcaagcccctgcctatgactcctaccctcacctggtggg

SEQ ID NO: 60267 - DNA, 1231 bp, Homo sapiens
ctgaatttcagtcttattcttctgacttgggtttggcagatcatcatcacccttcctcaagaactttagtcttcaaaacagccttaaaatcctcactccaccttgcgtctagaactgaagtccctgccccacaagtcccagcctggagccgaaaaggaaggcagaaacctagacaaagtcgtcaagatcccgagagaagtgggtaggtacttactctgtttctctctgcagggccgtcaggatcagggacttgaggctggaacacaggtggcaggtgtttggtacccagcctgcccaagaaaagtctccgcctggccccgccccaccccaggcccagcccacctctcccgttgctccgccgccagccgtcgccagcgggtgttcagtcgtctgcgggtcagcacggccgcaaactggcggatctaggacgaggaagcaagcacgtgggggtccgggcaggaaggtgctgagcggaccgcagtgggcgaatactggggcttgaccggtggcgtacagtgggaagctcggaggggagagtcaggggtctcacctgggggtcggccgccgaggctagcaggtcgcagagagccggcaaagcggcgggggcccgaagaacgatctggagctgttccgtggcctggggggaagctaggggtgagagttgggcctttcccgcaacctcccgctcgccctggcccggttacgcctgctccgtacccgacggatgcgctcggtgtccggtagcagcagctcccgtaggagctgctctagcccggctgactccatggcagcaactgagccgccgctactgggccgaaaaggggagggggagggacagcacgtggaggttctgacacccacttccggaggaaagggcgttgctgcacgccccgcgggttgccaaggtgattcaattcgcttcccacaaagaggtccggctcctccacttccgttaggctgagcaccggctgaatcgcggaaacccgactctggcaatgtaggttccccacgccgggagttcccaagctgggttggagaactcgagcttcgggcattcagtggccagctcggctttataaaggaccgtgcccttaacagcagggctcgagttcctatatccagaccaaaacctccaactgcatgagcctttttcttaataaattttattttggtaattgtaaaaagaaaaatcaggaccaaaactaaaggcaacttaaaaagttcaaatata

SEQ ID NO: 60268 - DNA, 2383 bp, Homo sapiens
ggcacagaattctcttctccacgttttcccgaaagcggatctcatacaaagactcagccattcggtccccatccagcacttcacccaggctaaggcttttgtgacgtatcttctcagggcagcagactggaagctgatagtagtggtaagtttcctgagggttatggtagggtcccactttgttgacatacagaataacagggtcgccggccttgtagtgtgtcacgccttccacccctggcccatggcctgtgcccagcaacagtatcaggattggcaaccactggcagctccaacttcgagggttccctacgactgtcatccttaaggcagtggaacctgtttgggggaatcctgaggttatagaaaccagggaggttacagaaaccccaggtcaggtgcctcgaactgaggtcccctggctccacttgctcccattggccccctccccgcctcaccctaccccacgtctctctatcccaaagaccccgctccacctctgctctctcatcctcccaacctggggttcaccccacccgcagcccgtctggcccggggcctctactacgcgccctggcccgtttccatggcaacgccgctcggtctcgcacctcgggtcccttcccgccacagccccggggtcctcaccgcgcgggaagggctggccgaggcggcgccagcggccttcgcgcccccgtagctgcctttgggctcctgctggggtctctcccacagcggcgcggtagcggcgggttggagaggacctgccgaccgacttctacggggttgcccgttgctgcgcctgacagcggcggctgcggctacaccgcgctggacaccgctctggcttactcaagaactccccgttgcgccttctccatctggaggcccggcccagctccggggaccccgtgaggctcggcttgccccgcccgtcttcggcgaggcgggggtcctcccggcgatcggcagcgcggcccaggacacgtcagtcttaccacttccgccctcaccggcggcgacctcagcctggcggaaagctccttgcctggaacgcagagggccttcgctgctgcggcccctggggactccttcgcgacggcttcccggggagggggctgaggcctggcagcgaggaccctgacaccccttcgggagaggagtggctgctaggccgctcgcttgctcctggaaagatttggggtttgagagctcttggccaggaggctcgcgctggccgaggcccgagagctgtccccgcgggacgggactagcgagggccggggagatggagcgcaggcggcgtctgggttcgaagcactttccggctgaaccacctgctgctgaggctgagccctgagaggcggttcgtggcccccaaaccggggaaggggcgaagctttgggcatctgtcccatgcaagggtcccaacatctgaatctcacctcactcgtctcccacctgtcacgaatggccagcgccaaagtgataaatatgtaataggaatgtcttcccgaggctgtgctggagacttccctggccgcacagtgaccgttcagagcccacgataagcaagccgaaacccggtttggcgcagaggcgcgcaaggagagaggtctgtcctttgactctgtgagttgggcagcctaacatggttattgttaattgacggtaaagtatctcgaggtccgttagtctatgtttttgttcttatttatcactgtgtatgtctttgggcttctcttcactttgtatggcagattattttgaaaaagtttacccttgtgtttgtctcagctgttttaaaggggatctgccgtctagggagttccccttgaaaatcggacctttgagcagtgacttctgttttgccacctgggagcaacgtgtaaggaagtggacttaagcttctctctccccaggggaagaagcacagtggaaaaatcacaagtgacttctggcctgaaaagcccttaatttacctgcttctacaattactgccctttctgacccagttctttccctgcagatataggtgaggttcaaagaagcagatggtggagttttgttagacaatcagtgaattttctaattagaaaaagaactgaggtcgggcgcggtgggctcacgcctgtaataccagcactttgggaggccaaggcgggcagatcacccgaggtcgggagttcgagaccagcctaacatggcgaaaccctgtctctactaaaaatacaaaaaaattagctgggcctggtggcgggcgcctgtaaccccagccacttgtgaggctgaggcaggagaatagcttgaacctgggaagcggaggttgcagtgaaccgagatcaggccattgcactccagcctgggcaacagagcgggactc

SEQ ID NO: 60269 - DNA, 1644 bp, Homo sapiens
agtgcattggtgcaatcttggctcactacaacctccgcctcctgggttcaagcgattcacctgtctcagcctcccccagtagctgggactacaggcgcgtgccaccacaaccagctaattttttttttttttttgtatttttagtagagacaaggtttcaccatgttgtccaggctggtctcgaactcttgacctcaggtgatccacccacctcggcctcccaaagtgctgggattacaggcgtgagccaccgcgcccggccaatttttatatttttagtagagacggggtttcaccatattggccaggctgatctcaaactcctgacctcatgatccacccacgtcggcctcccaaagtgttgcgagtacaggcgtgagcccccgcgccgggctaagaaggcagtctttcttcttcaccttagatccctcttgcccagcacaaagtattatagaacaaggttttgaaaatggctgaagacagcaggaaactcgtcttcaagcctgaacagtgggagtcagcacgatcgccacgccctcaactcaagtcccctcccagatcttgagttcttccctctgagagtgggggaggacggcggacgggaacaaggcgccccgacatggtgtgccttttggcaccggcgatgagccttgctccgccatcggccgccggggttttccagtcagcctgtctcctgattctcttcccctgcccggcgcagcggtccggccgaatctcgccggggtctcctcttcccctgcaccagccagcgcctcctggctggccagtcccaccctggctcacccttcccgaagagcctgccgagaccactcatcgcgagctcgcctctcccgcctccgcccctcagcgtcctccagacttccgccttgctcctgggagggtgatgtctcatcacacagggaccagccttgcccaatccgtcctcagggcgccgccgcgacatcaagaggcgcaaacgagaccaccggtgtcacgtgacccaagccaccagccccagaccgacgcgctcctcttaaagctgccacatcattttctattaagtaaaaagacagttctatctccacctgagtacgtgcttgttctccggaaggaaatgtgcagtgtgatggcacctcagtgtatggggtcagtgggaaaacttcatgctctttacagagctcaggaaagtggggtggtataggttcaagcacttggggttgccctaagtttagatggcaaacctgatgcagtctaatgtctcacattctggtctctgcacctcaggacaaccaaccccatttcacaggctagaaaaatagaaactccccacactgtgggtaaaatctcttctgtcacacacagatgaactttaataaattacaaatgcacctgaaaatgccttcttgatttcctttcagtttaggcctcaaatgggctctcctcaaggctggacctcaaaggcccagtttgggccttcgcaaatgtctctaacccttgacttagagtttgaagattcattccattctggatgtgaatgcaggtaacacctagaaagataagaagtcacatttcattaagctttcagggttctccattattactctgacctttgtgagtgccacctatagggcaaactatccaacc

SEQ ID NO: 60270 - DNA, 1006 bp, Homo sapiens
gcctcggcctcccaaagtgctgggattacagacgtgagccaccgcgcccgcctgctggccccactttttaatagttaaaaggcacaggagagcgttcaagggaaaaaatatgtaaatacttggaaacttgcaccgcccctatttttgtagaccaggggtttcactgtctcttgcatgcacccttcagcattacactgtcagttgtcagtcgctcttcttaccttgaagcagccgcaccgggcaccccaaggctctgcaatcgttttaggacctcaggcacctctgggtacagtcggacgtcttggccccgcctatctcgtacagttccatcactggagagggcaagagtgcgctcagccctggctgggtcctatctcgcccccagtcttccctgtccctacctcacctgctcttatggaacggagggtctacgtgcgtgtcgacccagaaaggccagagagtgtaatctgcgagaggaaggagagggaaggttcagcctggggcgggagatgcagggattcgggagctgctgttagggatgtggaaaaggagagcaccttacgaaattctccccttcccgtccctcacccaaatcaaagactgccagcttcggtagccgcgccatgacccgcaccgcaggctgcgcgcagcagaggtggggcttcacccggggccttagagagtgcggaacctccggcagctaaggcagccaccctgcctgccatagacaaatggcgactagagcgtcgccactcggggcgtcatcagcctggagatggcgcaagagtgccatctgatgctgggcggggaagaggattgcagcgaggtaccaacacgaccacacatgcaaccacagcagtcaagtctttctaaggcattggccacgggcatcctccctacttctccactccacccagccttgcccgattctattatactaagaagccagggaagaaggaaagccttttcttctagcacctgcctcttcttgagacccaagtgatac

SEQ ID NO: 60271 - DNA, 2415 bp, Homo sapiens
atataggccgctactcaacgttaaaaaaaatcatctttaacatactattttaatactagacctcaaatcttagctaagaagtagtttggaaggactggggaagagaaggttaagaatgactattatgtacggtaaatatgctaagaagctgatgaaataacgatagatttacttagctacaaaaaggccaaactagcattagacttcacttgtcagcagttttgtttttttgaggggggcgtgggggggggggtctctgtctgtctgaaggcacaaaagaggaaacagcagataggactaacgagggctggaaattggtgaagaaccaccacgggagttgagagatgcagatgaaggaaaccatggctagtagcaagaactagggcagcggtaactaacctgcctcagccaaggaagtgaggctggtccaggatgccaggctcagaaaggcaggtactgactgaacacactccccgctttggttcctgtaggacgggtgagataccacaccttggcaaccaccagtaaaggctcatagtctagcccttgggaggccccgattttagggctgtgctcggaggcgacctacgttagggactgggagaagcaggtaccctgggaatgaagaatggagagcagcgcttactccaagaatctgagagacgggggagtcaagccgctgctaggccttctctatgactgcgggggttcgaatacagtgagacccgacaaaagcgaccccattctgggtgatagcacagtcctggcaaaaaagcaggcatggcaaaataccccagggtcgtcaggtgggacctgggccccgctctcaaagcccttctgggtccccctatttcccaccacccctcgcgcggagccctgaggcagtcagcgtcctccaggctagggaaaggcgtggttttccttccccacgtctcccgtaaggcactgctgccagcccagtactactgcgtcttggcaaggctggaggtgctcccaccttcactttaattagcatcttctttccagtttggggctgcacacggataaattgctgctcctaccgctccggtcgccgctgccgccctccagcactcttgcctgcaagggccacttctacttccgggtcactgtctggctccacccccccccccccccccactgggttccggaaaggctcagggttgctcccgcgtttcggttcagtgacgtcgtaaattggaatgaggcatccagtttagcaacagcagagatgacgactctgcgattctgagagtccctggcgagcccgggctagcgaaaagtgggggcagaacgaactacatctcccatcgtgccaggaggcggtcccgcccgtttccccctgggagttgtagtctaaccccctcggatccaacagcaacctcagtgcgtgaactctgttatccagaaggcctcgccctgccgccgccgaagctggaattcgtcggctagtagttctcgccggcaactagaggaacctgttggcgtggcccagaaggcttagcgggattgcacgaggttagttgctaagcaaggtggtctttggtcaactgccgcctggaccaaggcaacaggaagtgagtacctctattccggaaactagttatgaaccctccccgccccccgtcgccaacattccttcgttcccctaaatcagcctcttgccccattgctctttgcaggggtagaagaaggaagtgtagcggggtaaggaatgcaccgtcagggtctctcacaaccctttcccagctctcctccccaacaaacagtacctgggatggagccctagggtaatcgcagccacgggatgggtcgaggtgacaggcttcagggaccacacttcggcctttgcccgaccttccacaacttaagcgaagagaggccaccagccgtaacagggcgttaaagcccaggggaagattggtccttatgacttcctgccttccagccctcagattcatcgctaccccgaggctaagcgccatgcctcatattgacaacgatgtgaaactggacttcaaggatgtccttttgaggcccaaacgcagtacccttaagtctcgaagtgaggtgagcaagcttctctacttgctgtttcttgaccccacgctcccggtgggccacaaccaagaaagatgcctgtccttgtcctaatatggtacgttttttggattaatgaaatggtcaatttcctgttcatatctgcaggtggatctcacaagatccttttcatttcggaactcaaagcagacatactctggggttcccatcattgctgccaatatggatactgtgggcacctttgagatggccaaggttctctgtaaggtagggctttcctcatgccccatccctattggtgtccagttagcccagctgactgcagaggtgtttgca

SEQ ID NO: 60272 - DNA, 2280 bp, Homo sapiens
ctccaaaatcttcctcagatcctgctttgtctgttgaggatacagaagacagagaagttagcaccaacatccagtagacaggaggagcaactttgctgcaccaagtgtaactggggtcagggcttgttccggggattactcacagccttgggatcccgcactataggtccagattctggaaagtggtgattcagggctttcaggacttgggcccaaggccggccctgcaggatcagctccaccaccacctgtacggtactgaattcagaatccccacttcggggcaagctgaccttttccaactagtctcatccccaagctgtgggcccttgtcaggtgctcgcatcccgcccctttctttctttccccttccaggtcctacttgctccaataccttggcctttaggcccatacaaaggcgttcgtggtgccggtagcgaaccaagccaggggcaacagcgcgcagagatcgcagaaactccagtactcgcggaaaatgttccacgcagcgtccgcgcacaacctgccagctagccgcggcggcgaagcgtagagctgcgggacccgccaccaggggcgtagccatggtcggcgggctccgcccggaggcggtccctccgggttcctcacccggatgggtgaggctttccgatcactcctaggggcggggcttctggcaactccctgtcgctccggtctgtcggctctgggtacctcgcgatctgactcggctcccttccatcggcccccagaattctgggggagggggtcttctggctcgggctggaggagcctgagtggagaagctgaccgtctccagtggcactgggtcgctcagctttaaacgtcgccgctgtctcgagcccgagggtgcctcacttccggctccgctactagcttcccttgccccggaaaagggcggtaagagggagccaatgggcggccacagagggaaccgtgacggtgcgtcagaaggccacgccccagcggagctgtagctgcccgcttcctgcactctctgccggctgacatgagttggcggctgaggctgtcgtggccgctgaggctgttgtggccgttcgtctgggtcctcccagccttgctttcttcgcggagcctgcggagaagccccgtcactcccgtgaggctcgacttcctagtctgtaaaacgaggatcatgccaccgccctttcccactgtcttcacccatcgaaatttagttctttaaattccagacccgagccggcgtctacaaagccttcccctctgcgcgcgtcgcttccagtaggaattcgactgttccttttataaaacagaagagggcgcccgcccttaaaaaataaaatacaggctgggcgtggtggcttgtgtctaatcccagcgctttgagaggccgaggcaggagggtcacttgagcccaggagctccagacaagcctgggcgacatggtgaaaccccttctctgctaaaagtacaaaaattagctgggcgtggtggcaggcgcctgtaatcccagctactcgggaggccgaggcaggagaatcgcttgaacccagtagacgggaggtggcagtgagccgcgatcttgcctctgcattccagcctgggcgacagagggagaatctctctcaaagaaaaaaaaaaaaaaaaaaagaggaagaagaagaaatagaatacaggctgggggcacggtgactcacacctgtaatcccagcactctgagaggccgagaggggaggatcgatccgcttgagcccaggagttccagaccagactggatcacatggcgataacctgtctctactgaaaatcaaaaaaactagccgggcgtagtggcacgcctgtagtcccagctactcaggaggctgagttgggaggattgtttgagccagggaggttgaggcttcagtgactgcactccagcctgagtgatagagtgagacggggtctcacacacacacacaaattagtttcttgttttaggattctgttgtgcactgaacttgtcagccccctaatgtaattgactgctctccttgactgtctcttccacaggcttcctggtgcctctcatttccatcagcaagcacagaacctaacacacagcttacactccttaattgttggctggattagttgcctgccttgaccaccttacaaggatttagtgaaactgctccgtctttagcccatgtcttccattcccagagataatggttcacacatccttgtctccgccccggatcagtctcagctgatccgcacattcgactgcccaag

SEQ ID NO: 60273 - DNA, 1589 bp, Homo sapiens
ggagctacttggggtcggggctacctctgagggccccaccttctggaatacggcctgggtggctgactggtatagcttcagcttctgctctcgctctagccttttggcctccgcctgctcttctgacgtcttcaccttcaggcgtccgtgctacaaggatgaacgggttggaagagtgcaggttgccttgcagaagctgacctgcaaaaaccccacactgtggagccctaggttcatacggggcaaccatggcactgccactgggggtgagggcgcgggcctgcggaggtgaagggctgggctcagggttctcaccatggtgccggctcagggttcaagacaggggaagggtccagtggtagcccttgaagtctgaggagagaagtgtcaatcacgtagccccgcccctactagctccgcccacagctgtgtccggaagcagcaagcgtgcctgggcagagacccccagagtgtaaagaggtcctgggacaggctttgcacgttccacaagaggtgagcacccggactaggacttccatccgtgtggcccttcctatagcccgattcgcccgggccagagcgcgagccggggcacctgggcgttggggaccactctgctccccaaaggttgccgctacccgcccgtcccacggctcccgggcacccccgccccccgcgggcggacccacctgcgctgggaggaggcgcgggggacgcggagctgcggcgcccgccacagagcccaggcgctggctagagcggcgccacgtcccggctcatcgaaacgcagcgcactctgcaggcttggggagggacttgcggcggaagaggccggctcggaggcgcgtgcgcgggggctctgcgctcgctgtccggaaacgcctcgtacctgttagccacctggtgtgtacgagtgcgcacgggcgactgtagcgtgcgtgtgaaatggggggaggaccatgccagttggtaactcagagtgcaatgtagttagtggaagaggtttctccaacagccggaaacccgcaccttcactactccactgacctcaccctggccacaccgacagccttctagatgtcaaatctaacagggggagtttcctgtcattttctctaacctctgaagcatttgacgctacccatttctttatacttgacacccccattctggcttctcctcctgcacctctgcctctctcttctcatctgttcacctccacccctaaatgttggtgatctccagggccctttcctcacccctttttcacttcacccactgttcctgggagaatgtttaaatgtaagccttcaactgcttcgagttggagctcctcagagctgttttggcccacaaatctggcattacactttctctgggtgagttcatccacactcattgttttaattactacctgtaaattgatgacacccaaatttatatctccagcccagatgtcttgcaagcttaaataacaataaataatatacatgcacatacatattcaaacacctgttggatatcacctggtgtcccagagacacctcaaactccaaaagccaaaaggtataaattatctttcatccatc

SEQ ID NO: 60274 - DNA, 1870 bp, Homo sapiens
tttgaataaatattcacatcttgttgagtagtattatagtttcaggtaagggattaggaaaggagctgttaagtggaagggctctctcgggtggtttctgcaactgtggtcccagaggaagcactcacctcctgagcaacaacgcgaagggtgtccagatggcggccagtgatgtaaactgtggcgcctgctttgcagagctgcaaggcaatgccacggccaatacccctggaggcaccagtcaccacacacacttggccattcatgggagctgccatgactcacaggcaaaggaggcaggtctgtggaagcaaagacttactctgagggaagcctggagactgtgtgtgtgttggggcgaggttggggggtaggggagaacctcactagggctaagaggaggagccaaggtaagaatcctttgaggggagaggagtcagaggctgacaactgggtgcgggcctgaggacaaggctgactgtcttttgggaggcccagagagtgaagaaggggctgagtgggactgtccagaggtggacaactactacaaccctctgagtgtggctgcctggatatgggaatctggcgcggcagcccctcggggcgcgtccacgcagagtcctgggctatctgaagctccggtccctggcctgacccagtccggctgagccagaggcgcagcttccgggccggggatgagcgcgaagcctggagatcctaagccctaagtgggacgagcgtgcgccgcttacctgccacctgcgctgccgctgaggtctgcagattgcggggctgcggtggaagtctgggttctcgcccagattgagccggcgacgtggaggcagtgttcaaggattgattctgtagtaggacccggggcgattctgtgctgaggtagaggggcagagtcccaggccaaagttagaacctgcggatgggggcggagcgatctgggtgacacacccaccccgcccggctggggcggcgcggaactatgacgtagtagctgcgtcaggagcgcgcccgcgtttctaaactttgtctggataaggcgcacgcttggcgacgtcgaaggtccgtccgcagttaaggaagcttttgcagccggacaggtcgcgaagcacacatggggcagggtccgcgctctccacacaaggtggggcgccggttcccagctggtggcaaacgggggcgcggggccaaggggtcggggcgccccttaccaggccgtaagcggcaaccctggccgcctccggatgggcgctcggagccggctccagattcgcacccgcacctgagcccggaagctctgggatatttccgccgggcgctgtcagcattgaaagaggctcccgagactggggaagaacgaggtaggcagcaacttcggggtttagaccaagagcatcaaatccagggcaggcaaggaaactttctagggtcggcagggcgtggggacttagtttcatttcccatgtcctcttcctcggcctccgacccacgacccttggttaagcgagggtacataactgtattctctactaagtctcttcaaagtgtgtctttcttcccttttcagatctgatggtgcacaatataatgaaggaagtagagactcaggccctagctttgtccacgaacaggactggcagtgagatgctgcaggaactgttgggattcagtcccttgaaaccgctttgtcgcgtgtgggctgctctgcgctctaacttgcgcactgtggcctgtcaccgatgcggggtccatgtattacaaagtgctttgctacagctccctcgattgctggggagtgctgcagaggaggaggaggaggaggaggaggatggaaaggatggtcccacggagaccctgg

SEQ ID NO: 60275 - DNA, 2054 bp, Homo sapiens
taatagtgtttaacctttttgagtccttactctgtgccaggtatgaggactttacctacattatcctcttactcctttcaacaaccctaggaggtgatgtattattattgcctttttatagttgaagaaactgaggttttggtaggttgaacaacttcccaaggtttgacaggcaggaagtggcagaatcagaatttgaacttgatttgtcacacaaatcacctttccatactagcttctgaattctgtccctcgaactctccctatctcctgctaacccctgctcccatagaaaagctcactcggtggaaaatgaacaaattgaccagagctcattaggcccactccgctgcttttagccctcagagggaggggcagctgtgtgacttcagccctctgctccatcatcacaagttgccactgttgtggagccccttggctacccctgctataggaaccgaggaacttggcctacttactttggctagcagctcctggcgggtggcagctgtcaggcctttccggatggtccgcttgtgatcacagacacggaaaggtcgctggggtggtggagctgaggtccagaccctccgtccaaactccgagcttatattagatactgacctggtagttgagaagaaaagtcaagaaggggcgaggaggggcttggtgagtgtaaagggcatgatgagggtagagtggctagagggctagggagggagagatctaggtttatcgattagggatgagggagagaccatggagtgcaggtgggggcgggtggctcaggagcttgacaagcccactgtggagtggggagcaggagaggaaggggtactggttagtctcctaggggctgagtggagtattgttgccctgcctatatcccctaaaggtggagggtagagcggagggttagcagtcacctgagtaagtcactggggttcagagctgagaggtactccatggtggaccggagagttccttccctggaacttctgggctgggtggttctctcctgtgctggggctttagtggtgttttctgttacaaacctgggatctcagcccaggacaaggtgggaatgagtcaagcctggactctggcccccctgcctggccagtaagaagggcaaagtccaaggggagggatgagggaggggccagatggggtcctggaggaagaattgcctggcaaaagccattggagcttgtatgtgtgtctttggtgatgacatgtgttgtgagggtagatgggaaccatgtaaaaggatgaaatgtgacttctggtgtttttttatttctatggagggaatttctggggacggtttctggctctcaggctctgagaagctgcagtttatgagtggctctgtgtgtgctgccacctactggagaagccataagctgcagctttaggaaaagggaacccggggcagagtgtggggaagtgggatggcagcatggcagggctttggaaaatgagaggtgagactgtgtccaggaagggtgtaaggagaggatggatcctgatacatggattcaggatcattagggtcctgtctgggacactggccttcctgcttacctgctctttccttcctccttggtcggaggaggggctggctcactgctctggcttcattttccagagctgcctgctgcagtcacacttaggtcatcttctctcacttttctccttttgccgattagtggacgtgacagagatgtgaatggggcagggatgtcctttgatggcatcaagactttagcttctggtgcgctgtgtcccagctctgatttcagttgcagccgtgatggacagttgcatggaagctgagactctcactgacagtgaaaccctcaaatgaacacaatccctgctttcctgccaaggatccttgtagggtcccccagcttccccactttttttctgtgtcctgacaaagaaacacagagtaacttgattgccctgtgacctggccagttgcatttcccctgcaggcttgagcccaagccagagccttgaaaaggtattcaggttgttgcccaaaa

SEQ ID NO: 60276 - DNA, 761 bp, Homo sapiens
tgccccacccctgaacgccctctgtggcgccttccacccacctgtaggcccagaaggatgtcggtctgctaccgtcccccagggaacgagacactgctgagctggaagacttcgcgggccacaggcacagccttcctgctgctggcggcgctgctggggctgcctggcaacggcttcgtggtgtggagcttggcgggctggcggcctgcacgggggcgaccgctggcggccacgcttgtgctgcacctggcgctggccgacggcgcggtgctgctgctcacgccgctctttgtggccttcctgacccggcaggcctggccgctgggccaggcgggctgcaaggcggtgtactacgtgtgcgcgctcagcatgtacgccagcgtgctgctcaccggcctgctcagcctgcagcgctgcctcgcagtcacccgccccttcctggcgcctcggctgcgcagcccggccctggcccgccgcctgctgctggcggtctggctggccgccctgttgctcgccgtcccggccgccgtctaccgccacctgtggagggaccgcgtatgccagctgtgccacccgtcgccggtccacgccgccgcccacctgagcctggagactctgaccgctttcgtgcttcctttcgggctgatgctcggctgctacagcgtgacgctggcacggctgcggggcgcccgctggggctccgggcggcacggggcgcgggtgggccggctggtgagcgccatcgtgcttgccttcggctt

SEQ ID NO: 60277 - DNA, 1099 bp, Homo sapiens
cctcagagggcgcgggacccgggtgcttgtcgtgtgtagttggagttggtctcaaagactggctggggaagactgggctttacagtgagggacctaactattgtgggacaagtggtgccacactgtggcatccctagggacgtttcccttcccagatgctccctcctccagactctcggctgcttcaccaacacgacctcttaggtctggaaacgtttgcaggtaggtttcttgtgcttggaataccactccactgtcgctacccactcccatcgcacaaaactttttttttttttttttcattctctgtcaaggtttcattaaccacatctgttgtccccggggtaaaccacgacacgactcccttccgtgtggcctggatccctcttctggtaacagcaggcattgcatcacactgttgtaccagctctgcgaaagcacggttgggtatcctgcgcccagcgttgcaccttgacttggagtcacagctcaacaaccccctaaaaggagcctactagcacgtggcagagccgtcctgagcgcagcctgtgctacttgcgtgctcacctgcggcagcagtgcaggccgtgagtccggctgtggcccaagatacagcccgaggaccagcagatgcgagagtgaggaggcgaggcccgcgacggcggcgtcccgcatgcccaagggcagcatggcatacgccgtgaagatgacgaagagaaaataggacacctgggggcggggcgcgggaagccgaaggcccaagtggggctattcaaggcctggtgagggatcgaagcccgggccgtccccgctgccccgcctgccgcccctctcacctggtcccaggcgctcaccacgcccccggtgaacaggaaggcgtggcctagcgctagcagcgcgacccataccaagccggacaggggacgcgtccagcgctgcagtcgctgctcccgggaagcgaggcccagcagcagcgagaagccgcccagcgcgcacagcacagtggtcaggaagctcgggtctgaggtcagctcctgtgggcaggggtgtgtgaggcaagattgtgacagggagaaggaacgaacctgataaaggaaaa

SEQ ID NO: 60278 - DNA, 871 bp, Homo sapiens
caggcgtgagccacagcgcccagcctcctgttgtccaacctattatcttgctgggacagctacccagaagatctggctcccatcccctatttgtttctgagcctcagttttcttatctgtcaaacgggaaccaaagcgtcatgaagcaagtgaaagatagatccaagctcacaaggaggcacttcggaatgaatgtctccaaatctggccaatttgctcgggagattcccggagccggggaccgcggccggcagcttgaagggcggcgcgaggcagcgctcgagcagcagggggcgccaggacccgcggcgtcccgcacctccctggccaccagggctgcgatctcgccacctgcctcaactccaagcagaagctgcacagccgtcccagcattttgtccccacctcttcccggatttaggcgtggaccagcaaggattggccgcgcccggtgattttcccaccttgcctccaagcagtgaaaagaaaaccaggggcaggccatttctagaattggattgaagaccttcttcctccccaaacagaaactggacatgggtttactttgggactcagtgagagcccggtggagggtgccttctgggagtctgtgggtacaactgctctacatcccctaagagggagagaaaggcaggaaatgaattccccaggggcctcctagaatttcccctttggaaaactggaaaatccggtgatggatttattgtagaacccgtagaccacggatgttcataaagtctgtcagaacccggacagaaacgagaagcatccaggactcagctttctccctgagcagacccagaagggtagagtgacttgcccagggtcactgcagttcctagccaggctca

SEQ ID NO: 60279 - DNA, 951 bp, Homo sapiens
tgtatacgtatatatgcttagaaaaatatatgaatggacaaatagaaaaatgtttaaaggaattattcctggctgatgggcttataggtgatttttatgttcttatattttataatcatatctttttcttagtgtgtgtgctgctgaggtgagtacttatagtcttatttttatctgcattttctaattttcctgaaatgagttcatgaaatgagtgtagtaattctacagttcagcttcctctttgtctccaagacatgcccagagatgtagcagcttccctctcccacctgccactaccctagcccgtcagtctattatttgctgctccctcctgatttcttgtaattgtaagtagcctgctggtcactttggtatttaatggatgttattaggtcttggagtttcaatatggtaagattttgacagacataacgtgatagaggtgattccactcagagagcatgttctgagtcaagggtaaagtctacagtgtgaactttcatgagtccaactgccagactggctgagtggcctttccctccccgcccccaccagcaacaatgataacaactggtcttttccacatgtgatggttcacaaagcactttcacagtaaatcctcacaatcaagggaggttggacttactgtctaaggtttacagaataaaaagttctcattttttgtctggaggtgaatagtaaacatagagtgataagaaatctcttatttatttatttatttatttatttatttatttatttatttattttgacacggagtctcactctgtcatccagactggagtgcagtggcatgatctcggctcactgcaaactccacctcccgggttcaagcaattctcctgcctcagactcctgagtagctgagattacaggcgctcaccaccatgccctgctaatttttatatttttagcagagatggggtt

SEQ ID NO: 60280 - DNA, 1630 bp, Homo sapiens
ggagaataaagtaatggaaatcagaattggtgaggagagagcagggcacagaaactcaaggtttgggtcaaaaaggggaatttcaaggctgggcacagtggctctcgcctgtaatctcaggactttgggaggctgacgcgggtggatcatgaggtcaggagttcaagactagcctggccaagatagtgaaaccctgtctctactaaaaatacaaaaattagccaggcgtggtggcacatgcctgtaatcccagctacttgggaggctgaggcagagaattgcttgaacccaggaggcggaatttgcagtgagctgagatcacaccactgcactccagcctcggtgacagagcgagactctatctcaaaaaaaaaaaaaaagtgtaatttcagagtttggtagtatggaatggagcattcctaaaccctggtaagtggacagtatgttgcgtattttaaattatagatgtaagggtcattagatcgaggaacataacctggagtattggaatagccttagtccccaggtggctggtagggatgaggtagagagacaccctgagccaggggccaaagtccaccagaggagtcctttaggttgtcaggtggccatgactcagatagggacagggtggcatgagtgaatgaaatgagtggcacaaccttcagaggagtttctaagtgaaaatgatcaagagtgattctgaaagctgctatgaggccatggaaaggaaaactccactttcttctctgttatgtgaaaggatggcctgtctgtgcaaaggttatgagagaatgtccaggtctcaggtaaggtgagagggaggaagttttgactgaaagatttggagaaacaagaagttacaccaatagaacagggatccgcaaggtagaaggggcaaggtaagaggttgagattgttcctggggagaagcagggatggaggagagaagacagcaggctgcatgatggcgaatcatgcgggagaaggaagtatgttaatatgagctagaagggaggaatagcctccctccctccctctccccctccctccctccctccctcccttccttccttccttccctccttcctttcttccttccttcctccttccctcctccctcattcagcaaatatttattaaccacatggaaagcacaaggcactctgttatgcaatagggaaagacacagatgaatcagaaatagattctgcccttagtttacattctgagaagtgacatgattttgttttaaagacataacctcttttgcttgtttagtttgtaagtttcctttctatctattagttcatatgatgtgaatctctgtgggaatctacctttctttaaggaagccacactaattaactctttataacagggagaaaatagaagaaagaataaaagttatgattatttctatttgaaacaagaagaggaggccaggcatggtgactcatgcctataatcccagcattttgggaggccgaggtgggtggatcacctgaggtcaggagtttgagaccagcctggccaacatggggaagccctgtctctgctgaagcatacaaaaaattagcccagcgtggtggcgcacacctgtaatcccagctactcaggaggctgaggt

SEQ ID NO: 60281 - DNA, 536 bp, Homo sapiens
ctttacatacatagctcatcttatttaatcatctcccaacaatcctgaaaagtctgtcctgttattattcccatctcacaggtcaggaaactgaggcacagagggtttaagtaatgtctggagttccacagcttgccagagacagagctgggatttgaaagtctatttcctaactccaggtccggcgatcttttccacaacactgcagccaattccccaccacatgggtgaaatcagatgaaaagtaaacatctagggcagtcttcaaatgaggcagccagacaggccacagatcgaacttcagacttttaaccaaaggttctgggattcatgctcccagttggacactgtttacttcttaagtagtaaaatgaatggggttggatagatccaaacagtgcctaagatcccttccaattctaacactccaggagtttatgtttcaaaagaacaacctgcagaggagcctgcagaatgggaccctcccactcagggtggcctggtagaatataggacatgcatgtcccacccccagt

SEQ ID NO: 60282 - DNA, 438 bp, Homo sapiens
gtctatcagttcaaggtgttcttttggttctaaattttttcttggcgccgtctctcctgtctggtcagttgctttccaggctgacacagctgtcgttcttggcatcctttgccttttttctttgctagatactcatgtcctggaccttgaaactttttctttcttgggttgatggaacacatccctctgtagcctcaagttaaaaagatggtgcagcagcaaagtgtatgcagatgcctgctttcaacatgcctgtctcttgagtcataccctccaatctgaactagctgtcctgtgtaatgaccattgtcaccctaaaacagtgcctggcatgtagtcaagaattatttgtcgaatggatgaataaattctgagatttctcttcaccgtcatcctggagatggtctttgcttctttcttacttggtttgctggaaaa

SEQ ID NO: 60283 - DNA, 857 bp, Homo sapiens
atcaaggatcttgatgccaagtgtggcatctctatctgaagagctgcttctgttagacccaggggccccggcctctgttttaagggggcagggcgtctgcaacaggagtggcacacggtgaagtgctggcatggctctacctcccaacccctcccaaccccatcccaaagcctacagtcctctgctccttctacctccactgtatcctgcatcccagaccctacagattgtgtgattgcttcatctgtatcaccccccgagtcctgtggacctgccttctgtgtagagcaaaacccaggctccctcacagccattctttgcagagatcacccttgcagtgagtgtgagttccttccaggtgtgtgcgcgtacactcaccctctgaattgctgccgctgccaaggaagtgggctccaggtgaaggccagtgccacgtcactctggctggccttcttagtagtttcatttctccggaagctgagccagtctcctggtctagcccaggttgccagaacgcttggcattgcagagtgctagagccagtggagaacttgccaacttgattgttttacagcagaggaaagaggatcacagagggaaaatgattcacccaaagtcacacagcaagttcatggctgagctgagaccaggattaagcttcctgactcccagttcaccatgaaaagggttctggcaacaggttcaagctggagaatccttcaaaatgctacacccacattctctccaactcttcatctccctgatcttccagacaaactacctggatgttgcccttaaaccatttctagctgttaaccctgtccagaaaaatgattgagtgatagctgagaagtgga

SEQ ID NO: 60284 - DNA, 659 bp, Homo sapiens
ttcaaggaaagagatgtgttgtttcttccttcctccttcctgttaggctgatgtaatgtctggagctcagggagccgtcttgggtcatgaggtggcaagctaaggatggtagaacaagacagaagactgggctttcaaatgatcataaggctgccatccatccctggactcttatttacagatttttctatgtgagacaaaaatgatttcctattttgtttaagctattcttattttgggttttactgttacagccaaacctactcttaatcattttgcctaattaatatctcattataattagtggggtaatacagaggatccattttctaggagatgaacgatcaagcctgagcagtgaacagttgtcttttggacatctgactaatccattgtcttataacacgccattggactgtttttcttcttagttgcaaaatatactcaaatagttccaccagtatctttcattcttggcacagtgccagatcttcttggaattattcacagttctctgtactcacccctccctacttacatagataaagaaaaacaaatgtaccttgcaaatagacaaaatgcctactatatttatgttcttgtacttatcacgactcactaaaaatagcctatattcactcttcttcactcagcatatt

SEQ ID NO: 60285 - DNA, 830 bp, Homo sapiens
acccgatccaaactccagaggcatcttctccttagtaattctatagtgtctcactgaccaccattctctagttgttttattgatagattcatccaggctgggccaatgggacagcgggataagaaagagagagggagggtttagcatactggcaggagagggtctgaaggaatgaatcatggaatcccaggtaataggaagcctaaggaggagaataagacagcacagatcaggagaaagagagatagtggggatatgctggaacaggtacagtgaagataactcagtgagagagctgggaggaaggaggcagcagtcagagtgtggagggactaaagttcaaacttcaaaggtggagcagtttcaggaggtggccaagcaagaggatgcatggttatcgatgttttccatggtccacttccagctctgtatacctgctctcagctctgctctcagccagagcaaacacactcaccctaatctcaggtggggaggtaagggccagagtccatctgggatccagcatagaaggacagccaggattgctacctgctggctgctctgctatacatgcagaatgtgtaccatgttcagtctagacaatacaccctccttccttcctcaccagccacagactccaggcccttcccacccttctgcctgtggctgagcctcccaccctagcccatacggtgctggttcagcttctgacggtgctggctgagatccgtgatgctggctttcctcacaggaagaagcctgcagggtacgctgaggcttgtccatctgggctcctgtgggggcctgtcaggctcacctgcgccacctgt

SEQ ID NO: 60286 - DNA, 2490 bp, Homo sapiens
tgcaacccacaagtgccccggtcttctgcccctcttctgtttccgctcctctccctggattctcaccgccggcaccctgatcgtctgccctctctaggctcgctgaaccccctctccatacctgtgtcccagctctgtcctgcctcccactcttactcctgctgtcactgcagttccctcctccttggcagagcatgcagtgacagcagttgggctttgggagagaaaggagggatgaagccgcctgcccactggacgggagggctgcagccagagcttcagggcagccctgctggatgggacagcactgagggctggacctggggggatggagaacatggtatgtgtgtgtgacgggtgtgacagaatgtgtgagtgtgtgcatatgccagaggcagcccctcaaccccttcctcctactcttcctctcttcaaaatcccccacaaatcaacagcccttcttcgtggcatctttccgtttgttggaagaaaggggtactccaccacgggtaccctccgcctcccgcctcccgcctaccccctccgccacgattgctttggtggaaagtgcttgggcctagagcaccagtgggccagtcacgctgcctctttggtcggccacatctttattcgcgggaaacaactttcaacgcatggttcccctttccgagaagtaactgcgcagaatgcgcgaggaccctgagggccgggagacagacgggagggctggtgagaagcgcaaggggcgagccctggagccgccgaggggactaggccgagcgggcccgtcggggcctctgggcgcggcggcggggttgggaggagggcgcgcagccgggaggagctgggctgactccgccccaggccaggaagtgactcaagaaacagtttgcgtgcgatgtggacaagagaggtccccgctgggtgaggaacccgggaaggcccgcccagattcgggccccctgcccttgtcccctgggctgggggcgcgggcaaagcgggggcctggcgggcgctgagaggacctgaagccggcgcgggcggcggaggcggtaggcgcgcccctccaccgcgcccgggagcggggagcgggggccgcggtgcggagtaggcccggcccggggtggctgccccagtccgcggtgggcgggcccggcccggcccggcccctgggccctgggcggtgctcctggcccgacggagaggggcagcggacggctgggggaggggtgggagtggcttgaaccttggaaatggcagaccagggcccccagaggacagcctagttcaatcccctgctgaggattcgtccttaagaagcttcagagtgccccaggagactccttctggcctccaggccgagctggagcccccccacccttcttgctccggactgtggtcatccttttccaaagcccagacgcccactctcgatagacagccttgtttaccgggacttcctctccggagaggcctgcgtgacatacaccctccctacctccagtggactcagatgcttgtcacctcctggggctgtttaccagagccttaactaggtgcgacctgttgatagctggtgtagtcccaggaaccaggatttggatggagggtacaatgaggctctgagctgccttctccccttccagggctgggggcagcagccatgcctacctggggggcccgccccgcgtccccagatcgctttgcggtgtctgcggaggctgagaacaaggttcgggaacagcagccccatgtggagcgcatcttcagcgtgggggtgagcgtccttccgaaggactgtccggacaacccccacatctggctgcagctggagggccccaaggaaaacgccagcagagccaaggtgaacgccttctctcccccatccctccaggcaccaaggacgctttcccccagggcggaggagagcagggccgaggagagcagggaagaggaggggcctggggaggatctccacttcttggttgtctcactggcaacctcagtgcccctgagttttgagggactttccaactctatatttgttttcagtttcagcttaatttcttctgtgatggcccaggctggcaaaaatcattctgtgctctttgggagaatagagatatctggctgaacaagttggccccaccaaggaatgcactgtggggtgggaggctgggccacattgcttcctttgggattaggctggggttccaggatggctcaatcatgtaccagctttgtgatgggagtctcagtttccttatctctaaaatgggaataacatcatgtggatactccagacatcctggagctcaggagcgagcaaggagccaggaggggtgatctgggccagttagtttacttttcctgaccttcccttcctcccaaccaggagtacctgaagggcctctgcagcccagaactgcaggatgaaatccactacccgcccaaactgcactgcatctttctgggagcccagggcttctt

SEQ ID NO: 60287 - DNA, 2170 bp, Homo sapiens
ggcgtacctacacctgtgactaagacccaggccttggggggttgtggggctttggtgatggctttagccagcaattgggtggtctctaggcggctgccgattacctctttttggaaggtttcattccatctgcaggagaaacatgggaaataaaaagccactaaatacataagtgcacatatccctctctctgtcttttcctgggagctatttcataccaatttcttgtaaagccctgaatttcggcttaagagaaacagtcaacgtctcctgtagagggaaagggcattcatttcctgggcatcctgagttatacgtgaggacttaagccaattggctgactgggtggaggagcaggtgggggtggaggagtggagcagaatgagtagtctgggatatcggtttagttcggaatctgggagctccattacccatagctcacaggttctcatcagtggggcactgtcctccctgtgctctagtgggtatcagctttagggcccgggctgaccttcggagagggttgaggatgttctctccggccaggttgacggcggcatcgcagctcggcagccccgatgcagcgagctcatcctgtcggagaaagcacacagtgcccctgccccgccctgcgccgcccaactctgccctcccacccgcttccagaggatggacttacccacgtgatccggccgggcccgggctttcgggagaccaacgtcacttcgtggcctctggcattcagcagctgggttagggctgtcccaatgaagcctgtcccgccacctgatcggaaaatacaaattgtttatattcccgtggagttggggtgggggcgccttccgtccccgctgtggcaccctcttccggcgccatcccatctgacaccaggcttctccccacttatccccctcctcgcgatgcagaggtgacacaggtcacagggattagggagattcggcttctcgggctaggaggccaaggccaggttgcctgtgcactagacagtgccctcccggaagcggattcccagtcctcaatctccgactaagcccgcccagcactctccctttctgccctccctcacccacaagcacacgcatagcgactaggacctaacgcgcctgcgtaaagtttagagtttacctcacctcagacgcgactacgacctctctgcgcatgcccctttcgggaagcgcgttccaatcgaggtcgcaatcctgtgcgtgacccttctcggcgacccggaaaaacttgtaaatataggctgggtgtttcaatagcaagcgaggtgggagggattagaccgatggacccggaaagggcggaggagggaaggctttagtgtagaaaaccaaccaaaccaaacccaaaccaacaaaacccttcacctaaaacccgaagctacccagacctcagaattttggatgtctattaagttggcgggtcagtaatgcaagagaacccttccaccggtaatctggatttctttccactcggccagttttttcttctctctctttccgctggagcctttctatcaacatttaaacattccaaagatccccctatattaaaataagccttctccagacctgtttttcctccagctaatattcttttttttttttgccttcatagccaaacttcccacaagtgtggtttccattttctacttcttacttcactcctatagggtttgtgcctttatcattcatttcctcactctccaagaacataagtttcccatgtgtcaccaaatctaatccctagttttcagttagttttcttgacctctcagtatcaatgggcacctgctgattccttcctccctttgaaaatgtttggcttcagtgaaagacattctcttctcggctttctcgtaccttttttcagtctctgatgcttgctccacctctgctaagttcttaaaatattggtattcctcagagctggatcctaggaccttctctttccaatctgcactttaccctaggcatctatgccttgaattcagttaccaggctttaacagaagacatcccaaatctcctatgcaactcggatctctcctctgagctcctaacccctataaaaacttttcactacacatctcttcttggacgtctgaaaccctgttgattttaaatactgaatctctcccagattta

SEQ ID NO: 60288 - DNA, 362 bp, Homo sapiens
ccccttgctttaccgagcatccatgccaacccagagacagctgttctgctgcagtagtcacccaaatcacttcccttgaaaacaaatggggcggtgcaatatgttgcatttgcttttccataaaaataaattgacacaatacaagcaggtcttctttcccatttaacagggcaagaaactagtctgctgaatgagggcacatgcaataaaatgaactcaaatggagtacatcactgatatcagcagaaaggtaattattaatcagcttaattgcttcacccaggagaaggaaaaaaaaaacttgctgaatagatgcccattgtctaaattaaggttagctctttagtctttattacattcca

SEQ ID NO: 60289 - DNA, 1028 bp, Homo sapiens
gttacattttacaaatacattctttaatatgaaacattaacctgaataactgcatactttctgtacacaggtatctaataatactagtgagaaatactacagctatattccaggaagaagtggtaatactggaaagtttctttcctttttgagttgtctatacaataagtccttcacagaaatatagtatcccaaaattcatagagaagtgcagaaatgaaacaaatgaaatgtcttctgacaagctcaaccaaactggtcccaaatcatgacagttattttgtctaagaccgtattaatactttgcactgcagcaccttctacaagaggacagcaaagaacttcacatgtgttatcactgggctcctctgcaagaggctgggaggtaaaggaggggcagggattgctgttacggccctctctgttgtggggaggcctaggtaggactttgacactgagaggtcaaaggtatgaacgcagcctggaaactaatcattagagggggctaataaagattcggatgggctttcttctaattcaggctatttccaatgaaacttaggtctaaaaggataagcagagagtgaggaaagagggcaagacatggaatacttatatttatcaagagtaactattgtaattctaccagggaagaagaatcttgggtttcacagtatgcttatgacctcatcctcagctactttggaatcagcttcccaaacattgttgttagagagttggcaaccacttctgttcttgaatttggcggactgtcagggggttttagatttatcctttcaattatttataccaactctctatctctgaaaccagaatccaatttggaaagataaatacatctctgtgtgtgtgtgtgtgtgtgtgtgtgtgtgtgtgtgcattctgaactgagatctgcaaacaaaatctatttggagtgatatttggggcttttcctagaaattaaaatagcttccaacggtactcaccaaatggcatgttcctcgcttctttaaatttttaagaca

SEQ ID NO: 60290 - DNA, 3679 bp, Homo sapiens
ataatagtattattttataataatataatattatatattataagacctgtgctccgaagacccagacctgagctccttaggtagtaaggatagaggcagccattccctcgcagtgagagaaaggccacacgccctttcttcccccacacacgtaggctagtgcaaaacagggcaagtcaatgtttttttctgcaagaaatgtcatctgaggatgtctgagtgtgggtaatgctcttgtctactgactcactgactatggcggggccgtcaaagcattgcgtctgctgcaacattgtgctttttggcaagggaaagtgagcagatctgtttctgcgattgtggtgcactttcctgaggttaactttgcatgaagcccggagctcaagaaaggaccacatttcctcaaaccaggctcaccagagtggaggtgggggagtcagtctaggaaggcagggcggaaggatcattttctatctgcactgtagacaacaagcacctgcgtattttgaagtcagggttgtgcaaaagtgatccattgactcttgcacctgggtcactgcaggagtcctggaacaagttagaaggccaagttattttctactggactctacaaaggtgtgccaaactctccagctggggttcggcacccttattcaactgggagctctaggagctgccacctggcattgccattttcagctcaggactctgccatgtgttctggcccccacttgtaagcacagcttactccttctgagtcaacagagccatgcttgtctagggggtagaatgcttgggttccatctctgaactctcccctcaccagcaggcctggctgtggcttgtccagtaaaatgacagcttcatggtcagcctatgctagcaggtccaaatcaagagtcctggtccctgggaaaatagccacaccttatctaaagaggtcaatctgcttgttaggaatactgccagtgccagtgattcataggcacacatcccagtttcacacaactgcaagtctggccatgacactctctcactctcatacacattaacagacactagtaacccctcctcttccccccgagatgacctgagggaggggaaaccaaaataaacacaagctgtccacgcctcacccctcccgagtgaaagcaggtaactgctaggcataaattttcccactggtcaagccagagacccctttgcctttggtggccgcattagtttctatcctgatgggtcctgtttcaagggctgatctgtgtttagatagtatcaacatttagcatgagggccctcccacacccctttccctttgggtttgggaggcacaaaatcttctcctccattccttccctgtccctgtgttgaggatcctcaatcaccagtatcaattctccaatccctctacagtgctcattatgtgactgaatagggcagggtcagtagaaaaaaaatttatgaaaatgattacaaataatagtaatttagatttatatgtgctacatactgtgctaatagctttgaactcattcaattctctgaacactctagtacgtaggtactattctcataaagaatagtgctctattctactgatgagaaaactgaggcttagagaaattaagcatttgcccaaggtcaccaagatggtaaatgacagcgctatattcaaacacaagatgttaactactattccatattgctttcccaattgcctcgcaaacttggccacagtatcagggaaacagggctaccagggccaagaattcaggccatctggttaggttatccaatccagtgtttgtacagccccctctgggagggacgcctacgtggacgacatccaggtattgtctatgccaccttaggaagagcaattttacaatcttccttggtaacctggttcatggtttaatcattaacctaaactcttgttttagcagaattttatcagtgcactattgattgctctattctgtgtgggaagacatgaaagaaaaatgcctgtaccatcacccttcccagaactgaagactgttataaagttattccctttagcctcctctacccaactcaacaacttaaatgtttccccagatttccactatccgtctcccactgaaatcacggaagctgctgttgttgttaaagaagctgaggctgtaatgccagcatttccatgtcatcattatctctgtgtcacagaggctggagaaaggaggaaggaactagggagaccttcaatccaagttcactctctgcctctgcaccaacagcagcaatctgaggctctggcctccagcagggctgtctgcattttcagatagatctagccaattctccttgaaggaactcgaaatgggccccacgggcaacagtgcagtaagaccctgtcacgacagagaatgaatgagatgacaagacagcgctgtgcaaaggggatgcaggaagagaaggcaggagtcatccacttagagctggatccccagctggacctgagcgtgagcctccagaagaggtcaccgcaactcagctgggaatattcttctcattgctttttaggttatccatccttgtttcctcagcagaagtggtgtttctgttaaagccagttattttcttccccgaaaggtcacctgaaaagtgtatttgaagggccagatcataagcctgacatgccaacacaagtcatcagcagatgttgtttctggaaggctaaattcaaaccactaaccagaaaaaaaactgccctttgatctgaagcacaacaacagtaataaatcctctttatcacctgaccaacagggcctctctttcctttggtttgtgactgccttagatagctggctgccaataaaaactgcccctttcccttctaaaaggcacagttctcagcgagtatgagaatgtgcagagtgcgcactcagtcacgcaggaaatgcccttctctggattcaggggcagcagggagtattgctgacagctcagcgctggtccggtcaagctcagagccccagaattgaggccctgaaataacaatcgacccctctccgagggaaaactagccccgaggtgcgtagttccctgggactggggcttgctttgtgtctggtgaagagataaggacacactgctacactcaggatgagaaagggacaggatggaaaagcaagcacgagcagcctcacgtcctccatgtgttggctaagtggggcagggatattcgaagacctgatctcttctccccgaccccctgttctgtgcctcgatacttgagccctaaacttctgagcaggaactaaagatggtccatagttcctaaagatccaaggtcagaaggtcagagatacggctgaggacattagaaaagagccaaagaaaccaggtacaagaagaaattttccacgactcaggtgtttagtaagtagcagatgggaattacataaaggggaaatagcttaattttatatctctcatcacaggaaaatactgaaataaagtttcttggcactgtagctccccaacaccccagagctgagaagcctgctcctctcttggcccaccttgtgcgcagtttctgcaaactgctgggcgctgttcttcaggtcttctgtcttctcctctgctcggcctaatcgctctccacgctcattcaaggcctggcttgccttctgca

SEQ ID NO: 60291 - DNA, 2375 bp, Homo sapiens
aaatacaaaaattagccaggcgtggtggctcgcacctgtagtcccagctattcgggaggctgaggcagaaggatcgcttgaactcgggagatggaggttgcagtgagccgagatcgcaccactgcactccagcctgggtgacagatcgagatcccgtctcaaaaaaaaaagagaaaaaagaaaaaatggccagtaacttaagggccctttcatgtcttattaagcacctagaggctaataattccttttagaaatgttctgagggagagtgagcaagattgagcataaacagctacattcatagacaactcaactgcccttccttatttaattcctgctacttcttatcgatttgaaaatttctaagagatttaaattgtgatgctttctataggctgagattaaaaagtcaaccaggctaaagaatatgaaacaataataaaaaaaacctaaaccattaaaaaaggtaaaagagagcccagatcataaaaagtccaacaggccataaaatgaaggctggaaacattacaaaatctcccttctcaactgggagcctggccaagcaactacacgggagttgagttctgtgattgtgagtgaaagttgcattgtctgtccccgcctgccctccttctgttctgatctctaattttagacatatctgtgttgacagcatcccttaacaaaaagatcagcagcaagctgttcaagtcctaatctgacatttcccacacggagagaaaggaatggaattcctttctcttttgtggatctttgctctggggttgtaactagtaagttatcacaactggttggtaccagcacatcaccaattcatacaacacatgctgttcatttaccttaaaaaaggactaaccataagcaaaagagaatttggttcatgatctatagatacattatcccatagtctcctaatcaaaatttagaatatacaattgagcaacaggacattataccctacgtcttgaaaaaaaatttagtcaaatttgattctgtgtttgaataatcacatctctgaggtgactgtccctaaaaacccaaaaagtatggtaatcttgtatattgtgtgacttgtcattcttgaaaaagaaaagtactaatagctaatatgtactgtatttactcagcgccgggcactgttcaaagttcaaagtgctctgtgacaactcatttaatcctcaaaacaactttgggagataggtactattattatcccttctttacaaatgagaaaactgagggtcagctaaataatttggctgaaatcataatggtaggcaataaaagatgtaggatttgaattagaattcttgctactgaatctgtgttcttaaccaccgctttctagagagaaagaggacaaagaaggcaagtcagttctcagccctgagaattccacctggctgatctttgtcatcagtaaatatttactgactccttatcatgtgatatgttttaggtatattacagctagtgttttaggcatgcctagtgtttcaggtatattatgttatttaatcctccccacagtactgtatgggagaactactactctattttacaaaaaacaaaaaccatggcttagacaggttataaattgcccaaggatatacttatggtgagtgatggaaccacctctgctggttcctttgggattatcattgatttgaaaataaggtgaacagctattggcaggagattcatggtactgaggagggaagaggactactttccaggctagctggcattctccttatgatgcagggctgtgtatgtgacagaggcctcttgagcctttacttttcctcaacaagatgcgaccacaggattgcttggaattcagattctttcctccactttagcccatcaacagattgattcctgacaacatggctttgacagtgtgattctttgtttagccttcttgccttgcttgtcccagcactgtgccaatttgggcccattactcccagagctttcctggcttctgctccattgttctaaagaagggattactgacacacactttggatcatttcattctgagggctttaggctttatctgagactgcaggtatgagagttctctcttgggaatctaccttcacctttactgcatttgtcaactcttccccacatacaggagtttgtaattcgagacagacactcatttcatcagagatagagtttgccctcataaattctctgagctgattttggataattttcaagaaaagaggtgactatcctttatattctatcattttaaaactagaagtctaacaaatgtaactgcttttttttttttcctgtcaaattaattcagtagctatccttcttggaatgaactttag

SEQ ID NO: 60292 - DNA, 719 bp, Homo sapiens
gctatagtttgatgttcagggtggctaaaaagcagaatttaccacacctacatacctaagatgccttacactttcatcatgtgcagccctattttgaccttacagttaagtgaaggtccgtgttgtgtggtatgcctcagctctctgctctgctggagtctaaccaccagacattttgatttcaacaagagtgctgatgaaaaataaataagctggaggtaaaaaaaagaggcagtattcacatagaatattatcagggctgctgtgtgactgtgccagaggtgactaagggaaaagaagaaagcaagcttctgaaatgagggttcaggaagtaactgagtgtggcttcttggtgctgctgtggtgacagaacaggctacgtggccaaggtgagaaataattatttggagctagtttccttactgttcttccaaagctctagtgtatgataattctgggtggatttcgcaatatccatgagaaacaaatatcaggtctgaggctgctgcgccagcaattctatcagccaagatggctgaatgtttataaagcataaaagcaaaaatatctaggttgttaccttaaatgctttcagaacagggaaacatcctctctgctatagttagtgggaaatggagcatggtgctctccacacaggattgatcttttgcttctcacactatttcttagtgtgttataatttggggacatagtaaatg

SEQ ID NO: 60293 - DNA, 594 bp, Homo sapiens
aggtatgtatgaaatttagaaggaatgctttctcttttctatttataagaaaaggcttgctgcttgtattatgtggggagagattggtaaagactagacaattgaccctttctcccagtttctgtagagaatctcaagttttacttggcaggcacttaagaggaatgtaattgactttgagtctaacaacaaaaacaacaacaaggtataaatttatctctcactcttgaatgctggtgactgtgaactagatctaggattttctttgttttggttgttcaaggatttctcaacctgccatggttgacctttgagctggataattagttgctatgggggctgtcctgtgcattgcccaatgcttagcagcatttgtggcctctgttcattagatgccagcaggatccttcagttatataactgtataatgaagaatgtctccagacattgccaaatgttgttttggagacaaaaatcacccctggttgagaaccagtggtttaaagctaccaagtttttccagtgatgacttttactaagtctattatatttaaaaaaggttgttatgcagattgttctgtgtgaagtgagaag

SEQ ID NO: 60294 - DNA, 766 bp, Homo sapiens
gtatagcaaccactagaacatgatatagtggtataacaaccctaaaattaaagatagagtcttaaccaggcacagacagagcttgatgggctggaggtctcaccatgtgaaacataccgcatgggggatgggacacaaagcctgttccttggcagctgggtcccaaagaggggagaaaatatgagaagagggggctttgaaactgatgaaaaacataagccacttcacttctcctagagaggagtatgcaaaggaataaaaaatcagaaaagttgttctagtgaagcaccctctgcaggaaaagaaacaccaaaagcctagagtaggtgtttcccagccacctcccttccaaagagtttggtatgcccagcattcagacgcaaggcttctgacaatatttgccttctcatagtgactcagcagaattgaggataaaaagaatgtcagcttaacctgagtttgggcctctatctagagtcgaattgaggctatgtaatcatcagtctttcacaaaattttttgcagccctaacataaaagtcatattataaagctccacatttggcaaatggtagaaaccaaataaatagtaaaatgttcattttgtagaaatactacaaaaagaaacaaccttggagaatttctgatttggcacaaacttgaaagggaagagattcaaaaatgagggctggcataaaaaggaatgagatcatgtcctttgcagggacatggatggagcttgaagccattatcctcagcaaactaac

SEQ ID NO: 60295 - DNA, 2152 bp, Homo sapiens
atcacttaggataactaaggtcagcatccttatactaaaactcatatgaataatgttttacaatgcttaaaatgaaagaagtgcatttccctatcgtgttgaactttattatgagctggtgtagacacacatggtggttgctcaaaatcatagggacccagattattttcggtgtgcttcttcctcatccctaggtgtgttaccagagctagccagtgacttgagctctagccaacacagacaacttctggacagcaggacagaggcagggcataagatgaacatgtcccctctctcaaataaatcctcctgtaagatttacaggacatttttacatttcactggctaaaattgacaatgaaatgttaaaaagtgctgttcaccctcataagattcctactaaatgtatggcttggggaagtgactttatctccttgaaagtcattttcttcatttctaaaatgtaattaacatgctcatctcatagaaatactgtaaagataataagtgtgtatttgaaactctagtccagtgacaggcacatagcaggcttccaataatggtagttgcagttgttagtgtagatgacattactgattcagagatatcatagctcctgcaaggtctcataactaatgatggttaaaccagtattcaaacttagatcagcctcactctgaagcttcctctcttataaatacagtgaaatatggcaggaacttggcctgagagcttctactttccaattcaattcctctatatcatgaatcatgatatacttctggtctgagttttcaggaccattgaaaatagagttaaaaatagaaagatttagtttatttggtttaacttatccaaataattgccttgctttcacttatttttgtggagacttggctgaaatcaacagcattaattgagtgtgtaattctggaaccatctaagaaagctaaaatcatttaaaattagttggggtttagtaactaggttgaactttgcctttgtcaggcagtttccagctgactcactgcagctgcaacaattgacatcattttgtgcctttcatgcaaagactaatttggcaggcagcactcccagtggagtgggtttctgaggcttggtgaatctcagggttggaatggactttaaaggtcatgaaagctaaaccttaatgtaatgattgaattggcttacatcaaccccatcaagaggttttctaacctacatttggataagtccagtgacaaataaatagtgaagatttccacatggcctgaattgcataacccgttctgtatttgaatagctcttacttccttatattgaactgcaatctgtattcttaaccttcctgccaccagtactacttctatccccagtacaaatattcctttttggaaccttacaacctttcaaatatttgaagaccatgacgttgcctggtcttagagttttctcactgctaaatacctccagttttcttcaactttttctcattcaatatgcctttaatttccttcacaatcctgagctcatagagaaacccatatggcttggcttgattcttcttaaagtgttcattctcctcttatcccaggaatgaatgaaatcctgcagtgtaaatggagggaatgacctaatcaaactgtcctggtaaagtaaaagggagttgcttgaaacatgatagagaatggtgaaaatttagggaatcatcaaattgttgagattttattggccctccttacaactaagcaaatgtgacaaaataatttcttgctgtaaaaagctcaaaggcataacaaagtcatagtactcttaagcacaaagcaagttaggttatttattgtgatagttcagactccatcaactttattttatttgtatggttcctttattttagtgctgagtgatatcattaagataaaaaggatgaacgaatggatggatgagtgaattgatggacaaactgctcaggaacaaatgttagttatatttcaatagatacagatttaaaggaaaacaaaccaaaactttttctctgaatctgacaaaatttcaggttctgtatggaattaaaatagcagttttgactcattcaatgttgtacatatgtaaccctttagtagcctcataaatcttgttctgctcttga

SEQ ID NO: 60296 - DNA, 2226 bp, Homo sapiens
gagaatgagttatatacactaggtgaatagtcttggaaaagccatttttatgtagacgaacagcttcattttttaaaaaggcactgagtgtgaatatgcacagtatatttagaggataacaaacaggtaagagatgtgtgctccagtggaaaaatctccgctggggctatattattttccggggccctctatcttacctgtagatagaactctttttgtcaaaaaaaaaaaaaaaaaaaaaaaaacatcttaaagattgctgaatgtttctgtttctggctcctacctttaaatgaactatactattatttaggggaaagcacatcaattaattaacagccttaaggaattaggatattttatcaggaaaaatactaaagagaaagcaacttaaaagatcagttaaaaatagaacattttgataaccaccatttatttggactcaataggcagaaacctattacgggattcgatacaagtagtgtaaatggggcatgaaggcttcagtgtatatatagaattggagatgctttcactttccatttgatgaaattgaatttctcagaatggactctatatctttttaattccatgattttcagcaggcagaaggacgatatcctgtaatttatgaagatagtttattattattttttattagctctcagctttagcaaccactttcttccccctccctccccagccatgttgctgctggtgatccttataagtgaagctgcttttcattttcatcttcctcagaacagctggtgcttacactaccctaaacattcattgagtcatttcctgctgataaatgtctatatgtagtcacgattatcacctatgcgtgtgatactaaactgtcctctctctttttaaaccaagatagcatttgtaccagcctctaatcttatgtaccactttctcccctttcagaaccaagctggcaattctcatcttgaatagctttaaaattgctcatagcaatcaatgacaactgaggcatcactaaagaatttcttttatctccaagctccaatttagatctgtcattaagcttgagtaagcttgaactgtcagaacattttccctcatcacatgctctaagcacaaaaagtcaacttcaaaatcaaatttgttctgtctcttactatactttgtaatggtttcatgtgaacaataaacttcaccgaaatagtagtgtcaatctttagtaactcagatcactatggtttcaaaaagtagtgaaatgctgccaaaactcaagtatgacgtatggtagatcattcactcacattcaattgctctttgttgtgctttaatattaggggaagggggacttggcagggggtatggagatgaggagtctctttcctccttttagaggaaaggttgtgtcatctttttggcaagtcactttccctccctacgccttcctttccatgcctgtaacatgagatagttttattacatgaattctaagtctctgcccattcctaatgttggcctcttaataaattcaacttttcattgtgtggtgttattcttcttcaagaaatggattagaaatgttaccatacagagctagaagtcatgaattaattaggaagcccatcgtccaaatctaactgtaaaatgccttggtttcatcttctggaacaaaacgattttttttggggttctgctgatgaacagaaactgtcttttaaagatcacagtttctatcttggagatcttttccactgacagatacttcagcctcatccacatatttaaatgtactttgatctttctttgttttgcaaattcccttttgaaacagtttgtgtgaactttagaggtgccaaactgagactaaagaccactaaaatctggcagagctatacatgtgaagtattcagcagctcaaatatgtttacagagtccatgttcaaaataagcgattgcttttttacaatttcttgtcaactccaaattgaattgtatttcttcttgtatctataaaggaaataggaagcttgataataatcactttttaaattttataagtaccgttgtgttaatgtgaagttattcttttctcgtttatcttcctgttaaaagatggccttaacagaaacataattcaggtcattattaccatgatgtattagagtgagaagaaaattgatgatttttttttccttagacatggaggtctcactctgttgcccaggctggagt

SEQ ID NO: 60297 - DNA, 644 bp, Homo sapiens
atagtttcagtgataggttatatttgttttttcttcctattcccttagttcatcttgaagctcattctgggtgtgtaactgattccaaaggcaatttcccttcatcctcagttttaggaactcccaggaaccaaagcttaaatatctattttcttaggaaggctacatttatataaatgtattaagcctgatccctctctgagagcaaatataattacatttgtttttcccagtttgtaataaaactttaaataaagatctctagataaaggacttttacccccctggttaaaatctgctttcttgtttacttaacatttggtggtgatgcaatgtataaggtatcggccaaggaatgactctgtcttttcctgttgttttcttctacaggttgtgtttcacatggatgtgggtatggtatgccacagcaatatgacatcttgattatgtgtatctgtcaagactgttttaaagaacattctcacctcagatttcttaggtcataacattatattcttggtattcacagcctaaactgtcatgcagatggaatacactttgctttcttggtgatctgtggtatagagaatgagttccagttaccatgggaaatgtatttgtttgttggcttgtttcttgtctta

SEQ ID NO: 60298 - DNA, 3066 bp, Homo sapiens
ttggaaaggtaagtaacacagattgcattagctaagccacaggtagaaaaataattctttaaagtatttaaatatatcttaaaaatgctatactcccacattacattgggtgtacaatttaaaatacatgatttttaagtcatgaaaaatattctggggcacatatttttacagaaattcttgagttcagcttgtatgttttatgcatgaacacttgcagtggcaagccaaaatgacttattagaaagggtgaattttctgtaagcacctgagcatttgggtgatctatgtttttggaacagcactagcttaactagatgtgagagggttagatattttgggaagtagggtcattagcataatgtgggttcttctgaagcagggggaatgtaggtgatctaaacgcaatcaaggtcacgaagcagcagctgatgttcaagtcagctaacattctttttgatttaggccaccttgatagaaggatttttttttttctttcaaaatgtgtgtaatgatgctaagtccattaccagattatataaggaaagcgatcattatactagcaaatatgcctttgtagagcctatcctgtgaatgtttgtgatttcacacatatgcaattaagatagcaaataagccagtttaaagaaaaggcaaattcactgtcacagtatgaagtcaatctttttagttcctaaaatttctttctaagcaatgatccttaatgacagtggataagatgttgtctttcctaagagagaagcagtgacaagatgagatggctatggcatgatttgtgatattttctttcaggagcttttatagttaataaataaacctaattataactcacccacaagaaattctgacaatataaagttgacgactgctaaaactcagcaggtttgtaatgttttccagcagctattttgggctactttatgaagggtgtgaaacgaagatcagtcaatcaaatcagggtgacattcatttataagacttgtgagaagactaaagataaggtttaaagtgcagttcaattataaaattgattcagagaaacgatgtgggctagcctattcattttcactccttgtcctctaggtcagacgtggtttgatgtgtaagtccaaagctgcaatttgcaatttaaagaattactaatagaaaatcacaaagagtggaaaatcccagtttttcacctctgccctctgacatcatcgtgagaaaaacataatttatgccattaccttaagataatattgcatgattacatctgaggctcatacaaaaattaaagattgatgtagatataatatttgaaagaggggttcaaaagttccttgaagcctgtctcaggtttataaaatttgctttagaggaaactcagctgtaggctattctctaatttttttgtttttttacctgaaatagtttatctgtaattccacacaattttatttctacacccatatcaattctttgagccttttctcatagatcctctttcccaatcatttccattgctctactctgggcacattccaaggtttccacaactctcttagtagtacaggcacaagcaccaataaggatctttttaggagccaagctgaatggaatcccacttgtttttccctctgttgcaacaactctgtgggactgccaaggagaaaataaatatttgttacttttggtaatgaaaaaagtatgtgtgactcagcagcacatggggagcagatgtgttgagtaagaggccactcctgtgcaacagacctgtcactaagtgaggctataaatagagaaaaattaggagagaataaactgcatctctgattcggctcaatcgcgtttaaactagaattactaaagtttttgtttctgatgtaagaacaattctgctctgtatagatgtctggtcaacatgtgcttaaatgagccaggcagtccctccacccctaccaccccacacacaggcagtctgaacaatgggagtcctggggatgttgaaacacatagaagttcaaagagtggatatcttgctctagaaattgctggattggcctgattatgttgaccatctctaccttttttgtcctagcaggtgagagctgaaattttaccttggacttgcctgggtgtttttcacaggggagggtactgagctcccagttggtaaagtaaatgcttgtaaaagacatgttctactggatcaaagtcagccctagaaagttggccacatctcttcccagataaaattgttcagcctgggggttggtaagaaagtggatttggattaataaataactctaagaaatcaaatgtgtagagtttactaaagagctaccacttggacagtaagtatcctttttgcaggtgtgaatttcctagaaataattcacttgcaattttgcaatatgactttttcaagctcatattaatactttgatacttacatcagggaaattcaatggaaaatatctgctcctgtgtctcataatttgccagatatattatctgtacatataacgatggactaaaaagaaggcagggcaattctaatggttctaggacaaagccaactatattatcatctcttgaagtctagaagccagccttagtcatctgtgcatatgacaaaacaatataatattgtctagaatataatctatgctcactgtatatttgtaggatgacataaacaattctctcataactacctaccattagaatgagattttgacactctctcccaaaacctaattctggaatgttattgtctcaagacaattcttggttgcttcccaaggaagttctccttagacctataacttgaaaggaaaaaaactgagaaggatgaatattaaaatgatattttgttatggtatctcataaggtatgttagtttttttttttttttttttgagacggagtctcgctctgtcgcccaggctggagtgcagtggcgcgatctcggctcactgcaagctccgcctcctgggttgacgccattctcctgcgtcagcctcccgagtagctgggactgcaggcgcccgacacgacgcc

SEQ ID NO: 60299 - DNA, 445 bp, Homo sapiens
agacgcggcgcttctgtcaattgtgcagagcaattactaagaaaatattgtgacgatgttgtagggcgaaaggggacgtgaggaggaaagggagggggagttagtttggagagcaatttgcaaaggaatattaactttgattcccgaggtcaccgcgggaaaaggggttctgggctgcagagctcttcctctaggtggcggactttggcaccaaacaaccgctagatgagcgctgacttcaaacacaggattaagcttcttgctggttaaaaataataacagtaataatatagaggtgtggggctgttttttcccccttttggatatttatttattgcagggaaaagtcattgattttcctaagcaaactgtgtttctccttcacttggtggaaaataaaaactgtttgaataaataagttatttctgaacattttgttgtcaaa

SEQ ID NO: 60300 - DNA, 1021 bp, Homo sapiens
gaagcttcgtcccagaggggcacctgcaagatgccaaccagagctctcctgtatgagttgtctgttgacccctgctgggaggtgtctccctttcaggaggctcaggggtcagggacccacttgaggaggcagtctgtcccttagcagagcttaaatgttgtgctggaagatctgcttctgtcttcagagccagcaggcaggaatatttaagtccactgaagctgtgcccacagcagccccttcccccaggtcccagggagatgatgggagttttatctataacctcctaactgggactgctgcctttctttcagagatgccctacccagagaggaggaatctagagagagtctgcctaatttggctttgctgcgctgcaatgggctccctccagtccaaagttcctggaggctttgtttacattgtgagggaaaaaccgcttactcaagcctcagtaatggcagacgcccctccccccatcaagctccaatgtcccaggtcaacttcagactgttgtgctggcagcgagaatttcaagtcagtggatcttagcttgcttggctctgtggggttggaatctgcttaacaagaccacttggctacctggcttcagccccctttccaggggagtgagtggttctgtctcacttgcgttccaggcaccacacaattggaaatgtagaaattacctgccttctgcgttggtctccctgggcgctgcagactggggctgttcctcttcagccatcttgcagggaatcacaataaagaatttttaaaaggaagagaaaagcaatcatcactattttggttttgttttgttttaggagtaactgactactgaacagtactgcatgtttctgaggttcctctgttattcctgtagttcactacctctgcatcctccccaggacaagaaattcattttccttattgtactgtgttatgccaagaatattactattgttcggtgaatataaaataatcattatagcaacaatttttttggcgtcctaaataa

SEQ ID NO: 60301 - DNA, 454 bp, Homo sapiens
ttcccccgacttctctccaccccaaattattcaggtatcttttcaaaatagaaaccagatagaacaatcattctggtgatagagccttcgccaatcaaccttcaagctccttgccttcaggcaagtgttttctcttttttttttccctttcaattctgcctcaccacctgtcacagtgtagtgcttagtacttctctccctttggcttgcttcatgctgatgggaagttgtgtgtttattttaaaaatcgttttgcaacccttcacattccagctctcaacccagcatgctgttgctcagcaacactaactgggacgctcctctcagggactgaaaccagaggctgccggctgcaaacaaggccactggaaatcatcgtctcactcactccggagtcaattactggaatccaatgaagtgcaagacctttagagactcgagtcggcatctttcc

SEQ ID NO: 60302 - DNA, 715 bp, Homo sapiens
gccaggttaagtgtgtttggtttcactgaaaatgagatggaagccatgcagaaggtttatagcagagcaggaacatgatgggctcactttagaaggatcattctgactgctgagtagaaaagaatcatacacagacaaagacagaggcagagaccagttagctggttgactggcaggtgagagtgacagtggcaaggacaaggaagtgataaaaatgagtagaaggagtcagagttgggatacattgtaaagatacagctgaaagcacttgctgatgaactggatatgggataaatgtgaaagagagaagtcaagcatgacacctgtgttaaagtgacctcatgctggaaaaccccacagctcccaagtttaaacatgttacacagttcaggctacaaatagagaccaactgcagggtcgatagccaaatccctaggaaagataatctgattggcccagtttggatcaggtgccccagcaatttctgtaactcctgtactgcagggggggttgtgtctaacattatgcattagcttcttccaggatcttctcaggcatgaatgtgccaggcaaatcctaactataatcaacccaccctccttcattctaaccattgttccaagagctgtgccaaggacactgcatatattaccacagtaattacaatgagttgtggtaatgtataaatggaaaaaacaagacccataaatgctaa

SEQ ID NO: 60303 - DNA, 1206 bp, Homo sapiens
gagtagctgaaagtctcagctaaaagcacacatttttctattactctcctcggttctctctctccctctgtgctgtttatctcaagtaactaggggagcttgtttaagtgaaatcttgttataaacagttaagtcgaatgatgctactagaagaaggctgggcacagagagatctgtgaccatggtcaaagccaagagtctccttagtatagtccagagagatcagttcacttggcccctccaagctggtggtgactcaaaaatcaggcagaaagccagaggatatctgggttctgactcatgtaaacaggaaacagtgccaaaggcctccagccagccccaggtgtgcagactgcagacctgcactggcttctcattgacctgcagttggcacagcgttatctacaggctctgtcattattactgccatgactgtgtcatgtttggagagcagatgcctcctctccccactgtcacttggaattcacaagagggctgaaaagcatgcctgatcagcttaggcagcggaattctctgctctagccagactttctagattgatatcagcttttattatcttatcatcttttctcagaaaattcaaaacgtttctcattgtcccaatcccagttactctacttcccacataacctctagcaaataatttacatctctaaaatgccctgtcttttacctttgcagaagctgataagatagtcagagatggtgtgtagtccttctctttgtccatattgttaacaataaagttagttctcaaagatgcacaaaacctcacacctgggaacagagtcactgtaaggaaatacaacttttatctaagttcatttctgtttaccttggctacctcccatttttcacactccagaaagaaaagaaaattcccaatcaggttcttgccagaaccctagtacagggcaggaatgaggacatgggcagtgccagggcaaatttttggctccatggttgcaacttggcagcatcgccttccaaacaagaaacaattgcataaacttatatggtttcaaaaggtttaaatgtttgccaggcgtgaaagggagaaaaaaaaaatcatttcacagaattccagctcagcggttctaaaaatgatgaaccttctagcttccaactatctgagacccctgccctctaaaatttcctgccacatttcttgggacctcctacatt

SEQ ID NO: 60304 - DNA, 1052 bp, Homo sapiens
gcaaactctcctgttgtgctggttagttcctctgggaagcagacaccatgatggagtctataatgcaagagatatgcctgagaaaggtaaaagggagatgggcttaaaggtaaaagggagatgggcttagactgtatttgcatgtactatacaaaaggtggagcacatgccaattatccatgtcaaagaatttggaggcagtgagccagtgaagattatgcaggggctaaattctctccttggccacctttgacttagacacagagtggttgttcaatcaatactggctcatttgaaatttcatcgagcaacagcaaagttaaacatttgcaaggtcgcacgcagtctcctctgaattataaagcactttttgaacatcctcaatgtaaagaaggcaaactgaggcacagttcatgggcagagccaggcagagcctggagctcttgccctccaacgggcgatcctaacccagcacattcattcccttcccctccccctgctccaaagcttgatgtgtgttgaatacactcggtagttctcaacatgttttttccttacagttctttattagcaacattcatttaggttttggactcttgtcaaatgtaatgtgaatggagaccagatgccttttctgaactcaacagaacaagaggagagtcacagagcccatcttgccacaatcaaaactagtgcttacaacaacacccactgttggtgacaggctgtgtggaacagggccagtgctgatctagcagtatatgccagctcaatgagtcagaaaaatgtttcagatgtgccaggttgctcagaaatccccatgagttcctgggcagaataattgttgtgttccccaagagcaaggaaccaagatgatcagaagcaacatccctgggatggtgtgtgtcattcgtgtccctagctggcagcagagggccattgctttgaaaagggtaccgtagacccacatgaagggctgcaaaggccaggggtagggtatctggcagccattcaaaaacacaggatgggggagaagcaattgtgggaaggaa

SEQ ID NO: 60305 - DNA, 1288 bp, Homo sapiens
tttctggaagctcccagatgtctcttcagaagcttaagacgttttggatcaaagacatactgtggtcctcgataaaggaaaagatactgttgtttcaataatctcacgggacaatacttaataatctcgtaaagtgagcccttatctgaggggggaaataaaatttattgccttctaacaccatcaaatagtttatttgagaccaggaattggtccgaccacttattttcaacttttggctgaatacgggtgaacttggctttttgttttccctaaacccaggacagaaataaattaaaagccctgactgtgccgggataggactgagaggcccaggaaaggctgcactaagtacttggagggtttgtttttttccttcttgctgctgctgctgtttcctcgaggatgaagggaaagataaaaccctcctgcctccgttcgtgctttcattcgccccattcctcgaaggtgacgaaacttcagcacatctctgtccattttggaaaaaagaggatcccctcaagagcaaataggcggaaacaatgaccccgcgcccggagtttttctgagctcctaaatagggagagagacccgacaaaacaaacaagcgaaggcgacacagccaggttagcaccgagcagcagcgcaggagcgccagaagggcgggagcacacgggcccttccccacagccagcgcctccgcgggtcccacccctcgagggcggggccgaccgctctttccgggtttgcgagcggaagtggacgaatttgaatcctgtgggccgttgaatgtggctgctcgcggtcggcgtgccccgacgtacagcgggccgggaaaagtggcactgaggctctggaacttctgcccagctctccttggtgagtaaatggggaacgggaagacgcagaacgttccagagagagaagcaggaccgtggggtgggagagggtgtcaggaggccggacgtcgcagccggggcctcgcagtgcttttggggacgtctggtgctggggcccggcctggagactaagggaattcggggcactgggggcgtttgctggaccagcgctctcgacggttgcgcacgccagccagctctcagtgttgaggattcggaggccctgccggtcccccgcgagtaaaccttgtttatacgcatcctccgtggctttttttaaacccgtagtttattatttccaccaattcggctcgaatgctgaaattttaacagtagttaaatctcactgtgaaggcgttgccacgtttaaacaaatctcttttaatgaa

SEQ ID NO: 60306 - DNA, 2027 bp, Homo sapiens
attttgcggtcacgtggcttcaagtgtacattaaaccgccagcacaagaccagcctggccaacatggtgaatccccgtctctacaaaaaaaaaaaaaaaaaatttagccgggcgtggtgacccctgcctatagtcccaactagtgggcagtctgaggtggaaggatagtttgggaggatcgcttgagtccgggaggtcgagactacagtgagccgagattctgccactgcactccagcctgagcgacagacagtgagatactatctcaaaaacaaaacaacaacaaaaaccagcacatcagcctggcctgatggtgtgcccctgtagtccctagctacttgggagactgaagcaggaggatcgtttgaccgtcagaatttgaggctgcagtgatccctgattgcgcgctccagcctaggcaacacaccccactactgcttgacttccttcccacggcaaggtgattttgcaattactacaaggaaagaggagaaatgctaatttctcattttgtacctccctggatcccgtgtccatgccggcagaacgccaccataaagctacacctttttttttaaagagatgcgactgagaaatatgccagatcagagtaatgctccaatgctttccgtttctctggagaaaggagcaaagggaagactcctgctgcactgagaaacgagagctaacgttaaaatgttgcctgtgtttcaggagcttcatttacttcagtcctgtggtccttatactcctagagcattatcaccctttaagtgctctgtaagtcaccaaaccaacagttcagtaattaggttcttagcactacacgctcctaccctaacagctcaatttaatgttgctaccatttgagagagtgtggcttgattcggtaggataaaaactcttagtattcgcctaacattacgggccactgaattaacctgcaccgggtctcccagttctaccgagagtggaggtcttcctggaggaggtggggtccggaactcaggcacaccctttggccccgcccttccgggctttgcttccggggcggtaagggcagccacgtcatccccccgctccgctccccagccgggcagtggctcgtgggagccaagatggcggcggcggcggcagcgacagcagcagcagcagccagtattcgggaaaggcagacaggtactgacttattctcttctccttgaagcttcgtgactgccccgacgacatccttctcctctggtgcgtgcagctcagagaccgatctccaggagtttaatccagtccctagaacatcaagagcccctcccctttgagtttttggggagaagttgccattagcttgaggactcggttcctcctgtggtgcaggagaaggagcttcagcggtgggcggattgctacggccctgctcttgtctccttcctagtgggcatcagaaggccatcacaacaagatctagcagctgatagcttcttatctatgttgccacctatgaggtctccgagtttctgtgcgtggttcagttctcctggttttgatttttaagagaactcccattttctgacactcagagaatttaggtattttcacagcggcttgctttgcgccacttctctacttcggaccagtcttttgggggtacctgcagaaaaatgcctggtgataaacattttctccttcagcttgctggaaggcattgaagaatggcaaaacaaatgaattaatagctttctcattttaattgtttgacacattgttttaaaataatattttatcttcaatagagcatgtttatatagcttctatttatgcagagaaatgtaaaaaggcacatattcttctcttgagttttgggtttttttccgtcttagaaattagttttgccttacttgaaaacttctcatgacaacttggtttatacctgttagctacaaactaaaggtttatacttgttaactagttgtcttaaaagttttcaagcaatttattctgaggagctaatagaaataaggcatcaagaatgt

SEQ ID NO: 60307 - DNA, 775 bp, Homo sapiens
ctacctatttattcctgctggtttttttgttacttacttatctttttgattgtgtccattatttctttaagtttttttttttcttagagacagagtctcactctgttgcccagactagagtgcagtggtgagatcatagctcgctgcaatctccaactcctgggctcaagagagcctcttgcttcagcctcccaggtaggtagggcaacaggcgtgccccaccatacctggctacttttttcttattttttgtagagatggggctctcaatatgttatctagtgtggtctcaaattcccagcctccagcgatcctcttgcctccatctccaaaagagattacaggcatgatccaccacaccctcccctttaaatatttttaacatagcttccctatattgtgcaactgacaactctaataactgaagtctatggggaagggtctaaatctgttttttttttttctattgatctcactcagcttggcttgcattgcaatgtgcatggtgaactttgattgtgaaatgattgcttaatctgcaaactaaattgttgaagatttcccccagagacaatttgttttttgcttcttcttttaccagcagcaaaaggcagtactaccctgggatgacatcagccccttggcacagtcgaagctcacattggatgttccaagctcagttttcttacctggccaccaatatcttggtagcagcatgactattgacatctactctcagggaaagctcatctcacactttcattgcccacggctc

SEQ ID NO: 60308 - DNA, 728 bp, Homo sapiens
agttacactttaaaaaaacaggtgatgtggttttgctgaatttaaatctctgctcacaacatgaaaatgtaccaactgcaccacaagatatcttttaagtttggaatgactggactactgagtgcctcataataagacatgcactttttcttagtttcaattatgcgacattaatgccacatattacaaaataatttggtcatttaactcaaaaccatcttattaagaacatctctattcttttccttaatattagtccccaacaaccaaaacagtatttacttggcatcactaaaaacataaacacaaatgcaaattttgaccccagggtcaagtgacagttatgagtcaaatgatctagaatatgtttaagataaaatactaaatgtttaagtgccagagcactttcagatctcacttgaaaataccgtgttcattgtatgatcctgccagcaaataaataatgaagtttccattacctgataacccacagtcatcaggaaaacgtttccaaagctgtgaatcatcttccacgaaagttaaaaataaatcagattcatctgtccaaaatgacataactccaaaagttaactttacaattcttgttgttactgaagcatctgcatattgtttaacaaagttcctgggagcagcaagatggctataaaggccacaaaagaaaaaaaaaacaaaagaactcccttcttataaattattataaaggacac

SEQ ID NO: 60309 - DNA, 2639 bp, Homo sapiens
tgagatccaggacatgagctgttaactaccaacagcttccaaatgtgcagcctatcaaaggttcacattatgaggatcgagtcaagctcaactatgaagggttccgagaacatctcactttgcttctcctgcaagagtaagtaacatgatataactacgtttcacttcaagggaatattaaatctcttcagtcgtttcataaatacagcatcgatcgtctggtttggtttttttatagataaagaaacggatgggggaaaggagatctagtggagagtactgtaaaaagaaaaattcagtgctgaaagcgttgatgagtcactaagtaaggaataactacagagaatccaagtgagtaaggcagcatctcaggtgagaaagtacttaaagttgacgatgggaaataaaacttcacaggtcagtcccaagtcactgtgcaccctagcagcccaggaaagaagcgtggctgtcaaggggcaagcgcgtaccaagtctgagggagggggccagatacgccaaatcggaaaggggggtggtccggaaaaggggggtaagatgcctatcctagtccctctcttcgggctcttcatctcaagaggaacaaacaagagcaaactcagtgttgagaggccccaaaccggactctcccacagagaggtgctcggtcccaagccccggaggcccgggaaggccgcctccggaggagcccccgcagacgccatactaaaagccaaaatggctgccccgaggaggcccgcaccgcgtagccagtgaaggttggggagcaagcttatgcgggaaagagggagggggactccaggaaaagccgttgagaggaccatcacaacctgagcagcacaggtaggttccgctcggcctcccaaggcgccggctccggctgagtggagtccccagccccaccccccggccgggaacccagccgccgcagctcccgcacaccgaccccaacgaggtacctgcagttcggcccgttccacctcccagtgcgcccgctccatctcgaaccgagcccactcgtgctggatgtagtgcagtatccccgggatagtgtactgctgcggccgggacagctcggggcctgccgcgggacccgctccctcggaggccggaggacccccgccgcccgccgctccgttccccccgggcgaaaggcccaggttccccccaggtccctgctgctgccggggaggggccgccatccccgggccgccaccaccgcctccggcaagctcgtccattgtgtgtggggccccggccggggcgcagggcgagacgccgacagctgggggaagggccggagagggtggccccgcgctggctgcggggcggaggccggccgggagaggggcggggaaggggtcgttgctgtgtgcctgccgtgggtcagagcagggagctgccggctgccgccattacaatccctcctccatctgcccgtctcactcactcactttaggggaagggggggcctcggcgggaggggtggggggagagttgggaaggggataggcggagggccgtcactagcgcacagcatgctgggtagcgaacgcagcctcacgcttaatcgccaaatagagtccggcctcaccctacgccggcgcactgagaacgcagcccgggtcgccgttagagggcggggaaagagctcgggctccgcccctaggcccgccctcagacccgatccggtgtctggccgcagctaccggacacctgggctccgactctgacttttggaagcgaggcggccttaggcttcctggttatcagtttccttttagcaggccgtccccgggcgctgtttccttcccaggggtctctcacccgtgtcccggctttctgagctggttgttaacctggctggtcgctctggccgaccgcatcccgtctcggattcctgacgtttctttttcattctttgagtgtttcaggcagtcccaagggtgggccctctttcccttcctgtcactcgctctgcctctggtttcttagaaccagtcagttctctgctggcaaatagccaagatcctccggctgtggttactgattcctcgtctctgtcttgagcctgggctttggtcccatttctatgcgctcggtcgcccgtcgtaacttattccactttgcgtcccctcttctttccttttctggaatgggttgtgggggggttgggagagggggaggagcgattttttttttcttgggagaagaagaggtagtgaattcctttagatcttgacgatgatgggtagagggagagaagtttgaaggagactggctagactaacaatttgatacggtagaaatgaatgggctcacaaatattgtcatcaatagactattttgatcgaaacagaaaataaaagcactgtgagtacaacttaaaatcctagatgaatgttctcctgggtcattaaatgtttaagtgaatatggccgggcgcggctgctcaagcctgtaatcccagcactttgggaagccgaggtgggcgatcacttgaggccaggagttcgagaccagcttggccaacattgtgaaaccccatttctactaaaaatacaaaaattagccgggcatggtggcgcacacctgtagtcccagctcctggggaggctgag

SEQ ID NO: 60310 - DNA, 3598 bp, Homo sapiens
ggagggaggttattggatcatggggacggtttcccccatgctgttctcgtgatagtgagttctcaggagatctgatggttttataaagggctcttctcccttcaatttctcctgtctctcctgcccttcatgtaagatgtacttgcttccccttctgccatgattgtaattttcctgaggcctccccagccatgcagaactgtgagtccattaaacctctttcctttataaattacccagtctcaggaaagttctttgtagcagtatgaaaacggactaatacagcagtctttgacttcatccttcttagaccataaagtcatttatctgaaggattgcagccttgtagaagggaaggacctctacccctcttgttcaaaactgtaccccaagagtctgggaaagggtggatcttcaaatgtttgatgaataactcaaatttagactagactaatatgaatattttttcgtcacgtcaatcatttttgttagttgttactgtcattataccagttgtctcttaaagttcaataaccagaactgccctgagttttgaaagtaaagaacaccaatatttcctcctctattggaaaaatattttgtaaactcttgatgttgtgctttggttcatgattcctgatgacactctggagagagcttctagaatcttgtcctctgtagataatgagctcacccaagccacattatcacctacaactcacctaactggaactatctccctaaactgtggctgagtcatttcctctcttaaagctcacgttcgaaacttcctatttgttctgtcctttcatcagtcctgttcatgcctcctccatgcccatagattctcccagtttcaatctgttgctgataatcttcaacaatgcctatttgccagcctatgcaacatggggagaccctgtctctacaaaaaataaaacaattaactgggcgtggtggcaggtgcctgtagtcccagctatttgagcgcgggaggttgagtctgcagtgagctatgatcacaccactgggtgcccagcctggatgatagagtgagaccttgtcccaaaaaaaaaaaaaaaaaaaagaaaaaagagctgggcgcggtggctcatgcctataatcccagcactttgggaggccaaagcgggcagatcacctgaggtcaggagttcgagaccagcctggccaacatggtggaacctcatctctactaaaaacacaaaaaattagccaggcatggtgcaggcgtcacctttgaaacttcctaaatagggtgtctaatcttggacaccgtatgcttattctattttggaccagagaggaacttttcgtatttcatgtgcatgtatgatgtcaacaaagataggttaaggaattccaggcttttaaataaatcagaagtagataaaactcaaatgtcttcttatcagttattacaatacctgatgttcaaagagtgttgaccgggcctctgaggactgtatagctccctgtaattactcacccagaatgtacatttttttttttttttgagatgaagtctcactctgttgttgcccaagctgaggtgcagtggtgcgatctcggctcactgcaacctccacctcctgggttcaagcgattctcctgcctcagcctcccaagcagcctcccaagtagctgggactacaggcatgtgccaccatgaccggctaatttttctatttttagtagagacaggatttcactatgttggccaggctggtcttgaactcctgacctcatgatccgcccgcctcggcctcccaaagtgctgggattacaggcatgagccaccacgcccagcctcgtacagttttatatcttgctgactaggtacctggcatccttctaccaaagagttcaaatcaattcacaaacactaatctagtcatcttttttgcatcatctgcaaaggctataacaaatattcttatctccacagtgaagaaagaaagctgaagagctcttggtcacttcagtaagtacttagtagaagttctcactctttacatcagtgagtgtatatgtgtatttggaaactagaaagtctccccgcacagttctgcctgctgtcatcctatcaatgggttcattattactgtctctggttctcaaatcatttacatgtttgaaattatttttagatagttttggggtgatccagtcactcagggaaatgacatagtgtttaatttttttttttgagatggagtctcgctctgtcacccaggctggagtgcagtggcgtgatctcggctcactgcaacctctgcctcccgtgttcaaacaattctcctgcctcaacttcctgagtagttgggactacagtcatgcgccaccatgcccagctaatttttgtatatttagtagagacagggttttaccattctggccaggctggccttgaactcctgaccttgtgatccacccgcctcagcctcccaaagtgctgggattacaggcgtgagccactccgcccgccacagtgtttacatttataaacagagagagcaagcaaagtattagactccagaggaagatctttaagaagagctgacatgtgttcagaaaccaaaggagcaaaatgtttaatgcatgtgtaacagaaaggaggcagctctgacctgcaccatgcttcaacctgccaaataagatctacttctcattatagtgattgactttggctaagaaaattgtagaaacacaggcagggcacttgaaccctttggataatattctgtgaggaaaaggaaaaggatcttcacagattacagaaaatagataccaaacctttaggaaactcagcatgctgtataaaattgtagtccaagtttattctgtaattgtctcctgggtatgagtaagaaaaaaaataggctgtgataatattgtttaatagctaactcatagagatgtcaaaattgaaaagaaaaagaaaggattgcctggagccaagtccctcctggacattggctaagaatgaacaaccaggtctgtaaacataagagcaaaatgactggaagatgtgactaattggtaaattgccaaaagtttgctaggtaataatttaacaggcttggtttgtcattgaagcagcagggtgagtattccaaagaatgacaccaaacatggacacctggcccagtaaatctatgctaaagacagtgttcctttggagaatatgttaaattggcaaaaagtcacaaaaacatattttttataacagcatatttttaaatgatggtaacctttagttttggctttctgttagtagaaagtacatgacaattatcttaacaaaaaaaagactgaagaattatttataggcatttaaaataactcctacttctctttgcttcttttgttttatagtttttatagtttcgtaacaattggatatttaaaattgtgttatacagtgttgtgcatagactttttttgggggggaaacaaactctcactgcattgcccaggctggtctcgaactcctggcctcaagggatcctcttgcctcagcctcccaaagtgctgggattacaggcgtaagccactacacctgtgcctagaagttttg

SEQ ID NO: 60311 - DNA, 707 bp, Homo sapiens
tgcaagcaggacatttaaaggcaaaggtttggccatgagtacctttgagacatttttttccttttacctggcagttgaaatccaaggtatagaattataatttctaactatcataaagatggtttttaaataactttgctgaaatggagtaaaagaaaggatggtaatcttagcttcctggtaacctgccgtaatttactgacaataatttgtgaggcaaataaaagcagcagttaataccaaatgattaaacaccacagagtatgttgcaatcccacccacagccatgagcttatcttcctggaaaagggagtgaatggccacaggcctcccccatggcacagctgttatatccccagctgagctggtctagataaatgaaggcaacaaccccaggcttggccacactgggcctggctctttacagcttagtgtgtagaattgctgtaagataaccacctgtctgatagggcttaggaaacaagaaatgagctgggaggacaaaaaaatatatatatatatatttatttatttatgtatatatatgtatttatgtatatatgtatatatatttatatgtatttatgtatatatgtatatatatttatgtatatatgtatatatatttatatatttatgtatatatatttttatatatataaaacttagtccaagtattatatcataatgttgtttctagttgcagc

SEQ ID NO: 60312 - DNA, 2465 bp, Homo sapiens
cctagatcaccccactccactctagcctgagcaacagagagaagctgcgtctaaaaaaagataaaattccaatgttgggaccataaacatttcaatcactgtatttatttttattttcatttttatttatttatttattctgagacagagtcttactctgttgcccagactggagtgcagtggcacagttttggctctctgcaacctccgcctccgaggttcaagtgattctcctgccttagcctcccgagtagctgggattacaggcgtgtgccaccatgcccagctaattgtatttttagctgagacagggtttcaccatattggccaggctggtctcgatctcctgacctcacgtaatctgcccacctcagcctcccaaagtgctgggattacaggtgtgagccaccgtgcccggcctcatttcaatcactgtaattaaaaagttgatttcaagtggcactaatattccaggagccctacgatgttcaattccaatccacatgatgtgaaaattcagaaaggctcttaggtttgtaggttgggagaaagtggacttcagtaactccgctctttgggagattgtttctagctcatgtcagctcaaccttagggagcccatgaaagaaaacaagttgcctgaggatctttagagtcagtcaagttcattatagcctgaaggtaagactgtctttcaatagccattctgagctcactacattagtataccaacagtctgggcccttcttacttcctcctatttcaaatgtcaccattgcagtgtgtttattccatgggcttagcatatagggtattttttggtccctgcttacctggcacatggcctaaatgccattactcttggcctcaccagggtgtacaagttgctcataaaccaaatcaagatgtaaacaacagctggattcttattttaaaagagtcacaagattccagggggaaatcagctttcaggcctttgcctcacattggatttggtctgtagtttccccatatagtgccagaaagctgcatgattattagagtttgagtcagatacacagatacacaggcacagtcacatgtccacagtatacagtgacctcactgagcaactcatgtttccaggatgttgggaaattgacttgctggaggaccttgtccttgttccttgtaatgtggggatgtcagtggtttatatgatttagcagtaaattctgatctgaatttcaaaacaattgggcagttgctcaaggggacatctgaacagcagatcatctgcttgccaaagatggggcagtccacagagcagcttgatccccgaactaattcatgggttaaaattagatttccttgtatctcaaagaaagttatcttggagaaggcgacattttcaaaggcactaaggctttcattgcccttagtgaatataacaggaaggttctccaggccatttttcacgtagccacctgtgcttcttagctctgcctttctatatatacctggctgccattcccactttgtctcacctaagttctggcttctgggtctagtgaacaggttagagtcaagggcctaacattccagtcccagtttggccgtgggacaaagcaatcatctgtataattgaaagacagtattaataggtatatcagaataacgcttttttttttttttctgggtcacttaaggacagttcccatgggtccttggaaaacagtttattctgctggaggactatttgcacagagcttaatgagatattcacacagagcctaataaaaactttaaagtcattcaccatttgtcctattctgtgtagttgcacttcactaagcaaatacagtgtagactttgaatatctggtctggttgaaaaaaatcaaagggaacaattcactttacaaagatttaattttgaactccgctagtgcatttaattacctatttgttgaatgaagtttatttgaaacaatctgtcaactgtttttgtttttgtaacagaccaggatcatgctctttaagtagacagagaacttcagatattaaggtgtaaaactgagaaacattcattgtcatcatctcattccagttccccttctttcaccaaagaaaagttaggtattcagttgaagggattcttgagggaagtatttagttctttgtggtttgctagacatcatagtctaacaatattttcttctttccccatgccccatactaacttcccagtaagaacacctgtaagccaaagtggctccatcattctcaaatgacttcttagaactacccatttgtaagagatactgtcttgaaatccagaaattttattatgccctgccttcttcattcattttctcctcatagttatttttacatcagtctgtctgacagagaagaaaactgaaggtacaaggcatttattttggggtggaggtttgggggctgaggagggaggtgtctagcccc

SEQ ID NO: 60313 - DNA, 1171 bp, Homo sapiens
ctacacctctgtagctatttggggaagaattaaaaaccaagctattaaatgttcacagtgaattattttgcggccagttctctcctatttaaagcagactgcttgtattttaatgtcagctcataatactggtatttgaggtacttgaatcttataaaactgcctgctctacagacctcctgaactgaaaacgaccaaaatcagattcctactcagccaaaaacctgcagtcatctttcaccctttcttccttcaatccaccatctaactggtcaccaatccctatacaacccatctgccaaactcttaaatttgttctcactaatccagttgccctgaagttcctatctcaatcaacacttgtctgtttctattctctccttcctccagttcttctctctgccagggtgtcaaagtgatcttgatcaacagaaatccagatgtgtcaaattttccttacaggtctttaataatccttcttaaatgtgaggtagagtccacgctctttcacatggcctacaaaagccatcataggttataaaaagctcctctctactttcttaacattattctcggagctttccaaatgtatcctgtactccattaatattgaaatacttgcaactgctaacaaaacacactcattcaatcattcagtaaatatctactgaggacctaaggatcaggccctattctgtatctccttgcctttgtaggaatatagcagtacataagaccagctctcgtggtgcttactttaaagagacaagacaataaaacaaacaaaaccccccaaaaaccagtatttcagagagtgaaacctttttttttttagatggagtcttgctctgttgcctaggctggaatgcagtggcgcaatcttggctcactgcaacctccgcctcatgggttcaagcaattctcctgactcaccctcccgagtagctgggactacagccaagtgctaccatacccagctaatttttttatttttcatagagacagggtttcgccacgttagccaggctggtctcaaactcctggcctcaagtgatccacctgcctcggcctcccaaagtgctgggataacaggcgtgagccaccgcacccagccaagatagcataagctttgtaaagtcagtaaaacattattgatataaaaagtgtaacg

SEQ ID NO: 60314 - DNA, 569 bp, Homo sapiens
cttcattttaaaaaaatgaaatattttaactgaaaaacctgaacacatctggtttcttaaagacaataaataacgcaacatcttttgatccatttcatattccatttttgcctctgctcccagccttgactttcttggtattgctgagctaaaaataactcctggtacagcagctgaaaattgtggttttcccttgcaaagaaaaagggggtaaagtccaattataagatgtaagtttgcttttctccaattaaaatacacatacaaatttgactgcaattcattcaacacatctattgaatgcctttctacaccaagtgctatgctaagtgttgggggtgggacacaaagatgagtaagaaagagttcactgactctgaagaattcaatctaatgatacagtcaagaactatgcaaagtacacttacaaagcgttataaaacacaatgtcatacccataaataaaaatgataaaaatctatctctgataaattttccttgtatttttcctgttgaaactattaagagtggtttttaactttttttttttttgagacaaggtctcactc

SEQ ID NO: 60315 - DNA, 3343 bp, Homo sapiens
aaaacaacgatccacgttgtcagacatcaaaagcagcatgcatagctgttcaagggctattagttgcatgtccctttcatctccctgtcccatctgtagccattccagcaatgtatctgggtccacatctgccatggttttttaaaagtctctttgcttaaatttgaaaagtaaagggagaaaagtcctttaaattccgggactgaacagcttgggcttaaatttttcttcctttacatctgctagaaccaaattttcatagtgtcctcctagcaattaaaaaagactcctaagtacgtttggacgtaagagtgcttaatgcagtttttcaactttccttatccgccaggtttaacgtacagatatcataccaaatgaaaaccagttttgcacaagagtatataagctgattaggttgctgcttaactagaaaccagagctgtctgtgtcaaagacagtcagtcaagcttcaggtcccactactgctatcactaaagtctatgccaaaaggcaaagaacacctaactaaaggttctgttttttccagcaaacttcatccccctccttctctacccaaaactgatcttcagataagggttagattcagtattttgaggaaactctaaacaccttgatccaatccccctccaaattgtttctccttcaaaattacctccaatttcacatattctgctgacttctcaatttacttctattttaaagatatccaaatacaaacgacaattatatacaagatttatctatgaataaagagttggttaggaattttggcagtcttggcaactattcttaaaagttaaaaaaataaaaaaattaaaaaaggaaaggctaaaagtaaatgcaatggaccagcaggttacggatccgaacgaatgtaggccaacctagggccctctttccccagcttcacaagatagggcagttggttaaaaaaacaaaaacaaaaccgagaagcaaccccaacaggtaagtcattacaaaagcgccccgtaagcgccctgactggaggacagctttgggtcccacgtaacgcagccgcaagtgtgggaagccggcggcggggcgcggtgggcacccaacggcggcgaccagcggggttgaccccacacccggggcccggccgagccgggcgctgagaggcgctggcccccgcgctgtggttccccagcaccaaaccccgctaagttaactacctgtgtctacgaggaagggaagttctggagaagcagcagcaagccttcgtgcccgagaggaggccgccgggccaggcagggcgccggctctcccgggagctgcgcccggaactcgaaggcctggcagcgaacccttctcaagggcaaaaggagccggcctgaggctctggcgcgggcaaccgggccccgccgccggcagggccccgggaggggaacaaaggggccagcggggaagtcggcagcagcctggccgacctcactcggcgccggggtctcgctttccgccactcgccgggcgtccgggatccgcgcccccacgcagggcccttccgacggtccgaggcgctcccgcctccccttcccgcaggctcttactcgggcttgtcgttccaaaccgctccgatccagctcccaacaggccgccggcagagccaggcccggccgcggccctagagttcccaagaagccgcaggccgcgcaggtcgaaccgggcaggcggcacaggaaaagccgcgcctcgtccctccccttcctccgcgaggacctggtgacagggaagcgagaggttctcgcgtgcggcagcagccagcggacgtccagtccccagcacgcggctcctcaggccctgcaactcagaggcccgcgcggtgctgcgggcgacggcggcggcggcgcggcggggaggcccagtccatcgcgaaccgggagggggaggggaggagggtcgagggagagccaggcggggaagctgccgagggcagccgagcccggcggaggcggagcaaatccactcccccggcggcgaccccgccggcggccacctggggcgctgcgggacggccgaccgccgcgcaggggcgccaaaccgggtacgccgcgtcgccgtccctgccccggagctctcgcccccgccgcctcgggctgtgtcgtacgtttctgccgcggcttttctatggtgcgccctggcccccttttcgcttccctgtcagtccgagcgcgctcatgcacgcacgtccagcttgcttggcgccgtggctaacactttgcgcgctcctgcggagggcgtcgcacggcacagcacagcaaagctgcggcccaacctgtccccgctgagccttccgcccaggccacccgcactcagccacgatcttccctcctcgcgcacggaagtgcgtcgcgtaaggaaggcgtctccccccgctcctgggaggccgaccgcctggcggttcaccccaaagaaaacccttcagagcaaccctgggaaagaggtgctgccgacgattatcaacgttgtacagatgagacactgaggctccaggaaagcgcaaatgcaggcccagcgccgtgcccggtcggcagcagcactgagagtgcacttttgactacgtttcttgtggcttgtggtcacaagtatgtctgtggttattcttttcaaactttatttcacacgcattcagaataaaggatgcatgcttataggacgtagttggagcccggagacgtcctactgtactctcactttcagcttttaaacaaaaagaaaaattaatacgacatgatagtgtttgagacatggtccctcaggcaaccagaggagctgctaggtatgagtaaagaacagaatttgggtccgctgcgtttcctgtaatcccagcactttatgattttactctcttgaggcccggagttcgagaccagcctgagcaacatagacctggtctctgcaaaaaaattaaaatttaaaaaataattacccagatgcggtgacgcacacctatggtcccagctactggagcggttgagatgggatgatccctcgagcccaagaaattgaggctgcagtgagctttgataatgccacctcactccagcctgggcgactaagcaaatttgtcatttccaaaatactggttcttttttttctttcttttttactacttctttagaaaaagaaccagtattttggaaatgacaaatttgtacttcagatagctatccgcgcatgtcccgttgtcgcaggtaatggtccgtttaggtatcctgttaacgaaacaagaggaaaaagaggattcaactattttgtcccaagtacaacacatgaggataattatttagatgtcatgagtgtg

SEQ ID NO: 60316 - DNA, 2740 bp, Homo sapiens
caggagaatcacttgaacctgggaggcagaggttgtagtgagccgagatggtgccactgcactccagcctgggtgacagagcgagactccctctcaatcaatcaatcaataaatagtatgtaactcaatgatctatacagtctattttacccattttccctggtcccattaaaaaaaaacaaccacctggtaaaatgaggttgaaaaagatttctgtatacctaggtgccaaaggtgaaattcttcatcataaacatttaaggattgaatattagcagggctatcagttacacttagaacactaaagtagttgttggtgattcattataggtgagttttggccttttgctcctgtccaagttggaaacaccttccacactcaggttttgttggttaataaagttttgaccacagtaattcctgaatattaatgaaaagagtgagtcaaagtagtaaatgacctggttaatatgtactggtatgattcaaacttactatacaaagatactcattctaaggaacttactttgtccttctcaatcttgaggaaagttagctatattgagtgttctgcaatctcactaaccattgcataattttccttatgatatcctactttatcaaggggtggttagcctttgccttactctcttccagctttttaaaaacacattctttgtaaccaaataaaaatgaaatctgttttattcttctttcacactcaaaacaagcttttgatattcttggagtttttgttttgtttagcaaaatcaacctatgtcctttcattaatggtctggaatcttattagcaaacaaaatttgcaggtggcttttatgttactgttagtatcacactgtgtacagaggggacatggaagacactaaaaataactaatctaacctcagtaaatgtactgcactatatgggctgaatattctcacagacttaaagctctgagtaagatagtattcattcctagaacaaatgataattgaaatctttattctcttctcttttagggttccccacttcctctttccccctaacctgggcatagctacagggtttgtgtgtgtgtgtgtgtgtgtgtgtgtgtgtaaagaaatgacttgtagtctcaaaaaactaagcacagaaccttctttgcatagtgatttcttctatcatatacattctatattgtcacattcatgaaattacaacagaatttgtaataatacagcaatggctgttctccatttgaactattttagtcactgaaaaaagtgtggtgcctctgtcaaagatttacttatatattaccaatggattaatagaaatatattgaatgttgattaatttgtttcttctagttctttaattctaatattaagtttatttgaagctacaacccataagtgtccagcttttcatttctttcataaataaagctggaagtgattataagttcatatcctcatttgcttctgattgatgcttccttataggctctttctccccacccctctgctcctccccagtgttacacaacactacggagccaggaacacaatgtcaactgtcaacgtctttctaaaggcagtgggtgatatttacacacgtaagctgctggcactaacaaggtgactggagtcaaatgtaaaccacgggtttatcattcccagtcaaatatattgtgcaatggggtagcaataggcactgtgtgaaaggttgcctaacaagccgccagccttaggattagtcagctccttgctgtgagatgtgtgtgagcgagatactggaggtctctggtgatagaaaagcacgctggccaatggcaagaaccaaaaggaggggaaactcaattttttggcaaacaatttgaatcttagcaaaagacctttgttctctgaggtgcagaggctgagaggttactgagaaacatccaagaaaaggacgttctctgtgaaaacttcccctcctatacaaaactttataaactggtacgatttctggccatttaaatttatagtgaaatcaaaacatgtttctggggaaatcttttttttcttttcgtaataaaagttgtaattattatttttttaagacagagcctcgatctgtcgcccaggctggagtgcagtggcactatctcggctcactgccacctccacctcccaggttcaagtgattctcctgtctcagccttctgagtagctgggattacaggtgtgcaccaccacgcccagctaattttttttatttttagtagagacggggtttcaccatgttggcaggctggtctcgaactcctgacctcaagtgatctacccaccttgacctcccaaagttctgggaatacaggcgtgagcaaccgtgtctggcccaaaaattttaattattaaaaacaacataaacagactataggaaattagaaaaacaaagcaaggagaaaaacactcataatcccttttgctaaaacccaactatatcacagtagcatacattcttattatctgaactgtttttcatggttgtaatcacatggttatttttgtcatgtgatcatttttggtaacttgtaagattatttctttctatagggtgctacctaacaatattttaaataactgaataatattccattcaccatatggttgaactaacattcactttattccaacaaataggctatttccattttatgtttttattataaataacactgacataaacataacttgaaatacagcttttc

SEQ ID NO: 60317 - DNA, 960 bp, Homo sapiens
tgtattttcagtagagacagtgtttcaccatgttggccaggctggtctcaaactcttgacctcaagttatccgcccatctccttttcccaaagtgctgggattacaggcgtgagccactgtgcccggctaaaggaatttaattgagcaacgaacacattccctaattgggcagcccccagaatcacagcagattcacagagactctggcgcagccacgtggtggaagaggatttatagaccaaaaaaagggaaatgactccagaaattggaagtgaggtacagaatggctggattggttacagcttggcgtttgccatatttgaacacaatttgaacactcagtagtgtatgaatggtagaagtaccgccgctgggattggccaagacttagctattgttacaggtgcatactcctaaattaggttttcaatcttgtctaattattaagctaggttacagttcatccacaaggactcaaatatagaagtacgaagtcctttccagggcatatttagtttgctttagcacaagtaaacacagtccacttcagcattcaggatgcttgggtgcacaaaacgcagcgtacactctcatccctatgtgtgcaacagtatttatttctggcacttagaaacagcattcaatgaatccagagacacttcgttcttgtacaatggttattgttttctacaaatttttaccttaagactttctgttttaatgtttaacagtattaaaacagtattaactgtttttctgtgtgtttggtttttcattaattaacttatttattttattttttggctaatttttaaattttttgtagagaagccataacttattttaaaggctagtcaagtgaagcagtgggagttgagaaggaacaaagaaatctgtaactagttgtgatcaattagttgtaaacaccactgcactcagaccagcctattagctgtttt

SEQ ID NO: 60318 - DNA, 1807 bp, Homo sapiens
ccattaaaacacaactcgagcccaggaggttgagaccaattggaacaacatagtgagatcctgtatctacaaaacacacaagaaattagccaggcatgggggcttgtgcctgtagtaccagctactcaggaagctgaggcaggaggatcgcttgagcccaggagttcaagctgcagtgagctatgatcacgccactgcactccagcctaggcgccagagcaagccctgtctcaaaaacaaaaacaaaaacaaaaaaacccccacactaattaacaacaaaaaagtgggggtggtggggagatgagaggaagagtaaaatgaaacacaaaacacaagaccatccctgacaaaagcaagcctttcacatgaactcactacatctacaaactctccatcttgtcttacaggaaaaaacagtggggaggggtttgttcagggtcagagctgatggtccccagcacacagtgggtgcccagagaatgggtcttgtgtgggcagcactgctggctggctcgcacagggcaagcccaaccaagagtttggtgattctgattgacagctttgattggatctctttggtgtcatctgacctttagtcagaaactgtctcaggaaggatttaaagaagtcaaagtctcccccctgccccatgaatgaggacttaacaaattcaaaggccaggggatagggcaggtggctcaatcttgcctattatgagaatcttggctgcctgcctgggtgcacaaagcaaacgacatttttaaatttcttcacagtccattaggtaacatgtaatacccttcaactgaaagaatttcaagtcacgtgcctagagccttcttatttagggtgtctctcccatggtgaccatgcagcaccaaaaatatcttctgtagatattcatgtgactagatcttggttatatgtaaacaggaattttcatttgagtcataattagtctccagataattaactcatgagcttttggctaagtttcctttgctaatattctcaggttgtactaaagttgagctagcagaaaagggttaggagtaaattcggttggggaaattgttagtatttgacacaatacttcttaaaccagttgaacttgatttgtgctgtagcccttgaataactgctgtcttcttaatttgctgaattggagaagttccttgatttgttccttaattccttaaatagcttgtgttcatccagctctttcgactccgtccatgaacactctatctcctctcaacaatgatttgggctgtgttttggatccagctgcttaagaaggaatgactgaggagaagtcaattgggccaaaattattctaggaggtgagattgaaatgagttgacttaagcataaagccaaaatgaaaccagtcacacagaaaatgtacaaggtgattatgaagtttgcctctaaattaaacagaaatctgtgacaaactgcatctcttgcagagtcagttctgggtcagctggcagcaactgcactcccttgcagatctgctcaagaccttgtgtcaagctgtctcccacttgatccaagtcatcctaggatccttttcttgaaagtcataaaaataggacaacagattcattgtcaacaccagccatgacagtcactcactctgtcttttttttttttttttttttgagatggagtcttgctcagtcacccaggctggagtgcaatggtgtgatctcggctcactgcaacttctgcctcctaggttcaagcgattctcctgcctcagcctcccaagtagctgaaattacaggtgcgtgccaccatg

SEQ ID NO: 60319 - DNA, 1091 bp, Homo sapiens
agatctcaatacagtctaaactgggaaaggagccttcattgggatgatggccaagaaactagtcagttgtagatgtagcttaaaaggtcattggctcacttgcaagaatactggcagcttcaacatttgctacacattcctctcattagtcaattgtttttaaatgtcttttacactggaaaacccaagaatgtctcctgcctgaatgtaccattctcagctgatctcttcctgtgagatgttaggaatgaggtcctgcagcatcccatgtgagtcacaggtcaggaggcaggatgcctccagcttctttgcatacagccactccactccctccctgtgactcagtccacactctccgagagcatacacagcatgccttgagtagaacctgaagcatagacccaaaagaatcagagccagaaaggatctcagatagcctgtccagtggggggtctgaccatgtggcttacctggtactgagaagtttcacatggcacagaactttcactggtaaaactgtggatcttgtgccagctgaagcaggtggttgcaatgtgcccaactactcttcagagaagaaactgaggccaaggaggccgacttgcccaagctaacaaaatctgtcagtggcaggtctaggattagaatccagatctaatggcgctaaagtgtagtgctctttcgaagctggaattttcttgtattgccacagtgcattgcacacaataggtgctgaaatttctgttgtggttgttttttgagttcgaaggatacgcttttcacagatatgattgttcctaattagcaatggatctcactcaaggtcattgtgaatcaatggtgaaatcagttctctacttctagattctgaacagaacagtgagaatgaaggggagggaagctttgtgagtaataacacaagtggttaagcaaacagaaggactgtgcaaagatgaagagacccttgtgtgtaggttaaccgagcaacacagtagcagagaacacaaagaaatatggtataggtgtaaacaccaaaaagtaggaagtcttttcctgtccttagagaaagagtatggtagaaaaaaagcatt

SEQ ID NO: 60320 - DNA, 616 bp, Homo sapiens
ttttgtgaggtagtgctttggcacttgatttcttttatctgggatggagcccaaggaagtggtacttggagagggagcagcataaacaaaatagaagtgactaagctgttttgacacccattaagatgggtgttactccccaaatggaaaccagctatctgcttttctatttgaccacgccttttcctgctggtgatctgaaacagggttacctgttcctctgactaatccctaaaaacgcaggtgaacagaggctgcgatgacctactttgcaaatacctgttacagtgttaatcagtgaactttgtggccagacgtcctcacagttgttctactttacactgaaggccaggtagggagcagactttggaatgggcttgtggccatccatcagaagcaagggagttgggaaacaagtgctgattagaaatgcaaattattggctgggtctggtgctgtgtgcctgtagtcccagctactcaggaagctaggcaggaagattgcttgagctcaggagttcgaggatctagtgcacaatcacagatcacacctctgaatagccactgcactccagcctgggcaacatagcgagcctccgtctctagaaaaagaaaat

SEQ ID NO: 60321 - DNA, 988 bp, Homo sapiens
ggtgcttggcttactgaatacttaatacgtgttgggaaatgtcctaaaaactttacatataaccttcatagtaacctaataaggtcaggttagtatgttgttttacaggtaaggaaacaggaacagggaatttattacttgccagagatcatatgatgatcacatagctgtcagactgaaacccagttaatcaggctccagaatttgagcttttaaccaccgtgctgaatcactcattcatccaaattgtgtttaatatgctacagagaaaaattttattatatttaatcttcctttcaagaaggtatacactatgggataccaatatatacatataataggaaggtaggaactattatgtttcataaaagataaaaacaaaagcactattaaatttagggaaggagagattacatacaggaattaggaagaatggacagggatcagtgaagtcataatgactgagcaaatgacagttgctcaaaggaatgtctaagtttaattaccagcatatgacactcagcaaaataattctgttggtagtacaatataaaaggtatgcttgttcctatggctatgtgtgaaaatagtagaaaatctctgcttctcagttgaaagtgattactttcccaactgtccctggaaaaagtacctaaaaataattaagataattttgaaatgcaaataggcttttgtataaaaatgcatcactaacttgctggtgagttattttcaatgtagagaatattaagatatttgaaaataaatccataccaaaactaagacaggaaataaaaactaagaactcaatttttactccaatccttcggaaaactaagtcactctaagactctaaatctacatctgctggatagtcatgaagaaaagttatttcaattcttaagtacattccacatggcaaaagcaatttcttactatgtcctagaaactgactctttgacaacacattggaggaaccaataaaatc

SEQ ID NO: 60322 - DNA, 1812 bp, Homo sapiens
ctacagcttaagtaatttcactgggagtattttctctggaagttcttaagtgtacttgtgggcccctttttttcctccttaaacttctaatatctttcaggctgtaaattccttaagggcgcctagccccaaaaaagtgctgcatatttgttcaataaatgaatgcacataaaaacaatggataactatgacctttaatgtaggagctcaagccattttattattatctgacttgacagtcaagaaaattatcccaacttgccagaggtatccattactgtgataaataaacactataaaacgctttataaagtttctaaagactttataatcacttgaaataacgccgcgttggccgagagtagggtgaaagaaaatgtttcctcacactaagcaaatgccaccaaaggaaaagctttctttcctggagagaactgcaacagttagaaagcaaatatccacactctccactgctcccttctgggaactctctttgagggttcctgcagaaaacgaacgggcctctgaggaagctcgcccgaaggccgggccggggcccggctcctggctgaccactggcgcagcggacgccgcagggcgggtcccgggagcggcgagttggcgaggcgggctccgacttgctgaccttccccacacgcccggcaaccccggctcccgctggcgggcagagtccacgcctacctgttgtgcacaggtgaagccagactttcccgtagtccaggaggaagaacggaccacgctgtttatcagccgaccctgtgccccagtcagccccttctcggcggactccagcccttagggtcaagacacctagcccctcgaccggttctcccaccggcttctttcgcgatcacattgctgccgcgaccaccctcgggatccccgagcgctcaactcatacagcggccctggtgcgttctccttcccagccaacaggcagcccagacacagccccctcgcgcccggaggtgtccccgctccctggatccccgactgcctgcctttgggggtcctcctcagctgagcgtgcgtcccggtccagcaacgttaccggctgctctgctaaccctagcagagtctggaattgccggcggcggcgacagcgaggcattgaggtgggcggggcgcgcgtggggcgtggccggaaagctctcagcggcgagcaccgcgggagctagcgattgggagcgcgccctgcgccgggccgctggtccaaggccccgccagctggccgccgagccatcgagcgcccactctggcaggcgtgactgcttcaccgtcgaaagagcgatggagactgcggcccaagttaggattaggacagcggtttttcagtccggagattccggccacaactatttttgtctgtttttatcgtaagccagagtctttgggtgcagctctgggacacctaaagggcctggagaaattcaggcggggccagtgctgtgggggtagatgttagacgtggaagggaccctagagagccttgactgtgaggactgaggtaaagtgacttgctcaaggtcacatactaagtcaatggcagaactgagactaatagcctcttaccttgagtcatgtgcgttttcccactacactcagcgttttaaatgtcatttttcaagtttcattttgaatctatctccagcttacaaaaaggttgcaagtatagtacaaagaactttttttccctgaattgagatttaaattgctgacaccatgccacattgtccctaagcaccttctacataatcacaatataaccatcaaaatcaaaacatttacata

SEQ ID NO: 60323 - DNA, 2241 bp, Homo sapiens
ttttttcttacatttcaacgtactccaaaaatacgtcagaggccttaaagaaaattttatttgtttttgtatgcagtgggggcaggcggtcttaaaaagtaaagtatgtatgaaagtagaaggaactcatagtgacataaatgttttaaattctttggagaaatgtgtttgataaggcaacattgttataaaagtagaggtctttgtttctcagttggaaattggtcaaaacttttaaaaggcttcttgaaatagaattgtttcttaggaaatctcatttctatgctaagaccaagtcaacataggggggaattcgacgcgatctgaggcgtaagtcaaagcagatcatgaactcttgcagcaaacctgacctacaagcttgcccccgaccagcatagaccacgagctgcaaggggtctgagacagtaaggcctgaagttcaccgaactcagtttcaaatacctgtggtccccccaagaagggagacacgctcttcctctcgggtgctacaactggcgctggggaacggtgatgctggaccgaaaagacaagcgcagccaggcaggccaccgcggccagcttcaagctgacccggtatccccgcggccggaccgccggtctcagagggagacacagagcggacgagtcaccgagacaacgcggaaaaaaccgccccgcacgccggaggataacgagagctgccgggctgacgttacctccacccactgggccgcgacgtccccatcggctgggcgaatttgcagccgggcgtgcaggcactgctgtaggagcgcccgggcctgaggaatccggctaccctcagccatggcttaagccagcgccgcggccggacagttactaggccatgtgtcgctggcccctccctcgacgcgctggcggggcagacgaggcggggcacgacgaagggcctgcgccgattgcccagtggccccgcccttaggagggcggggcctcggactgactctcgaatgtcccggatgtgcggtcttggaggccggcgtagcgctaagcttctcggcagcacctgcccaactctgtagaaggcgctcagtgtatacttttattaaacgattgaaaagactcgttaaatctctttcctacaaaccttttaagaaacatttttcacctcagaaagcttaggttccaactgttgaaaaattttaaatctgcttgatttaaattcatgttatgcccatatgaaagtaagtaaacaaataatcgaatcataaagcaagcggagatggaactaaaagctatatatacatccttcaaaattttccttattccaatcaataaaaacaatgctgcctcctctatcgggaatgccataaattattctgattccacagttgtgaaaaggtattggtatgctatacgaatacacattctttagaagatatccttgttaaaaatgttcttatccaagaaagtatgattgttaataacttagcccgctactaatacaaaaataaaacagcttattctgatgcatatgacgtaaattctgtgatgcattttctggaagtacatattagaatgtaaataaaactaaacaagggcttgattttctttcccatgtaacgtattccttaaacatgcatcagattagcatttatttgtctatgggcttggatggtttagatgaggaataatagtgttaccctgattgcattacccaggtcattgatttgggctcagttgacacaatgtgcctatacattcggatctgttgtttaaaaagatgacatcactgacagtgttgctatccatacaaagtagtgtgactgaagaaaatagtccatgcataatcaacagtcctttgtacacaaaatcgaagctgcttgtttgctggttatcttgcagccaggtttacacttttagtaaaaacagaaagcaaaatctcacatgatctctgattgttgcattgcagggattccaacagttgttgacatttgtctgcaaagcacagacaagttgaattgcttcatgtctgcacctttatgtcattataactactgagtctcttttctctccggctctcagattcagattttacaggcctgaaagaaactttgacatacaaaccattagctatgtcccagaataagaaaagactttggtgtccatttgtatgtggctgcaggaaatagggaggtctatagagaataggttatgtggttcgcagagatctttctacagagagggtttctttaacaaatt

SEQ ID NO: 60324 - DNA, 1393 bp, Homo sapiens
tttaaatgaccatatactgcttagtaagaaatcctggggtcattttcaaggtcccccatttcctacttttgttaagctgggtcaagtctctttaaactttctccgttttcttgtccataaaaagagtatactaggtaagtcttctgtctacctcgggacttctgtaagtatcataagagatgttttatatgacaacacttcacaaacgtttagtaaaacgctgcaaaatgtttgtagctggctataaacaagatcatgcagattgggttcctgagccaacaaacccaaagaagaccggttgctaggaagagaaagccgagcgttgctccgtgacgtcatcactccgcgccacccgcgacagtttcccagcagggctcacagcagcgttccgcgtcatggggatttggcagcgtctgctgctttttggtggggtgtcgctccgggctggtggcggggccactgccccgcttgggggaagccgagcgatggtttgtgggcgccaggtccgtggtgctgcagggcagggggaagcgggctgacagatgctgggctgcagggccgcagatgccctggcattgcttcttgccaaagactcgcctcagttcctgagacccccagtgtgctggacgtgcctacttttcaggcaggcccaggctgaggcgtggcgggacttgaaacacagttagaacgtagatgtggtattctacattgctttcttggctttgggttatttatcaaatagattgaagaaaagcaaaacacgtggaagccttatctccgtaaagaggcagcgtttttacatttttaaacgttcagcgtatcctgctagaaaaatttcaatttaagcaatgtgtctttacaattgttatcagtagtagtaggtaaatgtctccatagtgaagatgagcagaattagaaaagaaagccctcttaattgcaaaccccagattgtttttgcttttacagtgtgatgatggagatggcttatttaaaacggctttttattattattattttttaaagttgtctggcgccgggagtgagaccctaaaacaaagaagaacacaaatcatgtcccgaggacttccaaagcagaaaccgatagaaggtgttaaacaagttatagttgtggcttctggaaagggtggagtcggaaaatctactacagcaggtattataggatattaattctattcctgattaagaacttatgccaacagacaagtgcacactattgaaattatagttttgtgttttaaaaatttatttgtgaagttcctaacatgtgattccttagtttcaggagttggtagcgggtagacgcttagattttggagttagacaaaagtaggtactagccgggtctcccaccccttaactcaggaaaaagtgg

SEQ ID NO: 60325 - DNA, 635 bp, Homo sapiens
ttagtgaactttaaattttcatcacaaaatattaggcataagtacctagaaaagctactaggagataaaaggtatttataaagatgtatgggtgaaaatcagcacatttgatttgagagaaacctttctttataagtagatgttatttctatttataaacaaaaactattgtttctgttaactacagcagagaagaacccatttttagactatgctttatgattataattacttgtatttgggtttactgtttaacatgtggtgtagtggaaaaagctggactttagagtcagttggacccaggtttgaaggttttccagcctgacttcatgaccttgagcaaataactcctggtttcatcatccaagttaagctgatgatgcttgttttacgtgtctaagtgagattatttacatgaagtacttggtatagtaggtactcaataaaaacatttaaagccttattcatgtttttagagttttttttttttttaaggactctcttaaaatgacttttaatacttttctggtaaaataaatcatgatttagctgttagggctcaagcatagtctttaaaaatgaagacatgcgaaacactcttaaagcacttcatcaagtcagggcaaatggaccac

SEQ ID NO: 60326 - DNA, 2024 bp, Homo sapiens
aaagtctctgatctagttatcagttggaaagccatgaatcaatgtaattgaggagcatctatctcctcatctgtttattgaactgcctcatactttaaacattaaaaccaggctcatatattattcaccaattttaaaatcacatactaagttcaagaaaggctataggaagaaaatcaagactagtacaagaagtcagtgcaaaaagcatatatttgcactaaacattgaaactggaaatctggcagagagatggcaatggacacaggtatgcaaaaaatgaagagcttggaggtgagtccactcgttgtcacctgctgcaggcttatcatcatctctgcaagtaattaatacgattatcttatgctacctgtattgaatccacaatgctcaaatactgggatgtgattgagattgagtagcctgaaactttttaaaggatttgtagaaactacaattccaagaaaagtgaaggttgctttatttaaggaacaactaattactaaggataggatgaacttttcctaacctttaggagacaattacccagatggcctttggtatattaggaatgtttatcaaattgagaattctttttgggtttatttgaagccttcagtatatatagagatggttggggccaggagcagaatgccaggcaagaagaatggaatgtgcagaagttgcatgatgagagcttccagaccacagacaaggtcagcgtggctgatgactcgctggtctggactgagaaaagttgagctggaaggtacaaagggccaggttatgcagagcactcatgccatgcgaaggagttagacatttgctgcagatgatatcgaagaattttaccaggcagccctccctgtctgctgacatcctggcttgcaatcttttctcttctctctctgcttcaaactcatgctcaagcctgatgcactgctttcatgtgcatgtggacagcccatccaatgcctgcgtctcaaaggcctgttcagtttccaagttctctacctctacacctctggttttgttctcattcaaatccactcttcatctgaaatgtgaaactctcctaacagtgagtgtagtaattttcatccttcccacattccattaccttcactgaatgtgctgttcaggactctggtgccttgatgtcccgtcaccttgtccttctcctctctacgtacttaccttctgttttagtcagggttctctagagacacagaatcaataggatgtgtatagaagtaaaagagaaatttattttcaggaattggctcacatgattaccaaggctgagaggtccaaaatatgcaagatgagctggcaggatggagactcagggaggatccagtgttgtggttcaaatacaaagactgtctgttggcagaattccttcttgtttaggggagttcaatctttattcaggccttcagctggttggatgaggcccacccacatcatgggggacagtttgttttcctaaaagtccactcattaaatattcatctcatttgaaagcactctcacaaaaatatccagaattatgtttcaccacatatctaacactgtggcccagccgagttgacacacaaaattaacaatcataccttcctttcttttccaacctagatgtacccagtgaatgatttcatttgcttctcccttactcccttaacttattgtgtaaccactgcatttgctttgttaatgccaaagcttgtatcactcttgcaatctgctgctgcttctaaaactgctcaatacaagaaaaccacaaactcaggtgtaatggtgctacaacaaatgtgtggtctccagcttcaaatgggcccacagcgttgctaggaagtgcttgtgtgtcctcagtcagctccctctccactcccacagtggctgtctcagacctaaacagttctatgagtccctgacccatacgtgtccctgtctctgtctctgcctctctctctctctctctctcgcttgctttctctctcagcagttgaacttacctgtta

SEQ ID NO: 60327 - DNA, 4253 bp, Homo sapiens
cctgacacaaagtgatcccatttataatgggatcccatttataatgataatttctataatcaggtactattctaaatgctttacgtactaatttaatctacctcatatagtaaggtatatacaatcattatctccactttccagatagggaaattgagtccgatagtgtaagtaacttctttaacatcacacaattagtaagtggtagagctgggattccaacaggtctctacttccgcagcctgagctctcaacccctcctccacctcaccagctgcctcctgatctttctcccagcagatgtcagcaaacttcctttgtcttgcagatcattactgtttttgtatagagaggcactgaagaccaagtcatgtgccaattcacatctttgtacagaataatattatcctgttctccagtccttttagcggattatagctgagctcctctgaatattccttactgtattatcatggagcttgtatttctctaccttgtccacaaagaaagtgtgctgacttgtttgtcaccattttctaactagacaatggaacagttactacctgaggaaccctgtcagagaggagatgaggttagtctgaccagcattcatcttcctgggtcaacacaaggtgtctaagctgcgttagaattttgctaaaagtccctgttaataaaacggagacatttgcccctctgcaagtttctgcaagttctaccatgcttcataaagtctcatatattataatatttccatttttttcagatgtcagatattgtaaatgaattcctgttattttagggtcctagagctgcttattttactgttcctgttgcagtgagtattggggtgcctgtatagacggtgctgagatgtaattcatctgaggctggagacttaaatgcagcagccaggtgctctcctcctacttcctcactatcacagactttaatttcctcttggccatatttttgttcttctttctggctcgaaggtcattcctgataaagaagatggaagcaaactaggagttgagtaattctgttttcactgtatcatctctaaattaactgtgtcatctgcccccagcaggaggccaaactcttctcttgttctttttcttgttctgaacccaccccagtggctcctggtgtattttatgtgtgcattctcctgtgccccagccttctacttccgtgacttgattctttcttttgatgccactcctttgtatctgctgttggctgcaaattcctccttcctgcctttgtgagtgtccttgtaaaatataagctcattggagacagtaatttttttggatagttccctctcttcctcctctccagagtagagtcagaattaaattaggtggagcctccagtctttctagaaccaagttctacatgattagagtctctgaccatggaatcaaagagcatttagccttgtgccttacatataggaagtctgcaataatggtaacaataataacaacaataataacctttactgagtgttcaccataatagtaaaccatactaggggctttatatatgtgatctcatttaattctcaatgttgacatataaggtaggtcttattattcacgattacagatgaggatattgagatacagagaggtgacatttgcacagccgtaaggacagcgccaagagcctgactcaggtctgtccagattcctgagcgtgtactttaacctccacattctgctgccctctgagatttaatccactgaatcaccttcttttctctggacttgtagagttcttcattcttgcagtctcaggaacatagacggcttgcattcacttccttggctcttgagaatcacatagtgacaaggtccttttctgtctaagtgccagtcgattccattgtgttatccacctagttcacctttaatggccaaaattagatccaagcagtagctccctcacaacatccttgtccctctgtgacatgaagttgtcagtagagcaaggcctgagtgaattggatgctctgcttctgacagagtggggctcctaacagacctctggattgttcttccatcatccctcagcctgcagagaacagagcctgatggtgggagtgacaggtacacctaatgggtgggcccaagggcaaccagcctctccttgccccctccccactgagctttctgtgctctgggaatattatgctggcttgaaggtttttcttcaactatgatttacatgccacctattctcaaaaagaatgtgaagtaatttacaataaaacatgtctaaaacaagacaattaaaacatatttttaaaagagaggcagatggagagaggtcagaaatcacttggtttgaatccctgacaagaagttatagcacatgaatgcattttgatcaattctcgatacaaatgtctgggtgtgtaggaatggggaaaaaactctgcggagtggggaaccttgaacctcatgggccccatcctccacctggagccaaaatcaagtgacatcatgcctagcaatgcctgtgaaaatattaattcaggccgggcgcggtggctcacgcctgtaatcccagcactttgggaggccgaggcgggcggatcacgaggtcaggagatcgagaccatcccggctaaaacggtgaaaccccgtctctactaaaagtacaaaaaattagccgggcgtagtggcgggcgcctgtagtcccagctacttgggaggctgaggcaggagaatggcgtgaacccgggaggcggagcttgcagtgagccgagatcccgccactgcactcctgcctgggcgacagagcgagactccgtctcaaaaaaaaaaaaaaagaaaatattaattcatactatctgtctcaggaagcctcggggaaggcagcagaggaaccgctgcatgtgtgaactctaagtttagtgtagccagtttgcccaagggtcagagccaagataattcatcactgtcacagacaaaaggcctccataaatttgtctttaaattttaatacctaaatcacatattatacagacagaactcacacaacccatctattgctctgttataatttttaaggacaaaaatggtataaatcataacaggacttttaaaattatcacagttgtttcaagagatgctatgctatagcttttctgttagacaagattccagtaggaaatggatgactgaagaatgaatgaatgaatgaatgaatgagtgagtgcctacatggtcccatgacaccagtgaatcagtttcatactagctgtgacaaacagttcattcagtagagctgagcatgacttctggcggcacttcctgtcatgatgtaggctgatactgtgggagctctgagtcagaactgcagccagcaacatgactcagggcattgaggtcagggcaggggagctcaggcactcctctgacccttgtctaggtgtgcacctacaactcccttgataggtttacatatgaccaacttcatttgatagacagaaaaatagagaaggaacgttggtgatggagggttggcttatgactttctatatcattagagatgtaacaaacactcgcagtgaccagatgaatcagaaggaagatttcttgaggtccctggtaggcatatttcctcttaccttcaattctatggggcatttctgtagtttgttgaatggaatcaaagtgttaaggcaacctagaaactaagtactagccaggttcagttagaggcaatcaaacaatgaaatatcaggcaacagatttaactaaaactgttctcttaatccttttttttttttttttttttttttttggagacagagtcttgctgtgtcacccaggctggagtgcagtggtgtgatctcagctcactgtaacctccacctcccgggtgcaagcaattctcctacctcagcctcctgagtagctgggactacaggctcccgccaccatgcccagctaattttttgtatctttagtagagatggggtttcatcgtgttagccagaatggtcttgatctcctgacctagtgatccacctgcctcagcctcccaaagtgctgggattacaggcgtgagccaccatgcccggcctcctttctgttttcttaatgtgaaggtttttaagtatgtaggtattcatgggagaagtagtagttatttgttgtaggcaaatactggtgttctctcagctataggaagtcattaaagatgggaatgattaggatagggaaatggcattc

SEQ ID NO: 60328 - DNA, 1606 bp, Homo sapiens
agctccatagccaaagaaggagcaatccagcaacttaggcattgattccgcaagccgtcccagagcctctgtgtagtccttactttccctaaattgccatgactagctggctcaagttaggcctttctaatttacctggaccgttgctgtctcctgtgcacggctgcggggatgagcaccttgttgtgcgttcctccgctgggctgacggaaatggtttgcagccagactgctacgccacgcggtctggcatttagtcctcagaaatctgatttagagaacgtatacattgcatcacaatctagatttcagaggaaagttttggatagaataacccagacccaagtctgggtaatttaaagcctgggtgaaatggggcagaaagagcccagaatatacaggtctgaatcttggctggggtgatgtggaagactggaggcgccagacggctggcctccctccaagtgtttaccatgctggtgccatggggctggggctgggcagtccatgtgctcattcttcccttctcttctcctcctcctccccctccatctctcctcctcctcctcatgttttctataggctagagaaactcaggaactactgacccacagggaaggcaagcggagatatgagacggaggaatcaaacgctgccctggtggaggacgctgtgggtttacagtggatgatttcctctgcctatgagataaaagggctggctctgtactttgaaccccagcctcacccacctctgcctgggtgtggctcttactctctggaagacttactcaggggagaggacaggacagtgtgaggcttgaatctccaggaaatagagtctgtgggcagccattgactccgagtcaatgagaacaaggtgtgctgtttcctctgtgctgtttcttccctgccccactccccgcccctttgtcctatggtgcccaggctgcctgcactgcccagataccacaggccttgccagggacctcctgagaggtttctgaggcttgcagccagtggtcccgttagtctgcacgtctccgagttgccctcccagaggagaaagcatatgctgctgggaccgactgcagctcctcatggatgcacctgccaccagaaaattgttgttcagtctgggattgctttctcttcccaaagcacaatctcacatgcagtcatgagcccagtccagcctctgggacagaagatttcgtgcttttataaaccaacagcactgcaggtgctgcacaaggtaagtgtctcccttatttctttccctccccggaagcctctgtatcaaactaggagttaccttaatagggtcaaaggagggtgtggctgtttcacttcctgttgtcagcagccaagtgtgcctgaggacagagggtggtgggcaggcatccattatgtgtagggaggcaggtattgtactgctctggaacacactgaggaaggggggtgctctggcttccctgacaccacctccctggtcaggctgccgcaaggcacccagatgtcagttgtcttcccacaacctaatcattcacagctgctccagggccacacttaggatctctttccagcggtcctcttagtctgccccag

SEQ ID NO: 60329 - DNA, 3047 bp, Homo sapiens
cacctcccaacaaaatgattgtaattctctccaaattgtgcatcatttgaagtgacccccaaagcggccctgaaggcagggcgcagctggtggctgggccttccgattctcaaggctctgactccatttagggccttgggagtcggaaggcccatcagcctgctgagttctgcctccacccgcttcccctacccccatcctgagcctgcgggaagctgagacagcagagacatcaagaagaggaaagggctttgacttggacatctagaaacccaggagtccagaattgtctcttacactgacgtctcctgtgttgcgtactttataggaacagaaccaccagcctccatctttgcctaggatggacagatttaacgctattgattatgtttgatatgttaagttatttacatatactgttaattcttaggacaacacttaagtaatagtatcccaaatttacagttgctcagaaactgtaatttaagtgatttacagttgctcagaaagtgaaagtaagcacctaaggctgcacagctagtaagtgctaaagctggaattgaggtcttcttatcttcaaacccagactttttttcttctgactggatctcagatccagccctagggctcttccttgagtgcggctgaaattgccctgaacatacccaacaacctgcatagagagctggagccaacctgatgatctcagtcagcccagcaggctcctcccaggtcccctcctcatcgtgcttagatgagctgtcactggccttgtccttcttacacccgggctcagccacagctaacactaggttacatcgtgtgtatcaacaccaaccacccggtagtgaccacatgaaatacagcattgacaaggagtccaaggttagcctcagtttggagggagagagtagcctagacttgattagcagtgccctcatggccttgggagggagagagcctacatgcacgaagggaatttgctgtctctgcactagcagtaagcttgtttccttggccttatgtcaagctttcagtgtttttttttttgttttgtttttaatctttattcagctcacatactttccctttggatgtgcagtatcatttttcccctgataagagtagcatatttaaaagtacacatttacattttatcataattatcctcctcaatatagcaatttttggaggaagcgtactctttttgcccctgagttctgtggaaatcttggaaacagggcccaggaacatattcactcactaagtctttattgagtggttattatgtgccaggcacttttaggcactggggatacaaaaatgaaaatgacattgactctccttgcaagaagcccatgttctagtctggaaaaaccacatttaaccaccaactatagacatgacatgacatgaagcttcaccactttctctaagggaagcctccatgatgttcttggaactggagaatgcttcttaccaactttcattttctgaagaggctaagctgttgaaggaagaactacttcctccggattattatcctgtcagtgatttttagttcccagtgtcaaagatcccgtagtgcctttaaaatgctctcaggcaaaaactgccaaactgggctaataaatctgactggggtagccataggctatttggcaacaattctcagaacaatcctgttcaccctgttcagcctccacagattctagtgctcagtacttggctgccaccatggctcctggaccacctctgccctgggcttgagaccttcaggctatgccccttattcccagggcaacctaaccccccaggcttcagattgggaacttcctcccaaaacagtgcttggggctttttcatgtgaattccacagttaatgctgctgccgccgcctcaatgctaccctctgaggccaagcttgacatgctgttattgacctggcatacccaaatttcatttctggtaagagccatttctggtcacccaccagaatgggtgacccatgcagttgctaaatagtgccagagcgtggggaaatgcctgaagtactttggcgatgtccaggtatttcacatttgctttcattgtgattctgggctgaatttcagtgctcatcaacatgtttggcaatacagagacacagccttggcctagagaaggcttaagccatctgttctcttaagtgatagaaaggatgagacagaattagctagaaccaggaaaatacaagcaatgctttctgaagagcatgaccctggtagaaattttgctttgtgtgctcatacagagatccataaaactgttgaatgtaatggtcagaaatctatggtcagagacacaatgtaggttaatgtttaccaaagtcttggggaagaggagaatgagtacacagttttttagaggaggtggggaaactgttctaaaattagatagtggtaatggctgtacaactctgtggatatactaaaaaccactgaattgaacactttaaaagggtgaattttatgatgtgtgaagtatatctcaataaagtcattattttcaaaaagaaatctatgatctatagcaaaaaagaaaaaaaaaaccctaattcacatttaacaaatacttgttcagcatctaccatgcaccaggctttgtctgaggcatgagaggcattcagaaataaagcaaacaagaagtttctagctcagagatgcaccaaaattcctccttgcccacatctaaggcttacctggaattgtgtcagtttagagccagatgtgggcaacagttactgcctttggacttcctagcagagagatactgcctgtctttggcaaccctggagcccttgcatctccagggagtgtttcactgatgagctggctaatctcggtggttacttgataatcacagaaacagagctggctgcaatgaatcttcttgtgggaaccatccaagcttttctctggagctccataatgcagaaattcagtacagagagctctaaaatgagacgtcctcctgagtggatagcactcctgcgaggtggaattgcc

SEQ ID NO: 60330 - DNA, 1379 bp, Homo sapiens
ttatcctccttcagtgagcaggaaccgcagtcatttctgtaccagagggtacagctgttgctggggtgcagtttggcctttctcagatttccctgaggaggaagaagttttcccccacagtttcctttatagactctaagccattggttcaaaggttttcgagaaggtggtcagattcctggcagactcaatgagaggcagattctgggtctgggggaaaaactattgtattataaaatattagatcattaactatcaatcaccaaattttattgggtacctaccaggcactgttttagatgcttgggatacatcactgaacataagagacaaaaattcctgccctcatggcgcttacatttgaatgggaacaaacaataaaaacaaaataaataagtaagtaaaaaggcaagggatattggaatgttggaagggtacagttctgattgtaagcagtgctgattaaccagggtggccaagatagatctcctcaaagagtgaaatttgaggaaacagttgaaggagttgagagagttagcctcagagatatctggagggagagcatccagatggaagggacagaccagacaaaggccttagacaagagactgctggtgcatttgaggacagcaaaaaggccctgcagctggagcaccgtgagtaatggggagagtaacaggaaaggaggtcaaaggcagtagggtgggacacagcaggtagagagttgtgagccatcataaggacctcagcttttactctgcgtgagatggtcagccactggacagtttgagcagagcagtgacatgacctgacctttttaaagggtcattctagtcgctgtactaaaaataggctctgggagaatgagcagagagaccagttagaaggatgaggcaataatcaaggtgacagatgatagggtgcctcagagcagagtggtaggaatggcagaggagagagaaagggaggactctggatatgtttttaaagctaaatccaaaaggatttcctgatgggtgggtgagtgagtgagtgagtaagtgagtaaatgtactctagttccagacagtactatgataagcctgagcgggcttatcaccaccatagtgcttcatgatgatctcattcaatttctcccaacaactatttgagatacagactgttttcatccattttacagatgaggaaactggggcttagaaaagttaaatagttttccaaggtcacacaggtcggaaggggtatatgatttgaatctaggtgtgggtgacccaggctccatgctcaaaaacagaagttggcaacctctttctgtaaagtgacagaaaatgtgtttaggctttgtggaccatgtagtctctgtcccagcttctctgtca

SEQ ID NO: 60331 - DNA, 4066 bp, Homo sapiens
aagacggaaaaacgaacagaacttctgctggaatattgtgacaaatttactgacaaatattttctaatagatttttaccaacaggcagtttttgttttctttactgacagaccgtaaatgtacttctggttggcagcagctgcatcattataacacaaaagcaaccttggctaacttcagtaccttatgtaacataagaaataaagaataacttgaatttaaaatactttttatatgtttactaacattaaactattttcaatgcaggaaataaatatttccccaaagaggaatcccccctcaattactttctttcagacttaacaaattggagtagatgtggttttgctcattcttttatctgctggcaactattttaagtctcctgtgcaaggcagattccgatgacctcgggaaagtcacaggacctcagtttcttcaatggtaaaagcaaaggcagtggtttctaccgtcctttctcactgcaccattcagcgtcagtgccctcatgagaaacacacccaaagcccagtgtgctctaccccaaaacttgtgaaatttctagagtctcaaaaaagtgaatatgtttaaggcagtataataaaagccaggtggacgacagttcctaaagttaggctggtagtggcgtgaacaggggtcttttgggccaccctgagacccgccccacggggcttctcgatccacgtcttggcttctcgctccactttcacagaacgtactgaatcaggggcctgcatccccgtgccgtgccgagccgacggagaaatggactcctcttctcgctcctgtggagtttcgtcttctgggtgagtgtggcaccgggtcctgggcgggtgatgtctgtagttggcgagcgatcctcagccagaaaactggctgcgcacacaggcgcagacacgcgaacatgttcctgcgaacgagcttgggcgcatgttttcctcccttgctttctttaatgctcagagaccataaggggatttatcgagaagcattcggtgcccatgcccggtttggaaccgcgagcacaatatctggttcctttgcagtacggtggtttgctcttgagttacgaccagaaaccggaacagaaggaaagggagaagcaggggaggttcggggacgacggcgctccgggcagtaaggcagtagcttccaaagcgtggaggatgggactgaggaggagcagaatacggagaaagagggaagctgaggaaaaatactcacgccaatgggtaaaagggaaaaggtgagaaggaatggagtaggggagggaaccaatggtgggagaggcggaggaagaagggggaggggtagaagccaatgggggagtggaggggagggagaagcagaggggaggagggagcggggacgcgagcgaggacgcggccccgcgcgctcgtccccctccctccgactggatagctcgcgccttcccaggctcccgggagacgagggcaggggcggggccgtgccgggtgcgcggcgcgggaggcgtcgcgaggtgaaggggcggggacgggggattgtggggagggcagcgcgggttcgcgcgcgcgcgcgcgtcccgtccaggctgcgccgccgcgccgccgctccgcccccggtcgggtgtgtggctgcgcgcgccgggagagatgctgaggtaaagttcgggagagagggagagaaatccgtcagcgcgagggagcccgagtggccgccattactgagcccggcgcggcggcgggcgctggggaaggggggagggacgggccgccgctggtggcggggagggagggagggagggtgggtgagctggctgcgggagccgtggggctcagggtttcggggcgtgtgtgtcggggagggcggggggaggtggctgaagggacgcgccgctcggtgagcgcgccgaggaagagaggcgagcggagagtggaggaggaggcggcggcggcgggagcggtccccaggaatgtcgctgccgccgccaccgccggggccgctgccgttgaggaggagacggaggagaccgacgttgttaggtaggaccttgcggaccccgctcctccaagcctgcctgccccctcccggacggggaccctcctgcggctagctgccccgctcggtcgccgctgccggttgtaaccagttgaaggggctggggccccgcggccgccgaggggagcctggcgctgcgctcggttttcgcaggccgggcgggcagcagctgcagcgttagggatacgttcggcgtgaagggcagagaggccgggggagggggtgctttctccacaggtgacggggccagggtcggcggaggcctgatgctggccggggatcgccggccccgccaggcgtccgctctcgcccgccgcctcacttgctcgagtctcgggtggtccgtcgagaggggaggtggcggtgtccgttggccgggttgctgctgttaacgagttccacctggaaagggtacacggggcgggtgcagattcgcggaaacacagtctcggttgcaaacttaaacgccttgtaggggggatcggccctttcactttccctcatctcctcgactcctccctgggttctcttcaccaattttccatctgctttgaagcttggagtaagatatgagaagttgcactgcgcatccagagcccagagtcctatgggctgactgcgactgggttgaggctttgatactgagttttcgctagaataacctccagattcttcctctctttccactaaagaaaagtatcggggtgggggtggggagccgcgcgggagcgcgcgcgcacttatccacacagaaatactccctctcaccctccctcttcagcgttattagaaatgcaagagagctggaggctcggggtgtagctgaggttgaaaggtgcacggaagtaagggcaaactgttattaggccgtttagtaaaatcccgaaaaagttgtaggggagacgcttatacttctaccatgtgatagaaattcggatttggccatcgcttaataaatgggaattcaaatattttgagatagagcaagataggcatatagatgggtttgtgcttacgttttaagtttaaattcttatcgatcatttattttttcctttgtgataggcaggaaactgaatttttttttaaatgttcaggtgtaaaacagcaaaatgcttcgctgtatttactagtacttgcttatgttgctttctacaggtaggggcggggggcgagtttgtcaattccacttaaatccagaaccagtattcagttagaatgttaggtggtgtttatccgcatgaaggatctcgttcacttcatgggagcttgctctacatttccacttaaaatggttctcctaacaaaaatttcatctagatgcagcgattagacatttggaataatgtttggtttaaaaatacgttaatgaaaccttttgctgtcaattctagtttatttgtactgtaatacgataaaacggtattcttattcagtgtttgtagataagtattactaaccgtctaggtaacctactagatagtttcttgagtaagattttgctttcattttaaattcctttctcattttttgctttcatctatcctttgtatactaattgacctccattacctttatctgtagtacaaagagcggtaagtatgtgtcaccaaaaacttgcaaagacactggagcaatttatgactaaacgcactggagtgaaaggctgcgcatacctatgcttgtaactttcaagaaatagcactattgatctaattgacttaaagcagaatcagacggtacagatgattaaataactattgatttggttgtcttgtgtaggctgtgtttttaaacctagatcaacatgtcttattttgccattctttgtacattaattattaagagtactggggagtgaggtgggttacactttgatgtaagaattgcggcagaattctgttatctttatgagttttgtagtgtccctccccatttaaacgaccttagcaatttttaaaatgtgttgcaaaattattaccttaattctgtcacaagatactta

SEQ ID NO: 60332 - DNA, 3749 bp, Homo sapiens
ttttctcaattactgatttttagtaggttcttacttcaaaatattgttacaggaaggggtaaaacgaccacaggaaggagaaaaagcaaaactccagttattggtaaatgtgccatattcctcattcaacgtgccgttttaacgcaacacaggcaaacatttgccctttactttcttcaatatatgaaatactgtaaccaaataaataccagaggctttgatctttggccctcatctcacaacgctcagggatatgacttgaacagtacgatttttgctgtagttaaaaatcagaatatttaacactaacagtatttcttacgagtaggtctgtcccgtacttttgtatcctaacagggttaggatgagagtgcagggaggtataaggacgtacaagaatgcttctccagttcaactctaagtgaacgatgtaattcctcaaatccacctctcagcctgtttttcagcgttcctgtgtttggctgccaggggcgaaagtagcggtcgagggaagacacctgtgaaggggcgtggctactcgcccgggttcctccgtccctgaccccagaggcgcctgcgcagaatggacagaggcgctgctgtacgagaggggtgtggccgccctgtccaaggtcctcagcccccgacccgacgggcgcctatgcacaccggccggagatagtcacgcagatgccagtggagtccaccgcaacttagaatgtagtgccgacggctccagaactgagtggccgaatcgttgcaaggactctcccggagggttgaactttgggttcacttcagcaaagtctgttggcacaaggccccaatgtcaccggcgaaatatcggtgaaaacttccatgtttgggggaagacccctgcccgacctagtgacctagcgggccaaccgcctccccagctctcagagagacttcggggagacgccaagcgctccaggccggccctgtcctctgcgctccactgctgccgcacggactgccagactcccggcatgctctgcggactgaagtccgcggcacgagaaatcaaagccccggggcctgggtcccacgcggggtcccttacccagggtgccccgggcgctcatttgcatgtcccacccaacaggtaaacctgacagatcggtcgcggccagatacggcctggcggtcagagcaccaatcttacgagccttgtgatgagttccgttacatgaaattctcctaaaggctccaagatggacaggaaagcgctcgattaggttaccgtaaggaaaacaaatgagaaactcccgtgccttataagacctggggacggacttatttgcgtgctcgcttcggcagcacatatactaaaattggaacgatacagagaagattagcatggcccctgcgcaaggatgacacgcaaattcgtgaagcgttccatattttgcgcggttcaacgaaggtcgttgggcaagatacggtggtgttcctagaggttgttcaagatctctcggggcctgcattttcctgctcgcgagcttggcccagtagacacctacgatgctgtccgggcctcccaccagtcctgtcgcacagtgggcacacttcctcgacagcctccatcttcgaggcgcctagttacgttactattaagttacctaggtgatcctcgtatctgcgtccaaatacttgttttcattgattaaaatatgctttcaggctgggcaatgaacattcctcctaatcaaatttcccatcacagaatctgtccgatttatgtaaatcggccctttctaagtacttcttagaggatacatgaaaacagaagactcgtgaaaacagatccagatgggcttgctacttgtggccagtattcacatgggtcctggagctcttgaatctataggcaaaggccaacattgatttccaataataccagcccttagtaacattcctttcctttgtgcagctcgcagtctaagagaaagggtgtaagcactcaggtctaagatgatggagaatggcacaaagtaggcgcaagaaatgagcgctaatgtttccttcctttagtagagatttattaggttaggaaagatttagtaaggatttattgaacaattcatatgccagttggtcttctactgaacaaaagccaaacaagctggggctctggagtttgtgttgtttggtgagacaagaccgtaagtctatttcagaatgaaaagttcaatgaagaaggcacaaggtgacctttttccatttccaaaatgcgtattaacgatctattcgcacacaacattcctcgggtgactctgcttcgttcccacttcatagatttcacaaattttttgtaatgaaaaccactgtttcgtcattgggtgccacacgttttcgcttagattcacactgtttccttagtactaattagcagatactgaaatgatcttgacagactgcgcaaaatatggaacgcttcacgaatttgcgtgtcatccttgcgcaggggccatgctaatcttctctgtatcgttccaattttagtatatgtgctgccgaagcgagcacgttgagaagaagtcacccacaggccttataaggcacgggagtctttcacctattctacttacggtgaccgaaccgcgccctttcctgtccatcttggagcctttgggagaatttcatgcaacggaactcatcacaaggctcgtatgtttggtgctctgaccgccaggtcgtacctggccgcgatgacctgtcaggtttacctgttgggtgggacatgcaaatgagcgcccggggcaccctgggtaaagggccccgcgtaggacccaggccgggggctttgagttctcgtgccgcggagctcagcccgcggagcatgccgggagctgccaatgctgcggccgcctctgagcgcgcggcggggtccagcgcccaggcgagctggagacgccccgataacgaggctgctgcggcaccgagagggccggcccggggtcggcgcgcacctttagaacaggtcgtttcaccattaacttcctctgatgagtaattttttttaaaaaagtaattaaccgaccattatcacacctagaaaagttaaggtaattccttcatggcacctaatattcagtctactttcaaatttccttatttcagaaattccttattacagtcgaattgtcatagagatccaaacaaggtcccaggttgtattcggttgctacgaccctgggtgtctattgtcctctaattgccctcgcctcgtttttcttcacgtcattcgtatactgagggatatttgccctgtggattgtcgcagatcttgggatttggcccattacttactgatggtgtcgtttaacttgtttctctagcctccatgtttcttgaaaatttatggttaggggtaatggactcattagattctggttgtgttgtgttttgttttgacgcccgcacggcttcaaacacagtggtagggtgtgtgcttactgcacctcagcaagagtagtgtatccgctggctgtccccgtgtgagtgatgcctacccctgacctgtgggtgcaggtgcggtcagccgtctgacccctcacactataaagtctcccagaaatctttcctttaatgattttaggatacacccatgaacaagccaagtagaaggtctggtctggtggtttgcttgctttttgttttgttttgaggacacgttgtaattgtacatatttatggggtgcaatttgatgtttcgatacatatct

SEQ ID NO: 60333 - DNA, 598 bp, Homo sapiens
ttttgtgtttttagtagagacagtgtttctccatgttggtcaggctggtctcgaactcctgacctcaggtgatccgcccgcctgggcctcccaaagtgctgggattacaggcgtgagccaccacgcccggccagacttcagacgttttatccaactaatgacatcctcaaactgccaagtggtcagatcagctttgacctttattccctctaggagtcagttttttgtgcacaatgccactgacactttggacctggatctaattcccgccttcatctcctctgacttgttacataacttcttttggccataaaagtattagactttggccccagggaaggagttgctagaaatccagcccttggtacaaggagagtcatggtaaatatcaccttgcagtcctgccttgatactaagtattaagtaatattatagcctgattccttgtcaaggaacccttctctgctagtgactaagatagcataaaagcatgtggtttccagaaccaaatgtacacttactttcatttttttaaaactgatctttagcatccttgctacttttttttttttttttttttttttttttgagacagagt

SEQ ID NO: 60334 - DNA, 2454 bp, Homo sapiens
agagcggagtaacagaagggtttttagcaaggggtgtgacatgctaagatatatatgttataaagattactgggcttaatgtaaagaatggattggaagacaggtaagggcgctgttattgcaatttggggaaatgaggattttggcctgaactaggctagtgagtggagaaaagtagatggattcaagagagggaattggcaggatgtgaggaagtttgggtgaggaggagcaaagggtgaagcatgattcccaggtctttgatttgggcagtgatggagtgtggtgccatcaataagacagggaccatagaaagaaatgggtgaggaaaggtggtagagaaaacagtgggttcagttttctacagttggagtttgaggagcttgtgggacatcctagagatgtgtaggtggcagttggatgaatggacctgaagttctgaagagagctatcaattgaagtacaaatttgggagtttatgatgtagatatgggaatagatatgggagtagatgcattttttcaaggaaataccaacatttattgtcttggcagaaagggaggtacaaaataaacctaactgtgagtagccagagagctagaaggcaaacacagagaggcatacttggggaatagagaatttaaagacagagggaaaggtccaccttcctcacctttgggtcatccagtctctaggttcctaaataattcagtgtgcttttggtcagtaagtcctagaataggggggggaaaaagcatatcaaaccactgctgtgtgaatgctatagccctaggtcattggtctgttttatttaaacatatctaggttctgctccctctgaggattttacctaatgttaaagagaatgagaagaaatactctttatacattataaaactatgctaatagtaaccagcagggaaattgacctataaatactctgagcacattaaggtaagcacatttttttaaagttacgtcttttggctatggtctaatgtgatgattagtgaaaatggaattgaagagtgacaggaaatattaatggcaggcagcacacagtcgtttggccttagaaagaacaacggactttatctgttcccagagggaaaatttgatgagtaatgaccttgatacacattttaaacactctgacaatgaagtaataggtgctgcttttgctctttgaccagcagattctcctttgctgcagttaggtgtactacttaaagcttgtttagagggccacctaagggtacaggcagaagcatcacaacatctatatttctgttataggcagtgatgagtactatgagcctcttataagaggctgcaaggggttgctgtaccatcaggcctactttccttggagagggaataaagcaagtccaaggtgctcaagaaggtacactttcccaaaacatcccactccccacgttgctgattaagatctaatgattcacatttagatgcccttccacccccatccccatcctgacaacacaaaatttgagtcaagcctcaaccttgctaagtaaacagatttgtacttgttactcttagcagcactggagtctaaagacagactatgtgggaaggcagattcttagttacctcctccccaagctgttgcaggaatttcagatccctgcttgccaaagcacttttatggggttaagaatttttttgtgtgtgttggggataggggaatgtacagccttgagtgactcatgcccttctctgggcctcagtttttccctgttaggagggaaaggagctgtattaggggatccttgagtttccctaagcctggcctgtatcccctcaccaactggatccacgagccagagcctgctttagccaggcccattctctggttggcttggctggctttagagggctgcaaataggcaaatcactatttgtcagtctgtagagaggaagcttatttgcagtgggaacaccgtaggaggagatttctaagttgaaaatgcaggtactcctcctctggggaatggaagaaagacaaagagcccattaagggttctagaaatcagaatggttagattcttcctggccctgtcaacgtttgcctattaccctggcctcatcggttggcatttgcttgtgtgaaaaggttccaggtttagagaaagggtgtcggaggcagacaaacctagctctgtcacttggttgttgtgtgatcatgtatgaattgctggaatttctgcacctcattttcttttttaaggatgtttcataggcctgcaggaggactaaatgagatacataatacatgtgaaacaggaatgcagagcctggcatgggaaggggttacctccttcctcctgcagtccttctcttcactttcatctttgctcacatgttattctccctactggaaactcaccttcagtgctctgtgaggccctcctgtctgtgccagtgctcaag

SEQ ID NO: 60335 - DNA, 1651 bp, Homo sapiens
agaaaaaatgtggatctactctgattgagacaggttttgtgtttggctttatggagtctaaattgaaaattgctagtgtagaaaacctgaactgagatttatttttgagaagatatttaaagagaacagatagttgagatctaagtaggtagaggctgggaaaatgagtttgtactgaagccagaacacatggtgtcttcactggaaatgaatgttcccaaagaataaacttttgtttgtgtgtatttatttatcagtagtaacaattgcttttgaatgagctaggacatttatgattatagggtgtgggtttcttatgggcacacacagagactgtgagctcaaggccatgtgaagaaggtggaaatatcttccccggttaattttcatgggccagattgttagaaatatgtccaagaagtgacttcataaaactttgaaacttggctgaaaaccctggcagatctgcatcatctggtaaatatttaagaccttgtatatattattttcaaggaaaggtaataaactgtagaattttttttttcaacaaaaatgaaacactgtggggttgttagcttttgcatcagaactttggtaagaaaatgtgtttgttttggttttaggttttttttggttatttatttatttatttatttttttgagacagagtcttgctctgtcagccaggctggagtgcagtggcacgatctcggctcactgcaaactccctctcctgggctcaagcaattctcctgcctcagcctcccgagtagctgggtttacaggcgtgtgccaccatgcccggctaatttttatgtatttttttagtagagatggagtttcaccatgttggccagggtggtcttggactcctgacctcaggtaatctgcccgcctcggcctcccaaagtgctgggattacaggcgtgagccaccgcgcctggcccgttttggtgtttgtttgtttgtttgtttgttttgttttttccccagagggggagaaaagagatctcatttctgatagatttaggtcagtttaaattctttttcactgaggttgacctgatcaaagtttgcctagtgactcagcaaagtcttgccatgtggaggcttcatttttcatcacctgttggtttttccttttcttaaaaatttatttctttatagagacattttgatatcattttaaaatctcagcacgtgacaaatacaaactgaaagtgcgaattctcatgtaataagaaaattagaaagcagacaaatatcaaggccatctttcctcaggtgatagccttttgttaatgatagtatcttggtttcctcaggtgatagcctaattaatgacatcatcttgtatttctgtcctaatgaaattcacttctgtcatctcaggtaaatggtaaagaactcatgggtaaaggtaaatgggtagaatactcacgttcctattttaaaacttgagaaatagaatcacagatcaagaatgactttcctgtctccctttttctcaattcattgttctactggtaataaggataacacagatgttaacaacttacttaatgccaaaacactttacatgtattattttattttattatttcttgtgagataggtatattcccatttttttcagatgaggagagagtga

SEQ ID NO: 60336 - DNA, 723 bp, Homo sapiens
ttggttctgtgagctagtgagatttaactcttcaatttcctcatgactcaaaaattcaaatatcttagccacccaccacaacaaaatatcacaagtgttcttagagctttaggaggaggaagagtgtggtcagaatgctgccttctttctaataccacagtcaaaaaacattttctcacttactgattcaatacagaaaaactgacctttcattttagcttttgcatgttaagaacatgatttctaacattccattcattacagcaaaagctcattattttaaatgtctcagatgttcattatcatgccatgtttcctcttctgcttcctaagagaggaggtagtgtcactcacatctggcaaatgggaaagagttaaacagataagccatgactcatcaaccaactcagctctggccccaggcagcaggtggttcttttgatctttcactaaatggggacttttacaggaaacagtccttgaggaaggcagtttaagtaacttggcagttttgtaagcagcatgcatgtaaactagaagataatcttttcatgcccaaacatattataaattagggatggaaccagatgcaaaagggaccccaaacatgagatttctgtattgcacacattattcagtcatgagccatggaaacataattggtaatgtcttgcctgtgtcttgaatcccaaattgaagacggggaatgaggggctctatatt

SEQ ID NO: 60337 - DNA, 644 bp, Homo sapiens
agtaaatgttcatttcttcttccctctccctctctcaccattcttttttttttttttttttttgagcaaacacgacaatggacgttctttttgctcccttctatcccttccttctctcctttctttcttcatatcattggacaatgttacttttttctaggcttttggtttctgcttttgtatctgtccccaaccatactgctttgtcagtcctccagttccagcactttctgatgctgagtgaagagatgacctttttgacctgtttctcagcctcttgctgatttagcctgaaagcttcaatgttcatcaacctgagtctgaagtacaaaatgtttccacatcagtaacaaggacacagagtagttgtaaggaagaaaatgaaaccaactataggttgcaaaatatgtgactgtaggggcacccagacaagaatataaactctgaaagacaactcaagcccccctacactttaacactggaagggatccctagtacatgaagcttaagatcctttatataaataatcaaaattttagccggtgggactcagatccttaatgggctaatctactcttgtcatttactctgacaaatgtccacagggaagggaaacagtacaatactggcaccatttcacctct

SEQ ID NO: 60338 - DNA, 1182 bp, Homo sapiens
cacagttcagcccgtagcatcttctcatcatagactgtgctaccaatctgtgatggagaactgaaggaaaaagggccatggttgtttaatcttgggctacggtgcagtgtaagaggagttgaaactgcccctctgcctttgggggctgtgctccttgtttctgtaatcctactgggtccctaatcttcttctttcttgattttgagtagttgtgatactgacagagtggggacagaaaaagctgaaatctgttattgcaacagtaacagagcttcaagtctaggaatttccccagttatctcttacggggcatttgccttcctgccataggaaacagatgcagggagggcaagttgtaacctggggcctttaatcataaaggcatagggagccctacccaggacattcactcatggcagggtgactggtgatctgccagagaaatcccagcagcccttgctgaaaggcataaggtagggagatccacagctcctgtgacccaacctgtttcagcctggaagataatggaggacagagcgagcaaggcatgtgtgtgttcattagtattctttagaatacaagtgctagaaaaacccacccaaagtgctttaagcaaaatgggaatttattggttcacataaatttattgctgccagtgtactttgatccagtactcaaatattatcaccaggatctgtctctatgtttgctttgtctagctgtcagctttactggctcacttggtgatttaatcctcacattacgaattccagaagaaaagtaaatatgttttcttggctgtgactgggttatgtgccatactggaactaatcagtgtagccacagggatgggtatggtattattataagccagtccaggacccccctgttgctagggatggaatcagttccatggaaaccatatgactggagaatggtggagggtggtttcccaaaggaaattttagatcctcttttccaaaggaatctttggatcccttggaaactttggaaatgcttgttggacagaaataataggtgtttattacagacattttttcacatggccccacaaacaaatcacagtataatgttaccggaatgtccctggaaattacaataaggtgtcactttctcttcctatttttattacagccactttgtgtttttatatgctgaagt

SEQ ID NO: 60339 - DNA, 484 bp, Homo sapiens
cttctttgctgctgtcaaccgtcctctgtaatacaggttctctgtttctattctgctgtcttattttacacagagttgcctgaggaagagccaggaagcctgagatagatgtatacttttacatcagagtaaagtataaagactgtttcttctctcatttcctttttctctccccatatctcattctgctcctcacttcctgtccctcctctccttgggcttcctgcttcttttcctttcccctttgatcctctttaatgatgtcagcccctcctatgagagggtgtctccatcattgtttggtatgtagactttggtcataggcttgagctccgtatctctgactggatcttgacctggatgcctctcagaacctcaaactcaacactttagaactgagctcagcaactcctgtcaagaacattatttttagtctctaggtatgatatcaccttccatctagcttccatctagcctgataatc

SEQ ID NO: 60340 - DNA, 1933 bp, Homo sapiens
cttttctccctagtctttgtcatcaagggacttttcaattgctggttacagcccttctgttcttgtatgtgttatagatattgttgcttctctctcattttcaccctaattgtcatctccctttcaaagagtctgataaactaaaccagcaaagggagctgtcacaaggcagccctaggataggagcccagacagcagcattcagaatctagaaaaacttgtgatttttctactgaaaatgattaagagaaacactggcaccttgaacacagtaggtactctgttaatatttactgatgacattaatgaagagaaaattaaatgacatattcagaagagctagttcttgccaaaaatatttcctactctgtgccttttgagttgtgggacttagttttcatccctggatgacttgctttctatatctgtgaagtgaatagaccaaagtcctgtgagacaatgccttgctctttcatgtagtaaaggttagcccacctctgtaagtatagcagagaaacactagattgggagcttcttgagggcagggactttgttgattcaagtttagatctctgtctttagacatcctgtaatcacaggatgttgcaggatgttacctttcttgcatagatcaagtgttacaaagagcctggcaatttacacatctgtgctaccatgacttaagacaaaagcgcaaatcaggatttttgtttttgttatgttttattgtcctccctcctcccatctttgtccctccattctttctcccaggtactccatatccttatgttgttttcgtctcatcaaagccctgacagaaacacaaccacttccaaagacttgccattcctcaaatgtcctgcgttctaattggacttgcccccctttgctctaacaatcttattccaccttcatcaaaattattatttctaggatactgattttagagcatctgttttaagtgattattaataatatatgaataataggtaggtttagtccaaattaatctctgcctagtggaatgtgtgaaaaactgtcctaaactctacagtaatgaatgctattggaagaggtattaactaggcattccactagaaaatttgctgatccctcgtctgttttgtcatacctccctgactcatggggtgtactgtgagaactgttgcaactctggggaagtgttttcctgtcctgccactagactttgtgccaggaaataatttctaggcattgcctggtaaagttcatcaacttgctttgaagaagtcctgtgaaagcaatagagggttttgtgttgcttttcaacagtctccaacggaggagattttcacaacctccttggtatgccagtgtataacaaactatgatcactagcattcccccaagtaatttaagaagaattaaaaacaagataggcacacaaaagtttatacatttaaaaaaagttagattatttgacatattaaactaccagtagattcctagcgtttcttggtagtagaaaacttttgaaaacatgtccaataatctgtataataaagtcaagacagttttgatcttgatctgtaagaaagtgtaataataactaaatcattatttgaatgctgacaagaaaagtacttgctgtacatttactgtttacttgtattgtagcaccacctactgttgataaagaaacaagcttttatagctttcccatttttctttgcctcgctagttaaaagaatgtctttttttttttgagatctgatatttttaatgtcacaaattttttttttttattattatacttgtcttggctcgtcagccagacatgctgctcggagatgtttctaaagttatgatacagagattgcattatgtctgtttccaaaatgaaagattatgccttcagttacctaaagatcagaactgatgcttgacatgcata

SEQ ID NO: 60341 - DNA, 2175 bp, Homo sapiens
tttggctaataagacactggacactgtgttatctgtgctaaggaagcacagataacgcagcgtgttaagcattctgggtcaggatttttgtgctggcacaattgtgagtaaaccaagaaaaatagtccctatgagatttctttcagacttcagcacacagaaacctagtggattgttccttaagataaaagagaggtttgagaatttactttttgtcatagtttgggttcccaggaatcggattctgaggctctgagatctacatgctggaggtttattggggtgagttcttgggaaaagcacctctgagaggtgagggaagtaaatcaaccagagagaggagttgaactgcagctgtgacagagatggcagtattcctacccagaactctaaagtggctccccttttcccccaggctttatacctcctcccatttagcagacatgggatgtggaaagctcccagggaagggcatgaccttgggtgaggcagctgagggcaagtcccagggagggtctcagctgagagcaataagcagtcaacactgcttagcaggtggggtaaataagtgtcttgatcataaggtggggtaggaggagggcaagtataaatgctgtccaccgcattcaatagaagtgttttctctattattactaaagaatggcttgacccagaaaagatcatggtctttagccacagaacttaattctaggagaggcgatattacagcagactgatccctgtaatgcaaatggcaatgcccctctttgctgagaggcattgtggagaatgcatgaaaacatggcagtgatgttggcagggagatggcaacgaggttctctgcaccaactgtctcctgcagctgggaaaagacacacagcctggctgccaactgttgggctcattgtgctctggctgaatttagttccctcttatgtcagcttgcaattctatgttgaagaaaatcggtctggtctgccaccatcaccatctcttagcaactaagagagattgaaacaacagctgggtaatttgatattgggaacttaaaggtcgtgaaaatagaatataatggctgtttgtattaaaggaaaaaaaaagagaaaatgatgtaatcctaatgcttagaaatgtttggaatgccacatgggttacaaagagtgaaaatctagtttaaactggttggattctttctctctcagaatgattaaagttgagcccagaagctcacccaaacacacatatttgcctaaatataaatccctgtggaatgttggagctataatgtgaaaaacagtttctgtgtttttgtattttctctaagactgacctacagctttcttatcacaagttttgaagcaatacttataacatagatgataatttagagttattttttactttgctttttgtgggcaatggggatggggactgcagtgaagatgggagagaatgaggtgtggccctcagacatagtgctgtgcaggaagcctactacttcagaggctgcccacagcctcacatacaacaggtaataatagaattacatgtttgaaaactagaaaatgagaagtagaagccagatgaaattgttaaaacaagtttttcttttttccctagggccagtgaggagaccatctgtttttcaaattagaaaagccagaaaatataatgtttgctctcagaatgagtcaaatgtcatactctaatgaaaattccaaagcagaaagagagaaaggaagaagagcttgaaatgccaaattagtggggtgaggtgcttgctgcttgcattcctgcagatccaagcattttgcaactctagtaaacctgccaggacaaggttcatttgaaggggtgtggattaccgggaggtgcggggggactgacattctagtgctttagatggtaggtaactgcctggtcttgtttctcagaataacttgttcatccaccacatatgtggctttcatcccagcacattgggcaggacaccactgttttcttcgtttggttaatagttacacttccttgacacctcatacagctgggtcatggatctgctgctgttctcaatgtgagcatcactgtctttttttctttttctttttctttttttgggacaggatctctgtcacccaggctggagtgcggtggcacgatctcagctcactgcag

SEQ ID NO: 60342 - DNA, 1581 bp, Homo sapiens
attagagggtttttgtttgttggctggcaagattgagtaaaatttttgaccatcttctttccagcttagtcagttatacacatattgtctgtatctatccaacaattgcttgttatttgtcagtgatattagtcaggtaattatagcatagcaaacctcaattgggcatttatagaattacttatagaaaagtaatcagacctgttccaaaatttgtagtctaatgtttgcacaaggcacagtagtaatcactaggataagtaaggtacaattcttcccctcaaagactttaccatccagtatctcacaatgtaagaaataatcttaaggtggaaggctttacaattagcaaaacagaaacacaggcctcaaattaacttctacatttaaaataagggtgttggaaacatcaaaatgcaatggctgggtagttgtgcttattaagtggtgtgtttgagcatcagaatgtatttggctgattcagcacattgtggtggttttttttttttcttccatttccatcctttttttccttcctacacacgcagcaaggtatttcactcagctgtgaaatatttaccattgcaaggcaacatataattaagtgccggaatgagtgatgcagtcaagtgctattggagatcagcggacaaagaattcagtgtggcctgggacaggcattgtagaggagacagggcttaaattggatcttgaaaaatatttgatcgagcacagaggagggataggatgatgatgcaagcaacagcaatgccatgagcaaaaggcaagaaccagaatgagtcaggcttatttcaaggatagtatgaaacccatgttctctgaaatgaggatctgggtaggaggtgaagctggcaaggtagactgggaagcagctgataatggtagaaaggaacaagccatggcctgcaagcccagagacctgagttctgtcactaactggtctgtgtctttggcaatcattgaatcttctacttcaattatctgtgatgtgaaatgatgctttcagactaaaaaaatctctaaggtggcttcctgttttaaagtattttgtgattcttttatggtgatccttgataaactggaattaggacttttgaatctatcctaacagtccttaaggttgttcttaacaagaaaatcacataatgaaagagggaattcatcacatagtgaaagaggtaattattggtattaaattcagtgaagaatgattgccttgggaaaagggattagacatactggaggaaggaaaccagcttgaaggctatgctgatagttcatatgggaacagggtagttgaaatagaaatcaaaaggagacagacactagaaccattgtttattcattctatgttgatcatcaaaactatgctaggttctgaagatccggttgcaggaaagacagaagaggcccctattcttgtggaacttacattctaacaaaaggaaaaactcagcaggatttggtgattgaccaataggatatttgtgcctttaagagaatgacacttactgcaaggccagatgtctagctacaaaggattgaccacataaatgttga

SEQ ID NO: 60343 - DNA, 1180 bp, Homo sapiens
caagcgattctcgtacctcagcctcctgagtagctgggattacatgtgtacactaccacgcctggctaattttttttgtatttttagtagagacggggtttcgccatgttgtccaggctggtcttaaactcctgagctcaggcaatctgcccaccttggcttgtttattgagtacctactttgtaccaagcattgtttggggctcttaaggataagtggtaaacaagatggacacagtctgttattagttttttgtcttatcttttctaacttttttttgtaaggaactcacattatttttatggcaaaataatttcttaaaaaagtttaaaaaaatccttccattggccatttgtgtggtatgtgtgttttatgaattctccttgaccatacatttggagtgggtgcactcttttaaattacactgttctgtcctgtgtcttgtccaggtcttgcacaagataggaggtggctccaggacaccagtctccttcttagggtagattagggcactgtctgccctttggtgaagccagcgtggtcagaactcccagatttggtttggctccaaggcaaatagagtcctgctgggactctgctggctgtttatagtcctttcaagggtccggtcattccaaccttggtgtctatttacgtttgccgtatgttacttgacgctccttcattcccgttgaagctgcctctcccggaaatctctgtcattccataagccctagctgctgcctcaccgtgcagctgacctcatgcagattgaaaaacaaaatgtattctggctacatttaaaggaagttttgaggccagttgatgggcaaggacttggctgtattactttgtgggcggagcgcttaaagggggatctagcactggctagcaccagattccagggctcttacacaaaagcctttgtgttattttttcctccctctgcccagctcttctcccatgactactaatagtgtctctctgctataatgcactcatcattgccttctatttttaaaatgctagatcttgcatatgccaaagaacaaacaggcaagcaaaaagccaccgaattattaaaaagtattccatgttcctataataaattatataagtaaacatatggatacatatatatatgtgtatatatatgtgtatatatatatgtgtatatata

SEQ ID NO: 60344 - DNA, 1825 bp, Homo sapiens
gagggtgactgtggagtgagagatccctgcttacacaaaaagaatgctgggaatctgaggatcctgctgctttggtataattcagttgcctgctttgatattatactttgtatccttcttgtgcatagtttgacatgcattccctgactgttgttttgccatggaactgacttaacctcttggttgtttaactttttattttttttcttatttctcacaaaagaaatacatctctagtggagaaaaattttaaacatacagataaacagtacaataaaaatcatttgtaatgctgccacctagagaaaatactatgaatagctttgacatattttttactttagtatacatagctatactttttttctatatagaactcttttataacttacttcttttctggtaacaatatgccttgaacatcttctgatgcgattaaatatattttacaatgtttttagcatctgtgcattttttttcattatgtggaataccacatcatgttaaactcatctctctttttataatttttcaccattataaacaagtatttgacagcatttcagtaggtaaattcattattgccttagaaaagaatcctgtgaataaaattgttgggtcaatgggaggtaatggagctttccaaaggttaatcgacagcttgccttcccatctacccgatatgaaagaatgatactggcttcagaatctggatttgttgttatctaattttcagaaccttaaccaaaggactttgatcctatgaggcttcatttcctgttctggactctcagatgtgagacctaaaaacttgtgtctataatattagctctcaacagacatactgtagttgtttaaatacaaatcaacagtcaagccagttgctgtggatatttatttatgtgggggaggaaggcatagaaacacatccttagaagctgtgccatggtcttactgatctaaatagataaaaagtacatctaagaaagagctgccaaaggtcatacaatgagtcagcaatgaaatcccaaatagaactttgatttccttaacttctttctcccagtagaaaaagtactaatgaataggtcaggagaaagcatttgtaaattaacctgtaagatcctttataccttgaaacgctccagaatttcaatggagttactagaaatttacatcagataaaacaaatctaaactgctaatggatattgatagattctttacaagataaaatcttaaatgactgtaatgaagaaaaagcaacaggtggtatagggagttgaaaatgagactcaaaggaatctgtgtatacctcttgcctgggaaaggataagtaggagggtggaggagtaatggcctgaacccagcatagcaactaaggaaaacacaacaaaaagggcctctcaggacattaatcctggagtgaaggtgggggtcttaactttcattctgaatgaaccatagacctttcctcctcagcttggtggtatggatctgcactgttatttcagggcctgtggcagggtgacctgcaggagtcctagaatgtattagtctgttctcatgctactaaaaaaagacatacctgagactgggtaatttataaaggaaagaggtttaatgggctcagttccacatggctgggaggcctcacaatcatggcagaaggcaaaggagaaacaaaggcaagtcttgcatggcggcaggcaagagagcttgtgcaggggaacttccatttataaaaccatcagatctcataagacttattcactaccaagagaacggtgtgggggaaactgcccccatgattcaatgatctccac

SEQ ID NO: 60345 - DNA, 2440 bp, Homo sapiens
tagcttgatgaagcatcacaggagagggaatacttgatctgggccttgaatgatgagtagaatttatatagcagagatgaggaggcataatgttagtgacaggaacttgtgcatatgccagggtggagggcaagaatattcaaggtatgtttgggtgatagttaagagaaatcgttggtgttttggagtataggctaagccactataaacaaagagaccccaaaatacaataagatagaagtctctttctcttttacctagaggcagacagtcgagggaagatagaggtcgtcctgaggtccaggttgcttctccctcttgctcttctatggctcaccaccaataccatgtctgcattccagctcacaagaaggggaaaatggagggcagccacctttcttcttatggatacgacttagaagttacacatgccacttttgctcgcatcccactggcccactttgtcacatagcattacctgacctcaaaggcgttttggaaattagcctctaagctatgaatattgggaggaaggtgtctcgtaaactaactactagttagaaataactttgttagaggaaggtgaatgtgaagttagaaagaatagggccaagatatgagggactttgaattccaagtgtttgcatagcatagacacaaaatcaatactattgaatgcatgaataaatgagtagttaagggaatgagtaagtgaacgtatcattgagtttgaactttattctctagatcagggctacaaactaaaattaagaggccaggaagatagtataaatgaatcataaagccagctgtaaatggggagtgatgggactgaatcacctggaagatatgtgacatgtcttaagggcagccactactcagctccagctgatagttgcatgggaatgtgggccatttgtgccaagattttggaatttttaaaaagaaggaagaaatctgggttttatgtgacatctcccaatttttagatgttggatctgaacaatttttaaataggtcaaataaaaacacatctttgggatagtttggactttaagtcactaattcgcaatctttgcgaagatgggaaactacttaaaatgtttggcccagagagttggtagtttaagaaggttaatctgactgtggtatgctgggcacacctctagcagtaattttcaactgtgactgcaaattacaatcactgggaagctttaaaaaaataaaaaaacctctttatccaccccagaccaattaaatcagaatccctggggttgggtattttttaagttcttcaagcaattgtaatgtacagttgcggttgggaggtagtcctctaagcctaatctttttttttttttttttttttaaggcagagtcttgctctgttgccaggctggagggcagtggtgcaatctcctctaagcctaatcttaagggttattgaaatagcctagacatgtggtaaaagggtctgaactgtgggtctggaagctgactgaagaaagaaatagataggtgggagatattataaagggcaaattgataaaattttgtggctgttttaaataggagagtagaagaggaaaggagtcaaaaagagttgaaatttcaagctgaaatttgggggctgggagatataaggaatttaacaaatgtctccaaggcatacataaacttaagatacacagtagatgaatggggcccaaatccagtttgggaattctaagtcaacataacattttaaaaggtaaggctgcacaattctttttaaggataataaaaatcttttgtgtatattttatttgttgcaatgccaggacaaaaactgtatattaacattgctaatggatttgttgagacatgtcaggatcattgcgcaaggttggtccagaagaaccgtagggatccaaagcaaattccttgctgtttaacattaggaatgtttcagtcctgcctcagtttggtttctgtagagctttcaatgggtcttgagttgttatcagtgatgatttagcaccaccgtgaggctgtatccagtcactgcatatggctgttggcctctgcaatatatacggaagatgatctgcccttttgtttgcagctttaaacatcaaggtgaaaatagttctttgtaattttcttcgtatggaaaggttatgatgcaataatatcttgtattaagatgataacagtgcctaactgcatttgatggcaaatattactatcgtgatgaaactcaaaagatggataaactcaacattgcgtttttattatttatttatttttttagcgttgcatttttaaattcaactaaaatgattcttggaactttagtgaattattctttatctttaatcccgaagtcataattttgtgttgctggtaggatgtttcagaaaaataacaatttaaatacaaaacaaaactttgttatttc

SEQ ID NO: 60346 - DNA, 750 bp, Homo sapiens
gattagttacatgagtaagttctttagcggcgctttctgagattttggtgtacccatcatggggttagttttcagtgtaaactcaagagtgaccctcagtattgctgagtttaatcaggggaattttgaaagagaagatcattcctagctaaataaagtgtatgttctgccaaggtcaagttgtattatttgagacccactgctgagtactttattaattattttcagattggaaaataaaattacagcttttccaggaaactctgggaatcaatttattttagtaggggaataggagcaaggaaaagcagcttgccaattctatgcaactgtgaagaacagggaattacgaaaagcttgctgtatgagtcatagttagagtaaaaatccttgcttcagggattaacatctacataagttatggacaaaataagtaactggggctccatatggatattttattgtccattctaatttgtatcaatcactaaaaagaaaggatcacatgatacaagcatatcactgatccatctgtaattatgaaatcgaaagtaattttagaaagtactaccctcaacagagaactcatttatttatttagctgtggctaggaagctgtcctagagctgggagctactgttgtagctagattagattaatgaattaccacaaaatctgactgaaataacactggtaaaaatagacagtggatatgttcaaggtaattgataattatagtgggagaaaaga

SEQ ID NO: 60347 - DNA, 1378 bp, Homo sapiens
tggacttcccacctaaaataatacaataagggtcatttttttgttgctgaaaatatctatctgagctaatgagattgttaatataaactgatgaagccaaaatgtttgtgatagttcaataataatcataaacccaatgggaagtttcctcggggtagaaaagtacctctcgtaatagataatgaactgtaaagaggagaagagcctggttctgtctcctttttgttgacaaaaaagggagggagatgacatctttatatgttaatttggcataaaagtcaagtccaggtagtgaaggcgaatcctaagtcttccgtttcaaaaacattttacaaactaaaagacacgtcagcaggaaagactgtttggggctttattttctactggtagccagttttggttaggtgttctgttccacaaagtaggatttcaaaatctctgttcctctgggcatacaactgtcctagtccagctacttttggtcagctcctttctgtggttagaaactttcagttcaaaacagtcacaccacagctttttttattgtcctctttttccattttatttctactgactataatcttaaggcattagactccgttgcttgccttcccgttgttaatgtccactagaatcggtcaagtttctcactttcccataaatagggacataacaggaatctggtttagtttcgctttctcttttctcctctcttcagaatcagagtcaatagtcagcagtttgcactaacataaatcttgttattgtttataccaactccccctttctaatgctattagaaccacggtggacatagaccccagagatttgctcatcttaaagctctaaaactgcaccacttttatgacaacagtaaaaccttgagctgtcacttcacccctacgactgttattcaccgtgattactggcatttctttcttgctcattccctcctgctcccatcccccatttgattgtctgaaaaaaaatgtttggaacaaataaggtaacagaggaatgactagcaattcttagtcgagctttgtaaaactccagggcttcctgtatggaatctctgttctgtttgtgatatatccatgtacacttcccccttccggaaaactcatcccattattctggtgggttttaatgtggctctggaagtgagagggataaagaaaagcatggccgccttcttcctaatgatgaaatggctgtgtccggccaggagattgcactaactgcatgacaatttgacctcacagacctaggttcaaggctgaccaccactgccgccaggttataagtttcggtcaagatagtagcttctctgtccttcagttcttcactgaaaaaaaagtcaggtctacctcacgga

SEQ ID NO: 60348 - DNA, 1946 bp, Homo sapiens
cgcggggattcacctgtgaaccctggggtctgcactcctgtacgtccgtgactgatgcagatgctccggctttgggaacgctgctgagagcgccagagccacaaggtgcttgtgctgctgctgcaccgcccacggggctcttgggcccatctgcttgggccagcgcaccccccatccgtattgatttccgctgcccccaaggagctcccgggactgtgtcctgccccagctcgctcctgtggcctcccagttcctttttctgtttctttctttcctcctggctgcaatactccagagaagggaagtgtttgaaactgcaactgagtggcgttgttgcgccggcagccgagcctcccagtcccccaacgagaaagagagagagagagagagagagagaaattgagagagagagagagagagagagagagagagagagagaaggggggggaggtgtgtgtctgcgtacgagagagcgctctggagcaaagcagctggaaaatgcccagaaatactttcacagcggtcaagctggaaccccccgcgtgtcctcccccttcccgctcctcccggcctagaccccgcgccccccgcagggagggtgtgcgccccacctgccaccgggctgctccgggtggtagaaaggggtgacgggggacgggggcgggggcgggtggcggcgcgggggtgagaacccggaggcggcggggccctgggccgggctgcccgcgggaccgcgcggccgcctccccccgccgccgccgccgcctccccctcctcctcctccgccgccgccgccggtcgcctgtctccgcgccgggcatgcctcgggagccggggcggcccgggccgcgggcgctctgcggcgcatggacggcggcggcgccgggcgagcagcgggaggagaaggcgcaggcggcggcggaagcggcgacccacggctgggagcaccggcggcgcgaggggacggccggccgcccgcgaggctccggccccactacttttccgtagcctccccacctcagcagcacggccgccgccgccgccgccgccgccgccacggccacggccacggccccggccccggccaccgcccgccgggcagcccagagcgccgcgcacggccgcactctcccgccaccccacgcacacgcacacccccgcccgcccacgccccccacccgggaggggggagagaggcaaaaagtaagagaggaaaaaaaatagcaggaagatggcgcccaccaagcccagctttcagcaggatccttccaggcgagaacggtaacacttttctgtttattgaacctgccgccgggccgctgctcccgccgccgccgcctccgccgccgagggcccctctccgcagcccgcccgcctcctgggccgcgagcccgcggggacctcgtctgggcgcagcgctcgcccggggccccgcgcattgtccccgcggcggctgcggcagcgagaggctctggcggcggccgggctctctgagcagtcgcacctcctcggctcggcgaatagagtgactcactgacaaaaaaaaaaaaaaaaagaagaaagaaacagaaaagagaaaaagaaaaagaaacaaacagatgcgaaggcgctgccgtgtgacgggagcagcagcgagggtggggggccggggatccccggggccgccgcaggtcccctagcagctgctctcgaggaagggaatgaggctggggagggggagggaaggcggcgagcagggggaggaggcgaggagcaggaggaggaggccgggggcggggagcgcggagctcgcgccaggcccggaatgtgtcgcggaggggccggctccgtctccgcgcgagcagctaggccgggccgagcccagaggagcgcggccgccgcctccctgcctcccgggctgcgccctccgctcggcaacttgtgggtctcccgctctgccctccgct

SEQ ID NO: 60349 - DNA, 499 bp, Homo sapiens
atggctgagtgacagggctacgtgcgctgcgtgagggtggcagccagcccacacccgagcacaccgccaggcagcctgagctgggaacggacactgggaaccatccccctcccccatctctaccccagtcaccagagaaatgttttcaaccgggcttcctcacaattataaaatcagcaaaggtcagtccagcccagggataaggacatcaagacgcatttaaccatttcctttctgatgcctttccccaaatattaacagctgctgtttcctgagaattcatgtagcccggtggcattttgcacatatcttgtttaatttcctggttactgggaaggtgagcagcagtgtgtgccctgagtcacaccgctccaagtccttggtagaagtcattaaccctagaagttaccctatggacctagaagttatcacaggtatttctatagagaaacataatattcgacttcctttgatatgagaaaacagccttatcagaata

SEQ ID NO: 60350 - DNA, 1468 bp, Homo sapiens
ggttattttctctagttgtggcagatattgacaaactctgaggatgagtgtgtacttctagactatctttttctgagtttatattccttctagatcagaggttgcaaataagttgcattttcaggtagtagccacccaaagcactgtgttgaggtttctgaagccaggaccaagcttgatgggagttaatagtgccatgataaataagtggtgattgtcttgggcctggaaagacagaaaaacagtatgtgtgccctgtacctcatccctgttgccaaccttttcatttagatcaatatttcctttatctcctattaggtagttcagagctgaaggaattttgggggttctgtattctgctactttccaccaggaaaattgaattcattgtaaaagtgctttggatctgaatgtagttcagcaaagaaaatgtagctactgcatctttgataagcagcttcagtttaggttacaagtttataatgtttaaaacaaccatcagtggattcatttaaacaacttaatatatttaaagatttaaaaaccctgttacttaatattgctttggctaaaacaaaaaatgctttttgattcttttgcttttaagccagtcccatcagacacagcctaaaagatagaaatcgtgaccttcccttacttccacctccttaggtctggatggctgcagttttctctttaggccacgtgacaccacagcatgatctggaaagtaattaactactttagaagttaatccagcatatactttgaagcacaagcaattccatccctaatcgttgcttggcagattgattcttccttctggctcttgaaactgtacgtagtaattgccctggaatttaaaaatcatctggggaattccttgttccacatttagggcacaaacagctaatgacttagacacgttgtagtgtgtgtgtgtgtgtgtgtgtgtgtgagagagagagagagagaaagagagagagagagcatgttttcagggggtggaaaggcagtgtcactgtgtggataggaaatgtgtctcttcctctcactgtaagatctgaaaatctcttatctgaccagattgtaacactgagttgccaaactagcaaattgataaagtgttggaatgtgtttgcagagaggaatcttgatgggaagggcttcttagttgctcttgtacacaggaactctggttgcagaactgcctactttcacgttggttctgatgatgctgttatgtttgcaaaacagtgccgtgactactatcttcagaccagcaattagccagcttgtgaactaaccattcatttgctttctttcctccatttttttttttacagtatcttcatgacattcaaacatccattttttcatcaaaagattttactttcactctgtcctcgtatgattgatttccttttgtgtctgttatctttgtttgatcctttgactgtgttgggca

SEQ ID NO: 60351 - DNA, 1383 bp, Homo sapiens
acccactgggtaggccgcaaaccttgatgcctggccaagcccaggcttgcactttacacacttggactctgaatcccacagtagtatttaaatatagatctgaacaccagactagacagtgcaccactaatgtgcgggtatatgcaacatgctcaaaaggcaaacagcggctagggaaaggacacactgcttctagcttttctgtcctggaggacagaggctgcgcctttttttggctccatttcagagcagtaaaaggcagcatcatgagcagacacggcctagttcctgcctctcaggtttgttttcccatgtgggacattgcagttagatcctgagcttagaagaaaatgcctacggaatcaaaaaggataaaaggaggaaaaatacctggcttctgccccaaacgctgtgccctagctggctccagctgccttggaatggggcagggtggttgggttgtaattgcccgggcagagatatgaggtatgcaggcctacgtgcactgcctcacacatcacttggctgggaggggctctgtttagtcagtgtccagctgataacgacctgaatccttaggatgccagctgcctgccaagctggacatgtacagacagtggcacccagaggtccaggagacagaacaaagggcctgttactgagtcagccctgtctaagtgtgtcatccttactgaaaaaggttttgggcaggctggcagagaggctatgtcccaggaagcccagaattctggaatggagacagtcaaattctaaaggggttctctgctggcagattcctgtcattgattcaacctgggctctctcactaggatctggcagttgggccataccttcctaagagtattcttttccctgcctcccactgttgccaggcccagctggtgctggctctcttagtgccctcttgtttagggggaccgcatccatcagggccttaaaccttccctctccccttttcaccaggacataatgatattaatgatggctaacacatatttaggacttacatcagccacttactgctctaagcacttcacatatatgttgactaatttactcatcacaaccacactatgagatgtgtaccattattttcccatttaacagatgagtaaactaaggcacagagagtaaataccttacccaaagtcatgcagatagcaaggtgacagagccaggaagcaagtccaggtggtctgaacccagagtccctgctcctaaccattatgctatatttcttctcggttcatgaccaagttcttactgattaaaattagtttaaaatcaaccgattcctaggcctgcttttccagaatgaacagcactcaagctcagagctgggatttcataacttcctatttt

SEQ ID NO: 60352 - DNA, 819 bp, Homo sapiens
ctatagacacacgccaccacaccacacaaaaatacaaataaatttttgtatttttagtagagatggggtttcaccatgttggccaggatggtcttgatctcctgatctcatgatcctcctgcctcagcctcccaaagtgctgggattataggcgtgagccaccgtgcccagccaaacctgtgtcttttataatgttccaatctactctgattaaggacgttggaaaagggattctctaagggtcatggaatggaaactaacacatgcctcaaaggggagatgccaagacatggaggaaaaacctagtaccctcatggacgttactgtcagaaggggtgtccttgtcttactcccagaactgtctccagtcaccactgttgactaaagttagaggtgagctgctgtctcttggtgaggaatgtgaaaactcatgcacagataggtggagcaggaagttgggggaaggtcagaaagaaaacaaaagggtttcctgggatgagtcactgcctttctgggaaaccatttcagaagccaccgtgaagtccccaacacctgtccaagccctatactttgtgctcaaatgaagtgtggcaaacaaagttctgagccacatctgacagcccacaggccacatggagggcagaggtgtgagaaagagctgtgtgaggccagcacacgtgacaatctgcacatcacctaccagagtctccagagctcacttttcagtggactgaaggctcttagttcaaattatcctcttctttaaatggagcacactttatgctattgtttcctgcaatggccacagcttggattttc

SEQ ID NO: 60353 - DNA, 1209 bp, Homo sapiens
aactgagctacaatggcgagggagcgggtgggatactaactggcccttcccctagataggaggccatcaagtgcagagccagagaccggccctgggcctccgcaggctcccccggagccaaagagaggccaaaccgaagcgccctgcccaaggccgccctaacgcgactctggccgctcctgcctagcagataccggctggtgccctcgcttcggatgcaagatcccagctctgctgcagctttcgagccggagggacaatcgaaatgatcaaaaatgcccggcgggcagccttggcgagcgcgcggcggggcgcggggtgaagtctcgccagggcgcgccgcggcggacaccgagccacacgcactgtgcctgcgcccgcggccgccccgaaggtagtcggtaactgcggcgggcggcggccggggctggacagccagccccgcccggcaggctcgcagctcacgtagcgctagcgtgagtcagcgcgttccagcgcagccccgggccgagggagggctcccgcgcgcagcgccagcagcccgcacgtaccggccccgggagggggcgcctaggtggttccactcgcgggtgccctgtgccctgcagtgtccccacgccccaggttgtccccctcgaaagccacgtgggcgtggggctcgccttccctgggcggagtccccatcggtgcctgcccgcccggaagtaggggcgcgagggtgacgggcaagaccgagcccggcccgtgattcttcctcagccggagctcgaccttctccttgtcccttgcgtttcctttctttgaaccacacactcgctcgctcacgtttgtcccgactaagttgcccccggcccccgcagctgtcatgaagatagatggagaggtagctgcgagagcccagcctcggcgggtggtgcccagggcggactggggagactaaagacagtaaagggcgggtgggactcgagtcctctatccacctaatctcacatgcagtgggacttatcattccagtcggtctgcatttcctcaaatctgcacctgtttagttacgacaaccagctttataaaaggaagcggcctacgtgcctgacagctgaatgacggaattagaagtcattctctactaaatgtgtgaacatagcaggacctccgcttaagttctagacctacagggttgcaagtctgggcctcctgggggcaggaaaa

SEQ ID NO: 60354 - DNA, 1479 bp, Homo sapiens
aagacagcagggagtgctagaaattggcttcgtggacaatggggggaagagtcgctccgaataatgtatcagaatcgccgagcagtgctgaaagcagggttgagaatgaggtcaacaggaatttatagtggcaatcatcatagcactaaccatggtataattactcacaggcctgctcagcactgtgcctgacaagcagaggatacgctaaatgttgaatgacggaatagacccagtttcagtgagccctccagttaaagggccacatgttctctgccatcatagtttcatcaacaaaaagccacatcacatctgccttgggtctatttctctctgatatttttagtctagagaaacattgaggtggtttccctgcttttgtacaagtttgtcatatgttctctctgcatgctttgtaatgcctgtatgcattaagttgttttcctaagatcactggactgggcagatcagagctcaagctcgcaggtcacctaactcccattccacacactgtgctatgagatatgctatgtaaaactgccaagtcgttccagatgattcagcaggccttcaatattacctgcctgcctgtcttccctccttcctcgctgcctccctccacctttcctccctcagacctcttggaatcttttctgacctctctactaagctgtccccagcttcattatgttcagccctcatttgcacatgctcttgacacctggtgtttggtggcagaaatggctgataaaattccacgctgattaatttcatgtttaatctaactgatacttctgtagcctttgcaaataacctttttgaacaaaaacggcaatggctcattccaaacccgatcaaagaggtatgcatgactcacagccactaaataaacattgatgcctgatggcagtaatatggctatttatattcagagcctgatttaaccagtggcattcctgtaataagataataagcatgagctgtttactagaaaaaaaggagagtctgtggtgctggtgttcaataaaatctcttaacaggcaaatgagtctctgaaattggttggcaaatacatccagaatgagatgtgctaattagctgctgttactgattttctaaaataaagagtttaaacttagattagtcctgaaatttagtacaataaaaaatactggataaatgatattatgttgagtcttacagattatgtttaagataagtccaacaatacaattaagaaaaaagaactctgcacctaaatcattagattttttaaagactaagaggttgtaaatgtggagaattataagcatagatatgtgaatctcaggttcaatttttttctgttcagagagcatctgtaggtgattctcttggccacaatggcagggacatctattactatcagaacttttgtttttaaataggaagagcaaaggaatgcaagaattagcttaatagtatttgggtagccattaa

SEQ ID NO: 60355 - DNA, 1307 bp, Homo sapiens
agtagatatcatttttcatgtatatatttggttttataaaaatggaatcatatcaaaaatactgttttataaccctccaaaaattatatgtccccccaaccatgctagcttgatgacatagttaatacagtatgtttatcctcaagaaagaggtttaaggtacactggagatcaatacagagtaaagccacagtggaggaagctggtgaagtcctggactcctgtaacacattaaggaatcatcctgaagtttgagtcctgagtcctgttctgcagcaaatatgctaggaacaaacgctcagtccttctgagcctccatttccttgcccataacatgaggataatcatgcttgtctctcacaaatgttctaacaaatgagatcaccttcttaatgacctttgagttgtggaaaaaaatagcatcgtagtatttttttatgttgcagcctgctcattattggtattatgattattattatattacccagcttcgaattttaagctctcctttttaggatattttagcttattagccctatgacacttttatcactagtggatcttgttgttattgtttaagagcatattgcttttaacttacttgaataaacgttctcaattcttttttatggactttttttttttttttttggtaaattcttacatggagagtatgctactagggagtaggggctggatttgacattgtctcagtatttcctgcaccatctgtctgctgccctcccagacctgcaccatcaggatttctgcaatgcccatgcctacatgaatcctgggtgtgtgggggacactgttgtcccacaccagcctccctttgtagaagaatgggaggtgcaggccactgagactcttgtgggtagttattcagatgggaactgccaatgctgggaagtgaatcttgcagccaggaaagattgatgcagccaggaaccccttgctgaaggttacctcaggccatttcatcagtaacctctgctgaactgtaacgcaagcactgggaaaaggccaaaaattaacacgaagccaccctatctccagccttcacctcagcctttataatgtccaggcctcagatcccacaagcatgggatccctttatctaaagcgtggccatttccttccttactcatttaagcctcattctctttaccaaataccacgaaacctactcagggtacaatcaggataatctaaaatataggtactagtctgctgatgacacataggatttttctaaactaagtaagatttatttttcctcttctaactgtttctttttcttctag

SEQ ID NO: 60356 - DNA, 1504 bp, Homo sapiens
tgtggcacatgactgtactttgaactgaagaagattggaagcacctcagaagcaaggtctttctgaccttctcatgtcttcctgtctgccaaccctctttctcccctgaaagcaaatcatagaactagaatttattttccccaaggcaggtcatagaaaccagaattcctcttccccaaagtaagccataaaacctagaaaggtcgctctctctttcctcccttctcccctgaagactctcattccagagggatcctgtcccataccaggtaggaggggaagaatgctacacagagaggccaaaagaatccgagcagacaggctttgctgggtttcccctttagtctattaccattagatcatacccttttgtccaatcacatttctacatggctgtccattcttcatcgaagctaagcataaatgtaacctaagcataacacttttccctaggtatttgggtcttcatttctgacgggtcctgagacacacaaaactttgattaaataaatttgtaatgcttctttcttgctaacctgccttttgttatcagagtgttggctatgtcccttatgatggatgaggaaagatatcacacctttctacccctgcagcagtttgagttgggttttctgtccctggcaaccaaaaggattctaaatgattcattcctgtgggaaggggtcttgtaacctagagagcagatacacttgcaagttacatttgtagaggggcagccactattagcaagagaagtttattgcttaaatcaggagtcagaaaacttttaatgaaaagggccagagagtaaatattttagactttgtgggctacatggcctctgttgcaaatattcaactgtgctacaatacaaaagtagccatagacaacatgtaaaagaatgagtgtggctgtggtccaatcaaactatggacacaaatttgagttttgtgtaattttcacatgccacttatctttcttcttttgatttttttaaaccattttaaaatgttaagcccattcttcagtcatgagctgtacaaaaacaagcagtgaatgggagtttccccacaggctgagtttgccaacctctggcttagatcctcgtctctgggtgaagtgatgatcctctattgccttcccagggcaggaaagataacaggtctccctggctacaattacaaggagggcaaacaaagtggatgggactttccagcttagttctgagactaactatgattggatgagaaaacagtccagtggaaagagtaaaaaataaaacaaatgctctgcccttcttctgaactgcaggtgtgtttgggataagctacgagaaggattatgttttctgaaaacagattcttcctgccatgcccatcccgacactgcagggcttagagataagattctaattatttctcactcctaaatattcttgcaaaatgagatccgtaaaggtatcattccaatctctccactgcatcaagacattgaagggaaagac

SEQ ID NO: 60357 - DNA, 1425 bp, Homo sapiens
atatatatatatatttcttgtaaaaatatttaattttctgttttatgaaagtatgatgtgttcatgagagagataaaaataaccactcatgatcccacctccaggagacaatgatcattaatatttttattagtttaagtatagtatttattatcctgactcatttacctttctacatagcattaaaatttctgtaaacatcatttagttaggggagaggaggtcacaattaacatttttaaaagttaggcttattaaaatataatttatatatagtaaaattcaccctttttaggtgggcaggatgatgagctttgacaaatatatagagttgagtgaccaccacccaaatcaagatgtatgtcatcaatacatgttaacctctccctgtaaaaacaatcactctctgaaaacctatccacctgaaattgtcctctgtatgggataggagctcaataatggcaggataaatttataaatgatagacagggagacggacatagctagtgtcagtatgcggatatgagacgtttaatgttagagtaggtagataggcagatatgagcagggcaggatagggccccaaagaatgtcaggtgactgtcaggcaattatcaggcagctggcaacagggagagggaaatttcctaacaggacatatcttgagcttacgagcaagaacttcctaataagaactacaaatagtagagtttgactttcctctggggacatgtccaggcatgcacagaaaggggcaaagtggcagagtttgacctggatatgaccttcctccgggaacactagacctgtaaggcaaaactgccctaagagagcatgtgcataacttcagccaccaaatggcatatgtggccccacccagataatggcaaaacgctgtgtaggcactgattagccaacagcctgcccagagggagggatgaaaggaaaagactaggggaaaaaaaaaaacagaaaatagtaaatctatagagccctgaaccaaccatcaggcaaggcacttaatctttccagttgcctacttggttccttccaagtgtacttttctttgcttcaataaactctcctttctgccttaaatctactctgtctcttggccgaattctttttcccaagaagacaaggatcaagcactgtggagcctgcccagacttgccgccagtaacattacgaagccagcctgactggatgtgaattctttttctccacttattgtgtgaatttggaaaattaaaacttccttagtggcaatttcctcatgtataaaatgaggaaaataaaaactacttgagagaggtatcctgagtataataaagtaacacatgcaaagggcttagaatacaaccttgcacaaagtaaacaactgatcaatggtagttattatcatttttacaataacaataataa

SEQ ID NO: 60358 - DNA, 3135 bp, Homo sapiens
caggcgcacgccaccatggccagctggtttttgtatttttagtagagatggggtttcaccatgttggccagtctggtctcaaactcctgacctcaagtgatctgcccacctcggcctcccaaagtgctgagattacaggcatgagccaccacgcccagcctaagaatctgttgtcttactgcagagatctctccattacctaagaaaagtctcattttggagagatctctgtggtcatctgagggccacatgatctgtcagtgatgcttccttaaacacttaaagggatcttatgattacccctaaggtgtttttaggggagacaaaataactcctggattccacacaggaaataaagacctgagggcacacagagtgcccctggaaagaaagtgttgttggtctccctaagtgggacatacatcattcagagggcatagtttgacagttcctccaacttggcctcctggcaagctggtaagccttagggttcctggttcagtttgaataattgaggctagtccctgtttttgcagaaattgcctgagggctgtcagtccaaactgccctaattatctatgccatcagacaggtgttgctcattcaccccacggaatgactgactaagcaatagctatgggaagggaggtgaggaagacatccagcggtgttaaccaatgtcttgcatgggagatatagaaaatggggcaatcctttgctttatctgatagattcttgctgaggtgaaggggaatgacaatcaaaatcatggtcagcaccatcatgggggatggccgattcagcagtttcaccatttatagtgtttgcaacagttttggagagctgcatctgggcattttttcttcctgaggaaagacccaggggtggctctgaaggatattattagagatccttcttccccctcctggcatctaaggtattctcccctcatgtattggagttgctttctctccatcactataaaatcagcttgtcctattccaatagttatcattcacctttttccaatcatctctactcatacccagacctttcatccaaaagagtcaggtacaaaagggataaggcaattttataaaacttacagagactcacgccacctacttaggcctgcatgagccactgggtgacttatgaagcaaatgtactcaaccaagtggtgattaacctcatgatatagactcacagcaactcaactagagaatccaggggactgagccagaattaagttgaaatccctaggcctctttctggctggactaccaacccactgtcctgggactgccattagtgaacagaaaagcagcatggtcagggagtgttggatacaatgagttccaaatttctcttttaagaatcattatgtcagtatgttcagttctttgtcctccgttttaaagtttaacttcctcatagtttcagtaaaaaacctttcccaccagttttaatcagtagttcacatctgttcccctggtcacctgctccgtcctgactcatcccagtcacctgctttgacctgagtcacccctggtcacctgatctggcctaagtcacctttagttccctgttcctaactgtccttcctgccaaactactcaccccgccactctggctcatacccctgctctctttaaaatagccgatcagaattagcttagactgtatagtccaaccctagccaataggggaatgacagagcagtaggggctacctgcatcaagagtaagaaccccttcccctctcttgttcaggtgtcctctcgccattactccattcgtgagtcacacccttctatagaagtaaaaattgtcttgctgagaaaattaaatttatgttcaagtgctatttctttgtggcaccaaggaacaagcattttatttctaacagggaggaatccaaattttaaaatagcaataggtcatcctgatcattaaccaggaagtggctgagaggtgatctctttctgagcatagccacattcagtgaccaaactgcctagttaaggtacatggcccagaaggagaagagagagctagagtaaaattctatttgaattgatttttgaagaggccattccagtattcaatatcagatgcctgtgaacggtagggagtatggaaagtccatcaaataccttgactgtcagcactttgttgaatagcttttgtaaaagaaaaaaaaaaaaactcactccactgtcaagctgcaaaggcccagaaggccaaacacatgacacagattagtttcaagggctacaatattatagctggaatctgctgatcgggttaaaacagcaatattgtgttgaaaggaaggtgaaaggcacgtttcacctggcggcagacaagagaagagagcttgtgcagtgaaattcccccttgtgtaatcgtcactgaaaaagtatcaacagcattgcagcacaatgggtagccctgagaagagatcggaagtctaatgtagtcaatctgccaagaacaaggtgtggggagatggaggtgatggctcatgctatgtgacccccctcactgcaacactttcacaagtctgccttttaggtagcttctgcattagaaacagtcttttctttattttatgccaaacctacggtggtagataggtcaccatgtccagtacagtgacggatctagtcataaatgggagcaatctggacagtgcagtcttgatcagcagctcgataccagagaactggcccttactatagacatctacatgagtgacccaacagcttaactgatttattaccaaattttgcagccccagagagggtgtctttaatctaccaatctgtagttttccaagtgacggactaaactcccaggcctttggctatagcccagaggtcagtaaaaatataacaagctttatcaaaaggaacactggccagagatatgagaatagccttgagttctgcaaagggaatggagcaaccccacccatgtttggcttggcagagctggcactgaggctgaacagtggcagcaactcaatgaataccatcagtttgaagcttaaccaagtctggggatttggtacgctgcatcccagccacactagccatggctaaaagggacaaacgtagagctcaggccatgg

SEQ ID NO: 60359 - DNA, 2324 bp, Homo sapiens
caaagcaaactatattcagagtctaaatccaaaatatgcattctggttcttaaattccaggtttggaaagaaatgccaacagtaataaataaataaactgctttgaaagcatctcaaattcctcaaaagtgcttaaacaaaagactcagctttgagtacaaccttaagctatctcaaaacaaataaacacacttgataaggcttagaatgaaattacctcagtcactcactggaatgcaacaatgcattcgcaaagttattctgaagtaagctactccaactaaaccacactgaaaaggagagaacgtggataaactaaacatgttttgtgaaatacctgttttgtattggcctgagttttttaaaagttacatctcattcattatcagtatttaatctgcaagaatatcatcaaaggatgtcaatatggacaagcagagacaagaaacatcagactttcagggagcctatcttcacaaccctgagttattaactgaagttctcaaagttagatgagttaagatacagacaacgtgctttgcacaaatgctttgcttatagtaaccactcaatagtcattaacaagaatttattaactatccaccaaaacacagtttcaaaccctaccgacaactaaccacaaattgcaccacttttcgggccgacttctacggacggtgcacagaagcaataaatacacttttaaaactccccaacttgaagaccaaaaagatacaataacttaaactgctttcaaaaactactggagtgtcatgcctacaaattcagaacctggcttaaaagctagttaactgactagaattcttggtagacccaaagccaactaaatcaggaacacttaaaggtcaaaggcgtccaagccgggagcgatgtgctccactgttacatgatccccgcctcctacaggaacaggggactgaaccaaaggcagttgcggccgaagtgcaggcgacacacagggttacacatcaccttcggagatttcctccaggaatcaagacgcttcccccttgggtccagcgactcacaggtgaccccggatctcaagagttctcgtctcccccaccccccacttaaccccgcgagcgccgccctcggcccccagacctccccctgcacccccggcttccgcgcacaggaccggcggggccgccgctccagcctccaccccaggcccggggcctggggaaatgcggccccgcggcccgcgcccccagcccggcccccgcgcgcgcggccgggacaggatactgaacaccgtccgctcccagggctccagcatgtagagcgccgtgaccagcaggtactggtagtagaaccaggacatctgcttccaggcccgcgccagcgccatccccgccatgcgcctcccgcgatgcagctcacacgtcagtctgtccggccggccgcccgctcacgtcctaaagcccccggccgccaggcccgcccgcccgccacccagcgcccattggcccgcccggccccgccgtcacccgcggcacgcccagacccgcgcgcgccccggccgccggcccccagccccgcccgacccgcgctcattggccaggccgctacctcgcgtcgcgtcgtcccctcccgtttccccgcccgggcatcgcccacgctagccggagaacggtccccgcgagagcgcccagccgcgccccaccccgcccgggccggccggtggtgggcggggcgtcagtgccggccggggtcccggggcccccgcagcccagcgggcgctcggtccgtccagactggcccagagcgcttgcggaagaaatatttctggaacacttgttatgcctcaggcatccttctgagaaggaggattgccagggagaaccggaatgccttcggttccttaccttgtgcagctggcggcctagctgggagacaagcattaatcaagtcgtgatccgtgtaagaggagataaggggctgagagagggtgaggaggcgaacgccacctaataaggaggtctggaaaggcgtccttgtagaagggatgcacattcggcctccttcctcccttcccccacccatgcacacacacacacacacacacacacacacacacacacacacacacacccctagacggacataacccatgcactccctaacccagagaccacttaccaaaaacatctatctgcccacctcttagtggctgtaggtaaccaccaagtgggtcaaggccagaagcgcgctgatctagtgggttctgcagaagacaggcagcttgagattggtgtgagggctggtgatacttccctagagatgcactcctggatgcc

SEQ ID NO: 60360 - DNA, 1711 bp, Homo sapiens
tgtctcaaaataaataaataaataaataaataattgagacatacatatatacatacctcctttcacagacaggacccattaactgaaactctttttcacagggaatcctggtatctatcctcactcccaacaaaagaaatcttaacagcagtctgatttcccatgcatccaatgtctccccatgacaatatgaggaaacattgttcttttgattttttttttttttaagaaatgaggtctcactatgttgcccaggctgttcctttactaccaggcttaagagattctctcgcctcagactcccaaagtcctgggattacaggcatgggccaccacacccagccaaagttgttaatgaaagcatggctttacagaaagcttctttaggcagaatgaatgttttaaagtttaagaataggatctgctgacagcttaagaaataactaaatttgtgtggaaatatctcggcaaaacagcttcaagtttccctggtagaataaagcccacccttctggaaatcccacgaaccttcttctgtgcctatctcaggtcaatattctctacaatgctctgccaagaaatatatactttatcttattacccttattatactataagcctctggaagacaaggaccttatgatttatctctgtagctcagagcgagcatacaacagtccctgtcaaaaaataaaaataaaaaaggctgttcaatattcccttatttctgtttatggcagtttagtcttcaagatggacacttcacattaagtcctgtgagcctcacaacaaacatagtgtgttatactatgttatataggttatacaattatgttattatagttcaattttacaggtgagtaatcgaggataactgacttgccttccgtcactctgctactaaggtgtagagacaggtttcgatctcattgcttttgaagatttacacgcggtcccccgtgattccggaatatccctcttcctacaggcgacatcggcaccgcctccccccgggactgcgcgaccccatcaggaaagccctttggcttcgcacaagtaacaggcacgacaggctcccgagccgctagggtctgcgtaggctcggcaggcgcaacgaatggaggcgaccaaagccaggcctcgacccaaatcctcgggggccagggtggggcgggagcccacctgctcaaagccggctcctcgtcgctaggctcttcaaccgcgtaggggtcgtagtcatccggaagccggttcatggtggcctgcagcggcctacaccgtccacaagcaatttgcagcgtctctgtttacactgcaagtccagtccctaaagcgcccctgacgccacttccgcctgaacgtcccagtcccccttgcgcgcccgcgcagaccgacagcaccgagggaggcaggtagaaggcggggaaggggcggagcaggagcgaaaaggggcggggacgggacgggggcgggtcttaatcccaccatttttgttttgttttgttttttggagacggagtttcgctcttgttgcccaggctggagtgcaatggcgcgatctcggctcaccgcaacctccgcctcccaggttcaagcaattctcctaccgcagcctcccgagtagctgggattacaggcatacaccaccacgcccggctaattttgtatttttagtagagacgggggtttctccatgttgaggctggtctcg

SEQ ID NO: 60361 - DNA, 1158 bp, Homo sapiens
tggatatgtcaggttgattttggtactcatttcacaatgtattcgtgtattaaaatataatgtataccttaagtatatacaattatcaacagtatttgtcaatatacctcaaagaagctaagggggaataaaacaccaaggaaatcctgccaaagacaggatttgttggatattagaaaaagtaaagataccatgggctacctgcactttgcataatctagtagggcactggacaggagttgattcggctactataaaaatccttgcaaaatggtaatgtagactacacctgtactatttgagagagacagaagggtgggcgggagcaagttcgagatgtccacaccgggtgaaaattgagggtgccgctgggaaggtccgagaatgggttttcatggccccaaagtgtcgagggagggtgggggcgttccatctcccgcctccatttccacttcgccacctgcaccccgccccgcgtgggagtggaggtccaccagaaggcccgaacagcggcgggggacaagaaagcggccgcgggtccccgggaatcggagccgagcggcccctagggaggaagggctgcgggagggtggggcgcggtgcagcgaggaaaccgaaaggaggactacggggagggagtgccgcgcggctggggacccatccccgtaccacacccggggacccaggatggggaaggagggtccagggtcccgcgagcgaaaggaaggcagaacttactccgcggtcctcttctgagaggaagtccgggccgtcgtccaggccttcctgtggggtcggcgggcacggcgcgccggggaaaaggatgagatgggggagacacaaagggagacattagtgacaggctggcgcggtccccgcgcccgccccgcgcccgctgcccccaccgcgctcccgggactcggcgccgcggagaacacccaccatcatggctgctccgaggcgagggccggcgcaggcgcgcatctccctgctgccggagggagccggcggccaggagcggggcggggcggggcggaggcgaaggggcggggcctaaggacggcccgccccgtccccggcgctggtcgctcgagtccgtgagcgaggaaggttaacagggccttctgcccaaggtcaaggcaccgaagtcgggagagc

SEQ ID NO: 60362 - DNA, 736 bp, Homo sapiens
ggcgtggtggcgggagcctgtagtcccagctactcgggaggctgaggcaggagaatcgcttggacccaggaggtggaggttgtggtgagccaagattgcgcaattgcactccagcctggtcaacaagagcaaaactctgtctaaaaaaaaaaaaagtaggagttaatttccaaatatttgtgaatttcctaaatttcattctattattctaatttcactccagctgatcagagaacattgtatgatttcaatctactgattcaaaccagaaaagaaaagataattatttagttagttagttttccctttaatcttccaggttgtaaacacggcacatggtggtggtaaataaaaggaccaaagggcagtccacagattagtttactggtcaaaggggaaaacacaactttgtaatgggagagatcagactgtgaccatttgactgcactgatcaatcttggcctcactgtcagtggagcaaccagatattttgtgcacctgatgtgattcagtaagaaggacacagcataagctataaaatttcttaccaaaattgtgtaacctgaatctaagcaaccgtttagatctaactaccagcttataggaaatacaagaaatagaggaacagaggcaggccatcacaaggaaaccatcagacaaatccagaaggtaggacattctacaggacaaactgacttagtttcttcatcaagtcaatggcattaagaaaaagtgt

SEQ ID NO: 60363 - DNA, 1239 bp, Homo sapiens
ctactcaggaggctgaggcaggagaatagcatgaacccgggaggtggagcttgcagtaagccgagatagcaccactgcagtccagcctgggcaaaagagcgagactccatctcaaaaaaaaaaaaatgtttttaatatatttttctttccacatttataaatttcctgagccaattctgaagcttaaatgatcctaaatgtctacaatactaaaaatatagtcaatattttccaaataattattaaagctctgcattctttcatttaattttgaaattaatcaagtcctgtcatttctcctacatacctctcaaatccacctaccccaaatgtatttgccactgccttgatttaggcatcttaatcgcctccaatttctttctccttacacatattcttatcatggtcataaaacaatcaggtttgtgtttcagaaagatcataccactcctttgcttaaaaccctgcaccagctccttagcacaaaatttcacatggtatccaatgccctcaatgatctagctcatacccacctctcctgcacttctctcatcacagtgcctcacgcttgactcaatagcagctgtaatgaaacatttgcaaggcatctgcggtttttttttttctctaggacaatcctttcatacagatttctggtgaactctatcatcctttacaacccagctcaaacattacttctggaaggccttctccaagcccatttcaactccaaagttaagcactccctcttctaaatctagtagtaacatatggttgtatttatcacattgtattacatcataattatttgtttatgtgcttgcttgccttccctatatcatggaaagctttttgagcctaagaaaggtgcttcgtgtttgttgaactgaactgaatttgatctaatggtctgagctgagtaattgggaaacagatgggatgtttccagagtgattcatagtagccaggatgatcatgtttctccacagcaaacataaatcatgtttctttaatcacaaggattaccagactttgctggaatagcaaacaaaatgcaaactctctcttagttaaatgaagactaaatatccacgagctaattagtcaatgtatgatctgcataatttgagccaaattagtaaatatcactttttcatcaaatatagattgagtgcttctggcttagtgcaaaatgtatacattatgttttatcttacatctttatatgaaagggacaaa

SEQ ID NO: 60364 - DNA, 2648 bp, Homo sapiens
cgaacggtccttaatatcatccaagccatttacttgccactcatgtttaatacctaaaaagaaaaaacattatcctattactttattataattaataaagaataatttctctgccccaaatattcaagtttgtacctgtaaatttctttttaatggcatctttagagctagcataaatcatcttgctttttaaaggtgcactttcaggagccctacagaaaaaaaaaaaattattgaatcccatttataagaaaaacaaaggtaagactgactatgataataataatccttgcattttaaaagtacttttttcttttgtttttacacaccagaatataaatactaggtcttctttcttagactcttttgtttcgtatgtggcatcgtacaaagcatatcggcaatcattcagaggtagcaacttcacaaaagatgtgtaggggtcctctacagtatcaccaatgtcacccaccaagatctgctttgcttcctctacaattatttgtcttttgtcatcgcttaaacagaagagaactgctttctttctctttttgatctcctcttgtgtagaagatttccttactttcatatcattaaaaactttgatgacttcatcattcactgtaactccagaagcctgaaaataaacacagaacagtaattcagaacacgtattttggttttaaccaaaattactgtttgcctagagaagactcactttagtctggacatcaaaaattgcaccgtaccatgtaagtcgtccaatcagatttgtcacattttaagaatcagtagacgatacagcgaaggagtctaactcatcctgcccattcatccttcttaaaggggtttggacgtggaagcgaaagggacaaatacaagttgtcccatccctgaaatgtttcctatttcactgggtgatgtcagagcttcaggagtggcagcaaaaataccttctgtattgtgtcaactcggctggccttaaaaaaacacttttggatttcagttaatgcttctactatttttttctttaaagtcatcctagccactgacgtttcctcataaggaaagagaatcaagtgtaaactccaaaccgcccacggcccacacacagctcacatgcagacactccaaaactaactgatcgagtgtaaaagcttttacggcgagaaagcattttaaaaagtgttttccctcttccttaatctccccgtaagggttttattacaggccgtccagaccctgacccacacagcgttcgcagcacgtaccaattttaaagcctcgcgtgttaagtaaaattaggaagcgaagggcaaaggcggcgcgagcggctgcagtccgcagaccctctcgcgcccccgcccgcccggccccgacccccaacctgcgccgacgcccgggccctccccgccccccaaaatccaaagagcagcagggcagggcctgacggccggagggcaggccggtcggctggagagcagcggagccgcagagcagaagcgcccaccttggaggccaaaatcaggttaaaatggcggcctcactcccggggccgtgcggggggcttttctcgcctcgccgcggcctcccggccagcgcgctcgtcttaccatagtgccctcggctgtggctgcggcggcagctcgggcttcggctctgtggcactgggaggagaaggaggggcgggcgagcgggtgggcagcggagagtgcggggcacgccgggagctgcagcccgagggaggtggcggggctcggcgggccgcaggcagcgggcggggcggtcacgtgggcacgcctggtccccagccggcgccacccgctcccaggccggcccttctgtctcgcggccccggctccccggctgtccgcgtcctcggcctgacctcagagcgcgagccctgcaggccggggggggcgacgcggtggtagcggagcccgggagcctggcagagccgcctccagcccccgagcatcacccgtcaagccggtgggagagagtgctgggctcccagaggggcgtttccaccgcctccgtagggccctgcgccaggggtgggtgcgtgtgaggggaactcctgcgaaggtgtctttccttatttacctgtggttttcccgaaagaggctggatttcgacattttgagtctttttggaaaacccccagttgtttagagataaatgagaataaatactacacgagattgctccagttgatagtacttagcaaaaacaaaatgatacgcagtgttggtaaatcacttttcaaaactctggttgaaataataattatgattaaaaaattacgtggtagcattccttagtaatatccttttacattttagacttcataggaaatggattgtactctctcttagagatttcatgaagctccagctatgacagctgatatcaaataagccgacgcagcctcttctagcaaagcccatataactgcgccaaggcagtttctctttttttaatcttaactcctccatacctcagggttcttcatgtgtaaaacaaactgttattaaattatcgttaaggccctttccagctttagatttcagtttctgagtatatcaatgttcagtaggaaatggtgtgtttttggtggtctcaggattgaggttaggcaggaaagt

SEQ ID NO: 60365 - DNA, 1940 bp, Homo sapiens
tgtaaagcccttgtccagcacagaaataggaaccctggagctgttattaccaccagcagagtgaagatgaaggcactgattttatcaactcataggcaatagcgtgaagccgtcccaatcctcattgattctgaagactcagctaaagtttgtttactcaggattctttaaaaaattggaaaggtgatcatcccttaatatatataatctattcccccaagaaacaatctattatgtatatatttacttactcacttacagagatgggggtcttactatgttgcccaggctggtctcaacttctgggctcaagcagtcctcccgccttggcctcctaaagtgctggaattacaggcatgagccaccacacctgagaaacaatgtggatggaggttctgtggcatgtaaaagtttgaaagaactatctaaaacagtgaatctggaagattatgcagacaaactgtgtgtaagccctactccctgtcaagagacatcacattctcagctcccacagccacttcctgacaaagacaaatgtaagcataaagacactaccacttcaaaatgtacctttctaccgacatgccttcctaactctgacatatccttcctaacccacgcctgagctaaaggactgatgaggggccgggcgcagtggctcacgcctgtaatcccagcactttgggaggctgaggcgggcggatcatgaggtcaggagatcgagaccatcctggctaacacggtgaaaccccgtctctactaaaaatacaaaaagttagccgggcgtggtggcgggcgcctgtagtcccagctactcaggaggctgaggcaggagaatggcgtgaacccgggaggtggagcttgcagtgagccgagattgcaccactgcactccagcctgggcgacaagtgagactcatctcaaaaaaaaaaaaaaaaaagactgatgaggagtcaagtcgtatatttttctaaatccaagtttgaatttagaactagaaaataaatacagtaggaggtgtttttttggagtctgatctctgtgactcactctcatccacaaactcactttgggtcttacatatgccatctctggttctttctaatttaggagaatgacctcacaataaaggaatttatcagtaatctgtgtcacatgaagtggtaatgaagaggtagcagtattgaaatgcaataattagtgaaatgtagttcaaaatggtctcaaactataattaccaacttcaatggtgtaaaacataccagcttcaacttattaactcagacacaatttatcagattcacccgccagttatttgtaaaacctcaatcacaatgttaattaataatgcattgatagtaattgaattgtgatagtaaatagcaactggttacctaaattatacaaaccatataaaacgtcatctgagaaaagaaacttgctagtaatttattaaacactcctttgtttaacttactttattacaaaagcagtagattttggccgggcgtgatggctcatgcctgttatcctagcactttgggagaccaaggtgggtggattgcttgagctcaggagttcaagaccagcctgggcaacacggtgagaccccatctctacaaaaaataaaaaaaatcaggcgggtgtagtggcacatgcctatagttccagctacttgggagggctgaggcaggaggatggcttgaacccaggaggtggaggctacagtgagctgagactgagccactgcactccagcctgggcgacagagtgagactttcttaaaaaaacaaaacaaaacaaaacacagtagattttatttttgtttttattttttaaatttacttatttatttatttgagacagggtctcaccatcatccaggctggagtgcagtggcacgatcatggctcactgcaggcttgacctccctgggctta

SEQ ID NO: 60366 - DNA, 955 bp, Homo sapiens
aaatgaccaaataagcaactatcacatggctatcctgggaattaaataatagtacatgtatgctctcccaaagccctagggctcattcacatttgaggggtgcccactcattgaatttacgggaaaaaaaaaagggtatatgtcaaaaacctagaatagttcctgcacatggtcagctctcaaaagtttagtagtcttgtattcatctccctaaaatgacatacagcaagtttcaagaacagtgactataatgtaagaaaactagggactggctaaaaaaaaaaaaaagatgagtcatcacagctggcagattcttcacttgtctgacaaatataaggaggatctaaaatttactgagttccttaggtgctaggcactgtggcagactgctgcagttactgaactgaatcacacctttctgatcccttcccacattaactctggatttactcatgtgacttcctttggccagtgtaacactaacaaacatacagcacgctgaggcttgtactttcttgcactttggggcttgctctctctcgctgctgggatctttctaccatcttgtgaacaagttagggctagtcgcctgtagaataataggtcacatggaagtggactttagctacctcagtctgaggccccagacatgtaaggctatcctagattctaggacctagacaatctagtcctagccaggtcagcccagactctaagaacattgcagccaaccacagaattgtaagagtaatgtttactgatttaggccactaacttttaggggtggtttgttatacagcaaaggtaactactacaaccaccatataaatatagctatttttttccagttttacagattaggaaagaagattcccaaaactagcaagtcagtttggccccaaagactctttctactatatcaagccatctttgcatgccattctctgaggtttta

SEQ ID NO: 60367 - DNA, 2574 bp, Homo sapiens
aaaatgtaggagctgtaactacaccagcagctccgcgttcttatcaaaacaatagcgagtggcacatgtcaggcagcccacatgcgcagggggataaagcggcgcctggctgagtctggagttgaacttgtcttaaccccctcccccaacaacctccaccgcgcttcccggctatgcgaaagtgaaaacgaggggcgcccaaggccctgcttcttcccccttcctcttccccttgcccagccgcgacttcttcctcactgatctcccgggggcggagacgctgagttccccggagacgagttagtcaccaagaagaggcggtgacagagagcgcggctcgcgtcgcactccgaggcctagcagcgccggacgggaggccgcggacggaggctctcgcgtcccgcgccctccacccctggcccgtagggacgccccctccttcccttctagagcgagtctcaactccgctcctctctcccctaccccaggcagctccaacgtcagaccccactcccgactgagaaaacgaagcccagcccagtcgtttcctgcccaccggggcaggaattcccttccccggcccagggactgcggccccacgtcgctgaccctagcggggatcccctcggccgccgggaggggatcccggaactggccccggagtgcgcgtgtggccgcggcggggaggggcgaggcggggagtttccgccgccccgcggccaagagggcgggagggcgacagcagcggctaggagcggtccccgaggccggccagggacccagcctcctccgccactaccaacccgcgttccccacgcgcgccgccgccagttggccccgcgcgttctccaggtggaggccaggaggcagagaaccgcgggcccgggggccacccgtcactttcaagtcgccccgccagaagcccagggcgaggaaaaggagagagacaaaagagcgctgcggggggagtccccacaccccccgcggccccgcacacggcccggctcttactcgtagtggcggaagatctcgttggtgactttacagtagaaaacttcctcgtcgggccgcaggtccgcgggcggcttctgtctcacaaacggctttcggtgtagcagcggcatctcccgtccgcccgcgggctcgcctggaccctcggccgcccgcgccggccccgcttccctatcaaaattggagggaaaggaaagccggtaaggtggggagccctcggcggcagcgtgggccggtccgcgcgctgggagaagctcggctgccttttgtgtgactgacgcgccgcggccgctaccggagccgagttcgttcctgccgctgcccgggtgtcgagcgagcggagccgccgccgcccctgccccccgagcgcgccctacctcctctcgtcctgccgccgcctcacaatggggcaggacgccccgccgcggggggcagtgcgggagcggcggcggccccctcccccagcgccggctcctcgcccgccgccgccgccaggctcacaacgtgctcggcgcgcagctggccggccggccagcccaacgccgccagagcgctcgccgcgggcggaccccggagctgctccgctttgttcccggctcgcctccacttccccgccggcgccggccggctcccgagcgaccctcacctgcgatcacgccgactgccacttgtccaccttctccactacaaaggcaacgaggggagaccccgtcctcccaggggaccgcctctctccggccccgccgcgcccctggctgccgcttctcccgctgccactgcccgactccgcgcggggaattgcgtcccaccgccacttccccgcctctcggagctcctgggaagtttctgatctactttcggctctgaaggaggaagagctgttgggaggagcttttcactcctcgcttctacctttttattggctactcgatgacttttacagcctgtcactgatacaggaagagacagcggagagcctgggagaactacattattaattaatggagcaacccctcgtgaagattcagaagcatcctccatgtttgagattatcagccaaaagatctagggaaagcgctgggggttcataaacacatggctaacaaagtaaagccttcaagtctggcacagactcttgactacacgatgggaaaagggattccaattacgatttaacttgtattttaaagatgagaaaagaaatgaataagaaaatttgttgctatttttcttcttccaaattagaatctatatctctaaaaatactttgcatgtttagtaaacatccatcttgaacagaagataccttgacatcagttctatttaatacttatggcaattaagagatttagaaagcagaggaaaagaccaaaaaaaaagtatgtgttacaaagtgtcatcatgcttgtaggaccccagcattcttgaaactaacgcacctttaaaaagtaatatttacactgctgtaaatatttgcaaagtatcaatgtttaattcacttagaattttaaggattatggatttactagcgaaaattcccctaaagcaactttcccatatcag

SEQ ID NO: 60368 - DNA, 3326 bp, Homo sapiens
aaacaaagctgtgtatctggttttctatactttccaggtcaaatctcactagcagatgttcctgttatcttcagtttgacatcttatctaaaatgactcctaaaatgtgtaataatgttaattataatatctaaacctactgactctaacatcacaaagaattttaagaggtcgaggttaaaaatctaaaattgtaagtcatcagctaacaatgacatttcaagtcatgagcttggataaaaataaccatggaaatcaccattcagcaaaatacaggcatagtggccaggcgtggtggctcacgcctgcaatcccagcactctgggaggcccaggcaggaagatcacctgaggtcagcagtttgggaccagcctgggaaacatggtgaaactccgtctctactacaaatacaaaaatgagccgggcgtggtggcggacgcctgtaatcccagccactcaaaatcgctcgaatcagggaggtggaggttgcagtgagctggatggcgccactgcagccccgcctgggcaacaagagtgaaactctgtctcaaaaaataaatacacacacatacacacacacacacacacacacacacacacacacacacacactctcgcatacaggcataggatagtttgctatagttaacaaacataagaatatcctattttcttgagctttcatcaggctttactttgccagaatacatctatcccatttttcagtaactagatctagctaccacatttcctcagttttaacgtgtgtgtttaaagagacagggtcttgcgtcgctcaggctggagtgaagcagcgggatcaaagctcactgcagcctttttctgtctataaatcttcaacacttggctgcgctgcaatctctctgagcctgcccgattcgtgaatcattctttgctcaaaatgttaaatttaacttggctaaggtttttcgtttaacacttcctactaacgctacagcctaaaacctctcctgcaaaatgctttttcaggtggcaacgtaccaattctaacaagtttgtgggagtaatggggaggagggctaaccctctattttctttcagaaaaagggttaggcacaaggagctctaaaggcttgtccgaagtctgctgaaaactcacaaaccactcagaaccaggtttcccacacccaattaattccaagtggtactgtatccgattacccccattttccaagagatagtttattttttcccctcttttcccctccccactacactttccacttagccctttttgaactgcaaaataacctctcaactcccctcaccagaccattctctacagagcaaattcatctacgagatccaagacgcaactcccaccgccaggcggtcgcctcagaagggtaagcagaaagcatgcccacttggccacttttacaacttatttctgctcagaaatgcaccaactcaactacccggtagataaggcaccagctagcagagacctcttgctcatttcctcttgtaccttataaaatgcccgcttttttgctccaaagacgaagcgggctggcttcagaaataaaatccctcttcttgtatactagggctcgctcttgttaattggtgtctacgtgtggcgagcaactaactctcttttccgttagagcactcaaagccctggtcaatctaccccccaagacagcagagaccagcacaacgatcccaaggaaggctgttggcttcaccccgcttaagtcctcaaagtcagcgcctgcagcatatccttgcccccaccacctgcctctagctctggtcacttacacttacggttagttcgcatccactgtaacagcgcctggcggtcggcaggagccacagtgcgaagcggccgcagcatcactgcctgcctcgcagtgggaaattttaccttgctggagcaagccgcgcaggcactggctggcattgcgcatgcgcaagcagagaccgccccaccctccgcggaacaagcctccggtctgcaaagccctaagccccgcccctctacggaggtctcacgtgcgcctggggatccctgccttcagtcacacctctatctctcatctttccgctcttagctgggagtgctccgcctagtcacttttcttaaggtggctcgtcgaggcctgacttcttccccgaaatcacgtccctagacagcctcctattttaccactaactttactcctgcagttattcagcggtaggaaactgaaaccaaaaaccagtgtaagcaagtaaacatctaaactgtttcaggagccgcgtagaaggaacgcggcggtgtgccccggaagcggaagtagattctcctatagaaaggctggactacgcggagtggtgacgtttcctcattgggcggaaggttcgctggcactccgttggtcttccagctggtgggagttgacgacgtggtgctgggcgttgggaccctactttatctagttcgggaagttgggttgtggggtcatacctgtctgtctgctcccagctttcttgggtttcttccgacggcgtggggcctcgctaaggaattcccggcccctcagggccacggctttagcggtgtcttttgcggtaagtgtctgctttttcccgccccagactacggagggggagcgaggggcagccccagcgctgctcaggaggcgagagactccgggggaagtcggcctccgtggccaccggccatcgttaccgagactgagtttctgtggctctttatctcgtcttccatgagaagttttattaaagatgcgctgtgccccttttgagttgtcttccgatttacctgagccaaataagatgtaggcagttgcaggcctgagtcttcgttttgctttcctgagcaagaatttagatgaagctacttccccgaaaatccttttacttgtacgagacttttatttttcctatgtgtttgtagtgcttaacacaatgtcctgcgtgtagtagacgttcaataaacgaatatggaatatcagttgaatgccaatgatgatttaagatagactgatagctctctctgtaccatttgacgctgctgaccatccatttcttgaaactttcccctgctgcctttcttcatgctatcctcacctgattctttcacatgcttaatttaacaaaatatatacttgttcttggctacaaggatacagaaatgaataacactaactctgccattgagaagctaacgcacataaatacacattatatcaagatgggtaatgagaaacactagttgcatataaagagctgtagaaagctgtgggagagctaaagtgctccttaggtgcttt

SEQ ID NO: 60369 - DNA, 2354 bp, Homo sapiens
tcaaatgattatttgttttttaaagtttttggttttgtttttaggttccagttatacatagaataggaagtgtacaataacattaggcagagggtaaggagaagaactttggcacagaagagaaaggaatatttaatatttgggcctgctgttgctatgatgaaaaacatttacaaggtcatacaactttagggagcatttctgaattgagactagtatgaaaatggaatttaaagtatcaaatgaagcctcccatagccaaaataatgtatgttttggttttgccccctacatatttgtgaaaactttcatgctaaaacaacaatataccatttacctgcagaacctcagacttgtttgatgttgaagtcatgcagtaattgcatgattttttactttcgttgaacattgcgaaagacggaaaaaatctgggacgccccctctaacatacgcacacgactttaagacacagataaaacattccttacatttgtcaagatggaagcttactactgccctttgctctccttcaggtcttttcacttaacactttctacagttatacttaagtatttcagacaagagtaagcaaatatcacgcctggggttcttctttcgagggtattttggctggactgtcacccacgtttggaatggaaagtgcagcacgagccgtacattttacatttttcagcaaccacatcccatcactagcctttgaagtacaacgacacagctgtcttcattttacaagtgcaaaaaccgaggtcctgcggggtgactgccccagacgccgctggtgacgggctgcgccgaggtcgagacgccaggcttcaggtacacgtaccagaaatgacgtcacaggcggtgccaggcggggatccacgagctctggatgcttgcttggccggaagcgacgccccgcaaggacccgccccgccccgccccgccccgcgcgagccggtagttgcgcctcccagactgcagttggccagctctcggggtgcggagcccggcgggctaggcgaggcgcgggctggccccgcccctcaggccggcgagtccccttctcagagacttggctaggcgcggcgcgaggcgggcgctgggcgggtgagtcccacttcccgacagcctggctcggccagcgactgggcggggagaccaaggatggaagtgggcttaccggccattaccctctttctcaccagcgccagcagccctgtggtggcgacgacgatggaccaggagccagtgggcggtgtggaacgaggagaagccgtcgcagcctcgggagctgcggccgccgcggcattcggggaatctgcagggcaggtaggtggggccgccgaggctgacgtccggggagccgagccgcctccttgccttctccgcgggccgctcttttagcctgcgcggccgtcctccgagcaggccgccccagctttggagttcctcctcactgcacccctgtttctgctcactgagaccagcttgtgggaaggagcgccccccgcctcactcaccaaccccttggctggcagcacagcagactctggggcggcctcgggttcctggggtgatagtccagcttctggtctaccagaggaagaagaaaggcgtgtcccccaaaggctgtccttgcagtagctggaagccaggtgagggcggcttcaaccacttctcagtctcttctggtgcgagcgcctgcctgggcatctgccctttgcttggcatatgccaaacgtttaccagctttaattcactggatccttacagtaaccgctcgaggtgggtgttagccccatttcaccgccgaggcaactaaggctccgagctgcgctgtccaacataaatagaatgcaagctgcattgaaaattgtaatttaaaattttccagtaggcacgttttaaaaaagtgaaaccgatattaattttaatagcatatcttatttaacctaatttatcaaaacaatttcaacctaaaattactatgaaagttattaatgaagtatttgcattctcttttggagtcttttctaagtcttttaaatcctgggtgcattttacacgcatagcatatcgcagttctggctgaccacatttcaagtgcgcattagccacatgtggctagtggttactgtattggacagcgctggtttagagagttaacgtttcttgcaacttttcagtattagacaaaaagacactttgggaggccaaggcgggtggatcacctgaggtcaggagttcaagaccagtctggccaacatggtgaaaccccttctctactaaaaatacaaaaattagctgggcgtggtggcgctcgcctgtagtcccagctactcgggagg

SEQ ID NO: 60370 - DNA, 1140 bp, Homo sapiens
ctgcctcagcctcctgtgtagctgggattataggcacgctccaccgcgcctggctaatttttgtatttttttagtagaggtgggatttcaccatgttagccagggtggtctcacacccttgacctcaagttgtctgcccgcctcagtctcccaaagtgctggggttacaagcatgagccaccatgcccagccacagtgtaaattttatttgtaattattggatttctggttcaagttgatgtttgaaaaataaaaaaagaaaaatattttaaaaatataattattgggaattttgtatcaaatgattttctggttggttttacctgttagtgcttccttcattgccccccaccccgcctcccaaatagaggttggaatcattatccctcatctgaaatactctaaaatctgaagctttttgagcactgacattccttcctttgcctgtgtcatagaaggaaaaaattaagccaatgagagattgctagaggtagcagtgagaagcctctactgtcttgggggtgggatagggtggggcatggtggtatactgtgaaggatctgagctctctattcactgactggagctgttgcattgacattagatccatccagttagtaggatgactggagatctaacttagctcatctgtctttcctttgcataggaaattaagggatccaaaaagctgagtcatggtccaaaaggaaacgttgatgtcaggacagccatagccaaattttatctcaagggtaaacatgagactgggtagggatggctgtcagtgcctggggattggtggggcttgggggtaggtagaagaaaagtgtcctgggttaactacttgtttatttttttcatggacacaataaatgacctgatctttccttgttaagggctgggatttatttgaaccctcaggacaggctagaaagaattgtgactttttttcatgttaatacataggtagcctatgttaccaaattttattttttaagatagtttattatttttattttttgagatggagtctcgctgtgtgacccagactggagtgcagtggcacgatctcagctcactgcaaccgccacctcccgggtttaagtgattctcattcctcagcttcccgagtagctggga

SEQ ID NO: 60371 - DNA, 595 bp, Homo sapiens
taatttatatttctatttcattaatattccatttcttaaattgagatgtgactaagtcatatttgaaggaaatgaattatcaacttataacttaataatgctaatttaaaatataggttttaaattatgaagctttcttctgcttccatttttaactccctcatagctttttatcactttctgcattttattagagctaattgtgaatagtaattgattcaacaaacatttactgagcactgaatatatgctagacaggttggtgtaatggaaagagcatgagcttgagattcagacctagctttgaactttggatctgccttatcagtttgggttaagttctttaacctctctacgcctaacctttcacagtacctggcacatggtaggcactcagtgagtattatactacaagccattcccctcctccagcccagtgatatcccagctttctgagtatacatttttcttttttgagacagagtcttgctctttcatcaaggctggagtgcagtggtgtgatcttgtctcaccgtaacctccacctcccagtttcaagctattctcttgcctcagcctcctgagtagctgggat

SEQ ID NO: 60372 - DNA, 564 bp, Homo sapiens
tactatgtacagagaacgctgtagtagacacggaatgaggggtgagcaagacagccccagcccctgacctcatggagtttcagcctcataatcactgtttctctacctaatgtagagaaaacaaacaaaaaaactcatcctctgtctgaagctcaaaactcagggctctattaccctgcaactcgcctgctattggcacgtggctgtctcattcagccaattcctccccacttatttgtggactatggtgactggtacacagtgttcttcacaaggtcctgcaatcatttaggatgaataaacatttatgtgggtgaccatgggtcctgcaactccaaagactttcacctctagttcattctgccatttggttctatgacaagatcacagattttacttgatccctttctgaaatcttaagctcaaatatactctcagatcatcctttctggtaattcaaaacctcactgccataccatttccacttcagcctcactgagctcttgaattctgtgatctattttctcaaaagttattttactctttctggtctcatttccttcc

SEQ ID NO: 60373 - DNA, 2393 bp, Homo sapiens
caacacagggagatcctgtatcggaaaaaaaaaagtgtatttaggaaaacacagattggcagtttgggagatgaaaattgaatgtaggagaatgaacgtccaggaaaacacggtagacatgaccaaaacaccttctttagattagtggacttgtattaaaagtgagataactcggcggggcgcggtgactcacgtctgtaattccagcactttgggaggccgaggtgggcgaatcacaaggtcaggagtttgagaccagcctggccaatatggcgaaaccccgtctctactagaaatacaaaaattaaccggccgtggttgcgcgcgcttatagttccagctactccagaggctgaggcagaagaaccgcttgaacccgggaggcagaggttgcagtgagcggagatgctgccactgcactccagccagcctgggcgacagagcaagagactccgtctcaaaaaaaaaagtgagacaactcaccaaggttctgtttttctccagccactttcaacagcccttagtgcgggtgtggaataggaaaggtagatttaacgaggttagttaataagcaatgtgaaggagaaaaataaaaggaaaaatggattatgaaatataaaatggattacgagggaagcaaaaagcgtgacagtaaaaaggcaggaggacaattataggtcctggtggggttcaggcgttgttggagccggggttccaagttattcttcacaagtttagattaagaccatggaagtcagtgactaaagctaagtttttcgttcctctagattctgccccaggaaagtttgggtcaaacctatcgggatccttaaaccacattccactccgcctcctttgtcgggaggtttcacagaagcggaaaaggcggctcccccttgctcctcctccccacctcccccctacctctaggagtttagggccgggccatcccaacgggctgcccctcccaaaactcactgtttggacaggtgttgggcgtcgctaggcgccgacgaagaacttctttccagtccatggccgacttccgcgcagcagcttctgcatttgctgtttcctacctgctccacccctaccagctcaggcgtcagcaccgccaggccccgtaaaggttaggaaggccgtccaaccaccatcttgatcgagggcggaagtcttggctaaagaggcaaaaacaattactgtcactgccgcggagaataccgctaccacgctgactgggggaaaaaactatgaaagagatggaaaatggttctccttcagaggcgacccaagctcaccaagccggattttaaaggccacgataagcccgcgttttcctttatcgtgtgcctttggcgcgtgcgcaccacgtgacccaggagttcattagttccggcttgagggaagcgccttctttcacaatttcttttcattgttcattgcggatatctggaagccttccaggtcccctgaatgtagtagacacttcagcagccgtctcctaccccttttgccactaaatgcttcaaaactgccttttttcctcgccgccgggccaggcggaacgcctaagtccgggtcagtctcgtccgtcggtcggggctggcgcggtgcatcgtgggcactgtagtttccgccgcgtttatggccgcgttaagtctgagtgccgctttgagttgttgaatgaagtgaacttcatttgtcagcgttcggtacgcagtctaggcagcgcccttcctgtacctctcttcctttcctgagtcgttggcgcagctgactcgccacctcctccctcctcgtccccccaccggaggagttttgcggtctgtagagagctatgcagggtgagggcccctagacttcggctttcgccgctgttggtggtaggctggagttgggggtccctggatacggttttggctttacaccccctttccagcaagcttcccgtgggaatctgttccttttcaggacagctgtgatccacgtgagtaaaactgggcgttccgtcttgtgctttttcctcaggttcatgaactggaatgtaagaggcaccagaggattcctgctctgtcccctggtttgcggcttgcgacgttggacatccccggattgttgtttaatagagaaaactcacctgccttcttgcttttaagtagccccaaaagcagaaccttgatttgtctgtaaggaagaaacacaaaccttttaaaaagttccacttcgactctgcaccgccgacccccaatctctttaattttgccatagaagaggggttttttcaacatctctctcactatctggtgctgatctcactgcataatgactttctatttgtttggtattcgaagctttccgaagctttggaagagcccataccttgggctaggccc

SEQ ID NO: 60374 - DNA, 921 bp, Homo sapiens
tctttttccatttttgaaacgcacaagataaaatttcttaatagagtagaacaactaatttagattcagagtcaattctataaaggtttcctactgtactgcattgtttttgctttgcaaagaggttattaacattttttttctgggttaggggaggagtttgaaaaaatcctgtacaagttaatccattgtgtggtaaaagctatagctgaagaggcaatgtggaatactccagtgtgcacaacccctgcttttatcataggtggcaactgcagattaattctggtgtggttaggcatttcacaaagggaaatatgaacctgagagcctatgtccccaacagtgctaactgggagatgtggagtgtggggatttccactctttgttaataagatctccggcacatttcctctttgcttttgcattttccttggttatgaagcagctgcagagaagtaaaatgtgatttcctgtgtttaaaagagtgctggcttttctttcagagacttaaaattggaagggtggaatgcatatggattgagctacctacagggctaatttaaacataggtgttttatttttgtttttgtttttgtttttgtaatgagttcactgcatttgtgccaggaatatttttgttcagatgttttgaattagcagataactcaggttgtctcaaaagcaggcttctctctaggctgatcactgctttaacagtgtgattctttgcaagctgactgaaaaaccactaatggcaaaagtgcattctgtcatatcaataaaaatactgtagttcctttgcagattcatgcagtataaatgcttatcttgattatttaacctgtaaaattctccaaaatgagaaaaataggcagagggtgtttttcaagaaaatatgataaggccatatcaaggtacagt

SEQ ID NO: 60375 - DNA, 2809 bp, Homo sapiens
cagacacgtgcgtcagccagtgccagctaattagtggctctagactgctttgtgttttcttcctcttctttttcccctcatctaaaatatacttctacctccaaatcctgtttttccttcgtgactatctcagtcccttttctgtcacacaaccttttttgacccctgtagtctgcatttatcttttcttcctttgaacttgtagcatttattaaccctggcacacatctggctattgatcctatactatgtgttctttttttagtgttgtttagtttttcatatcagtatctattgttatttcaaccagattagaaactctgagggacaggacaccctttttcctattttccacaatgcttggcatccagtaggtgtgtaataaatacagttatttatacattaaataatccagtgcttacatttattatgtcatagctaccatttcagttaatctttacaataactttgagggaatgagtattttctctccttgacaaatgaggaaactgaggctcagaaaagttcggtaacttgctgaaaccacacaggttaagtgatgaagtcaggattcagacccacatctttggactcagtaacacttgctgtttaaccatactggtaattctgcctccttatgagactggtgtatgttttctgaggatgggaaattacctaacacttagcttactattatttgcttgataatggcagaagaaaaggtgtgcaaacctggattcgtagtgattcctagcaggaataatgaaacagattcaaactgtgccaaagttcacaggaaaatagaatttcccttaatctcgttgattactggtggaatgactcatcttccagttgtacgttgctcttgagttactcagatatttgtataagttagacagcggagggaaaaccactgatgagatgtacaagacacgtcatttgagctgatgaatgttcctgggatatccccaagatttctacctgagtattcctgcctgtcctatttactgttggactctttcaccttttggttttctttcagagtaaaatcacttcccatttcctttctgctttccacttggataactttcacaggctactctgttactactgcagtgcacaaagatttactgtctacatatttaacattagtcagatttactgttgaatttatgcactagaaatttcaggaatttaaatttttcctttttcattctcttctctgcttccgatttttttcactaaaagaggacaaaaattgcccaaactattttctttttttaaaaaattagcaatagaattgagtatagatggtagtaaattctgcttcatttctgtgggaacattgaaaacttgatggcttctgcaagtgactgataaattgtttctgctttataaagaaaggaaacagctcattcaactcaatgaagtcattagtaaactgggaattagaaataaagattctgtatttttttgttgtcattaatttggtctttctgtctgcatctgttttctcacaagtttgttttgaggatagatcagaagacatatgcacattgtaaagcataaagtaatccttaaggatgcactacaggcaatcctcagccaaaaaacatgatttatgaaccatgcatacatgcatactacaaagggatcgatcttacctcagtctagtgccctttgaaggcgacaagctaaatggtctttttggcccctgaatcagaatacctggaaacaactgaaatgtagacatatttttcttatacatgtggaagcagttaggttatgggtcctttcagggattcatctactctactgccatgtgaagaccggagcccatttctcagtcaggaacaggaagcaggcaaagttactttcctggtatccagtgttaaaacccaaagagttataaatgttgacaaactattggtaaaacttgtggtattattatttacctaaagcacatacaggggcttttatagtatagactttttacagtcaaatcatttaattttcttgagtccttacaatagcccttcgaagtatgtgttaataaccccactttattcctgaggaacgtaaggcccagagaagtgaagcgatttgatcggtgaaggggcttaaattttctacacatttccttccaaggacgaagggaagttagacactgtgttggcactttagagcagattctgggttaggtgtgaagcagaggggatttccagggtgtgtaagcatggacaaactccttgaatgaaagcagaattttttctttttttaaagtagttaacagcattttggggtttgcaggactcaggctgtgttactgccttttttattttttggcctgatttgtttctttctaatttgggagcaagattttataattaaaaatatattgccttttgccctttctttgagctattctccataaatctgtaagaatatgatatgaaaaggaagaagagtgggattaaaaataatatagctgattctgtctagaaatttaatttctaaactatctttacctgagttagatctatttctccaaagatcagtcaagatttaagaaataactttaaacttgtaagtaaattcttttctatctggaatttacaggataatgtattaatacttggaaatgatacctaactgctagggagcatgcatctttagctcatgattctagatgattgagaattttttagggaaactttttcagtccttcatctagttgatagtgggctatcattttatatttctagattgaaaaataggttatcttctttctccttcctctctctcctct

SEQ ID NO: 60376 - DNA, 2915 bp, Homo sapiens
cacttgctacttcgtcttacacttttatgtcatggagatgcctactttctttaaacctcatgagccaacctctgccaacttccagcttttcttctgcagctttcttgcctctctcaaacttcatagaattgaagagagtttagggccttgctctggattacgttttggtgtaagggcatgttgtggctggttttgtcttctacccaggccacaaaaacttcatctcagcaataggctgttttgctttctttatcgtttgcgtgttcactggcataacactttaaatttccttcaagaacttttcctggttgggcacggtggctcattcctatagtcctagcttggaaagctggtgggaggatcacttcagcccaggagttcaaggctgcagtgagctgtgattgcacaactgcactccagtctgcagagtgagatcctgtctccttaaaaaaaataaaataaaaataaaggaaaaaaacctttttctttgcatacacaacttgggtaactggcacaaaaggcctagcttttgacctgtcttggctttcaacatgccctcctcactaatcatctgtagatttttatttaaggtaggaaatgtgcaactcttcctttcacttttgaacacttagtggtcatcacagggttaattggcctaattttgatattattatgtcttggggaaagggaagagagggagagagatggaagaacagctgatgggtggagcagtcagaacacacacaacatttatcgattagattctccatcttacgtgagtgtggttcatggcaccccaaaacaattacagtagtaacatccaagatcacagatcactatgacagatataataataatgaaaaattggaaatattgtgagaagtaccaaaatgtgacataaagacaagaagtgctgttggaaaaatggtactaatagacttgctaaacacaggactgccaccaatcttcaatttgtaaaaaatgaatatctgtaaagtaatgtgcaataaaataatgtatacctgtatcatattccctgtgcatctgcttagtacactttaaagactgttaatggtgatgatgataaaagccacacattctttattcatcacttgtcagaatgttcatttgtttattttagtgagtcatccttcaaataagaggaaaacagcatgttctttcaaagaatactgtctgggaagcaagggtacttctcagatctaggagcaggagaatgagaaaagctgaaatgacaagccctgtattatttttgaagaagagttgtattttttatgggtagccatttgtaaaccagcctaaataatgaaattgtaggagtttagaataatatcccagtacattaggtcaattatgtggtcagaagccccaaacaaatattgagtgtattctcatattacgattttgttttctgaagttaaatggaatgatttatatgcttatcttctgttgcatcttaaaaagatgtattattagtagacaaatgcagaggttgtgtggttatataagttatctattactctgacttcttaagcagcagggcaagaatggacatgtttttctaaaataagacttttctccatcttacatgggtgtggttcctggcaccccaaaacaaagctggggccgggtgtggtggctcacgcctataatctcaacactttgtgaggctgaggtgggtggatcatctgaggccaggagttcgagaccagcctggccaacatggcgaaactgcatctctactaaaaatacaaaaattatctgggtgtggtggtgcacacctgtaatcccagctacttgggtggctgaggcaagagaatcgcttgaacccaggaggcagaggtttcagtgagccgagatcgtgccactgcactccagcctgggcgacagagcgagactcccatctcaaaacaaaacaaaggtgggtgtcttgagtgccttttgagtataggccttcagactttctgaggattgggaaagcatttttttttaaccttaaaatatttattgaataaagaatggcaagatcagaaaaataagctctggttaggatttgatgtggggcttcattctcagctctgttgctacctccttttatgatcttcggtggtctcttttcctgttcaaaccccagtttccttatttataaggagataatgaggagaccagacttaatattctctaaagattctttcagctctaaaaacttaatgattcaagcaggttgcctgtgaagaacaatgcatttcttccaaaagagggtgctgtggtatttctcagtactttagcatcttcttgaaaggaactgaacaatggtagaatctcagcttaattttgtgtcttcagactcccaacctttgagaaatagtgtctaattccttcctttatttagatgaggcgatataaaccaattcctgatgttactgacacttaagtaagtttcaaagaaaaaaataaaaaatacacataattttaccaggcaaatatagacagttttgtcagatgtggtggctcccagcactgcaggaggatcacttgaggctggtaatttgaaaccagcctaagcaacaaagtgaccgtgactcaaaaaaaaaaattaaaaattatctgggaatggtggcgtctgcctatagtcctagctgttttgttggcttggaggcggaaggattgcttgagcccaggaattccaggtttcagtgagctatgattgagcaattatttcaccactgcactccagcccaggtgacagagtaagactctatctctctttttttttttcttggggggacagggtctcaccctgtcgcccagactagaatgcagtggcatgatctcggctcaccacagcctccacctcctgggttcaagcaattctcctgcctcagcctcctgagtag

SEQ ID NO: 60377 - DNA, 829 bp, Homo sapiens
gctaatatcatatggaaacacaaataggcttctttttttttattccctggctcactgaaactgccggcagagcaccttaagctaagggctacattcttatcttgcctttaaacaccatgtgattcagcatgtctgcagtctctgggaatctacactgccactttctacctttgccttgtgggtaacccttaccttccacctacctccacccccaggggagaatgtgggccttgccaaacggaggcccccaggagattttccaagactcacgagatgtcaagtcatctctaaattttttcaaaaaaccagaaagtcatttcaaaaagtctaacttgatggccccacagagaggaagatcaaactttccacacagacacagcaagtctgccacccaggcttgtgttagagctgcagtattggtacccagacatttctgaaagctccctgacccaggggaaagtccacctgagtgagtagtttagctgctgcccggagcccgttggcacatattcacgaagtcggcttccaggggatttccctttgaatggaattggcaaacgttttgtctttctgaaagatttcccagaggaattcatttagctatgtggaaaaatctcaaattctaatataaaatctctgaccttttagggttttgaaatttggatctctcatttactgacaaatctttttgaataaagaaaaacaattaacataatagaaaacctaaacagtgagaatgcatattcaacaaatgattggagtgcttacctcaggctaggcactgtttggtattgaggatacactggtgaacaaaacagatgtggctagt

SEQ ID NO: 60378 - DNA, 1618 bp, Homo sapiens
ccattgcactccagcctgggcaacaagggcgaaactctgtctcaaaaaaaaaaaaaaaaaaaaaaaagactaaaaattgtcggggctgctggccaaaagaagatcttgcctggctgtcagaaaataatgttctttccagcggctgcttgaacccgcttccttcagtgcctaaatttaacggctgcagctgcagctgcaacctgtttcccccgtaataggaatgaaagtggaggataaaagaggttaggaagaaggcaagccagcagtctgaccagacacaggatgcatgtaagagacttgttaattacacgttctatttaggtcacactgataggcaaatcgctattctgggcccccaggaagccttttcgtccttgctatagtcaattcattctccagatgaaagcctgaaagcgccacgacccaagtttcacgtctatccactcaagaggcctgcttggcgcaggcgcataccttcaaaggcctcccgccctcactccaccacccccttagggggcggggcctcagagctcagtgctcgaactggctccagagccgtgagttcggcatgcaagagcggaagaaacgcggctggtaccccggaagcagtcgctgcaacttccgggaggtgcttgtgtgcctggtgcgggagctacggggcccagggattgtgtttaaagtagtgcttctaccaacatgtcccgtggttccagcgccggttttgaccgccacattaccattttttcacccgagggtcggctctaccaagtaggtgagtgaaccaggttcgcctgtgggccacctgaattgccctgtcatggtacgtgcctggagcgagcagacgcggcccgggtttagtctggggccgaagctgggctggagctgggaagggagaacggctgaagctggattgagctctgtggtgtttgcacccccgtctggacgcagggatcgggggcctgaaggcctgtctctgcagggcgagcggccacactgcgtagacccaatggagagttaaggaagatagggctgtaatgcctgactccggcttcgtgaggccccttcagttattgtattctgtcctggccaggcacaaggtctgtttctaaagggtaattgattccttaacgtctcaactaaaatgcctcctctccgttttcctttgtttgcagcatggacttctgtggttaattccacacaggcactcgaagcctgctatataccagacactgctagtcctaggagatacaaatgtgaatgttacaccctcttctatactgaagctcacagcttagagtgacagatacgttaaacaaacggataaaaaaaattaaaagtgccaatttacaaatatctacagagttcaagacatctttgggaatctgatagaatgagtgactcaattctagagctgctcttgagattggcatcccctttttacccacatctgtttgaatgctcctgtaatttaaatgccgattctgagttgtagatgaggtactgtgtactagtttactgaagaacacctgtagtggaaagaaactatcagttactcggaatagtaatgtattgcgctgaaacggtgtcaaggtttaggttatgattataagccagaccc

SEQ ID NO: 60379 - DNA, 3205 bp, Homo sapiens
ttcaccatgttggccaggatggtctcaatctcttgacctcgtgatctgcccgcctcagcctcccaaagtgctaggattacaagcgtgagccacccggcccactattccagttattttaagatgtacataaattattatgttatcatacactagattttattgaatctaccatttcacattcttattgagagtgtaacctcttgaagcctactggtgcaggagggattttgcaaccttcctttggcttttgtcacctatggaaaactacaaaccagcttgcctatccggtgattggaaccaggaggattgccggccttgggtctggaaatcctatcccatgtgtcttccttcctccctccctcccttccttggttccttccttcccctgactaggccccagaggggtggggaggccttcctgggcctggcatcagggctcctgggctcccagccaagtgtccagaggtcactcctcctggcatctggatccttcttatcttcctgagacataggaggctcctgctctggagatgactgaagggaaaacacctgtatttccagggccttggaaatagcctgctccagccggccttcccgggagaaactgagaaaggacattggtccgaagcatttctctttcggtttgtgctgcgctgagcctgtcctgtgatgcggccctcaccaaccaaggactgaacgagagggactccatgcgaacctgctcagcatacagcaggtgcctcgtggatattcttccctaaggctccaggccagccaagcactgcattaaccaggttcggatgaactttagaatgtacgcatctgagctgtcatagttttttgttttcttgtttttttgagatggagtttcgctctttcacccaggctggagtgaaatgccgcgatctcagctcactgcaacctctgcctcctgggttcaagccattctcctgcctcagcctcccaagtatctgcgattacaggctcctgccaccatgtccagctaattttttgtatttttagtagagacagggtttcaccatgttggccaggctggtcttgaattcctgacctcaggtgatccacccacctcggcctcccaaaatgctgggattacaggcatgaaccactctacctgacccatagttcttaaatttaaaatcttgatatgctggtggatatgcagcttgatttctttaagccgacatggcctgactttttcagattctcagcctgtgttggagggctgttgagtgttctttctatgcagaaagtacgcctgccgtcctctgttttgtaatcgccaccccatccctgcccaacacacacacccacacagccgcagttacgccgggtccagcaacgcacgaaccaagtggaaggtcaagggctggggctccgtttccctccccttgaagctgtttggtttgctcttgtcccagcccctgactgagccgccagcccagaacgggggcagccctcccccatgcagtcagggccagaggagcataatattgcccccccgggtgcagccttaggtgcaggagcgttgggaattttccatcttgctctgcagcctggcttcttaggtcatcgtcctgctgctgacataggcctgggttgggcgagtttcctgcaggtcagcgagggcgcggaggcagcgcctgagcctgctcagggcctggcttcctgcctgctgtgaggaagggtggaggaggggttcgaggcctcaaccatcccttggcccagagcctcaggccaagcagcctccgcctctgcccaggcctgtctcctcccggcctcctgctctcctgtttcctaaagctttcccgctgggtggctcccagttcttccagaaatcccctccaggaaatttgcttgttgccacaaaataatgcaaatctgttcctggggccgcccaggcaacctgcagtctctgtctccccaagacctgaggagggagggcgaggcaggccctgtgcccgtcagggtcccttttccagccatgaggacaaaggataagccgcaccctcgtcaccctctcataagctgcaagagaaagttcctggttttacctctaagggaaccagctccacctagggaaaggccacacaggaccctcaaaggcaccaaggtcttttttctatttaatatctaaaacagtctgaatatattaaagtttatgctcatgtttggcatttgtttatctgtttctcgaacttcaactccctgccgtgtctggagcagaaagtgaaggcccatggataacacttctgcgtgccacagtcctaggtggtgaccaatgcagggatgcacaggtgccgtgtggccttctgcaggccaggccccacagagacccacagtcaaggtggcctgagacccttgaacaaggagcttgtggccagagaaaggctaaatgcagcacccccacccctgtggctagtgccagggccccacctgaatgctctgcagttgggtccccccaggccatctccagaggagaacgcaagtgggctagggagggaacagaccagcctgatgcaaaaccctctcagcccagcacagccctcgtgtccctgggctgagggtctggggagaacatcacttgctcttgcctcccttcctttcttgctgctgctgcctcctgaggtcaggccgtgactactcaggagaggaatggaattccagggctcctgctcctaatgaaggagaggtgggaggggcacacaccaagctgctaccaggtaccaggccctcggaggtgcttgaacactacctccttgactctcaatagcaatcctatgaggtggatgttttcttgcccaacagatgggattctgagactcagagatattggtgacttgcccgaggtcacaccaatggtaggtggtgattcaaaaccaggtctgtgtgcagttcaatgaccatggagtcttgccctgttgcacagggcttcttgtgtcatacacagccttcgctttgtgaaatccagcacagttgacccacattctcacccaaatccaaactccaagtttcagagcttctttgcacccataaaaggggggctcagaagtccccttgaggcctcagaaaggacatagaccaaacaaaggttatggcctaataagaagcaaatcaaagtaacattgccttatgatttaaaagtagtatgtgggccaggtgcagtggctcatgcctgtaatcc

SEQ ID NO: 60380 - DNA, 1989 bp, Homo sapiens
aaaatccatgtgaattatgttagggcaggtatgaaattcaataattggtcctgctccaacgtactcatttgacaggtcatttgccctcacagtctgtattttttcaggtcaaatgcaggtgccacactgacttatggccttgacttccgtagactcattccactcaggatgaaacgtgattggttcctgaggtgaccctgcctcagtgatagaagtgagtcctcaggcagggaagggtgtggaggcaaacagcctggggagggaaggacgcctgggttttcccagccagtggctcagggcaccctgcagacctgccagtcccctctgggatgagccttcatccctgtgaccccttctctgagaaagggcaccccaggcccaaagcctccccagtgcacagggctggtttctgatgagctgccccctgaggctggcctggcaaaaccaggtactgacctgcacagggccttggcatgatttggaaaaaggcaactcattgtccagatggacacagcccgacccccacgcctcagcccacacctgcatgctgtacacagcagccctgaccccaggaaagtccctaagatttgtaggaaaaaggaaagacacacagtacatgctccaccaggctccttctccagggcctccccagcgcatcccgtctctgcctggctccatcagaacccagctgggtgaaccttgggcccctcattccccttggtgagaccctgaatcctggagggggctggacttgtccttcatcctgggattctaggtcaagttcttagctcctggctcctcttcaaggcccggctgggtctcctcctcccactccgcccctctgtcccctcccacagagttcaccacacaggaggcaaggccagcgggctgggaggtaccagtggtggctggcagcttagagtaatcagccccgcctgctcccacagaggcaaggctgcctgccaaggccctgccttctactgctgttggcagctcctagggcaacaacagaacctcccagcctcccttcactgggggagaagcatgagctgaaaacaaaagaagggattagagcccagatggagcggcctgagctcggggcggggtccccaggggcacccccctcgtcctcggcccttcagctccttgccctcggccgtctctgggcgtcaccagccagcagctgccttgctggccagcggtttctgttgcaggagcctcttgtgctcgggggctggccacagggcctccgctgtccctcataatgtgtttcaagtgattttgcttttgaggaacctgcccgcccaggacttcaagggcctctgctgacccatgcacgtcccaaggcctccgccgcagccccattcgccacacggcccctggctcctgcccacttatggctggtcctgggctcccgtggccaaggagagttgggcagacgttggcagatgtgtctcctttgtccctggagtgattccaggctcggctgaaactctgaaaggcgagcccagccagaggtgcctcggaggcccaagtgtgcagcctgtcattccccagcagtgactccacaggcctccagtgcacatcatctcctcatacgtcccccaaggaccctgggctaccgagggaacactagctcatagcttgtgacttcagcactgtatggaagagaacaggagcagacccgtctcactgttggggcagctgtggacagtcacgcgtctatcttggttccagccaggctctcagcttgcacagccagggtgccagaaactgcccgggccagattttcaaacccctgaggtaggaggagccaccatcatcctgtttctcctctggccctcacaacctccccctacttccagcctgagagttctggtccactggggaatgtgacctttgaaagtcttggccctgtgagcatcttaacctcagcagcacgttgttttgttttgttcacatcattttcccccacccagcacagggcac

SEQ ID NO: 60381 - DNA, 1968 bp, Homo sapiens
ggaaggaattcagctgtgtctgtaacctaatgccgagtgcctcccctacagcttccttcctgtgcacacaggggtctgaggccactggtgccggtggggacattttacactctccagcctcctggcccaaagaaacccagaaaagcaggaatggaggctggggggcaatgcactgggctggggaggcctcatccacagagaagagcgctctctggagaaaaccctttcctctcactggttccttgagagtgaactcacgaaagtctttgggaggaagcagaagcctcagaggccttttgagggacactttgaggcccctcccttccaggcctttgtggagagcaccaaggacaagcatagcctggctgttaaacccgtgggcgcctgcatgctacgcacctgaccgagggcccagatgtgcaggctcaccatcagatgccaaggaggagagcagggccggccagcaccccggcaataccttccagggaagcagcacagcaagtgcacagccctctacggccccaggactgcagccccaggccctgatgcctggctgggctctcctccctgacatccttccagctttggcctctcccctccccaggaaccacatatacagacacacacactctcacacatacacacacactgacacacacacactgacacatatgcgcacactcatacactcacacatacacacacacgtgcacacacatacacacacatgcactcatacacacactcacatacactctcagacatgctcacacatacatgcactcacacacactcacacatgccctcacacacagacacaaagacacacacacgtacatgtgcttgctcttctggccattccctgccttaaggaagagatatgagagtagacagaaaagaaaaggatagaaagaaacaaagtcttctggaactctgggtttctgaatcctgactccttagacgggtgtaaaagatgcagaaacatatttggtaagctgcttgataagaaattgtgaggtttcccagagaaaactctagcgttttctctgcaactagagagtggccctgagcttgggaggagagcagagcaggggtgtcatgagaatggggccctgtctcagtttcctgggaggagcctggtgaatggcaaaagtctaggtgagaaatggccgtgtggtgtgtccaggcagacggagctctgtatcactgcaggctgcagagagagtcctgtatcttcagaagtgaacgcacatggaccacgtctgtggtcccagcaactccggaggctgaggcaggaagatcgcctgagcccaggaatttgagaacagcctggccagcatagcgagaccctgtctctaaaaagataaaaatacaaataatttcttaacactcgatacacatttctcaaccataatttagaaatgcaaattaaaaccacagtgagataccatttttcactgatcataaaggcaaaggcttaccatttaatcaagtctgatgctggtgagagggcagggaagcagcttctgttgatggctgttgacgggagtatgagttggcacagcctctttggagagccatttggcaatatctttccaaattaaagtacacatttcctttgaccctgccattccagttctaccctgcaggtacatcccacatgtccacaaggatgtttgttcaagtcacattgtttgtaatggcaaaaaaagagaaacaactcaaatgtccattaataggggactggataataagtaagtacagtcatccctctattcttgggggactggttcctggaaacccctgacccctagccctgtagacaccaacatccatgatgctcaagtctctgatataaaatggtgtaatatttgcatataaactattcacaacctcccccacactttaaatcacctttagattaataagatgtaaatgctatgtagatacttgtttattgtattattg

SEQ ID NO: 60382 - DNA, 1444 bp, Homo sapiens
atctgcaaaaaatacaaaaataagccgggtgtggtgtgcgcacctgtagtcccagctactcgggagactgagacacaagaatcgcttgaacccgggaggcagaggttgcagtgagccaagattgtgccactgcactccagcctgggcgacagagcgagaccctgtctcaaaaaaaaaaaaaatggcccagcatggtggtacatgcctgtagtcctagctacttgagaggctgaggtgggaggatcatttgagcccaggagttggaggctgcaaggaaccaagatcacaccactggcactccagcgtgggtgacagagcaagacccagtctctaaaatctgtatctctctattctcacggagtgatgtggtgctatttgaatgggttagcatctgtggctgttctatctttctggtggcacaaaagggacaggaataagcagtagcagacacatagtgggaggaaggcacagcaagcccttctgcaggtccagaaccagggctgggggcaggtttgtgagggtaattgacactttccatgtggacagcctcagatatcaggggctgagtcatagccaccctagaggctgtgacaaaagtccacaagttttcaaagactgacgtattctagaacagtttatccttaaggaaggagcacttgggaggctccaggtggggctgggagggaccaagaaggaggtgtctgtagggagaggcagagaatcagccctcttgtcactggctgtgttgttgtcaccctgccaggtaccacagagatcatgacaatgactccagatagacccacactgctccggaaatggaaactcctatttctcaacaaaatccacctaagctcaaaggtgaaatcaacaaagagttttaaagatcattttagattattatgaagaaagatgcaaatgatagcacaagactgaaaaagaaattcaaagcccagtaacgtatgagtaatgaggaaactaaaatcacaaattcagaaagaaccaattcacgttcaaacaaggagatcccattttccacttatcagattagcaaaaatgttaagaattgctactattcagtgttagtgagggtgtgggaaaacaggcattctcaagctccccacatgtcatagaggagtgaaaatcagcccaaactttttggagaacaattagtcagtaataacatgtcaaatgtggattcactctgattcaaaaattctatttctgggaatccaccctctgatgttgtcacacaaggcatatgcaaggatgttcgccaaggtgttgattatctagtaaaatgctggaaacaacttagctatcaattagagactggataaataacttacagtgtatccacactgtggaacccttaagagactgaggtagatttatatacagtgacatggaagatctctaagacacattgacaagtgaaattaacaaa

SEQ ID NO: 60383 - DNA, 2857 bp, Homo sapiens
ggtgaaaccctgtctctactaaaaatacaaaaattagctgggtgtggagacagatgcctaaaatcccagctacagattctgtctccagaaaaaaaaaaaaaaaaaaagccaggtatgatggcgcaccaccatagtcctagctactcagaaggctgaggcacaagagtcgtttgaactctggaggcagaggttgcaatgagccaagatcgcaccactgcactccagcctggatgacagagcaagactctgtctcaaaaaataaatgaataaagattaaaaagaaataaaaaactattttgagccaggcatagtggctcatgcctgtaatcccagcactttgggaggctgaggtgggaggatcacttgaagccaagagttcgagaccatcctgggcaacatagtgagactctgtctcaataaataaaaaaataaataaataaatgaaactcctttgaggatctcaaccaacatgagctgtttgtaattccagaaatagcccggacactgagtggccctaccccctcaaaggattccaggacagctcccaccttcttagagggatgtggagggagagccggccctgggcatgtgacttctgtgccctcagccgctgttggctcactctgaggaggtccagcctccctcccatgggtcacacaagcatctctcctcttccccgaggagcaagaacacagggaacgtctacatcgaaaggaggagctttagggttttgtgccagcttcacttcatttcttctgctgttggttcattcatctaacagaatttattgaagtcctaaggggtggggacacagaactgaactctcctggtcctggccctgaggggcccctgcctggacggcttgaacccgggagggccaggcccacctcccgtggggcccgttttcccctctgggaggtgggcagcctcactcagaaaagtgcttgtagagcagtttcacccctttgtgaatgagcttcggcaagcacaggggtgagtcacggccttggtgacacagaacacatgacttcgaattgcccagaagtatgactggtgccctggcctgtgcttccccaccctgagggggaggccactgtcagctcagaacaagggatccaaagatgacctttcttgttttccaaagacctgctgtcagctgaggcctttcaaggccctgtatatccatggtgaattcctggaaggcagcttgaagtaaccactgaatgggtttggtttctttttttttttaattatctaagcaaagcacctttctccaaaaagagcaaattcacttgtgggtcacttcctgtgggaagatggaaaatgttcttacttgggagtagatggggagagcaggcccagctccaatagcttgctggtgccactgagattcttgagcctggaggatcctggctgacttgctccagacctggcggagggtctgtctcagtcacggttctccccagcgatgaccgagaactggtcccagttcctgacatgctgtgggtccagtgtgacccacaatctgcctggcccatcccctcggcgggcgcacctctcctagtgtaggatgaagcataaatggcagaaaccagcaggcgccgcttctgtgtccaccgagtcagctgggatccatgcagctggtggcttgtcggtggcaggccaaggcctgagtcatgtccccgtcacagccttcagtggagggctgacccacagaggaaattacacagcactctgtggcccatgatggagtcaggggcttttccaagggcatcaactgggaaggcagaaagaagtcatcacccacgctggagtctaaggcttggggacccccacttactccaggggagaaggcctggtgacctcggggacagcgaggcctgtgcaaacctcttccacagccctccactggccagcagggtgcccacagtcccgacccctctgtgacagcgctgcatgctcaccgagccagccttgccccacatggttccttgggctgcagccagaagtccatccgcagccttttacccagatccacaccagccccaaccctcagtcagaaaacacagcacctccaatggagccagaggccacccctctcagatagctgtgtgactctggcaactaaattcaactctgtgggcatcagtctcttcatctgtaaaatgggtcttgaacacggggcttcagtctcttcatctataaaatgggtcttgaacacctacctgaccaacttgtggtgaagatgaaatgaaactatgcaaaggcctggcatagagccggcacacagtgggttctctgtacatggtcctcgctctcagcctgctctgttgcaaaatccaggttggcactaccccccagggctcagccctcagcgttatccctttccttccccatacccagtctcccaacccttcgtgcaagtgtgtggtggaggagaccgaagctccacatccaaatggaggggttgactcctctgtagtgaggggtcagcctagcttgagtcactgggagactgtcttccagcctccccttgcccaccccagacctgacatcccagggccaccctgcagggagcctgaggtggaggggcctggctacctgtctgcaaatgtggagccgggggaggttggttggcagaaaggagggagaagtgacgaggcgccccaggccctgtgcctggagtcagaagggccagctctgggagaaccttcaccctcgtggagactttgcctcagaatgtttgcctggaacccagcccaccagggctgacacctgaggctgaggctgccctgtcatgccccttccacaccaggggctctgtgctgggattgctgtggccagttacggggaggcc

SEQ ID NO: 60384 - DNA, 695 bp, Homo sapiens
ctgtgatattgactaggctaccattttttttttttttttgagacagggtctcgctctgtcacccaggctggagtgcggtggcacaatctcagctcactgcagcctctatctcccaggttcaagcaattctcctgcatcagcctcccaagtagctgggactacagtcatgtaccaccacacccagctaattcttttaattcttttgtattttttgtagagatggggtttcaccatgtgacccaggctggtttcgaacacttgagctcaagtgatcctccctccttggcctcccgaagtgctaggattacaggcatgagccaacacacccggcctgcactcatttcttaatcaaggaaaaatgaatataaaaggaggcttgggaaatctaggaagctcattacaggaattcctcatagaggtgactcagcacttcatttcacaaggaggaccagaagtgtcgcaaacacagtgttcttccctttaaagagtcagatcgaaccaagatctccctgcgtaactctctctgcaggagacccgggctcagttacaaaagactctgggttggcagaaacagtgctcccactttttcagaagtgattgggtctggaatggctgaattacatgatgtgcttctgcgagaggatggcagactagctggggccaggtagccagggctacctgaaacaccaggaaat

SEQ ID NO: 60385 - DNA, 1711 bp, Homo sapiens
caggcctggctactttttgtatttttagtagagatggggtttcaccatgttggccaggctgatctcaaactcctgacctctggtgatccgcctgtctcagcctcccaaagtgctgggattacaggtgtgagccaccgtgcctggccttaatgtatttttttttgtagagatgggctctccctatatttcccaggctggtcttgacctcctgggctcaaatgatcctcctgcctcagcttctcaaagtgctgggattataggcatgagcccccgcacctggtcacacttacctggattgctggccggtttgtgggccttggccctattttcatgtcagtgttcagagtccagtcctacttgtcaatgactcagattggctgatgctgggtcatacttcctgccccctgtgaaaagggtgcctgccacagtcacttggggcatgggataagataatatagtactggcaggtaaatagctaactggaatatgagctcgggtcccgtctctcccacctgcactccgcgctggtgcctgggctcagctcccgtgctatgggctttcatctcatcacgcctttccatgcagttgtctgtctccctctccacctaagcaaggagctcttaggggcagaggccatgacttattcctcttattcctgcccttggcaggaggcctggagaatagttctttttgatgcaaatgaaggaatgggttggagagtcgtacttctctaggagggaaacacaggtgaggtccagtttcagtttctgtaatgctctctttcaatggggaaacagcctaggatattcttgtccaggcaccagaggttggggaatgtttcttgggcatgtttcagactggagttccacaactcagacttttcttgccaaatgaaatttcagctacacttaaggcaagttaatgaaaatctggcagaaagctgggggtgggggagtgggtgggtacgggggtgggaagtcttggggaaggaagacccatctgacagactcaattctgtcaccacttaatcacttccagtagcaactgaactttccatgcaaatccacccaagctcccagccttctgaatttccaggccccaggggaaggtcttcagattgctcagactagtttgttccctctttaaagaaaaatccttactttctggaaggacttggtacacgtggccgctacaggaaatgtatcctgatggataaggcaggcagaaggaatcaaggaactgaattcaaggaagttgctgatgtgatatattatttccccctcatatcacttcccctttctctaggcactcttagtcctacctgtccccacacaatctgtaacttcttggaggaaatcaaagtgcattaaagaagactctccgtctgctggcctgtttactttgagatcttttgctcttgtttgcttaggaatttgaagattttctacagattagaatgtttcccttctaaaattttcctttagggaactccaggctccagtcacccaaccaacaggcaggacagaaagataataaatttaaaacaaaaagaaaagaaaagcagggagggctgggtgtggtgggtcacacctgtaatcccaggactgtgggaggccaaggcaggtggatcacttgaggtcaggagttcgagaccagcctggccaacacggcgaaaccccatctccactaaaaatataaaaattagccgggt

SEQ ID NO: 60386 - DNA, 7494 bp, Homo sapiens
ctgtagtcccagctactcgggaggctgaggcaggagaattgcttgaacccaggaggcggaggttacagtgagccgagatcatgccactgcactccagcctgggcaagagagtgagaccctatcacacacacacaaaaaaaaggtggggggggggatgagaaatggggagaagagctagagagtaaggaaccggggcagccttcagtgcttaactgggcccagctacctcgagatttatgcagatgacagaaccttttccaaggtttaggacctagaaagaagaaaagctgaagcctagaaaggtgggagactgggcccaagtgggtgagaaggggcccacccttgcttgaccatggagggtgacgcccctatgcaagagctgggctctaaggaggctggggatgagggggtggcgcacagctttgtcctgtttctacaacctagcacagaactagagacagcgtatgggtgaattggcacaaatttaacccctttacagagggaagaagagtcacatttgactgagtagaaagtactaagggcatcgttccaaaattggggagccaagtttccaacctttgttcttttgagaatgagggtggggatatcaccccactcccatcttacctctcccacttagctgagagctgaacctaactgacctaattcctgtggtaggtcatttaacacctgtgttgaggtgcttggggatggacaaggaatttcagggaagaacccgggcactttgacagagaataagactggtagagggaccgccagtgctgggttccggatggactaaggctacagaaatggagcagagctgggcgcggtgactcacgcctgaaattccagcactttgggaggctgaggtgggcagatcacctgaggtcaggagttcaagaccagcctgggcaacatggtgaaaccctgtctctactaaaaatataaaaattagccaggcgtggtggcaggcacctgtaatcccagctactcgggaggctgaggcacagagaatcgctagaacccgggaggtggaggttgcagtgagctgagatcatgccactgtactccagcctgggcgacagagcaagactccatctcaaaaaaaaaaaaaaaaaaaaaaaaagaaagagaaagaattggggcagaattggctttaaccagtctgtagtaacactccttatatgtggaagaccactaaatactggctcctttttggtccaaggtgaccatattcttttgactttgacatcgtttgtggatcaggaaagggataatgtaataattttttcttaggtataagtcaaagacatgaattgcatttatacactactctgcattttctagaatgcaataactttactttttcctcagaaatgttttggctgggtgtggtggctcagacctgtaatcccagtgctttgggaggccatagtgggtggatctcttgagcccaggagttccagaccagcctgggcaacatagagaaaccctgtctctacaaataaaattagtcaggcatggtggtgcatgcttgtagtcccagctactcaggaggctgagttgggaggatcgcttgagcccaggagtttggggctgcagtgagctgtgattgcacaattgcaccccagcctgggcaacagagtgagaccctatcccccaaaaatttaataaaaatgtttacagagtacaaatgcagattttttatattgtatagcggtaaagtctgggctttcagtatacccatctttattcttctctctacctaggcaagagagccattttagggatgaaaacctcaagatagagcatctaagccaagtttcacattactggtttcttgtgacatttgctcctgtagaatcgtccagtacaatcagtagactgaactgataagacccttcaagcctttattacttttctactacagccaataacacatagatttaagagatggaatgctcttaaaagatgtttaccccaaaacgagcacgtatgaaatatgttaaccacctatttctcctgcaaggtgaccctagacaggacattctctctggacttgtttctcctggtatgacataaagaacgttgcgtaacagcttgtttttctttagcactacgtgcctgccgctctgctatgcattttacgtggattgtcttatgtaattttcacaacagcccagctaataaatgagaaaactgaggctcagaggtgagcatctgctaacaaatgtcagtgcagtcccatttctgagcctatgtccttaggaacttcctgtattagtgagatctttcccagctctatatgaattcagcatattcttcttggccaaaataatttcctcaactggcaattagggtccaggaagtttaaatcaacgggatgacagaatgacaacggagaggtctccaaccacaggccaaacagcatgcttccaccccaagcctgagattggtaatttcctataaccttgcaacagcctccctcccacacactgggcccagggtgcctgcaaagctttgctggaggctgggtgtcaggtgtgagaagctgctgggagttacctcctccctcacactgctccacctccacctctgccggaggatggaacttcagaaccggaggcccacggcagcctgaagaaaatgatcaggataactcatttgtaaaaatctgtttaataaatatacatcataaaagtaccaaaataattaccaacaatacattatgtacaccatttacaggagggtaacacaaaccttgacaggtagtaacttttcaccccacatcactgaacgcttaacactcctggctgttacatgtcacaggataccactggggtcagtcactcgaagcacaataaatataaaatgtggtccttccatgaaatttttgataaccttctccaaaaaccccacaaaggtgaggtttaaaagaagttttctcagaatttcaatgatctttctcgtcccctacaaaaagttcacaaaagcaacaaaatgagggctgatcctaccacaataagacgttttgggccaggcagtgtgcagtgtggatataagtacaccctttaaattttttcttcttttttctttttttagaaaaataaaactttttttttgtacaaatatacaagtccatgttctttcagcccctttgcgctcataacgtcagacgctggcctccaaacacacagtcatcatagggcagctgaaaacaaggggaaaaaagacacgttaagcttccggagcggagctctgccaagctaccgggatggggaggccactactggaaataactcttggactccattctccatagcccaaatataatgaactttacaggctgagagagtttgcctttaatgcttctctttaaaaaaagagggggggcaggtacattcttgggatactggttatgcacagaaatttgagagactcattatgtagatacccctctgataaggagcagctctaggggcctgggagggtgaagggaatggcacctcattagttagagcgccgaaggagttcacagactcacctcgtcctctgtgaactccgtgaactctgactctgtgtcatagctctcctcatcctcactctctggcagcatctgaaggttttctagtgtcagctggcccagctgctgctgtatccgggtgcttgggcggccccaggtgagctggtagggagaatagccctggtaggtaactctgttgacatcagccccacacttcaacaggagtgacaccaggtcaggattttgcaggtccactgcgaggtgaagggcagtccggccattacagggctcctgaaaccaaaaggaatttgagatgcttatggctgcatttggaatttctgctcacaacataagcacgaggagcctgactcagtgcgtcgggggcaggaagcaccaacctgagcattgacatcagcacccaaggacaccaaaagctccacgatgcccaggtagccatggatagaggctaagtgtagacacgtgtggcctggaagaacaaaaggaaaaaagtataaccacctgtttcaaccctcactcctttcacctattcttttatggaacaagtagtcttatcttctgaattttaagaacccacagtctgggttctgaaagaactttataaaggcatccaataggcactttgcacacatattttctcaaccttccaaatgttaggagtttaagctcttgcctggactccttaagttggcccacctgccccttctccacgtcacctgccctccgagggggtggggcagggcagggaggcagacataccattgtagttggtagccttcaggatggagtggaggtgcggggtggtgcaggactgagtcaggactcccacgctggccaggcagccctgctcacaggcaaggtgtaggggggtatttcctcgaaagtctcggagctcaggatcacagccagctcccagaagtgcctcagcaatttctggctggttggtgatcacagccaagtggagtggagtctacgaatgcaagagagaccagagaaagtaagccatggaccaaacccacaccccgagttcccctcaacccgtgtctcctggttgggtgctgctcctcctagacaggggggtggggagggctggcaaatagcagaggctccaggtgggtcataaagacctcaccaaatcagtggaatttccttcactctctaggatgtgggctgatgtgaagtaaaaggtgagggtaaatagtgctcagtggccctgaattcagaaaggatctggggtgactctgctacatcagctacgtcccagggtcagagagaacccgggccaggcaagcggcgcacctgctgcaggttgttctggaagttgaggaaggccaggtctcccttcacctggcggatcacttccatggtcagtgccttttcttcatggatgatggccaagtgcaggaacctgtggggaagagagggaaaaaccccaggggtggtgagtgcaccgcgtggggcccagggaggcgcgggctgcgggggattgcgcaaggccggggtttctggaggccgaggccgcggtgttttccgcgaggttattatgagctgagtgttcctggcaggcgcccagggactttccgcccccctccccccgcggccccggcgggcgccggccagaccgccccgccctcccgccagctcggaacgccctgtacttcccctcccggctgctcggcgcccgccagcggccagaaactcccgccccgccttatgcaaccggggacttcgcgtccccgctgccgccccgcccccggcctagaggacgggtctggggggagggggcgtgtggcgacgctgccatccaccagggcccagccgccgcccctccgagttgggccggtgccccgcgcggccctgcagccctgcagcgttcggggcggtgcaggagccccggggtgccgcggcgcccgcccggctgcatcgctggtcccccggctcgggctccaggcccggcgcctcccacccccaggccgcgcgcgtcccgccctcccgacgacccccagccccgggcctccgccacttacgagtccccgtcctcggtgagctgctgcttccagggctccgagccgcgcggcacctcctgcggctcgaggcggatctcctgcagctccttgaccatctgctcgtactcctcgtctttcatggagtccaggccgctgtcgtggcggtcgtccagtagccgctccttcttcagcccgtcgcgggggccctccatggcccactcctgggggcgctcggccgcctggaacatggcgcggacgagctgcgggcgctgctgcgggtgcgctgggccgcgggctgcgcgctgcttcctcgctggggcgctggcgggcgggacggcggcacggactgctgtgggctctgcagcgccgccgcggcgccctataaacgctggctggggatttctctggggcggggtcaggctcggggaatttccaagccagtcagaccagaaaaagagaactggcttcgtcctctgctagggggaaaaagaagcctaaaccctgagctggggttcatcggagaaactccctgcgatgagccactagggtcacggacagggaactttttgatgagcgccgagtggctggaaagtccttccgaccaggccccctccccccggtacttccctgcagcctgcaccctgtaatcctgtccctctgcaagtgagccttctttccctggggtttcccacgatcgatttgaattggggtcgtcggctgctgagatcccaaggacgccgacctgatgggcggtccctctttggggtttgccaacctgccggtcctttccgttttttgatcttttgaaaacgcaagagtggaaatgatggctgggcgtagggatttgctttccccagacttctaaggggaaggacgcactgtggttagggggctgcaggccgcgccggtgtttctgcctataccaggctctttgcagcaaaggaacttttagcttcgcccccacccccccacgcacccccgccaggtagaagttgtgaaagctttggaggagtgaaaagcctaaatccttggagaactctcaaatcacttcctagggatgaacagccctgttgactgggggaggggcaaacgctccctgtatggggaaactgctgaataggaccatgattttttttgtttcccaagtaaagcaaggtgttaatgtttgtagtggtggttgtggataccttgcaatagcagagtagctattgtgttcataagtagctattcgtttatgctatctgacctacattgtgctcccgcagaaaaaggatcgtgagcctacttctgggcacccaaattcgaggagaacttagagaaggaggctgaagaatgagtttagttagtgccttaaccgcgattggaccttaaggaccactaagaaagtagttgccaggcatcctgcgggaggctcaaggtagtcccatcctgcccgcccctccttgctctcttgtcctgggggacagtagcagttggacccattcacgccacctgggtagaaaggggtttcggctcactatgctctggtttcacctgcagaaatataatttatgctctccactccacctccacctccaagcctgcaagccatggactgaattcatctacttggtagaattggtacaggcaaaataaagcaaacttcggtcagagctcttcagaattagtcccaggaggcctctgtagttctgcagagatttctggtgattattgcaatcatctttaccttgactggccttgtactaaccaatccttcccctctcttcgtatctccacccctcccctaatattagaatgaaagaaatctgactcgatagagagagaccaagtatgaagggaaaaaaattaaaatcagatagaccctccagggtaataatgatcacatgttacaatgaaaacttcccagggatagacaccattgtctctgcaggtttatgatatgca

SEQ ID NO: 60387 - DNA, 932 bp, Homo sapiens
tcccgagagagagtccgcaggggctcccaggagagggaaggccgggcaacccaggcctcggcgctgccacccctcgctcctcaccgatgacgatgcgcaggtgcttgaggcgagtcagtgcgtccttcttggtgtctagcaccttctgggtggacttcttcacgtccccgtgcggcttcttggagaacatcctgtcgctgccactgccactgccactgccacagccggctcccagccgggtcccggcggcagaaagtggagggagtggacggggaggagactagccagagaggctcattagctccccagccttgcgggccagggcagagccgactccttcccgatccaggccagggccgccacctccacccgcctcgcgccgcggctccaaggcaccttcggccccagctccaatatggcggatccctctcccggccctgcacggagcgaggcagacccgggctggccgcctgccgccgccgctcgtctccagcggccgccgctcgccgccacaggccggggccccggacccagagccacgaaggtggagctctcggcggcaggagcacaactctctccctgaggcccccttaaggttgaagcttctttagcagcttacaccctgcagaggccgaaacggagacgagtgtggtagtgatggggtttcacgactctgccgtcggtggcgaacggtgtccgtggcaaccgccttctgacgtcaagagttcttgacgtcatgccagcatgagatcacccgtggcactccccgccttggtttcctgtgtaagcagccaaaggagaatctcaagaaaggcaaggaaggtagttactgcgtgctccattgtaagccaaatgatagtaataagcaaagagaagtaatctttattaaatatgtccatgatttatctttgaaaatgtgcataagttgttgt

SEQ ID NO: 60388 - DNA, 1425 bp, Homo sapiens
gcttagtaaaacagatggttctccagttccccaggctcaatgagcaggcaaagatccttttaggcaaaagacattttcacatctaacagtaacatctctgatggtcaggcaggtcaaacaatcacttggcgggaaatagataaatacagactaaattcgcacaatctgtttctgtttagtttataaactgcgatccagagtgtcagctttcgtgccttgtgggacttgaagtccagaaggaagaagtgatcagggctgccgagggatggaagcgtgcagcccctgcaggtctgagacctacgaactacaactcccggcaagcatcggaaggccgcgtcgtaattgcgggcaaccaatcgtaccagagcagggcaagcccccgccctctggctcggtggaaggcctccgccaatggcagagctcccatcgcagagcctgcgggttaggttgtgaggcccgggccgggggcggggaggagccaagggggcgagcaagctcggtggctgggtgggttggggcgttccgcgcgcccttcattgaagcggcggtggccgggctgggcgccggtagtggaaagcgacggcgcggctggaaaatgccagtccattcccgaggggataagaaggagaccaaccatcacgatgagatggaggtggactacgccgaaaatgaggggagcagctccgaggacgaggacactgagagctcgtcggtctccgaggatggagatagctcaggtgcgcgacccactgctgggaccctgagtccccgcgcccagcgcgcgacaggccgctctccgcacgccaggcggctgcgtcctgctgggaaagcggggcggggacagagggaaggggcggagactggctctgggccctgggctgcaccctgaccggtcgctgggcgctgtctggctcctgatgggtcccggcggcggggcggggcgggcctgggcttgtccagctcccaaacgcggcgtggtcctgcccccggtggtgctctggagcgaccagcccaggcggacaacttcccgcagcagacaaactggaaatgcctcctctccccagcccaccgacctctttccctattttcacctttgcaaccctcacttctcagcgcaagtgagttgccgggacagagggtcggcttagtaattaacctcagtttgcaagtcaacttgccggtcagcacttttacatcagtgtcttttcgggggctaacttgagagcggtcccgttcagtagctccctgaagtttgcaagactgagaggaagggaccaacattcgggctcattttggatcttcatatgcttataaattggctgagttttggcagcgttgaaaattctccaagtcttttcttcccttcagttttttctaactttgggctgttttaaattattttgggtgggggaggagggcagatta

SEQ ID NO: 60389 - DNA, 4185 bp, Homo sapiens
acttgctttgggtctttcctgcacacatttgagctatactgtctctcaggcctaaatgctctattgggcatcttgggtttctcatagagaggggagcccaagggtgtgcactcgcccttaccttcctttagagcttttctttccctcctcccctgtgcacctgcccaaggaaattctcagtacaggtcatggctcatgcccactctgtgcaaggctgccaaggggtgagactcaagaaggtgaggctgctgcctgcctggtgccttctgtgacctctcctgggtctctggatttgctctttttgtacctctattctgaagattttaaaagattctgtaagattctatgttttatattggttgtttttctgccgggtaagtagaaaagggtacagcaggcctattatttacactaaaggaacactacatgtattctcctatacctctgatatggtttggctgtatccccacccaaatctcatcttgaattaattttcttgtgtcgtgggaggaatctggtgggaagtgattgaattatgggggagggtgtttactatgctattcttgtgatagtgaatgagtcttacgagatctgatggttttaaaaacgagagttcccctgcacaagctctctctttttgcctgccgccatccacgtaagatgtgacttgctcctctttgccttcagccatgattgtgaggcctccccagccatgtggaactgtaagtccttaaacccctttttcctgtataaattacccagtcttgggtatgtctttaccagcagcatgaaaatgaactaatgtaatttctctttttatttctttttaaacatatgttgttggtttttttttttcttttcccccccatcactgaatatttctagtgcatgttgatgatctttccatagaagttcccagagatctactttgttcttgttaatgaccacatggtatttatttttatggaataaccacatagaattctatggtgtggaatgccagcacaatactaatgaacattgaggttgctgttttccttccgtctttcctccctccttccctttcttccttcttattaaacaaggctgcagtgaacactcttatacatatatctttgatgctaggaaagagtatatttgtagcataaatttccagtagaattgctgggtcaaaaaatggtagggaaaatttgtattttattagatattgccaaacttccctgcaaacaaattgtaccaatttgtgctcctactaacagcatatgatgatgcctatttctcctaatcatcagaaacactgggttagttaatttctaggtcattattgaagatcattcttctaccttctctttgtttttctctgggctgcatgttaggccatcattctactccttttagaagatttcattcactcattggcttcagctaccatttaggtcctaacaaattctaaatttaagcctctacccttacccgagttatatattcaagttgcccattgggcatttccatctgttactcttaacacatttacaacttaatataaagaaaaccaaatattatctcctgtgcacattcctctcccagtctggaatgtactctatttgtgcttccacccttgatacacacaatgactcacataaattcagaccttggagaggttgtggcaggtagctaaactcatgaattttggagccagattagctggatgtgaactctaccatttatcggctgtatgaccttgggtaacttcttttttttttctttttctttttttgagacagagtttcgctcttgttgcccaggctggagttcaatggtgtgatctcggctcactgcaacctccacctcctgggttcaagtgattctcctgcctcagccccccaagtagctaggattacaggtgcgcaccaccacgcctggctaatttttgtatttttagtagaaacagggtttcaccatgttgtccgggctggtctcgaactcctgacttctggtgatccacctgcctcggcctcccaaggtgctggaattacaggcatgagccactgcaccccgtcaaccttgggtaactttttaacctttttgtgcctcaatttccccatctgaaaatggaaataatacttcatagggttgtggtgaggacttaatgaatatatgtcaagtgtgtagaacagggcatgttacatgataaatcctatgtaagggctgttgatgaatttgacttctcctcacatctgtggaattagctagtcctgtagattctaactctgaaacatttctaactgaaagcattctcttttctctattcccactggtgctgccctagttcaagcctctggtatattttactgaaataattgtgatggcctaactgggtctctctctttttattttattttaatttttctctttatagcaaatattacatttctagaacccagaactgatttttttttcctcccagctttaaatctttttttcaaatcttttgcttacccagaacttcaattctactttttccaggaaatgcttcttccctgatctgactgtgtggttctaatgagaacacctctttctctaatactgcacaattcttggtcctagttgagtgcactaggtgaacgtgtaactcagcctgccccaattaaaacccttctcttggatctcttaaactataactgcaggaaaaagtatcagtctccctcttatgttggaactgggacaataaagtttggaaattataggcaatgacatttcctgccctgtggagacagctgaggagatgagaggtggatggggagtttcttggcatttagcctcgtgctatgagctgactcatagtccatctgcactccggtcttccttgtgttatgtgggtcttctaataaattcccctttttccaaacgattttgagctggatttcacacccttgcaacatttatgatgcatccttagagcttcatattctgttgatatccactttgaaaatcatcacaaacttttataatttcagcacaaagtcaaggaattaaaaaaaaaaggtattcatggaattacaaatatatgcatgagaaagagaaaagcagtccctgacaactaggaactgcgtgataggccttggtgttctgttgaacataaacaatctcacggaacaccaacatcacggccactctgtgaccgtgaggaagtggggtcaacgcccaccccaacaacatcttgtctaaatatagacaaaaacaaagtcagtctgcaaaccacaaaaaatgtggaacattcccctattctggctaatgtgaatgacttctgcttctttaccaattatagcattagcctcacttcattccacctgctttataagtaaaactcattaagatactaaattatgggattgcccccacttcctgacagcattttatccagagcaaagcccacttcctcaaaccctaccaaaaatctcccaataaaagcccaaatcctataagtcccttttaacaccttcttactcagacatccacagttccctatggtgtggtttctccctccctgaaatgagcaagaaacccaacttgtgcaactgccggtgtgttcctggtggcctttggctggaaggcattgacacgtggaacatttaaaacagtttgctgtaatagttttttttttttaactagatttagacaatgatacaaagtacattctggacacagatctgggaacttctagtatataattataatggctgataaaaaacagactttaattttcaattacacattattgaaagaatcacaaaagacaaaaagacaaggcgaaaggcatttcctgaatgcattttgtactgcaatctaaattagatagtagtactttgcttctaaagccagaaaataatattaatatttctactatattaaccagggactatcatctggaaatgtaaaagctacagtcccagtgcattttcattaaaacctgaaggtggcagtaaattcctacaagacttaggtgcctaggttagaatttgtatttttcctcctaattattcaaaatggtatagtgagacttcagttgtatttaatcctgttgcatactaattaagagatgtttaggaagaagataaagctctacacaaggattatattattattactctttattagctgaaaaaaattcaccatgtaaagggc

SEQ ID NO: 60390 - DNA, 968 bp, Homo sapiens
ggtcactcctgagtttccatgctttcctctttctctccttgaggtggttcttctgtcttctccttttcttcctctcctccctgtttctctggcagcttctcttaagccttttctgaaggtgttactatcactccatcccaggtagatattttggaagcaagatggctggcatcgtcctcctggccaaggatcttcctaaagccaccagaggattcagaccagagtcagagctgtgtggcagaccatgtcctgcagttgcatggtcatgactgtgtgtactctcacaggggtcagtgacacccagtgaccctggtgggaactgtcctgcagccagaatttgcaagcaatgctcatatgcaacatttagggccaaaggctgtctggtgaggttgttcatcacagcagaatgacccagtaggtcaaggatccagaatgtgagtggctcaaagccaggaagacaaatcctcaagtccttgagtagtctgatgagaactttatggactgagaggcacttctctcaatccagcaggcagggcagatgactgccaaggcattctgcaataccttgctatccaaatagactttggggtccagttttccaagattgagtgacactattgtaatgagaatcttcactggagcatcagaagaactgatttcaagccagttttgttggtcagcacggtcaaaacttcagaagaatcttgtgctctgaggctttccaaagctttgttccccagggcagtaacagcttccagtgttggcagagtctttagtattatcaccagggcagctgcactgtggcctgtagccatctttctcttttagtacgatcccacctgtcagacttcttgaatttgcacttcaaattagagccacaatcaaattatcagtcacgttgtttatttttgtcaccagagaaaggacagagtcctgttcagcagagttgggagccaggtactgatctc

SEQ ID NO: 60391 - DNA, 402 bp, Homo sapiens
cctgcatttcaaacatgtagtgcaggttcagcaaatctaataaaactcaaagaaaaatctcagtgctttttagatctcttctcttatctcatgactcctgtttcttccagtaggaaaggaagtaatgtgctgtctaaatatctgattgttgtgttgctttagggaaaaacaattagattgccttgccatttgccaaatagatggaatgaaggtttcactccattaacactcattccatgagtcattctaaattcttgacagtatgccaataaaccccagttaattcaccaaaattgccgctggtagcattttgcctctgcaggtaaccagcagcactgtaatcacttactccacaaagataatgaggttgtatggtttttatttatgctaccaatttgtttt

SEQ ID NO: 60392 - DNA, 1505 bp, Homo sapiens
ttaactgttcctcaccagcaatcattttcattatttctgctcagtgacctttcattccctccatttttctctgataattagatttcttaaattaaaaaaggtagggggagaaatgataagctcaatagaagacaaacaggaattgaatggatgtatgcatttatttttaatatgttttagcaaaacctgtatgtacctgccccccccccgcaacacatacacatcattgggctttagaatccttgctgagatgtgggtttgagggagataaccacgtgtggtgagttgcagagcctgccctccgcctgccaccgttgctgtggggagcgcactctctgtcgagcgctgctgtagcagacccaccaaatcccatgtaagtggtcagagcacaaatgaggttgtcggtgggtagtcctaccctattcatgagctctttcagaacaattttcattactttttttaaatactgtttttggcaaacacttgatacttgaaataaaaaatgcatgagtcacctactgggataggcacagtgtgtggttcattgaatttagctaaattgtgagtcatccatcaatagtcctcttggtgaacatacttgtaataatttcacacattacaaacaaaaataggtatgattttcaagattcttgaagctgtttcccttggggattctttggattgtgtttagagttttttgtgttgctaggtggtgagaaacttgtcagctttgttttcagatggatccaaggcttgtgtctctgtcacgtgataaaagaactttggtttgggaggctcaggggcagagtatgaagctgagcgtcatgaagtggggggaaacaggaattagcgattaatatttgtccttgtcagatcattgacttttaagattgattttggcatctgaaaaatgtttggctccactctcaggacagagtcagagcagtaagaatatgcacctgtgtcccccacccccttttttctgataggagagagctgagcagggtggttatgtgtctgtgcactactgccctctgttggatggcactagaatttctctgtatccacaccccagctgaatgagcgctcctggttggctggcaggtgacccaggcaaatatgtcattattggactaagaccaattaaaaaaaaatagttggcctgtataaactaagagagacctctctctggtggagaaataagagtgtagactttctgacctgtagggttcttctattctggtggctgccgggcaagaggctggcatctgctgctgaatgacaggacagactttgtgattaaactgctagatctttggcttttcaggaagtgaaaataatcacaagataaagtatccttacttgcatttttcccctttcataagtgcaatagggcataaaagggctttggcttttggctacaatcagaggtgaaagtttttatatggatataagaagagaagttaaagctctttgcaaactatggctaaagtgccatgtcagta

SEQ ID NO: 60393 - DNA, 743 bp, Homo sapiens
ctacttgtatttagttagaagtttgttcttactttaatctagaataattgctgtcatgtttccagctactttcctttaaaattccccttaatcattatctacccttgttatcaagagctagtcaaaccaatctcatagtgtatgtgtttgtgcgtgtgtttatatattttttccctcttcatttgtttactccattagttgtgatacaggctaaattgctgtaacagagacccagaaatgcagtagctctgtcctatgaggtcatttgaggactgggctggtgagtcagctctgctctgttgaacatgtggcttccattttagacatccagggtagctgtgttaattattgacatttctcagccagagggaagagggcagaggaggtccatggcaaggagctttatttatcattaagtaggtgactcagcagctacacacaacacttctattcacattacgttggcctgaacttcatgttactacttctagctggaagggaggctgggaaacgtactgtctagatgggcagtgggggattctgttacttaaaggaaaaaaagagaatgggcactggctgataactagcagtgtctgccagtcacttactcctcaatcagtattaattcacatgtgaataccagtctctcattcgttcatgttctcattggcaacatggggatgtgactgataattccagtaagacaagaatacaagaatgttactggtccttggaattagttt

SEQ ID NO: 60394 - DNA, 892 bp, Homo sapiens
tgtatttttaaagcagcaacgaagtgttacagtttactacataagagaataacttttaaaaacctgattattctcataatcaatagtaaaaaaagttagttaactttaaaaatagctgcttaaaatacttagaaattctctcttgagggatcaactataataatttacttcgggaaaaaatagctgctatcaaaaaacttactcagaattttacaagaaaaaaatatgctactcttaaaaatcagaaagttttctccaactttaaattcacattaccactgttaaattctagcaaagccttactatttaaggttcaactaattagtaaagtagcactttagacagggctggctgaagtcaaactctgccaaacaccctttttgatctaggtgctgctaattagaagtgttcacaaaaggaagggatggggggagactgaaattacttgagcacttactatttttaagcactttgtgaatgacacatccttgtactactaaaagcaggacaaaggttttatttatttaacctatctgagtcattccatgcccttaaaataatttttctattcaactgtattagtttatactgcccttttcttcagtcctaaattttaccagggtatgacctaaaagcaaccatagtagaaacttttattaataagaaaggtataaaactaatcaaactatttcagaaaccaaaatgaaaatgcagtaacttacttgaggtggttgaacttttcttctttttccagaaaagctctagattaaaaaaaaaaaggtaatgtttagaaaaatctaagcatcatttttttttctttataaaatactgtacaaattatgtacagccttgggaaccctgacagaaaaaaaaccaaccaatttaccaatac

SEQ ID NO: 60395 - DNA, 954 bp, Homo sapiens
catatccagaaaactaccaagaacctgaatataagattattatcaaaatgagtgaaaattttacaatgagagcgcccatctgcagtcttttgaatgaataaaagtgaaccatcaaaaacttttctagggacatgtgtttacagcatagtataagactatacttcatagtagaatcaagttaacataatttattcaaaatgagtcatcttttctacaaaataaaggtgttacgtgagttcaaatacagattttatgagtcacaattataataaaaaagatgaatcactgtacaaagatcaaaaagatataaggttaccaataaaaagataatatattgaataaatactatgtgacagaaatttactgccctttgaagatgagaatggaagcatttaaaagtccatattagacaagtataaagagatatgaaatttcatgtaggctgcactggcaaagattagaatatattaagattgtacattaaagttaatgcattaatttatattactttaattcctataaagattttgttagacaacaacctgtattatgtatggaagtaacccattaatgtactttcatagtcttcaaggagatctatagttgattatagaaaacttaagaatacagcttggggataaagcaggcaaatcctcaaccaaagcaaagtatcacattttctagagaaaataacttatagaaaaataagtcttaatgtttggttcatattctcatttcaattcagcagaattacataagcttcaagtgcaattaagaataattagtcttttaagaaaaccacataatgtcacaaattaattttaaaactgtcctaatacatctaactattcattcaacaaattcattattagtaatatgaactctatgcattttgccctacagaacttggaagagtaaaccactcactcgaaaatctctattagtctgctatta

SEQ ID NO: 60396 - DNA, 1925 bp, Homo sapiens
gtcgccataaaaagttctctaacttttaaaccatttaaacgtcttgggtcttaagaatggaatgttaataacaaaacaccccaagtctttaaaaaatgtttttggtaagtacttggcaaacaactgaatttaaaagttatatctttaagcagactccattaataactgcgtcatttcataaaaccgtttaacttacagtaatgttctttgtaagacacaacatactacgatttttaaaaatagtaacttcttaaaagactgattctccatctactcaaggctttaaaaataattttcacaaatcagacaaatgttctattttcataggaatttaccattatctttgacacaaatgcctgctttgtccacttgcgctagtaccagccccaaaacaaacttttacggctagaaaatggtctatgtaagatagaaaatatttccttttaaaaggcaggtaaacaagcatacttttaaattgtttctcatttaaaacttgaattttacaccatgaaacgaaacagtgacttgatcgaagaagcccatttcaatttaaaaccaattttactatgacatttctgcaaaagcgatttatcagccagttaaactagttaatagttaaataacgacagttctaacgccaacagcattttacgctagaagtattttaaatgaattccttttacttttctccccatttgaaaggattatagatgcgcaaaacagcccgaaggaaaaaagaaataaacaaaaccaagtaactcataagaacaaattactccctcccccaccaaaaaaagctaataagcgcgcgcttttctataaatctcaggcctactgaccaaccaattcccataaagagtaagttggaggaaaaaggaccctgaacgctaagcgcctcctaaactcgcagtgaagcttttccacattcattctctccaagcctgcctctctcggagccgggttttcacttaggccaacctcacccactcttggggaggacagctgcaaggtaaacgactctgcaaccggtaccgccgtcctcctcactccgaccgaggaggctgggcccgggctccttccacacctcggcttcgggaccgcatcccacacctctgcaggcctagctgcccccggcctctgctagagaaaaagaatggcgaggagggaccggatggtttccatattcccagtccctcaggccacctctcacctgtccaaccagggtgtgtagggagcgaaagatttcgtagagcacctctcgggagaggttgggtctgcatcttcgctccaggttcctgtcaccgctgctcgggcgattaagctccgtggcagcagccatgatatcttctcaggccgccccaccaccaccaccaccaagatttgctcacaaccccgccccctcccttccagctttagtcgcttggcgatgacgtaagacacggagtctggtttagatcgggctttgaggccccaccctctctatgtgaatgacaagcacgttacaccaatcagttgcagctgtgacattgcgccgaggctctgaagtgggtaattgcagaccacagctaggctggaatgctgtgtttggggtggtcattagagtcgtggtctctttagcgttatgaagcctaccttgactcctaggtgttcattgtgaatcttggtaagaggagacatagttaaattttgtagtttgagtccaaaaagtaaaagttgacattttaacatggcggtgtggagtgggtctggaggaagcttgctggtcagggatggagtggtgcccacacgtgtttctaaacattggaaaactcacacggaattatcatgattggatagaacattttcatctcttcaagtttgttgttgttgttttggagacagagtctcactctgtcgcccagactggagtgcagtggcactacctc

SEQ ID NO: 60397 - DNA, 1427 bp, Homo sapiens
attagagacagactctatccaccagagttcatactatattgagagataagagatgcagataaattattttgatacagtagaaaaaagaagtagagaaaaggagtcacagtgttatatcaatttagaagaaggagaaattatcttatgcaaagacactcgtgaagtgcttaatgctaagtactaagccttatggatatccaagcatacaacacttgtagtacctatgctcaatggttattcacctcaaacttatgggaactgtggtaggtctcaaacaacatgtggaatttagatacaaatacaggatgcagatgggggtgggaaaggcattctgattaatggagcccaggaagaatagcatggagatgggaatacttcccagcggctttcgcaggtgaaaatgcaggaatgcagagctgtcgaatttagctggcatggaaggagcattgaaggagaagagtgaaaaatgagctccaacagtggtttggagccagtttgtggaagatccagaatgctaaggaatgggctggcacgggcaatgtgttcctcatagtttgaactctgaatttcttgtcacacacaaaaataaaggaggacaggtagtgggtactagtttcagtctgtgagttatattcactatttcagaaagtttaaaacattagtcttttttttgcttttggttagaattacgtatcaccttttccttagggaaactggttagatcatgttgggaagaagtttggcttgaccgttgctggcttcatagtcatttgtgggatgggattgggacacctggctgtgttatcctatcaacaggctagcagtcactgcagagcatttcacaagaaatagctcattgctttttcacattgtaggttaattattttacatgattgtgcaactctgatagccattggttattcacgaaaacttgactcgatatttaagtggaaagtatgccaacacttactaaatgctgtttgtttggtacatagctttcagaacatggtgtccacaggcagtgtggatgttgtccagggaagtgagcgaaagaggtccttagtggaaaaaagattaggtaacactaatatgtgccctgctatggggacatttcataaagaaaccttttaacttaaattgattgcttttagtttaagagtaataatgaaagatattgatcctttattgtaagtcttgttggacctagatgaggcataagttataaataacaatgtccaatatgtctgattttttagttgttacatagttttggtatcttaggggagaaaatagagaggaaacagttttcttgcttttgattttgatctatgaacaatttcttagagtcactaacctgatagaattacttttcaagctattgaaactttcaaaggtcataaatatgtaacactaggggattaactgat

SEQ ID NO: 60398 - DNA, 652 bp, Homo sapiens
ctcaaagaaaacatttgaggatggattaatgaagaaataatactaactgatcaacatatctctgttttgatcaagctcagggaaaaaactggtttgaagagactgtttaatttcactgcatatttaggccttatttgtatttctaactctgaacactctgtgctgaattcctcctaagccatgacacaagaaaacatgcctcttgttctcaggaaagattaaagggctgcacttgggatgtgtgtttgccaagctttcgtcacttcgttccactcttgggtttggttatgaaagttgtatattttcaaaggtcattgaaaggcaaccacctctgttttctgagcgtggggaacttactcctaatggccaggtttattgttttattgccactgtttacaaacagggagaaactcccttgaatgggcacttccttttttaccactggcttccccactattttaagatgtagataagttcagtattcaggttcactgtttgacccattaaactggtattgaggtataatttgtgtgttttcccagtaccgttgcacatagaatggggttcatttccacacgtttgaataaatttatccagttcagtgaacctgttgtgaagctcagcaaaactcagtaggtggctttaaagtcct

SEQ ID NO: 60399 - DNA, 963 bp, Homo sapiens
cactgtcaatgataatcaaactaaacaactacacatctttttgtatgtgatttaattgcccagatttcaaagaaagccacataatcttatgagttaaaatatttctttttcttattttaagcatggcaggacagcttttcaaaacataacttgtagtattgggtgccattccaactaccaattcagatcctttgacatggcggctcagtttgctaatcttggcttatacttttaaaaacaacttactacaactttacgtggtagcattctgtttttcttatagtttatagctgaaaaatgtactctttaattactcttgatattgacaaagggcactgtgactcattttatttttcaacatagagctaaaaggtacatgaatcatccttttgaaatttggaatgcaggcaaaacagtggctgtgaatggagtctaagtaaataattcctctcatcatctaaactttttttcagggcatcagcactagaaaaagtcattttcttagcagtagcttattgccctaaaaaagaaatggtgaaaaatttattcccagagcacagtttatttaccataagatgtggctcagtaaagtgttttgtatgttggaaatgtaaagttaattcttcctgtcaaagccttaggaaaacaggcacatcgtaaacatacttttgcattttagagctggctctctttattttagaagagagttttttctatacatcccttaagtcggcattcttagatgtgtagaaatgagaataagtaatttaatagtatcctggtatgacagatctaatataacatatactagagtacgtttttcactctccacatgggaatacaaagagggagaggggggaagtgtagaaaataaaatcccaagagatgaaactgatacctctctatgaagaacttttaagctccttcaaatagtggggttaagtcactgccaaggctcaatac

SEQ ID NO: 60400 - DNA, 1319 bp, Homo sapiens
atatccttatttaaggcacgaatatccccaagcaagcacagtatgcaataagaagtcctgtggagtcctgtaagtactttgatgaggaatgcaggatttatgtaagacctgagcgagcttgaagaaagactctacaattgataaaactaagtcagaccgaactggatcattttcaagtaaaataggtagcaaggcaaaaagaccgcctcaaagtcgctgcccttggggctctgccacttgctttacaggctaggaacggacaatgccgggaacccgagagcggccggcgcggacgccgaggcaactttacttggggcacccactactcgcaatcaactcccggcctcctctgctctcgcgcctctaggggctcaagcactgctccgggagcgctgaattttgaggaagagggcagaacttcagtaaggagacctgtctgggcaacggtttcaggacacgcggtggggaaagcgactagcctccggcggggcagggcgggctgtccttacctgcagaaccaccggccacgatctgccgagaagcctcgcgcactaagctgacttcaggcttggcggacatcttcgccaggcgggaggacaagggagtgggctgagatgcgtcaacgagctcgcagcctgcacagcctactgatccagagagccccggctgggctggtcctcaagcgcgttggctccctgtggagcagcaatccggcgactgctggaaagcgagggttcgaggcgcagattcgtcgcgcgatctccggcgcgtcggaacctgttcgcagcgctctcgcagaggcgccctcggctccgaaaatgtctctggaaagaagacccgcggatgggtttgggttggctcaccgcagcggctcaggctttgtctcctagattggcgcccacgcccttctctatcaggagcctccggtagtttgtcaaactagacggttgcctctgataactcaagtgaagtgacccaggcctggagcgccaagtacaaagcggggacgacacttgcacctcctggcaagccagagcacagtgaggttcaaaagaagggacaagtgaataaattcctcagttagttgtcctataattgtggtctgtagcaactaagtcaaagcaaatctaatttacacttaccttacaatagagctaaggtagtactttaccaaaaatggttttgatttaaggtaaaatcatacctcatcaacttgagttttatttacctaaggaccaaaagaagaaaaagcctggttacaaatagtttcttctatacccaggtcagtggttcttaaaagtggttttagtacccacagc

SEQ ID NO: 60401 - DNA, 1602 bp, Homo sapiens
tcagcacctcatattatgcctattctctggggtgtattaaaaaatattattgcttattactcagcacccagaagagtacctggcacatggtatgtggtcactaagtatttggtgtctgaaggaatcatgagtaacaggagttaaagtgacatttataaaaccaattctgaactatggaacaaaaaacccaaatttaaattactagcagttaattataccattcttagttcacggaggtaggccaattgaaaactttggacatttttaaattctgtaaggtttaacattttttcttagaggattcacatatcgtaatctcatccagcacttcagtcaaaaaaaaaaaaaaaaaaaaaagtcaccagctccaaggttttagtgtgaaacgttctttggccaggatctagatagtacttttgctcactcaaccggagcccgatctggtgccattttcacttgaccgccgcttcgaaacacgtccctcccacctctcatcccaaaccacacacaaagaaggaaagcacaatttcgacaggtcttgggaaaactcgacgaggccaagtatgaggccacaagacaccgtttttagttccgcgttctccctcttctaatcctattaggttttgtccagacaacgttttgctctttcagaagagaaagagcgttctgcgctcgtcgtcttggattcgacaaccataagcatcccgttagggcaaccaccgcagcagactaagttcgactactttctctccaaactcctcccgggccttcttcccaagctctctctttctcctggaggccccgcctcgcggcccggcagcgcggcacgcgcatgcccggtgctcgccgcttgcgctctcccctgcggcgcgccgccgccccgtaggccccacgcgccgccccgctcctccgccggatcgtctgtgggtgagtctcgagccaggaggctctgagccagtggcgattggctgacgcggtggctgcgcactcggcctgagaaactcggcaagcgcgcagtgtcgactccccggtctatgccaggcgcatctcaggtaaacggttgggcagggaggtttgggcgacggagaatgatagtggtgggcacagatcagccctggagttttcggccgcagacttttccttggagaaggagaaggggccccgcggaatctgtacttagtgaatgctgaccccgcgtggccgggagtgatggggctctctcgaaggtcagtgtcgtggggtcctcaggtggcagacagctctttctgggtatggttttggtattgtctccagtttcctaatactggacctgagcagctgagcatttattcaagggtgtattttttttgtttttttccccttaagtcgcggttagtcagaaggttccagtcctcgctcaacctctgatcgactctgtgcccatgagagagtcgttttatatttcatttctcacacgtggaagtgtgggcgaagaatgaggggcttctttaagcgcgctaagccatgctgtaaaaagatactgttagaatttttttttttcttttttgattcacaatgtccctggacctggtgcaacgtttgggaagcattttaagctctatg

SEQ ID NO: 60402 - DNA, 699 bp, Homo sapiens
aaaaggatatgacaatggatacagatgaagagatgcagaggtcaaggtatgggggaagaggtgcagagcttccgtgccctccttgggtacaccaccctccaggaacctccacatgttcagctattaggatgctctaggaatcctgttcttttgggcctttaatggagacttcattacataggcatgattgattaaaccattggccattggtgatgaacttaactgccaggtccctctgcagaggttgggggttgaagctcaaagtcacaacgttttaatcatgcaaccctcttcatgaccagcctccatccagaaggtatctaagggctgccagctatcagttaatcattagcgtacaaaaagacatcactttggagattccctgtaggtgaggaaaggggtggaagggtggaatgatgaccaaatatgtatttcacaatatcacagcaggtgaatgaatttcactttcaaaggaagagctcataaataccttattctctgatttaacatgcttcaaattggctgtgtgttatccttgtattcaaattttttgtgaatataattcttgagtcaaatatccttttattctaaacattgtaaaaatgttactcgcttgtcttctgacattgtttgcctgaaaagaagtcttgacagattccccatccccttgtgtgtgtgggttttgtttgtttgtttgtt

SEQ ID NO: 60403 - DNA, 628 bp, Homo sapiens
tgaatgatgttcctggacttacatatacacatccataaaacaactttaagaacattaaaaaaaaaagaatgcgggtaaatgattgacttcattaaaaactagaaagtgtcctgagaactgtctgaggtctctaaagcttttgctacagtagttggttaatcagtacacaaatatttacttgcttcctgtagataacactagttatcatacttacatgttcagaaataatttgagtctgaagtctcaatgagaatgactttttatataatattcaacttgttgatactttgatttgtcatacgaacttttagttttagccttgttgtaatcttagaagttagagttgcttctgttaggatttaacaatgtttgggcagcacatattatacaagaaaattaagaatgagcacttaagtaattgacagctctgttgagattacaacatttataatggcaaataaagtttgcaaaccaagaggaagcacctgtgattccaggagtataataactgaaaaagagcttaataaactattaaactgtggctatcatccagtaaacactaatactctttcctgaactctgctttgtgttttaaaatagtataagaaacatctctgtccttttatgc

SEQ ID NO: 60404 - DNA, 1199 bp, Homo sapiens
aagaataaaactgctagtttttttgcttagctaggagttaaattagataaaacaaggggctcaacagataatttaaaaagtcaataggcaaagcccaacctgtactatgttgaataaaaagcaaaaatccaaatgtcttctgatttttccagagtgtcttgcaacagaaattttataacatttccttatgacagcagctgtacaacaggttttgaaccagtctagtgtagtgtttagtaaagtgaaaggggttgggttgttttattctttttaagttggcattttaccaaaagagaagtttggtggttgttatttttccctcttatgtttaagtgacaaagtacttgattaaagtgaacatgattttatattaattctgatttgttctttttctgaggaagataataaaatgaaataatccaaatgcttttacacctacacagtatattgctgagcaaattatttatggaatggaaggcaagataaagttgcttttaagaatcctttaacatatcagtttgataactagcaaaacacctttacagccattaaatatttaccaagacttggctttggacaggggggcagtttagtgcaccaaatttcactctatgcaatgccattgattagctatcaggaggacatagttaataagtaacttcaggtattacatgtagagcactctacattcttgtcaaatcttttcgctgaagatgacctgaaaaaaagtcagttacaaccagcattcaccccaccaatgattgcacaagcacaactttgaaagaaataaaggccaggcaaatcagttgagcagtacttaggcaatctttcctagcaactgttgtcattgctgctggactttagaactgaacatgtttacatttaattagaaaggacacatagtttacagcacagtagctatcaatatcagatcagaattgatttccgctttctccccagtgattgcttccttcaagctaattaaaaaaggcatataatcaaatggctcacataaattttaaagtaaagtaaacaatatttcctggtgatcaaaacaaaagtaaatgacattcatccttatcattagctacattttttgaaataattctgttgcttataaatgtgatataaagcatgtttaacattatcagactgcaaagaagaaacctcaatgaatgttttactaagtgctttagctc

SEQ ID NO: 60405 - DNA, 1136 bp, Homo sapiens
atgagaagcccacagctaacattacactcagctgtaaacaattaaaagcctctcctctaagatctgggatcagacaaggatgccagctctcaccatttcttttccacatagtactggaaattcttgccagagcaattaggcaagagaaagaaataaaagtcattcaaataggaaagaaagaagtgaaattgtcattgtttgctgagaacaggatcataaaccctgaagactccacaaaaaaacaaacaaacaaaaaaaacctcttagaactaataaaacaggctgggtgcagtggttcatgtctgtaataccagcactttgggaggccaaagcaggaggatcacatgaagccaggagttcaagaccagcctgggcaaaatagtgagacttcgtctctatttaaaaatttaaaaaaatagccaggcatgttggcacatgcctgtagtcctagctatttggaaggctgacacaggaggattgcttgagcccaggagtacaaggttacagtgaactatgattgcaccactggactccagcctgggtggcagacaaagatcctctaaaagagcaaaaacacaaaaaacaaatacagtaaagttgtaggatacaaaatcaacaccccgaaatccatagcacttctatgcactaacaacaaactatctgaaccagaaatcaagagaacaatcccatttgcaatagctaccccctaaaaaaattaaaccttgggaataaatttaccaaaaggagatgtaagacctgcacaatgaaaactctaaaatgtcaatgaaagagattgaagaggacacaaataagtggaaggatatctcatgttcatgaattagaagagttaatactgttaaaatgtcacaccaaatgatctacccaaaatgatatacagattcagtgcaataattatcagaattctaatgtcattgttaaaagaaatagaaaaaactatcatggaactcatatggaccccccccaacacacacacacacacacacacacacacacacacacacacacacacacacaccgaaaccacatagccaagggaatcatgagcaaaaagaacaaagctagaggaatcacaatagctgatttcaaataatacaacagagctgtagcaattaaaa

SEQ ID NO: 60406 - DNA, 1564 bp, Homo sapiens
ctatgtgtataacatcaagcaagatttttggttgaggttttatgctttcagtaaagaaaataaaagaagaaaaccaattaatggtctgattctatcatcttttgtcaagcatctcttactgatctacatgaatgtgacctcccgctcatagagtagtctaagaacactgcagaatggacttgtgaactttcgactctcttttcaatttaattgactagtttttagtcaactaaaaaaatcattttctttgactaaaatgtctatgtaggtaatttctagtgcatctatgctactcagaaatagaaacgtgtttttttaattagaacaaaaagtctggttttattagtatcaaatcattgtgtatttttaaattatttccatgctactgtaacttgaaatgtttcccacctaaccactatttctggctttatgtttatcagctgattctatgaaaagatgggaatttagtacatagaagttacacagtataccaaccaatgaatcacttatctaagtaacaggtgaaacattgctgatatttgtgttttgaaatatgtgcttttcttaggtaaaatcagtttattctacatttaatatgtgatcctgtcattgcatagtaaatgattcattcacaaccttaatgcaagtagctaaatgtattgaaataagtgtcctataaattttgtgtggcatctaatgctgacataattcaaggatctgggttaaagtttgtgtcgttgctgggttttttaacctcaaatacttggcactctgtagcagtgtctctcacagtaatgctttgtttcttaacatgaccgtgaggactgcttggtcacaggcaaatactgtcctttatcagccaggacattcttaacaataattgccctttttttccccttctcacccccatcccaaccccaacttaggttggaaaggctggtggatgtactgaggaagaaggttggaaccgggaccatgaggacagtgatctgattgaaaaaaaacgacagtctggggaagcgatcacatctggtgaccaggctgcttcattcaacactgtgtaaacaccaaagccttaacttagcaaacagttgttagaagtgggacactccaaccacattccaagctgagataaaatcaaatcacaaatgtttaaccactttgctgctgacttgagttatttatccaaatatattaactatagacttttaccaatgggtagctataaggttacagcttattttgtaactattttatatctcaatatctttaatataaatctttttactgagagatcattatagaaacatgttaaagttggttaggatcatatcttcacatatggccctttctgaatcaaagtgcggcaaagtaaatattgtctaagctttaatccactgtgttaggtcaaaacttcaaatacatgcatttttcaatatagggtatatttcttaactgatgagagaggcttagacatgagtgtgtagtcttccttcaatgcgtgtatgtaatctttgttagtataaaagatattaaatataggtgccaagaattaaatgtataa

SEQ ID NO: 60407 - DNA, 1379 bp, Homo sapiens
ttttataatgtatagtcaagtgtgtttgatatgattgatgcaaatagattgtttccttttctcaaaaggaattccttcctcacatgtcacagcactaacttttactcttcaattgaagtcaatagaatttgcacatggaaaggggatgtgtatattcaatgagtgactttacctaaccacaaattcagtgacatttttcaagaataaggacttcataattaggcctctagttaataacaacatagagataaaagcaagggaaaggggaaagaaaagtactattttcataaataaaccatttgtctttcttaggaggaagagatagattaataaattattattgttagcaagatcccaagtaaaattttaaagatctccgtttctgtctgttaactgtcaaatatttttagcagaaaacagttgtctctttacatggtgttctacctcccaccctacctgcacccaagcctgtttggatcgagaaatagtgatactctgtgacattttaaatatcatgtcacctgacctgagatctagaagaagaaacagtatgcaagctttaataaagctatttgcaggccaactcccaaatttctagtatttaccgctcctttgcagttcctcttacatttgtaacagttgacctactaacaggttcccagaaacacagattcaaattttggcaggcttacctcacctctttgtccttccaaagtacataaatgctaaactgggttcacagtgagaatgagagtcattctaacaagacttttaaaaccaagaccctttctgctccctaccaagttactgccatcttctccgaagaaataaagttttgtcagtgtgcccttggcataatttcttcagcctggattaaacacaggtgactgagagtccgccttatctccacagggcattagtcactctataaaagttaaatttattatgaaatgctttgtttgtgttaacatatatcttctctgggaagctggaaacaaaggcatgtcctttaagactccatatggggaaaacacatcctcctttggaatttaaccttaatttgaaccaagatctgtgaaagaaaagtactttagtgtattgttcccttgctccacccttctatccccttatctaaatggagttactgttgcttcgtgtttttttaacccttccaattccagtccttgctttcctgagtttaaaatttatcctgggaaagaaatatattaaaataattgtggcaaacaattatactttgcttttaagaatgaattttttttgtaatatattaattctgatatcctttaagttaagtaaatgcacagccagtttatacatcttcattgttcattttgttgttttaagatacattgtaaaga

SEQ ID NO: 60408 - DNA, 1798 bp, Homo sapiens
tgtgagtctatacatgacctaataccttttgctgcttctatggtacttccgtttctctcatcttttcgtcacttatatttccttgggaatctctgttttctgttcctcttgaaaacaagttacccgcttgagttaaaaacacttaaaaatgttatttcaaagcatggtaatcattgtttattatccctaatgataaattcaattgtaagggtctgcatatagttgagaagaatcttactatgttctacatttttttatatttcaggttgaacgttggctactacactactctttctgttgctgagggtaagatgaaaataggaaggagtctgttatactctgggaaagttaatttgtgcttagtgttaaaatctcaggttattccacaaacagcatcacctggtaacaactgtaagtgaacataagactttaaaatatgtgtttactacaaatcctgaaaaaaaaagcagaccttactttatttaagaaggctctttggatattttaaggtagtaatcattgtacagggaattaaataaaactcaacactgtcacttgctatatcatatgaatcatcaagaattggatagaactttcccctctcaataccccgtagcaaactggaagaaagctgatatctgtgcaatcttgtattcaatggatgtatataaattatactattattacacaacttctcaatgtcactctttgactcatcagagaccttacagtctttcattttgcttacaattcccattctccttgttcacctattctattttataagatgagataggtgaatggaatgcagtggagatcatttctcaatatttctcatttcctctctctctgcttacctcacagtctgttcttgctatggttatacttctaaagtgaattatctgtcaaactaaaggagcatttccttccgaattgcctgactcagtggaaatgctgaagtgtaaaagacaggtgcagactcaagggttaagcctaggcctggcttttcactgtccagagggcgggctactcctttggcgcattgggagcccagagtctggttttgagtctaggatgccaaatcataatgcagtgctccagatccagcttctgaatctctgcaattgaaatataaaagttttacttctctttggaagttttataatgaactgccttggcctatttgctgttgaaaactctgacataatatattcctgataggacacatgtaaacctctgggtcacaaggaacaaacactctgaaatctctccagtaagaacagtattctcaatgaaccaactcccaattggtttctagtttttctttcttttaatttaagaatttaccatattttaagaagttgaggtcctgtaatgtcttatcataaattatacttaaaaggcaaagaggcttcatgacttagcatttgggtgacatctcacaaatggatcaagtctcacatttataatgctggtatcattcaaaggaatttggagatttaaatttattatttccctctcagtattaagaatagaaaatcaaatgcttaatacatattaaaggaagtttcccacctgggcactttatttggatcaatcttatgtaggaactaaataaagtaagtgtgtatagactggctgaataaatgaagagacaagcattcaggtatctgaaacaggtttgagagctaataaaaatggatcctcaaagaggcatatttaaaatgcaagacaattttaccttaataaataaccaagaaaatactcagttggcaaaatgttttgcaccatgaatata

SEQ ID NO: 60409 - DNA, 2035 bp, Homo sapiens
acagttgtatagataggaagttcttgtggatgctcctctaagtcgctatatcaatttgtgtgaatatatatatatagctatctacctgtctatatacctcctacagcatgtgtgtgctggctctaattctctgaagagaaaggtgaagagtccattgcttggaggttgggatagtcatgactcattagtgaggaacgaccaatccacagttactaccgcagagcatttcaataagtcttctgtttgtttaaagtactttaaattgttattattattattatttatctgactgaaataaaacttcagtccgaactttccccagtaatgggggtgaagagggggagtaaggttgtgtaggaagcatctcagtaatgccttgaactgcaatttaataagacaacaggctatgaagtcttctttgatcatgagtctgagaaattcaaaatataatctctctctttccctcttctctctctctccctctcccccctctcctctctctctctctctctctctctgtctctctctctctctctcacacacacacacacacacacacacacacacacacacacgaggtcaagacccgcagtgtcttagtgggttttcacctccacctccgtacaatcaagagggcagagaaggcgggggctggaggtggctgaaagggcagggatggcggtgaaacccgggaggaggcgacattcgtgtcaggtggcggtcccaggcagtgtccacaggcccggaagccgaggggaccaggcatcaagccccgcgtccagatccctgcacccgggggcgggacctggtgtcccgcggtccccgcccaggttcctggggcgcttttccgcaatggctggcgtggaagcgagagggggcccagtttttccttgccaggttgcgggtacagccagctccgcgccggggttgggcggcgcggccgggatgctgagagccctgcgtgctcagccaggggcgcagggcggcccttctgcccagcgcgccccgggcaccagggatggcttcccagctggaggccgggagggaggagagtaaatacccattctgcgggggcagccctcgggggatggttgcgaagggagaaacgaaaaataaatcagacaagagagccgtcccgcccctcctcgcccggtcctggcgggcggcgccactggtcctgcagcctcgggcgtgcccgcgcccccccgagcccagggggcgtcgcagcgggccgggcgggccaggactgcgcctgtgtgcgggtccccaggagcactgctcgcctgccagccccgcccggccgggcccctccggcgggatagagccctgctttgctcttttcgttggccaagcacaattgtgttattggagataatgaattcaatccccatcaaagggcattaggctcgcccggggcctggagttgctgatgcctttttttttttttttttcaaaccaggaatgaaaggctgaggggaaaaaaaaattctctgggggagcctttcccctgatcgctgcttttgaagtgaaggggcccgggcattgttgttcacctcgcggcccatacggctgaagaaagcctgggcttttgatgggctgagaaccgcctcggcagtgagcactccgtcgggccgcgcggcctgcgggcagcatatgtctcggggcacccgggcaccgtctggcgggtggggcccagggcccggtggggagggggttccgcccgggaggccggggctggaatgaggccggcacccggcggcggggacctttgggcttcaggcctccggccagggatctgccgttcctcccgcccacctggcgtagcgcaggagatccacctgtgtggctgatgagtccgactgggaggccgcacaattctttgggggtgagggtgggaaaagctggcttctccttgagggcaaggagcgggctggtctttatttttaagcactggaacccagcatctaaggtaactggctcagctagagattaatgagtctgagtccgtgaaggtgtgcactcgtcaagaggcctt

SEQ ID NO: 60410 - DNA, 11096 bp, Homo sapiens
aggcaagcaaaagaataacaaatgtactcctttttaaaagtgtgtgtgtgttgggggggggggcggggggattggctaaggaggtttccaatttaattcattgttcccaatttgcaggcaatagcaatgctttggggggaatttccaggttgtttttttccttggtttcagaaattaaataaagagaaaagaaaaagcccctgatgtgtaatcttgaaggggagttgagagacgtaaaaagttaaaccaaggcaacctcacacttaaattctgagtcaggcctgccgttggtgtcactggcctggttcttgatttcgccagtgacttgacccgcattccacctggattctgatgtattcgagcacgattctacttaagccctttccttcctggattttgagggagaatatcttgcctctgtcctttaggttgactggaacatagagaaccccaaaagatcacggagtggcacccagaaaaaggagggctccttatttcccgggactgcaagggggaggagtgctcactctcaccatgtgctttgctcttacactgtagtcacagctaacataattggagaaataaggaagttaaatagaaaaagaaaggtggcaagtgaggatttcccccttgtcaggtgttttaaaatgtttataacaggaaaattcatgcattttacaagttaaaattgaatggcatgggtattttccagccccagattgcttggtaaaatgatggtggagaacaaaaaggtgagggctgcagtcctagctggccaaagttcaaagaaccatgctgggctggggctaaaagaaaaaccaatggaattattatgcccccaaacttagctatttggaagaaaaaacacaagatttaaggtaatctgttgttaaatgttatttggatacactaacatcgtgcatgaaaataaaacttgtgtaagtggctactttaagaaacgctttacctttccaaatcaattctatttataaacaggaagattgtgaaatattcatgtttttttcatttcattttcttacattcttactctcatgagaatctattgattctaacgattctttcagtttgagaaaattttgtttttaaatttcagcataatttgattacctatttagttctagatatctttaaaacaatcatctttttgcatataactatcttggagtaattaggcatgctcttaactccatttagttgcaaaacacactttattacaattcaaataaacaattggtatttaatttttgaaggcaaaatatttcctacaaaggtataaaatgtctactaacttatttaagctattttatttttcaacgaattttttcctgttgacattgagggatcacattaaaatacattatagctaaatgttctacaatattactgctaaatcaacagaaaaccaattgatcttgaggaaaggttaattaatttgggtgacaggtcttctactttggccagcattggaaggaatttgtattgatctcggcagttttttgcaaagaaacttaagcatgtttgtggaattgagaccaattttttaaaatgccaaaacaagggcttacatttttatcacttcaggacttcttttctgttatggctcgttcaaatctgttagacttctaagaaatataatgtttttatgctttcagtgaaatcaattaggtatctagccttcagaaaatgaaaacagaggttgggagctttactaggatcttgtttgttttaatccctccttccctaataattctcatcagtttatcctgtatgagggggatcacaaagggacaatggaaattaaattttgcctttgatgtaaacactgtattagccatcatgtagaaaatggacggaactgccttctacttccgaacacctgtgagttgtttagtttttgctgaatagaactggtgagcttttcttcttccctatctttggttctgtttttgtcaccttaaaaatgtttcatacctgcccttcctaaatgcaaggtgagagtaacaattgcagctcccctcccctgtcctatgctcactcccaaaacatttgtttttttcttttttgtaaaaatgtttgctcggtagcgttggtgggtccgagcgccaccggagctgtacacttgggtcaggaggaaggctttccctcctcgcccctcttcgccccctccctcccctccccggggacccctcccccatctcgggcgaaattcctaagaccagcgagcaggagcaccgcggcgggacggtcagcagcccctttccggccctggtcttcgggagctggcgaggtgaagaaatgtggaaacacccagacgaaaaggggatggggtgggggtcgcaggaaggcggcgccctcaggcagggtctccgcactccctcggaaccacagatgttttcttcctgacccaggggcgcggcgccccagcccgggcgcccgggtgtttgtgtgtccgggtttccgaggaagggattacgcagcgggagcagccgcggcaacgcgggccgccggggccgcaggagccgtaacgaggcggctggccttctttgttgacttttaggtcccgggctcaacaggagatttattcgctaggaagggaaaatgcccaaacaatgaagaactatctgcacttgtcacctcgagacgcttgctgtcctgctctgtccgccttccctggcaaccagctgtcctggccgccaacccgcgcgcgtcctaacgcgcgggtggcaggtcgcatcacccagaggtggcggagtgtgcggtctgagaactgcgagaagcccacaaagcaggggctgggcctgcaggctccccgcggtccagctcccgaggcaggtctccaaagtgcccccgtcccccgcataactagaaaatgtctccggcaagtaacagagcgagagctaaggccaacttaagcttggtggggtgaaggcaaggcgctgatgtttctaatacgttgaaaaggagaaagggaacatcacagagaggacagcacagaagttaaacatcttagattcagtgggggcgggattccgaggcccaagcccacgcctttatattacatttggaagctgaatttgtttaccttatgtaaataagagtaactgttgggattggaagctttttcctctctttgggactttgatgtccttccgaggtctccaaattagggtttgaaattattcaaaccagtaatttccctcccctcctcctttcattaactgaagtgagtgggggtttgggatttctggattttttcaagtgctacatggcaccctttctctcatctggggaggcaattacgcgataattaagcgactcacacggctctttttatcttgtccgcggtgtggagtggggcgatcaaagtaaaggctgtccaagttcaagccctggtgaggatggagttcatacacaagggctcaggcaggcaggcctctgcttgagctggtgttgttattgttgatgtcaatccgaacaagacttacaaagaaataggtggactggaaagtgagcctgctatcaaaggagattaatgattttgtgatcccaagcaactatggagtgtgaagttgcatttaaaagctccttagaaggaaacaaattatcaactttaagttcttaggaacgacatttttgaatcaaaatttaaaacaatcttcacaaaatgcaaaatagcggctaccctaaaatgtcctgtcggtacaacgcttcccctgcgagagtgaattaactcccctcctcccacctcctccagagctaccctgatggctaagtttcgtttctcttttaatgagaagagagttcatgagtctccgttggacacaacttaattctatcagccacagctgatattttattttcattggaagaattctcagataaagaaaagtgatacattggggaaggaggaaaggtagttaaattaatatttgattttgtagtgaaaaggctcaaaggaaacacagaaggcttaagccggtgtcaaaaaaaaaaaaaaaaatgaagtaaacatcactgggaataaagaatcttaaaaatctcaactcttggaatattaaatcaacttatacactttacttgaatttctttcactcctttttactagctacacattcattataacaacagacaaaacaattttattttcatttttgtcatttatattcagttctagaatttgaaaaatatcgtattcagaaatattcacttcggatttagttaagtgaaaaaaaataacagaaatgctcttttgttaacatttgatttatttaaagtccttaactgcaaatgatcaagaacattttccacggcttaaaatctggtattatttttgttatttaaatcaaaatatttttaattacaatcacattgataaaaattaacaatttaatttgtaattttaaccatcatttaaagcaatttcagctgtaaagaaaaagaataaaccatgcaataaattaacattgagaaagcaaagagaaataataatgaaacccgtctggctatactaacaccatgtccaactgtggaaagtgcataacactggatgaaacaagcacacgatggcaatgattaaaatggccactatcaataggatttttgaatcttggaccacgttttgaaatccagctccctataacttatctctcctccaacattgtaatattcccttttactgaaaaaaaaattctttaaatggtatacactcatagaaactaattttatgtgttatgtgacctcagaatgacatgaccatggcactctgcaaagcaagaagcagagttcttgagggcaattcctgaggaattgattcccagggccatctgtgggtagagaggacaaaggggttggggtccttgtaactttcggtcaagcaactcttgagaatgtatcatgtatatcacctatctattacctctatatgttatgtaaatatacggaggatgtctacacatctgagcatgtgcataattaagtccatacacaatatacatgtatttcatttaaagacatctgctatctgcatgtatcagaaatgtaaactgagaagcaaatggctctgatgtttataatctgtttatgtcttgctatataacagcagtattgtctttcaatacttttaagagcctctagtgtatacttgtttcttcaccatttcaattcttatggttaagagtattgccacagacctgtaaactcgtagggggtcaggtaaggagggggaaaaagcacaaacaaatattttacaaacttgaccatcttccttttttgtttttttaaataaccctccacaaactagaatgtctggaggggaaagagggaagaaagagaggggggcaaggaaggaggagaatttcatatatacacttgtggatcattaaacttcgcaggaaaaaaattggtttggggttgtctttgtagtaatatacacaatgaattttgaatacaataataaagtaacagtcttttgcactgggggaaaggttgtgcatgaaaaatgaaataaaaatagttgttgggattttattatgctgttgacggtttggtttgtgtggttttgtttgctgttgattttttctctcttgctaccagcatggctatgccagacaaaccccccagtcccgggagctaggaagtgtttaggacgggtctggaatacacaccttggtagtacgccggctccagggctgagggctcgatggggctcctggtggtcaccgaggcgctgcctagaggcaggctggcgggcaacgtagagccgtaaggcgagtattgcagtgcctgttcgtatgccttgaagtccagcttatgctgctgctccgaggaggacatgaggttgttgatggagaacgggtggttgaaggagtagtgggggtcccctttcaggtgcagctgggactcgtggggtgccaagccgtgtgccgggtgagaggcgggcacagaggccagcgccccgggcccggagcttatggggggcgcagttgaggaggctggagtcttcaactccgaggcgccccctgtcgccgtcgccccactgtggtccagagtctgggggctggcggcgggcccgggggccggcgcgccctctagctggccggtcttcccgtgcacaccccgatggaggggcgagtcggcgctggggttagaggcgccagaggggtccttgcggctctcagggccgcccttggcgccgctgcccccgcttccgctcccgcccccgccgccggcccccggctgcttctcgcacttgaagcgcttctggcggcgcaagtagcagccgttctcgaacatgttgccggagtccgggtgcagcgtccagtaggagcccttgcccggcttgtccggggagcgtgccaccttgacgaagcagtcattgaaggacagcgagtggcggatggagttctgccagcgctgctggttctgccggtaataggggaagaggtccatgatccactggtagatctcgctcagcgtgagcatcttgctgggcgcctgctggatggccatggtgatgagcgagatgtacgagtagggcggcttggcgtgcgggtagctgcgcttgaacgtcttggcgtcgccgccgccgcccgcgcggctgcggcccaggttggacggcgcgtacgccatggggctcatgcacgggttcatggcggccgcgtaggggcccaggccattcatggaggccgcctgctgcgcacccatggcgcccatgccgctcgggctcagcgccgtacccatggccgtcacgccggccgcagtcatgctgttcatggcgcccgccgagccccccggcatgccggctactgcgccgggactcaggccggcccctaggcccgggttggcataggacatgttgaaggacgccggggtcatgttgccgctcgtagtcatggtgttcatggtcatgtaggtgttcatggagttcatggagcccaggcctgagttcatgttgctgaccgggacggaggagtaggcctggagtggagacagcgagtgaagaagccccggagggcggggttagtggtgggcactggagggcggccgtccgggacctaacccgggggcaagtgcagagcactttgcagaacacgggacgcccccacccggggcaaatggctaagcgccctccccagaccgagcaaagatgtcttgcacggcagggggaaaatcctagcgcggcaggcatgaaagataaacgctcacagaaaatatgaccccaggaagatgtgtaatcgccttacacgccaggctcaggggctggcttccagggccccctcatcgcctcctccatccacgccaggcggtatcccaagtctccaccccaaccagcctcggcaaagcgccctttggggggaaatcgttgatagagcaaatcacctatggacatgggaccccctgaatcatctgtttcccaacaagtggctttattgtcctaggggtttttgcctatggtgactttttgttgtttattgtatttagaagtagtgttttctacctgcttgtagcaactgtaatgttaaaagggaagcaaactcagagttaaataagttttggaaaaataaaactaaaagtagatccataacagaaagggctgggagggggtgctataataatctcaaagtgctatatgcattttattttaacatgactttacatgtacacctttgcaagctatttagaaactcgcattaattttgtcaccactttacagtcccctgtttgaaaaatttggtgacacagtttgtcaaaataaatcttttttttttttcacatgctgatgttgctgccgatgatttcaacgcctggctttgagattccgtgagtagtcttgaataatttaaaattcgaaaatcaaattctacttattttctcttaatgctattgtatttcctaattctcagctttaacatgtaagaaagtactttcgctaggggtcttaattgaatggtggggtcgagatgactgcgtcagaattaaatctctggaagacctctgagctccttttaaaatcatcaacaagcgaaaatccttatcaatagcgatgtgggaatgcattaggtacagtattttaaacatacaaaacctaggcatattaaaaagcactcctctggtaatttaataaggaataatgatgtccttaagtttattttaatcagcaagtatgactcaatttgaaaatatgagaacaaatagatttaaataggaacacccagtaaactatggtatgcaaataaactcagaggtaaacttgtgaatacataaatctaaataagtcagttaccatcaaaatattacgtgatcctatatttttctgtccacgtcttaaaagtattttttaccttggggctttattttctttccctcttcccaagattatccaaggcagttccaatacgcgttttcaataatggtaattaaacttttggagggtaatcgccagctgtttccagaaaaatacttttaataggtggtagtcctccctgtaactggttttccctgtaatccttttgtgcacattgtaaaaataacccccatgaacgtgccaccaaggggacaatgaagagaaacaggttctcggcccagagttgtgaagaagattttggtcgcactagcgccacccagcggttttagagaaggagcacacttctccccaaatagggcttttgaagaacaagttttacaaaatttagaaatcgtttcattattgagacacccaacttggcggcagagcgctttaatcagaagacgtctgcgaattaaacggtgggacgaagaggtcgccttgtgggtatgctccggctttctcagagttgcttccaactcgcaccggcgctcgcccgcccgctgcaccccgggcccggctcctgctcccgctcgctgctgggaagaggcaagcgcttcctagagccgctgttttcaaagcccggagtttcctaaaactccctctccggctgcgagagtcgggacagagcagggcagcaggtcccgcttccaggcccggccaaggcccggccggggccacaccggcgggcgggcagcggtggcaccgagaaggcgcccccggcccgcctgcctgccttgcctggcgcccaccgctccccggcctcccccggcacgggctccagcggcgccccaccggccgcccgcctcgccttgcctctcacctcctgcgtgtctgcgtagtagctgttccagtcgctggtttcatgcccttccatcttcacagttcctaacatcctggagccaccctgcccaatacaaccatccagccctgtgcgaagcgacgggcggccgcgcggcgcggggcgggggaggggagctgagcagctgcagtcacccgagcgcccgcgcgggcccaacgccacccgggcgaagaggaagcccagagctgcggggcgcggcgtgcgcggcggcggcggcggcgcggcgggcgggggcagcgccgggggcaggcggctgccgcggagcgcggcgccggggagcgcctccgcgggaagtgagcgggctgcctctgcgaggcaagtgcagttgagctgatgtggatcttacgtcgcttgagtgcccacctcctcgtcctctccccatttgtccgccgcacaaagacgctcgcacctacaaagcccgaggtgcacctgcaaggcggccgcccgccagtccggccgccgcgcctcccgccccgccgcttcaccgctgcgcgcgacccctcccccgcgacccctcccccaagcggggccctcactttgtttgcaaagcagtgtaattggtttaggcccggaggctagggaaagagggaaatggggagggagggggtgtaaccccctttggaaaaagaaaaaataggcggggccaggcgggcgggcgggctagggctctggatcggaacctcgcagccggagaaggccgggggcggtggcgtcggagactgggcttagagaccttgtgggataactgaccccggggtccctccccagaggtacacgccaccttccgagcgcgggctgcggcccagtctcgcgcccctcctgctctttgcttcctccctcctgattcctgacccaaagttcaaccccgggagactggagaatacagacttttttttttctttcctcctgagagcttcagactagaaaagggaaaaagccccacttttgcttcgtcactagaaaccgggtcatctgagtcagccgagccaagtgacgttaggccgacccgggccccgggctagcagagcggaggcgctgccacgaaactcgtacctgcggctaagagcaggtgagtcacagcaccggtttatatctttatgacataactttttttttttgttccgcctcggtccgctcctctccccttgtcatctgtagcgaccacaaagaggaagaaactgagagcagatgtctgtgtgatagggcaggcggacccaagtcgggccgtcctccccctgccgggctcctcctcccgccccccttcagccgcttcagggagtgagctggagacgaccgtctggtttctgataggaaaaggtcagggggaggggacatctcccataacacgcgcgttagctgggagagcaagggcctgggcgcgggaacgcatctgcactgcgaaagagatgccaggcagaagcccgagactgcccgcagcggcgcttggtcctgtctgtgacccggagggtccgggctgagatctcaggggctcgcttggttcctaatcggtcctggacgtcggtgggagagtcttcccaacgcaaagtctctttactctcatgaggccctgggtggtggttgcccacttgtcctgggagagagaacaactgaagtgaccgggtgataggcaattagttggtgatagattgggagatggtgcgtgtgttttgagtgtgtgaccgtttgtatatttctgagcatgtgtgactgtgtgtgtttctgagtgtctgtgaccatgtgtttgttgtactgcctgtagaaccactaggtttccttaagtaacaataaaataaaatctaaagtaattaagaatccgcaaaatcttcttgttttgcaaagtttttaaaatgttattaatctcattttaagaaa

SEQ ID NO: 60411 - DNA, 1273 bp, Homo sapiens
tgtgcgccgagctggggaaggggccagggagccgcgagactgcggtcccccgcgagagagaagtatgggcctggccagggttcgaactccgttccttcgctgccttccttttatttttcttcctcatcttccttcctctctcccttggttccatcattaaatctttaagggattaattcacaactctgtagtaggtaggggccctgggaccacttgacgggcctttgcaggcagttctgtacagagtcctaacccgtaacgggcctcaaccccggctgtgtgtgcgtgtgcttgtgtctgtgtgtctttgtgtgtaaaagcaacgcataaacatacccagggctttcacttattttattgaagcaaacaaacaaaaacagccactgggtttgtcttttcccctactcctgcctgagcgccgccgggtttctgagctgctccgggcgcggacctagctcacccgcagccggatgtcggagccggagctgctccccacccggcctcgcccgcgggcgacaaaaccgtccctctggccacgggagagcatcgccttgccaaaatcaactcgcattttcatgtattcaaatgagaaagactgagaagggcgatttcccctgctgggcagtcgacagcgttggaaggaagaagtgccccctagggcctcgcggaaacgggaacaaacctccctcgaggcccccggaaccgatatggcgaccccgcccagacctgggtccccgcggccgcgcgcgtctcccgccgttgtggcccccgagttactgacttttgttcacaccggtcagcgcctgttggaggacgtgctcagccccagccggtccctcctcatccagccgatccccctcctggggagcgcggtctctgctctgtgctgctgaaaggatcctcgggctttcccgctctactttaaaacccctagggctaggggcctaggggagggactggcaatgcacgcttcacacaaagaggtggaaaattagagggaaacgtgacacctcttaggtatccgttagagcagaaaggacctgagcagctgaggtcctactgcgtgccacagacttggcagggtgcttggagatcctggcgtttccccacctgctgctcctgtgtgcaagagctgggaggctggaaacctgggcgagggtaggtcaggacctccattcctctccatcagcagaagcccgcgttaatgcagagcagtgatggaagccgaggggcttggaaaagtcaactatttcatctcctgcctcaaggctgg

SEQ ID NO: 60412 - DNA, 1100 bp, Homo sapiens
ttatttgccacgaaagcaggagttgggggagacgttacaagagtaaatatgcctacctcctcttctgggctgctatcactcgagaaggcacaaggctgtgcgatcctccgccgcatctggtgtcctcgatgttcctcccacccccactgtcccaccgggtggatgaacccactgaacccacggttcagccgtggctccgatgcggcggaggatctgcaccccaaccttcctgctttcaggtcctcttctccaaactgcaccttacccctgccccagtcaccgcggtgggggagagggggtcggaacttggatcaagcctcacccaccttagagactcaggtttcgagttttagcagatctggtgtagatttgttttctttcaaatgcttgaggatgcagttggtggcatggatcccactcttctcaccccactggcctcctcccgccaaaataccttccattgtgaattgctggtctccactgacctcctcatgaacctctccctacacccccgccaagagaagtagtttcaataaataaagcccagtgctggggttgaaggtcagtttacactgcagcaggagcttcacaaattcctgcaggtgctggatgggaataaaccactgtcccaagagatgacagagagagagaagaagcgaagactgcagaagctgtgtggagatgcggacctggcgttaggattggggtggggcagcatggttctgacgctgaccgcagtgctgccgacctctaatatgctagggaacccagccaggccctctgtgcctccgtttcctcttttcccaagtgaggagcctggacctgatgcccggattctggcaatcgtcagttgtaggaacaaagtctggagtagtggctggcatgagagtcagccctgacgacctcacccagggaaatgaggaacccgtgtgaacctaagaaggaaaccgctatggtggttgtggtggtgggtggctcagctccagaagtggtgaagcgactttcccgaaagggaggaagactctgggataattggcaccgcaaaaatttccttcctttttgctgaatatccaggtttgtggtatacggtttatggtaaa

SEQ ID NO: 60413 - DNA, 1131 bp, Homo sapiens
gttaaaccttctcacaggaaaagttggtggcagattttacagttagtgctatactttatgcttttttctttttctgtttttgacaaatgtacttactttcatgatgtaacaatagctggaaaaaataactgtttgtgagactgaagaaaattaaatgttagcatgttagatttgatatttttggtcattgtaatgcctgatttggatcaattgcttattatattggttaatttttttatgataaaataaaaaacaagccaacacaaaatgtgcataagccatctgcttggtaatttagatggcattatttttctctaccattaatatcatgcttcatcctcacatccataattttaatggagtttctcgttacacaggaatacaaccacaattttaaataatagtgtggaaatgcaatttagattatgatttacattttgctagtcaccttgttgaaactctgattttctccttatttcaccactaagtttttatgggttagtttcttctagattcttcttcatttaactcttaatgggggtttgaagaagctttaattattagcttttgttgttgcttagggaactaactgaaaggtatgctggacatggaagacagcctttttatggccagctcaaactttgtaaatggatattactcacaatttagtagctgagaatagactcatgggaaaagaattccaaagtttatgaaacagtcaaattggcatttaagtgaccctgtacataccattgcttatctgcattgctttaagctcatttagttagcaagattatgtattaaaacaaatagtcacagcagacaacaagtattttaccttcaataaatagttactgtcagattatcaatgaagcagaaacttcttgatttttttttctaaaaaaccttgcatttagtgcattaagcagagtagtatggccacacacagagtcagagtcttttcttttttatgtcttagtgtttcaaagaatgacaaatagtcctgtttaagaagagtgtgctataaaaacacacagcctttcctgagcatgccaaaaatatttgtagatcttgttgatatatatatattactgctttaattcattaaaacaaaaattagaaattttcatt

SEQ ID NO: 60414 - DNA, 915 bp, Homo sapiens
gagctttttgaaattaacttcatggaaaactgtcattaagttttaaaataatgaaaaaacattctgcttggtgtatgattgctatggacaggatacaactcaatggaaggcagccttctatttagaacttctggcttcattttgtttagtaaagcaaaataaaaacactaataccatgtagaccatatgttcagggagaaatatagactgaaagttaaatgcactagtcagaaagtcaaactgtaaatcacagaatttaattaaaaattcccctttttttccaaagaaggatttatgaaaagggaaggtgtcagaaagagtaactaatcatgccaattccttgccaaccagcagactgtttacttaatctatccaaggtaaactttgaacttgacacaggaaattcatggagcatggctcccataatgaccacagtggttttcttttggacatttttgagccagaaagaaaaagaaaagagtgtcagtttcaaagagacagaaaacaggaagtaggaactttggtgtctaggcaaggggtcagggattctgtgaggttggattattggatgggtggttttcattttgaaatagaggcatcaaacatgataatttctaaggttatttctctactgaaaatcagttgattttaagagagataaataacatttatttgatacagaaaagctgtgttaatatgtacgtggagaggattttaaccccaagccaccaaacccttgaatatgactgtttctcactgtcactcgtggccaatagaacatagcctgaggtaaagactctttagttgagaaaaactaagcttgtgactcaagataacggaaaggtaaatcaaagaagagtaaagttttgctaaaagtctaggagacttcaggaattctgttcctagcgcagacct

SEQ ID NO: 60415 - DNA, 828 bp, Homo sapiens
ctggaaactttggctttagggcagccccaagactgattgaggtgaatatggttgtccctccagtatctggattgagcaagtgaaatatctctctgggggcggaggagtgcctgcctgcagggacagggtaggacgggggacaggggaagggtatccacgtctgcagccaggccagcacaacaaggccttgtttctcctccactgcaaaaagactggatgcttcactgttttgtacttcatttcctttgagctgctgccctctctcctcctctgccaagtgcatgagtttggcagggaggttggcaagcatttcacaagacggtaaaggttaaggtacagtggaggttgtttagtgcagaattgtaaatatttgttaaaaggtttgtggagctgcttcttttgatacctctaatccaccgagacagaaataacttcaaagccatgcctagtctgacttggtcctcaaccaaaggaaaaaatcagctactgctaaaatatgttttcactcacagccaggcagcctgccttagcaggcgtcctgaaggatgaatcatagtttaattgtctttgggcacttgcacatctgcttaggatcgtcaacagggcaggagctgagctgcatgaataaatgtgaagaagcctttagtttacacggttccatgctgtcaacagcagaacgagaagtccgttcagaaggatgggctgagccagctcgcctgcccacacagaaggaaggcttcccagtgtgctacttggaatgtagggagaacagcatttctctacaatttggggcttctccagggatttcagagtaaggatttccaaatc

SEQ ID NO: 60416 - DNA, 923 bp, Homo sapiens
ctgacgcagaacgtgaaaactagaagcgttcattagcgaccaccctttgtttgactgatgaggaaatcaaggctgatggtgagtggctggccccaatgtactgctctcttgttgtgtttgacttagatctttggtctcctgcccgggattggtgttctttctgctgtcacaaagtgctccctccagtgagtgtattcgatccatgtgaacatctcccttcaggccgctggtggtctcagcgcctgcttttcccctgtcctcttaggcatgctctgatgtgaactattttggagctgcctttgggctgagtttggccggatccagtgcactttaacctgccctctgctgccctctgctggcgacatctgggctttgctgttcacccttttgggcgtggccccaccacttcctttctgtgaagaacattctttgcgtctgggcatgattgtgccctctgacctgtgccaatccatgttgactagtcccgtctgttacctgggagcttgttaggaatgcagaaccctaggccccactctatatttattgaatcagaatctgcattttaactagatcccaagtgattcatatgcacattaaagtttgagaagcactgttctgggtcaaactcagctacattcaggaaacagtcgagatcaatcttttctactcagtaattatcttggatcactctaatacctgttccagttctgtcacttggtaatgatgatttctggtccagatgcttttttctgcctggacggctgtctgcaataacagagaacaggaagtgccatacttggaattctaaattttaaaaatccactaaattaaaagctgagatggcaggaaggcatagcacgtgtattgtgctacaatatttcaatcctcctgcatcttttcccctttacctcccacaattaata

SEQ ID NO: 60417 - DNA, 2318 bp, Homo sapiens
ctgagacttacagtacagcgggcacagcctggttgaggagaaggagaaactaaggaaaaactggagacagcaaagcttgaaggaggcagagcactaagctgctgcgggtcactcttcctgtgaacaggctagtttcaaataaaggcttgcagggatcttaccgagcaaagcaacgtttatgaaaaggaacagggaagttgcatggagtgtgattcttccttccacaggaacagttggaaagccaaagagaccctagagtaagaatggtggtaagtcccagggttcgtttaaaatcctgataacggaacatacattctttcttacgggaaaaccgttttgattcttaaatgaagtcagtgagcttcaggcttgcctacattgatatctcctaatggtttgggcacgtgacccagagccagctcacaaatcaagcctcagaaagagctgacatcctagctcttcccggaaaaactcgaatgtcgccctgccgttcctggggttggtgacaggtctggtcatcgcacggcggcagctcctcacctggatttagaagagctggcgtccccgcccgcccaagcctttaaactctcgtctgccagaacccgccaactctccagggtacaaagtacagcagggacgcgggtggagcccttccaagcggcgcagccttatctttcccgagtgaacacctaggtggattcccaacaccgcgcctggcacgtttctggagggagtctcaagctcctccagagctcccagctgcgcgtcctcgtttctgcagtcgatattcctgtgggagacacggggggctctgagcgctacgagctttattaagagatttgcgaatggttcactcaggtccctgaacactcccaatagcctaagctgcctgctgtgttatagcgcagaagcccctaacgcacggtggttgtcctttcttctcataacgctcgcagcttagggccagtttccgcgattctaagagtaattgcgtgggcacctgtgctggggccaggcgcaaagaagggagttggtctgcgcgaagatcgtcaacctgctaacagaccgcacatgcactttgcaccgaccatctacgtctcagtctggaggttgcgcactttgggtaaggagggcccggaacttccctggcgggtctgagctgcaaggcaagcgagggtgggaagagggaatttagggttctggactgcgggacgggagagaagctggggtctccagagaaaagggcagcaatggagggaaactgagatgaactccagacatccatgttcatggatccgtttgagtctttgctttgggtaggagaggagtggaatgagacagaatctatacctttggttcccacccgccctccagtaaggccgaggaactctcttggttcctctgagagcaagaggcagatggtgctgcgagggaaccccggaaggagccactaaagttgagcagagtgcaggactgggaaggaaaaaaatggggggcgggggggacaagccacctatgtgctctcctccctttctccaccccacccccttttttcgtagctgctgacgcgctggtggtgcctattaatcatttaccagtccagagccgcgccagttaatggctgtgccgtgcggtgctcccacatcctggcctctcctctccacggtcgcctgtgcccgggcaccccggagctgcaaactgcagagcccaggcaaccgctgggctgtgcgccccgccggcgccggtaggagccgcgctccccgcagcggttgcgctctacccggaggcgctgggcggctgtgggctgcaggcaagcggtcgggtggggagggagggcgcaggcggcgggtgcgcgaggagaaagccccagccctggcagccccactggcccccctcagctgggatgttccccaatggcaccgcctcctctccttcctcctctcctagccccagcccgggcagctgcggcgaaggcggcggcagcaggggccccggggccggcgctgcggacggcatggaggagccagggcgaaatgcgtcccagaacgggaccttgagcgagggccagggcagcgccatcctgatctctttcatctactccgtggtgtgcctggtggggctgtgtgggaactctatggtcatctacgtgatcctgcgctatgccaagatgaagacggccaccaacatctacatcctaaatctggccattgctgatgagctgctcatgctcagcgtgcccttcctagtcacctccacgttgttgcgccactggcccttcggtgcgctgctctgccgcctcgtgctcagcgtggacgcgg

SEQ ID NO: 60418 - DNA, 608 bp, Homo sapiens
cagccgatatgttagatagggaaaaaattcatatcttcatagccatttcctctcatttgaagggagatcagggcaaaaattagaatatatgcataatatttaataattttaggtttgtctaagaccccaaaccggataattctaagtccataaatctttcctaactgtttaaattccaatttatttcagcgtcatgagtcattaaagcagagagttcgtgagagaggaaagcagttggctcatgttccaaaacaactctgagtgtttactggacttcaggaagcttatcttggtacactcagatcaaagctattcacacaatgactgaataaacacattggctaatgatgatggcaaagattctgatacgatactaaggaaaatacaaatactaggacaagaaaactttgaaaagcattaagaatttaattgggaagtaaaccttttcacttcatgggaacgagtgtgctaagtcatcaatctaagcatgtgctggtgtgaattgcataactgcaactcttattagacaattattatttgaatacttattctggtatattctcctaggctatcatatcacttttaaataatacatttaaaattattgc

SEQ ID NO: 60419 - DNA, 1019 bp, Homo sapiens
acttgtttaagaatatggcaacatctctgcatttaataagatcgctaatgttgattggggaattccagcctatttatagaaataaatgataggttggtaagtaatttaaaaaactgctctataaatacaaatatgtagaacctggccatactaatacaatactaactgacaacactgagtgtagaatatccccttagaaatgagcaacatttaaaatatgagagataatgaaggatgggtgagttttcatctactttcaagatgtcagaggcctctggggtagcttataaaagctggagctttataaaggtataaaaagcaaaatagatgttcccaatgtagatataattaatgtataattaagagaaaaagttgagaagttaaagcagagagtaaagatgcatcagcaaatgggtggcaccaaatatagacatgatcagaatcacaaacacaggaaaataaaacagaaagagaaacagatgtgtcatagtcttggcaaggagacaagatacaaaggtgaatgttggttgggcagcaaaactgaccataataagcaactatgggaaaatgaggtgttttttacagcaatttaaagaaaggcttagaggggagtgttagcaatattaagtctgaaaaagggaaaaaaaaaggatttaactgcagacattacagtgaacacaattaatttgctgatctgaagaataaacatttgagtgggttgaatgatctcagaattgatttcagcaaagcttctgagtatagcctgggcaaacacttggtggtccttagtctacctagaagaaagagtgaccagtgctgtgaaacgaagcttgccacccatgatgtgctaaagaggagaaacggaggatactaggaagtagaggaaatgctctactgcacaggctgaggaacaagggcccaaagacaagacacagagaggaaggaattagctaagacacggaggaagtggaggaagggttcttataatttgagaataaaaggtttcaatggacaatgac

SEQ ID NO: 60420 - DNA, 819 bp, Homo sapiens
atgcttaacatcactaagaaaaataaatctatagttgtcgattacaggaagaaatgtgcttgtcctctcagggagccactgtttagccagcccctccaagacaggtcctgtgaggcttggttcagccccatttacctagaaattaatcattaagccaggctgttcttcgttaagaagccaatgaagtcggtctgccatagtcccagaaatacggcttgtgaaagactgcttgagttactccaaaaagaaaccaaatcataggcacttagaataccctgagaaagctcaagaaaggggggaaatggcatgaacacttggcaaagaaagctcagcaattttctttttaattattgagataagagagtgagtttggtttcatttagctgttcaaatagaaatctatttaaatatttaaacagaaaagcctcctgatctaccatcctgccctcctgtaacagctatggcctctccacagagatgaattttatagtggatttggtttgggaaacttctgttttatgggttagaaattgatttcaagagcattcagcagagtaaaatacacacaattgtgtatttgctttgggggtaagtccacactcccttgcagtacaaactaaatctcctgctggtaaacactaggatgtttggcgtttgaattgcttctcttttagagatgtggtcctgataatctctttcacaaactattaagggcccaaaccctccacgaatgcctggcccttacttcctgggcatcatcctgtgctgtgtttcttcattctatttggacaaataaaattcaacaacatcaaagcaaca

SEQ ID NO: 60421 - DNA, 1346 bp, Homo sapiens
ttaaagtataataataataaaatttaaaaaatatatttaaaaaaaaagacagattaccacggagaaaagtagatgaggtggtgcatgtttccacctagcacaggacctagccattgttaaacagggttttgtctatggcttatagtgacctttaagtctattagataaaagtgacccgaaatcagtctgctagagtctttaccattagttggggaggctggaagagagtataattagtctacttaattatcattattcttactaaggaaactttttcctatcaagtcatttcataggttcagcaaccagtctatggattaggtgcccttaggaaacttgatcccacccctttgcttaaggaagagacggaggctggctccttagtccagcagagagatgcaagcaggaggatgtggacatgctgattgacatgactagtatactaatgttaagaattagggttttctactctgtacagataactttagactttattaattaacagatcttatctgctatgggaacagatccaaatttaacatacagcatagctacattataattaaacacattttgtgatcacatccttcttaataaataaaagtaagctctggacatgtttaaacatgtttctatttgacaatcacagcttcagtaatctatttaataataagaaatccccgaatcactccacagagctattattttgtggaaggtcctgcagaaaggggaggatttttaacccagttagtttccttcaacagatacaggcagattcttaagtgttacagatagctaatgataccaacttaaaaccaaaaggggcagatggggaagcagatgtagctgtcaccgtatatataggctgagtacgcacagcaggtgcactgaatgttcttgccaaagaacctgcaataataaaacattagctccctgaaaccatgctggactttagactccaaatggaaaataatcattagagtcatttacaacaagccatgtcagaagtgtgtatggcactcaataagtaaatataatttaaaaggcccaatgtaaatatgcaagaagataagaagagtcaccacataacaaacacaaaaatagaagtctgttggtccaaagtctgctcagagactgtcacatttacttctctaactccaggcagagtgatgtctatctatactgtaatagttagctaatcaattaacaaacatacctaattaagaacattgcataacatgccttggcaatgtattttatggtcctaaaaagtaggagatatcttccttaaaataattaaagaccttttttttttttgagatggagtctcactctgttgcccaggc

SEQ ID NO: 60422 - DNA, 540 bp, Homo sapiens
gcataaaggcagccacataaaaggaccctaggggtcaatgcctaacctctataagaaaatggtaatgacaaaagcggtatctgtaaaaacagtaaagctaaagtgtttcatcccattggtgcagcaagagaaaacctggcttgcagggaaagtcccaatagtcttaagacagaagatttcctgagtcaagtctgattagatgaagtgtttacccaggatggctagcaatgcagctgaagggagaacacaattagtggttgatgggtaaaccaaaggtcagagatgaatcagccatcaattttaagttgtgaaacagaaaaggccaggagtcaaaaaggaagccgggagcagtggcacaggcctgtagttcctgctccttgggaggctgaggtgggaggatcacttgagcccaggagttcaagtccagcctgggtaagtaatatggcaagatcccatctcaaaagaaggaaagaaaggaagaaagaaagaaagaaagaaagagatgaacagatccctgaagttggatgcacaatggatccg

SEQ ID NO: 60423 - DNA, 2501 bp, Homo sapiens
gttccttccaattacatgtatttgttagttgccaattaaatttgtctcctacttttcacttccaaaatcctcaatgaattgtcttcttatgatcttggacaattaacctctctgaatcctgtttttctcatcagcaaaataagagacttggactagaaaatcacaaggtcccatctaactctaaaattctgtaagtcaattaaaaatagctggactctggccgggcgcagtggctcatgcctgtgatcccagcactttgggaggccgaggcgggcggatcacctgaggtcaggagttcgagaccagcctggccaacatggtgaaaccccgtctctactaaagatacaaaaattagccgggcatagtagctcgcccctgtaatcccagctactcgggaggctgaagcaggagaatcgcttgaaccagggaggcggaggttgcagtgagccgagattgcgccactgcactccagcctgggcgacaaagcaagactccgtctcagaaaaaaaaaaaatagctggacttctgaaatgatgttcattcactaccagaggagaaagagaaggaaaactcaacatgcatttatatttaaatctaaaacctttttaaaccaagttaatttggctagttatccatggctttggacggtagaggttgagggagttcaagtgaaaacgagaattccacatccccacttcagtgattgatgtagatttactatgaccttcctcaggcagtacctttaccaccaaatcgggaaacactacctaccgtagaaagaaagcccagtgagatagggctggtcctgctggaaaactgaactctttgtaatcaaaacccaaggcattatctttaccaagctcttttcccctttaacccctttaacttccaaggctgaattacggtgacgtagtcaattgggttcaaagtctaggacactccatatctggcaaggaatgaaacagtaagtccaagggcccagaggcgatgatggacttgggtggaggtgggtggcccaggaggtgggggtgggtgctgggcgagatgctcgaaccaccgttttccacatctttccacctaatccaggggagctggaggaggccgggcccccggccccggcagagcgaagtgggtgagagggtggcaagctcagcactcaacgctccccgcgccggaccgggcctcagcctccagcacacctcgctggccccggggcaccgagagggcagagccgggaccaccccaggatcccagcccccagcccgccgccgccagcccgcccccgctccccgctgcgcacctgcggtcccccaggagcggagacgaggcggccctttcctcactgtccccctgcaggacccgtcgcagcctccgctttgcaaaatctgtcctctccgcccagcaggagcagtccgtggcaccgcaatcaggggtggcgccaccccgccccgggcctcagcgaagacctccgcccggccaacatggctggcgccgcctctgccacgtcaagaggaggggacggggcgtgagggcaggaagggggcaggaaggggcgggcgcagagttaccagggcaggccaccggacccctgagcttgcttaataaccggaggatttgagaaaggcgcgcggcgggcgaaggtaccgagaggggaggagggaggagaggtagcggggaccgagccagaggggcggaagaacccggaagacccaggcagccggacggccgaggggcgtgggaccgggcagagcgggaccgggagagagcgcctttcccagctccctaaagccacagcgtatcccactccctgcaggtcgcagaaagagtggagaactggtgccactcggacaccttagctcaccgagagaaatggagacggcctccaggacatcttaggaccctggttgattccgagaatcacaaatcacatctctgaaaaaagtgaaaagttcattctttcacttagtgcaacaaatgtttactgaaacttactatgtgccagacacaattgagatgctggtaatatgatgcaggcaaagtaggcccagatccctggcccgaaagaattcacgtactatttatgtattttagtcagcctgtcttttcctcctacattgcctctgccacttcaactctgtctccccccacccccaaaacacacacacagtacaatatttggctgattcatcttgatatgttcaatgtttttctttccaagaaaaaagttgaacaaaatgagaaagcaacagattggtaagacattagagcttggtggtctcagacaaccccttccttcagtgaggggaatgaaattaagtgcccatggaattaattgcatatatgacaacgcctaaaagcctgcaaagtttagccatatcaacattttatggaatggaaaaaaagatcaagtccctgtccttgaaagctcatattcatgagaaataagacagcagcaccaggctgggcgcggtggctcacgcctgtaatcccaacactttggg

SEQ ID NO: 60424 - DNA, 2214 bp, Homo sapiens
cttcacctctcaattcttctcactctctattcagtctagtccaaagaaatgcttaagtgtatttaaatccaccactctttcatacctctaccactttatctttgcctaggatacatttcctatccccactctccactcattttttatcaatagcattaaagaaagggctcctgacttgagcatgactttggagtatttctaaaatccgttacaactccatgattctaccagccaatactcagtgttaactattcattaaatcactattccctaaatactgtgaggcaggagtattattttatttaatttatctagcagtgtcagcagtgacaggcccacaatgattgaataaggactcccacatattagaagtaaccgctacatactatcacatttcggattaaattagattaaaaaaaaatctctacaaggatggggccattgtttcattcactactatatccctggcacctagaaatcgctctgacataagggcactaaataaatactttctgaaataattaatttaaattatgttccctaattatcctaacgcctgcaaactttcctttgcaaactcaaccttcattaggcttcaggtctcaagttgtgtggagttgtactgagcattaggaatgaggaaggagggacaggcttctcaggttggcacaggtctgtccagtgcatggctcaagtgctggaagtgccagcaaaactaagtaggctctgcagttaaccctctcgtaaataatggcagggacaacactaaaagtaccaaaatctgtggcgtgcaagacaaacgtacgggaatagacaaaagagaatcaaatagaagaagatacgaaagagaaaacgatgaaagatgacggttcaaaggagacaactgacaggttctagggtttaggacacctggaggtggaccattttgtgtacacctcgggaggcgtcgggtggcgatgggacaggggttgaaggaaagcactgaggggaaacaaggtgtgtcaccgcaaaaggacctcaaggttgtgtggcagcactcaccacctccccctgctccgcggacttgtacactccagacaccatctcgttatggagaagcaaaaacaacgcctcatccgccatttcctgctaattcttccaagcttcgagttttggctcccgtttgagctggtctgggggttccagctcgcgcctcagcgacttcgccggcgccgcggctccgtcaggccgccattctatccctgtggctaagagaccgaggtattcacacgacttcccaaaggctggtactgaaatgagtctggtactggagagagcccacacttcggggctaccaaatcctagggccgaactaaagtctgacgggagctctaaccaaagccaaccagctgagatgcgatccggccgctgggcgggggcgaaaaaaacaacttccggtcccctctaccccggcattcggccagctctatgatcactgagttcctctctcccaagcccggagaggccagcgcccagatatgaggaaggttcccctctcaccacgatgtcgggggcagagcaagataaaataagacctaaagctcccgcctggcccgggcgcggtggctcacgcctgtaatcccagcactttgggtggcggaggcgggtggatcacatgaggtcggaagttcgaaccagcctgagaaaccccgtctctactataagtacaaaattagcggggcctggtggtgcatgcctgtaatcccagctactcgggagtctgaggcaggagaatcgcttgaactcgggaggcggaggttgcggtgagctgagatcgcgccactgcactccagcctgggcaacaagagtgaaactccgtctcaaaaaaaaaaaaaaaaaaagagctcccgcggccacctccttgttaattagcaatagaagttaaaaaaattcttttggcttcatcaaaagcatccacttcctgccatatgttcttcaaatatgaaaagttgtagaaagagtttaaaatatacgttttcacagtgcaaattttttaaatattgaaaagttatcccaattcctattgaattaagcccgggtatacaaaaagaattagagccattttgaccaccaggaattttcctgttagtggggtgcaagggacaagggaagtggagcaaacgaaaaacaagatacacttgaaccggaaaatacagactaatcagaggattaggt

SEQ ID NO: 60425 - DNA, 2603 bp, Homo sapiens
cacagacaccactaacaacagggccgctcccttaggtctggtcttaaccagctctaggccaggtgaagaggctaactcaaccatgactgcgtgtctgtctcgccattgctttcttttctctagtatagatgctcagcgtctaatcagagactgattctcaactggcgtgaccaaaggacagttatattatctccagtctcaatttccttatcagtaataacaggcattttatccacactttcagtttgtgagaaataaggcatgtagacggtttcacagagggtcgggaacaagatcaacccctaacaaacgttagccattatgactaatgacttttactagttttcatttttgtcttccctcttctcactttaacctaatcaggctgggcgtggtggctcacgcctgtaatcccagcaccctgggaggtcgaggcaggcgaatcacctgaggtcaggagttcgagaccagcctgcccaacatggtggaatccggtctctaataatacaaaaattagccaggcgtgttggcgcgcgcctgtagtcccaggtactcaggaggctgaggcaggagaatcgcttgaacccgggaggaggaggttgcagtgagccgagatggtgccactgcactccagcctggacgacagagcgagactccgtgtgaaaaaaaaaaaattaacctaatagaggaaagcacgcgcccaccccctctctgagcatgcgcaccaacagaatagccgcgccctttcctaattaaatcattaaccaaggtgagggtaaggaagaaaaggaggcttggctaagtcccactctgatgtgatcacgttaaaacggtgtaaggcacattacatcataggttaaaaggcctagaaaactccgcgctccccttgccagaactgcagactcgcgagcctaagtctccgagaactcagggattgtgaaacccgccccgactctgcgctagcagcgggatccaggcacccgcagctaactggggagggagatgactgcctggctgacttttcattggctcagagtcacaaaggctgcaggttcttcccccttccggtcgctgagtggttgaggccggaagacaacgctcatcgtcattggctgagcccggctgtcagtcctttcgcgcctcggcggcgcggcatagcccggctcggcctgtaaagcagtctcaagcctgccgcagggagaagatggcggtcgccgtgagaactttgcaggaacagctggaaaaggccaaagagagtcttaagaacgtggatgagaacattcgcaagctcaccgggcgggatccgaatgacgtgaggtaagggcctaacgggaactcggaactcggagctcggagaggcagccctcaggtcggggtgaattgggggcggggagggcggccagccttaagaagactggaacctcgaggcctgttcgcggggcggcgggtaaaaccctgttgtcgccgaggtggagaggccccaggtcccctccgtagagcgctggtctcaggtccctgaggaaggagagcgaggcctgggtgcgccggcatgctttcttggcctgtgagaagacccggactgctgattcccgctctcggccctgcaggcccggaactgcagcacaaagccccttcccgctccggcggacacccggcccgttgctggccccgagaccctgccgggacgcaacaagccgccttaccccagcttcctgtccacgtgcagcctcctcggggatggcgggatggggacctgatccaggcttgttaatgtgtgggggcatcgaggtgaatataatttctgtgacacaggtcctggagaaacgaggaagttaaatgaaatagtacttcctgtcctgtttcagacatttagatttatttgaaactatctttttggaacttttgtgattttttctccttatgatccacatctctgaaagtatttgggtgcgactgtgtgtgtctacatatgattttgcactgatttgtaaatcttttacaggcccatccaagccagattgctggccctttctggtcctggtggaggtagaggacgtggtagtttattactgaggtaagatttcctttggactttactcatgctgaaactactggtactttactaaatatgttggtttgaacaaaacctgtgataaaatcaataacccagtgtttgtcgtctttgttttgtttaatgttgtaatagactagatttctgtataaatatagttatcctgaaaaactggaggttgaagaatatattaagtttaccaattttgagtgaacttaattcttataaagtaacactataaaagcattttggaatgaatgcccgtttaaggctactttagttggaaagatttttgaaagtttaaccatattctcttgtcaaatggaaataccatttatcttgtatttcaagtgttttatgttgaacattttaaatttcaggcgtggattctcagatagtggaggaggacccccagccaaacagagagaccttgaaggggcagtcagtaggtaggtttaaaaaaagattcctgaaggcttctttagtttctgaggtaccacacaaatataaatgtttattaacaataattctg

SEQ ID NO: 60426 - DNA, 1212 bp, Homo sapiens
gtaagtacttactacatttcaactattgttcttaactaaataagttttaacttcatagtaacaataaggggtttttaaatagaaaagtggaatctttttaaaaatacttttcaccatatttcaaagccattcttttaacataaattattactctttttgcacacagctatatacgttatccactgaaattagtatttgcaggtaactacccttttgcggaggcctacttaaaaactatcctgttgaacacaaggtacctttaagtgagacagttttacatgggcttcctttataacacattagtccaactaaaaatccttgttaattattaaacccttaggtattacaggaatacctgacactgcagattgaaaacagacagtgtttgtctctcaagttaaaccaacaagccgatagaaaaaggtagttatcaagagatttttaaaacttcaaccctttttctcttatagttagtgaagagagtagaatatctccagttttggctgacatctctacaacctgaacaattggcttaaacttcacttgggattcccggttgcttgttttagcatggcaaaatttggcgttcacagaatccttcttctggctatttctctgacaaagtgtctggagagtacaaaactgctggcagaccttaaaaaatgtggtgacttggaatgtgaaggtaagtttgcttcccccgcttcttctcctcctaaattgaggctctgcaatgacataaaatcttattgtggtcacgcatgataaaaatgagtattgataccattgagaaatatttggattatgaagtacagcttggtataaaaaagaaatgttggaagcaaagcattttgtggtagtatttaatacaaatatacaaatagcaaaaatcagtctgctatagaaatatatcagaagttaaaaaactagtcagtccttttactatttttaaagattaatctaggagtctctgagcctattctggctcagaaggctgcccattaaaaaaaaaagataaatctaattgattcatataaaaaaagacatcaggctaatttgataggcctttatttatgaaggccttttactttttagtttctgtttcacactcagaactttctgattctcatgacgttcctaaaaagtgtttttatttcaaaccatcatgatttattcttctaaactttactaaatgttaatcatttctgtgtt

SEQ ID NO: 60427 - DNA, 3146 bp, Homo sapiens
cattttagtttttatcagttatcaaattcaggatttttcttttcaattatagattgtaagagggtagtaatatgtacattttaaaaaacatatataggtgcatatgtatgtgtgtgagtatatatatatatatatacttaacaacgagtgaggtccatgaaattgggttatgggttggtagtcacaactccacctgtagcacccctttaccacacaaatgtcaaaacgggatcacagtgtggaaacagaagagtgcaggatatattagaatctgaaatctttctcaaggatatgaggtgcctggtagaactttatttacatgttaggaaattttaacatgagcttttcaagaaatggaattgaaaagtccagaggaagaggtgagtttataactattaagcatactgaaacaaatgaggtttggaattttgcactaagtttgttaagctttactgtgtttttgctatggggggaacttggatttttctttttttttcattttatcctctgtccttaatatttttaatatttggagtggtaattactgaaaattggagagggacatagagtgacttagggagggcaaagggaggttttttttttgtttttgttttttgaaagttctaaaacctgaaaattattctggagtcttccgaaaatgttcagacacatttaagaatttttattgagtaatacaatgttctaattgaggcatacacgttgttctaggagtctgtgaaattctaaagataaaagtttgattatgcttgttttgactttaatgaactattcacataattttaatacacagtgtctaacacgtatgaaagttgtgtaataccttataccttaacaatggagaattactaagcaattttggctactctgatattagcatttcctgaaactcctcaggctgatgtggcaaaggagaaatagcaatcttgagttctgaaaagctaggccgcattttggtcctgaaaaatcacttgctgtgaacttgggccagtttttgattttttaaatggcataacagttcgttgctacaagaggttacatcaggaaaatttcctaaggatttaagattttgttcatctattgagttcttttgggtgatttgtttaggaggaagtatctgctcctttttgagttgcttcaccaaagtacttgagtgagaaggcagaatataatgagaatgatcatgctggcaaggaagacatatatatgagatgggttatcctttacacctacgtcagctaaaaccgtctcctacgaacaaatccagcacttggcactttattcgacggtcctaaaaatagagtcctaaatttagaaggcaaggtgctacttttagctcctcttctcggaggaaaacagcacgcaccgcgccaggccaaggtccacggggatttgatttagcatttgggtaactggccgctaatggaactgaagacagctgggcctaacaagtgcccaggtgactcaggtaagcgaggaaaccagatcgaggttctcttgcgtgggacaggttaaactctgaccaaaccacagctgagccgggacgccttcctgtctaaagtccaaagtccggacgtggttggcagggcgcaccggcgcgtgccccgcaggccatttttctgactggaatgacggcggcggctggcttctcggggctgccggggtctcccggggtacgccgccgtcaggacttctgcagggcgcagacagcaggctccagcgaggctgcggaaggaaagccttgggtgtcggggctgggcctggcgtcggcccctgggtcgggggggtgggggttgcgccgagacgcctctaggagaagtctcgccgccgccgccaccgcggccgcccgaggcgggtgcccttgggacatagccctggtctttggggttgtgcggctcacacgacagcgcggagtatgaggccgaatctcatcctctagtcccaagcctctccactaccagggctgggtggcttcgccaggtagagcgccggcccctttaagagcaaacgacccggacacgtctgcgaagcttgcgcgaagaaggggaagtttgcggctgtccgcgcctccccgccttctcgcggctgcccggccgaaaccaaaccgaggggtggggtggcgaggacagggtacgtcgcaggcttgtgcgggtcgggctcggacctgcgctgcctcgggatgtaaagtataacaagagggtcgggatgggcagcgtaggcctgtgaggcctgcgggtgcccctgtcccccagctccccccgcagccggctccgcagtggtccactccggttgccgggtgcggattcgggttccggaccgaaggctgtgtgttctccgccgtttattgtggccccgacaggccggggttactgtggcgaccacgagagcagctttggcgctatggaggagcccggggttacccctcaaccgtatttggggctgctcctggaggagctacgcagggtgagcccaggcgcgatgagtgttacgtggcccaggggtcgcgggagccgccgggggaaggaagcagtagaccggctttggggtctaagccgccgtggtcagaggtcccgaagccagtcctcgtctgctgcccggctcccgcccgtgttcgaggcagtagttaggctcgtagggcgcttgagtggtttttgtgtgatggaggaggacctggggctctgggaaggtgaagaaagcacttgcttagctggactttgcaaagatgtaaatgtttcccgattcctaaaactaattagcctttccgctatgttgtttattttgagcagagacacgtggttccttcgactgtgagaaacttgaggactgttcctttaaattagttacatttactgatgtaacttctcgttgaaccttgaaagaacacctgaggttgggcggggagttgaaattttgattctgcattttttttttttttggtaaagaatgaatgcccttttgagatgctctaccatgagtgagattgttcttcgcttctgtcttgttaatgtacagtctagagatagtaaactcccagtgttcaaattttgttttttatttttcaggtctagtttataatcaagttgtagagatttttctccttaagtgtttctaggtatctttgttgacat

SEQ ID NO: 60428 - DNA, 884 bp, Homo sapiens
aactaagtatttaggaagagagtttgttttttcaatctcatgtaaaacaaaaagtatgtgagacaaatctcaatcagtttagaagtttattgtgccacgattgaagacacacccaggagacagatctgtgcctttctccacagatgattttgagggcttcaatatttaaaggggcaaagcaggctggaggggaaataggaagtgtagggtcacattactgaatccacaggttgcaagataaaaccacataggggaatagtgaattatgtattcgtcttatgctcagtaaatctgtgctgtacacaagataaggtgatagagtggagatatttgacctttatctgtagctatctgcttaggaactaaaggaaaggcagttgcttgcatgactcagctttcagcttaaatttttccatttggcctagtgaattggagtcccgagtttctattttcctttcacatttctccccacttttctttttaaaatctttcagataaagcattttagaagaaaatgactctctggtcttgggttttgtctgatcttttgtggctaggacagtttattcctagacgaataggtctcatgttgttaggaagctaattttttggcaggttgtgaagtctcatgtcctacaaagagaacatagggggaggaagaaaaaaaaaaaaaagaacaatcctggaaaactgacaaaggccatattactctgaagtccattcatcagtaggcaggtatgaaaatggtttatgtatataaataggttgctattgttttcttctgaagtttaagttgtctagcttcagttcacagggctttaagaaaagcaaagcttaatttttagtgatttcaaatcaggaaaaatggaaaaaaagaaggaaaa

SEQ ID NO: 60429 - DNA, 2608 bp, Homo sapiens
ggggagggactttcaaccctgaagatcaacttcttccccaatccctttaacaaacactcctcctcctcttcgggccttgttcagttagccgaaactatttctggtaagaaaatggctgttacaaaatttcttttaggcagcgtcctatgagtacctactccttccctcaccatgaactatttctaacagattcagagtcagaaaatcgtgttatgtgtatgttttgtttcttccaaggctcacccacaggcctcaccctcccagtcttaacgctcccatatataaaatgaaaagtgacagcgcctgtcagctccatcccacggccaccaagaggatgaatgagtgcctggaaggcgccagaagtggtgtctgttaaacaccccgtccaccactgtttataaagtatcgtgatgagtcccgttatgcctttccgctcaaggaaaccgcctagttagaaccaacactctccgtcactgaggaaggcaacactgaagttggccgggcacgtattatgcacagaatctgtgtcggggtgcggggacggagcgaccccccgttaccgggcggggcggggctcagggcaagcctacctgttgttccggatgctgaccagcacgcaaagcaccagctccaagtaggtgcgcagcacttccagccaacgagctgagagctgcagggcctcgacttcctcccctccagtcccggtgtccgcgccacctccgtcccctgggccaccgccgctcagatagttctcggcggcgaattcaacacgcagctctcgcacgaaccagccgcacttgcgcatgaggaattccagccgaggctgctccgcgggcgagacgcggaggcagatgcggagctggggccacagggccggatagaagaggcactcacgccagtgcgagcaggaggccgaggcccgcagccggtcgggcgccggcagaaaagagaagatgtgcacgatcagctcgctgggcagcgacgcagcgcccgccgcctgcccgcacagagccatccggccccgccgccggctgccggctcccggccgcccccgcagtacccggagcagcccccgcagccgtcgcagctgctgcagccgcagccgccgccaccgcgccacccgggcggccccggctcgggttcgagctcccggcggtcggggctgcggcactgacaagaacaacaacatcaatgactaggaagaagggggcggaaccgtcgtgggtctcggcggaaccaagtagaacacaagttgtggagagggggaaaggcctctgcgggcgtggcctgccgggagccagcctctgtcttctcaaactctactcacgtgcgtccgaggccggcacactgagtaactgcactgccctcgctcgtaaacttcagcggcccggaagcctcaaggcgtactgtaaggaaaaggcagccctccctgcgccggtcggcagagacagagaagtggtaggagctgagtttgacgtcgccgctggtgggaggagtccggcgcgcaccggcgcgacttccggaagaggggagcgcccgattgcctgtagggacgggaggcgcggcacgtgatctctgacgcacgcaggccgcggggcggggcggggctgggcggggcggggcggggcggggctgggcgggactggaaccggcacttggcaccccttacgccttacggtggccgctgcgcccagtcacatctgtaagtcggttaattttggcgctcggtcgatggaggtggcggtactctggtttagtgcgaaaggtcgtcacgcttctttgtaaaacgtttctcagtttgggctgaggaccctgagccaaagtggcggcatgcagggtctttctcagccatcccacctgcccagagtagggttaagaattcctgagattgcgccgctgagagggagctggcggacgggcgggctaaccccggcgggctgtgccgggaggggcggtgtggggcgtggcggaggccgcgaatggacctgccccctcggtccaaccacgcaggtggacttccgcgcactcgctggtgtgtggggaagcagtgaggacagcgtcaccctttggattcagagggagagaaaaaaattggcaaagggatctgagatccgcaggttgtgaccagcctcttctccagggcttgaggaagggtctcttttccctgtgctgagatttaaggctctcgttgaaaagttcacagtaatgacagagctttgattttttttctttcttcttcttctttttttgcctggtatccctaacttagattttccaaaccatgtccctaacttcaccacagcctactgcaaagtaaactctggttgcaaagagtggtgaagtcagaaaagattaagtgactttatgtaataatcgagggttgctttagggaggctgcctctttatgtaataattgagagttgctttagggaggctgtgatgttggaatagcatcgttcttttgtggtaaacaccaagactttttggacttttttttttttttttggttttaaggagcggagaatttaataggcaagaaagaaggaagaaggctgaaggaagaagctccccactacagagacagacggagggggctcccaagacgaaa

SEQ ID NO: 60430 - DNA, 783 bp, Homo sapiens
gtaccatatatttggacacagattcagagcatacacggccttctggagaattttgccccagccctacaaagaatgtcacttagttggtattgtaattgtgacttcaaaaggccattccaccattctatcaattcagctgcttcaggatgatggagaacatggtaagaacagtaaattccatgagcatgagactactgctgcactgctttagctgtaaagtgagtgccttagtcagatgcaatgctatgtgtaatatcacgatggtggattaagccatccgtgagtccacagatggtagtcttggcagaagccttgcgtgtaagataggcaagcaaataggcagagtaagtgtctattctagtgagaacaaacctctgccctttccatgatggaagaggtccaatataatcaacctgccaccgggtagctggctgatcaccccaaggaatggtgccatatggagagctcagtgttgctctcagctgccagcaaattgggcaatcagcagaggtcgtagtcaggtcacccttggtgagtgaaagtccatgttgctgaaaccatgtgtaacctccatccctgccactacagccactttgttcatgggcccattgggtgatgacaggggtggctggggaaagattctgagtggtgtccacagaatgggtcatcctatccacttgactattaaaatccttctctactgaggtcaccctttggtgaacacttacatgggatacaaatgtcttcacagtttttgaccactcagagagacccatcaatata

SEQ ID NO: 60431 - DNA, 968 bp, Homo sapiens
atgctgccttatctatcttggctgaactttccacacaaagtgacaatagtgcatgaaaaacaagtttagtggacaagtttacagactgtttatccctgctttctaaggaatatttttctaatacgcattgtatgtatgacaaaatttagactgtggtttgctttaatgatatagcatttgatgaggtaagaagacagctactcaaaaattcaaatttattctgcactaaaggcaaactattgaaaagttttaaacaaagaagaggcataatacaatttgtattttagaacaagagctacaatgaagagcttgaattgagatgagctgagagaacagataggaaggcaaatgtcaaggtaagtaaaacaaattctgtctttattactttccctcactttcatccattaaaattttcccttcagccattacaaaaaaatgtttcaaaggtatccttttaattgtttatgtatattagtagaaaagattttaagcctttcactgcttactctgtgttacacaactatttagctgtagagaaagacataactggtttcaaagttcaatattacatcattagataataagaggtaggaaaacaacaagtgatgcaagacaggctgtgctgaatgctcaaatggagggttggaatttattcttttgagtagtggagaagaagacaataagctgaagtttgacagaggggaatatttgaataataaggggtcaagctattagaatgttacaatcaagaattaatttactaaaatgattaagattaattaaacaacccagtttccattaaaatatctgtagcttaacatttcatgtgagagagtggcaaatataaatgtttcagttttacttgacatcatgatggatatggatcaaaccgaaagctgcccaaaccatccatgttaattttgatggagtgaccctatcaacgagtttcagcaaacattagtgatatc

SEQ ID NO: 60432 - DNA, 1227 bp, Homo sapiens
aaggaaaatattatgctatatgttggcaagttttacctgctttcatgaaataaattgaacataccattacatcatagtcaagttattacatacttttgtttatctattactgtattacaaaagggaaaagtactacattcactgtatgttaacaatgataatacagaaggcgtaatatgagagaacagttccaacacatttggaagtggagtgcactgccaagaatgtttagcttttactgacttgtaagactggttaattttactgaaagttactctctaaaacatttccagcttgactgaaaatgaatcaatatttactgatgaaagattacacaactttgaaagaggcagacaaactctaaaattggtcttttactacctgaaagaaactcccatcagtgaatagtctgtggaataaagaacaaaatagcattacctttgacttttaattgattttagttgctggaagacactaaactaatcaataacagtaataatgacaggaactagggtctcatgtttggaagttcactaaaaaatattatgtgtattcaaagcaatgtgaaggtaataggcatgaggtctctaccataaaacacctcccccaatagctatggtgacatgtaaatcaatatgagccctaagcaatggaagaatcttctagttgagtacaatagcagaaagtggtgttaaatatgagaatgaatgagaatgaaaactgaatttcagttatgctgcttttggctgcaagtacagaaaagccaactataatggataaaataaacaagtgtatttgctcacacaactaaaagtccagaggtcactggattcaatctagctatatccagtaggtctgggctacatctttccctgtgaattcctctgtgttcattcctacaatggtgtccttcatgagaacaatctaacgatgaaggtcaaagtttcacaatcacagaacacaaattcatgagggtgagatatatcttctggtggctttattttaggaaacagaaaacttcttttgcctaagctcccagcaaacctctctttcatctctccgtctcagagtcagccataccccaatcttgaagctaaaggaatttttgtagttaattgacttggagattactgcaggatttagcaggctcatccttggacctgtgggtgaagtaagatttattttttctatgaaggaaatatgtcaaccgaaaaataaattagtgta

SEQ ID NO: 60433 - DNA, 779 bp, Homo sapiens
gaggctgtcatattgaacagttaaattctagagctttctagaatatagaatgaaaaccactgggttagtcaaaatgcttctcaagactatcattcaggaggctactgccatgatcgccaagaagcatccagcttagtatttggcatctgagtatactgataaaatcctgctcctagacctacaaggtggaatttcagactacagacctacttaattcagtgatacaataacattctgaaggatctgggaagccagcttgctaggcagaatttccctggcagccctctctttcaacgtgtactttgctttcaaaatgtcaacataacgtcactctgagatttgctcatctcacagatagcaaagtcagctttttaaattaagcagcctaacctggaagccataataagtatgaaatagattaggcaggagttattccccaaagtcttgtcaatccaccagcttaaagcaatgctgatcactgctctaatacttgcaggtagttgctgaggatagtcaaataactcccagatggactgttgaaaggaggaagaactacatcagtgaaagcataatcacaaagtgaattataatttcaagcaatgtggcttaattgtgggtaatagagggtatagtaatatgaggtgaagcaatcaaacaaaattaatgcagtcttaacttaggctacttgagtttcagaactgtgaaaagtaactcttcaaggagtactaattattgaaaatggtagaagtctttgtcaaggatggccttcaactggaatt

SEQ ID NO: 60434 - DNA, 1466 bp, Homo sapiens
taaagtatttttcgcatgactatttcattaagacttaggcttacatcactgttgtatttagtgtcctgtagtattttttaaatgttaaaatatatgcttatgtttatgaagacagtttaaaagctagctataacactttaatttgtgactgttcatttaatcataacctgaatgtcgaatgataacatgtcaattacttagaataagatacacagtgcaaagacatatttactcatgagagtcatcatatgatgaaatacttgttgctgtgtactctgcaaaactaagttaaagcagaagtttaaaatgataaatacagctaaaatatagcacaattttattttgttcttattatgtctgtatgtataacctatgcaaactaaaatgcataggatatatatgaaaatattagttgctatcttggggaattgaatttggagtatttttcattttgctttgcttatatgattatatttttctctaaaaattcacaagtatcatctgcactttaaataaaatatatttttatcctgagttatttttccagactgctttagtgaaggacagactggattgatcatgtatgtaaataatcagagacaacattcattgactttgttttttacagactgtacacagtgcaggaagtttccagttacttttagtgtatattgctcaatctgtcttccaacaatacccacgaaagcgggttccactttaaatgaaatgtacatgatttattttggaaaaatttcaaatagctattactttttattaggtttcttttccctctccaccaagtattcgtttgagaggtttcattgtaccatattgctatattttgtcagaaagggaacaaaaggatttatccttttaaaagtttttttgccctttttaggtgttcttttgagagcagactaacaaagggagatttttttctccaatgaagttctacagtaggaaaaaaaaaaaaagtgaaacaaaagactaggggaaaaaacagaaaacctattatcctgaaaaacatatttctggttgaaatattattgttttaatgtccctcacatataaagaagttagttgaagactcaaagtcaactttttctcataaattcttcagtgaaagaaaatggcaaagtctctgtttgcagatatttagtcaataatgtactctcccagttctaacaaaaatcattcaggtccaaatttcaattgtgtcactagcaggctgtgctacttgggaaagtttaaaaatccctctgtacttcaccctcctcatttgtaaaatatagagatgataaaagtatcatgttagaggatcactgtgggaattaagtcagataatagtgatccattattaatactcaatacatattagctatcaacacattatcaatattatataacaaagaatattactctcaatgttatcgctgttcttataggtagattaagggtttttaatt

SEQ ID NO: 60435 - DNA, 964 bp, Homo sapiens
cctctttcagtggaactttccctgatatagatagaatatgctgagggttatttctccagaaactgtgtctatatctactatctgaatatttaaggaacaaaatacccatttccaacctatgcaatacaatgtactacttcagatcctctaaatatgctaatctccagctttatcatgatgtctctagtttttttcctaaaagttcagcatgggcaggtctagacaaaactgtgaagttggtaatttattgatagttcctgcacctaaattcctcttttgtatctcactttcactttccactactaccctacccaactccctctaaacctttgaaccctcatactcttccctgaatgtgagaattgtcttatcacagattttatatcacagtttgttaacttattcaatattgatcaagcacttactaacagagcaggagcattgccatcttggacaagcccctcattctaaagttcacattaataaaaaaccacctaaatccaaagggcatcagtgtaatggctaaggtcagcataaccataaaccacaaataacatctccaaccagacacattccaaactcctccccaaccagacatgctggcccctagataagcccctccagctgggaagatgctagcctcgagataacccctcttaggacccgaaagatgtctgccccagataacctcccctcctcccagagagattccaaccccactataaacttctttacacacataaacattccaagcttatgataaaccccccctcaccctaaaatcaatatatactcttagtctgtaagagaaagcactcctgacctcaatcggccaggagcacctctcaggttttaactaaagaaaacctgtctttgactgccaagccacgtttcgtgtttctttcttttttttttttttagttcatcaaagagtgtttatttaacattttctttttttttttta

SEQ ID NO: 60436 - DNA, 1739 bp, Homo sapiens
tgcttctttacgggagatacaaaaactcggccctaataaacagaaatagtggttgagcccacaaactagcattaagttgtcctaactgtaatttccagctccgtcacttgctgtgtgggaccttattatctccaaaacccaattttttcaacttcacaatggaattaaaacaatctaatttttcaaaatggggttaacttccactgtaagttacagtatattggccaataattaacttgaacactaaagctggcatttaacagatcaattcaactgttttctaagtaaatacttaaacgcttaaaaaaccgtaatttactgagaaaacaaagctttctttctaggttaagaatttgagaaaacaagacccagaagcaaactaaaatcaagtcctaaaatggtacaaacctcaaaaagccaatcaggtttgccaataaagctccgcctccgtgcaaactctgcccacttccggcttccccacccaccttctaccagtggaaccccgcccctctctgcgaggtcccgccccccacacctgatcctggttcccattgggcgaatctggatgctgtatacacagccgacacacgcacattaggctggggcgtcttcgcgcctgcgcagctgcgctgtcaggcggctgaaaacgggggggttggggggaggggggcggaggtcgtgccgaatcttcctccgtaataagaagcgacgtgtcccactgtcctggctccgtgggtccagtgagattgggcctgggcgctggagctgctgtggctcccgccgcggcggctgccatggaggccatgccagagcccagaactcacgccgggggaggccgagacagccggcggtactcatagatgaggcagcggcggcggcggcggcggcggcagcccgggctctccatgagcaggcggcggcggcgacgggtgcggcggcaccggcagttttcggtccccagggaggtacgaggagtttgcttcctggtggacggagactggccggtgtgggaacgccttccgcggcccggccctccagcctatttgtccgcagttctgagcactcggcggggcactgcccgggcagaggcgggggcgcccagccgactcgcgggcccctaactcggggacccgcccgcctcggtgccaggcctcccgggcgcggctgcccagggccagggtgggcgtggccggaacgtgggggctccccgggggcgcacgcctagcgtccgccttgtccctgtcccgaagtcccgcgctgctgggagcggtagcgcgtggctgtacaggcgtattttaggcgctgatttgagaggggacttttagaatccctgagtccttagggagtctggcgttcaatgccttgggcatgtggtggggtcctcacggctagcttggggtaccaatttcctcccttggaagtcaccacgaaagaaagatgttttgtcaaagaaatagaggtcaggagagttttccaggtttattcaaattggagggcccgtagagcctggagaataaagccagcggaatacatcctccagtccttctaattacagttcctagctaaacagctaagacaattttaagtaaagctcttcacagctatctttccatcatttttccccacccctcatttttattgcaatttactttggaacaaatcaccaaattcatgatgaaactagtatcctctagttcttccaaaccttccctcctcccgttttttccagagaaagacta

SEQ ID NO: 60437 - DNA, 2019 bp, Homo sapiens
aaatgataacttagacttttcgcacgagtcattcaaaagtaatagtattattccttcaaaaaaaaaaaatatctcttccacactccaaagcattcaggctcacactagacactccagctcttccactgtgtccgtttaagtatcacttatgaggagaaaatgcacacaaaattctcagttcgcctaaaataaataaatgtctactatcattcctaaatccacaaggcagaattctcttagaaccatgatgccaagaacttccaccgcaagtgaaattgtcttcgcaatctctgtctctaggagactgaaaggctgcagagacgcttgaggatcctgcagggaggctagggcggcagacggagggggcggaggttaggggagagtcccacagaggaactgcattagaaggaaagattttgataacgtctaagggagaggcggttagctacagggggaaaaaaacagacctatttccatattatgtacgttgtaaagaaaacgcaaagtgatgagggtaaggaaacgttgccaaaaacaaacaaacaaaaacaaaaaaaaattaaccctctgcggccggagggttaagagaagtcgacaaaaggagaagggggaggcgaataaaggccccaaagaccaggaattgaaaaaaaatacccgatttgtgagcttggccgtggtccagatcttctgtcctgataagcagatggcaagaggaaaggatcgcagttactcagggtggtagagagtaacgcgtttacaagggtgacgagccctgcacaagaagatgtcgcctctctttccacctgctccgctcagtcctttgcctcttactctagcaccagtggcattcgggcaaaacactgccaaagcctgcaccgctggaggacagcaaaaggaaaatacctgagtctcagtaatcacacgggcagcgacaggaggaggaaccgcggacaactggagcctgggctggatcctcactagctccggtcaaaccctaactcttacgggtggggcgggcaacttccgcccagagcaaggaaagcgtcacatccgtcaaatggcttcacccctcctcccttctccgctgtagctgcgtttacaacgttctgacttcctcttccaggagactttggcctagtctcaacacctgacgtggactacataacccagcattcatcacggcaagtggatttccgggtcaagaggtccgcgctgggtacatcaccatggaagcaatcggtttggtcacgtggtgcccttggttacgcccggtggcagctgtggggtctagggctcagacgggggccattttgccagaggctgcctcccggagttgggggcggcctggcggcaggctgaagctgttcttttgcctcttctgcagcttggggcttggagaggatctggaagtctgggctccatcgagccctttggagacggcaatggtttcttccaaccaccaccacctgacaaccctgcatggcggctgccccctccgcgctgcttctgctgccgccctttccagtcctctctacctatcggctccagagccgcagtcgtccttccgccccagagaccgatgatagtcgagttgggggcattatgagaggagagaaaaactactacttccgtggagctgcgggggaccacggttcctgccccactacaacttcgcctctggcctcggccctcttgatgccctcggaggcagtctcaagcagctggtctgagtctggaggcggtttgtcagggggagatgaagaggacactcggctccttcaactcctccgcactgcccgggatccttctgaggccttccaggctttgcaagctgctttgccgcggcggggcggtcgacttggcttcccccgacgcaaggaagctttgtatcgggcactgggccgagtgcttgtggaaggaggtagtgatgagaagcggctctgcttgcaacttctctcggacgttctccggggtcagggggaggcaggccagcttgaagaggcctttagcttagcactt

SEQ ID NO: 60438 - DNA, 1527 bp, Homo sapiens
atatctctttccctactgcaagtctccattgcagtcagtggtccctatacctgttgcgatggtcctgaataaagccctctttttgtgctttaacaagtgtcactaaatacttttttctttaacaatagcccgttctccaaacccctaactccagaactgtttagttttcaggaaacctgagtgggcccagggtctataccatcgtgagatttgtgggtttaaggctgaatttctgcccgtttttaggtaaatgttttagtgtgaaagcttgaacaattgtagggaaaaccttagatttgcccccaaaaatgacattttgccgtttttggtggggaggggtcagggcgctgtgtttaagatcaggcgtgtgaaagcccctaaacgccctcctttcctttgggaagtccctatggagggaaaggcaggtaggcgcagcggtccccgccctcgctcgcggcggggcggggcggggctgcgggggcggggctggggccgcacgggcagcgaggatccctgggagggccaggcctgcgcgctgcgaacccacgtgactttttcgcctccagggacactgacgcatgcgcatcgtgccctggaccaggcggccgtggcgcgggtggcggctgctgtgctggctgtggggacggaggcggtgaagtgccatcttcggctaggtcgtcacaggctccggctcatggcatcaagtggcatccatcataaggtctgctggggcgggctccttgaaattagctggggcagagggtggtacttggtactgaaaggggcctgccgggtttcaggccgcgctctggccgcggcctccctctcccgccctgtttgaggcctggctcggattcagcgctcagctgtccattcctttctccttcccacctgttgggtggagcggtgcaaggtatttttttcttagaccaaacgtttcacttgaggggtgcgttaggtagggtggagaagtgtgggcctccttcgcctggatttaggaagatatttgggggtaattctaaagcccttgcttctcccggagctggaacacggctggggtggctggaagtggaaggagcacatttgcagccgccagaggattgggaagataatatacgttctattactaaggcatgtgagcgccttgtagggcacgttctgtcttctgactacataagcaacacttttgcgaccctaagtcacagcacccacagcttttggcaggatactttaaaacagaaaaaacacatcattgatcctggcaggattttttaagggattgtgcttaagaatgtttaactttggtaatcagagaccaccactggtgtttttctccaaaatcacatctttaagttaattaatacttgaagttaataaataatactgctcagtgtattagtaatgatgccataataccatgtgaatttatgctgattcaaatgttgtttttttcgtttgatactcatatggccttctgtttgaggacttcagattatttagcaactgatttaatctgttcagaaataa

SEQ ID NO: 60439 - DNA, 2772 bp, Homo sapiens
ccgcttgtaagagaatgctgcgtgcacaactatttcagcaatttaacaggtgcatgaatgaacttattttccaaaggaaaaacaagtgtaacaaaaataacttgactatagacggatggttaagatggagactatgctgacaaatggagagcctacagtataaagcatttcaaataaatttcttagtctgtttataacaatgacagaccactgcacaagagaaatgtgcatgtagctcccttaaagtataaaggtgaaaaggtcatttaaagggtcgatatgttaaatcaaaacttaaaccacaacctacggattttttaaaaatcacacgcattaatgttcagtatttagtaaactgttgagaaaagcaagttggatacaccgttcccacagaaatcttcacatcccttcccatttccctagtagccggcgccccgctcccaggagtctcatccacaccactattcctcggcctctccgccctagcccccaatatcctcgggttcctatttttctggcctccacccccactcaaggatcccaatgaggttctaactctacaattgcagcctgtgtgccccaagaaataaagctgctcccctgccccagtagagaacgcccgagaggcgggagcgaggcaccaaagcacaagctgggcctctccggccttccaggccaccggccgcgggaagacgagggcgggggcacagaggaatacggaatgtatgggcatctccaggggggtgaggcgtccctcagccgcaccagcccggccgcccctacgcctctggtaccgaatctgaaccgtgttcctgcagaaacttgataatgtccttcttgggcagctgctcactgcgcagctgctccacggtccacgcccgctgtggaacggccgccgccatcttcccccgctgcctccgctttactgagccagcccgccgcagttcggcatcgccccgccccctagggcggggcggggccactcacggaggtcgaggggcgggcctctgctctagcagtcgggattggggcctgtctttgagtgacgtcaaggctgtgctatgagggcttctttgttgagtccgggttgaaaaacctaccgcggtcgtctctgcagtcgactgagtagaagaccgctagagatcttcgattctgaattagacaccttgtgaagcgacctctgatggtagcgacatttatcaaccattacccacatttaaggcagctatgcctttaaagtccagtctataacctgttaaaagaaaacagcattcaggctccttatctcgttttatctagttctagcctaaaaagtcacacctgaagtgcttcagtccttgtcgatccgaaaacccatatcccaccatttcccttttaaagatcacacaaccgaaacttaaatacaaactgcccatccccttccccccatacaaatacgagaaagtttgtccaaaacgaagttcagaaactttaacaaataaaacaatttataaagaagccgcactcaggatgccacttgctgatgagaatgacattattaatgctcgtaactctgtgatgtatatttttttctcagtacacgaggaaacaaatttacagaggttactcaaagtcaggtttagagagaagtcaggaattatttgagacagaaatcttcgttagagtggaataattgcacaccgacgtttattataatgctcttacctataataaagatttaatagttgaacatcaggactccttacttaaaaaaatgtaggctgactctgggcatgttgcctatgagttagctctgctttgcaaggagcattaaaaaaaaaaattctgacgaatagctggaccagaccacgttcacttccctttaaacaatgaaaatattaaaataatgggttgccactcccagcgcggtgaaaaagagacttggcattttgttttctcagcccagatagagatataagacaaattattccatctacacatttttgcttttcactttatattctgatttaaaagtacaaggaatgaggcacgttagacgctcaataacattaagttcccaaactggtggctattccattgtccccgggtatgtaatattttacaataaatctctattataacattttaagtgatttatcacgttagcaatgacgcccagccatctaatcattggaaacggaacttaaatttagagtttgttaaaacaaaacaccggaaccgcaccggggaccatatttagagtaacgccttaataatgcgcatgagtctccggcagggctgtgaaggtttccgggaagccagccaatcattcccaacggaaactcagtagcggcattttcaactggataaactggccttagtcccgccttctcgttccagagttttgtgcgaaggaaaccgatggggatcggaaccgtagcggttgagctgctgctgctacggatatctgacagaagccttcggtggttgtcggcctaatgagcggacggcaaagaacgctttttcagacgtggggctcaagtatctcccgatcatctgggactccgggttgcagctccggaactgagcgacctcagagccctggcagctccaaggcgcctttgccagcagcagcggaggctcagctggagtcggacgatgatgtgttgcttgtcgcggcgtacgaggctgagcggcagttgtgtctagagaatggcgggttctgcacctccgcgggcgccctgtggatttaccctaccaattgcccagtgcgggactaccagctgcacattt

SEQ ID NO: 60440 - DNA, 2658 bp, Homo sapiens
ttaagtactgttattactcccaatttgaaaaaagagaaattaaggtataaggtggttaagtaagctgcccaaggtcacttgacaataagtgagaaagaggaaccgattctacccgactccatagcttcagttatttaccaacaggcaacagtctacacacccactacacagggaagttcactgcagcataaaatgaaatgaaacaacccagatgtctaccaataaaggacaaaataaatcccgccacatccatacaatttactctatgtattcaataaaaagatatatatgtacttatatggaaaagtatccaagaaacattaaattgaaaaagaaagtaacaacatagaattgcatttgtttaaaaaaatttttaagtaaataaataaaacacatacaggcatagagaaaaactctggaagcggtgaaccaaattgtaaacagtgtttatctttgaaggccaggatgaagtggcctaccattttcttgaactcctgagctcaaaagatccacccgcctcggcctcccaaagtgtgggatcacaggcgtgtgccaccgcgcccgaccattttctaaataattttattaacatctaaagatgtttgcaacaagcatgcaatttaaccagaagaaaacataagctgaatgatcaactgcttctatagccctgtgggtcctggggtcccaaggggaagagttgggtactgaggaatacaattttcccacttggtattctaaaaaaaaaaaaaaaaaatttattttagaacaaagacctagaacgctcaccatcgaaataaatttgagcaatcgtgttctactctcttaagtacagtagacacgcaacaagtaaacatcgagtgcgaagtataaaatccgtaccaaagccagaaatctacaaaaaaaataaataaaaccgcgtgagccgagatgcttaaagggcagacgcccaccatctgcggggacccgcggtaggaggttagcggagggcgcggggaggacgtaccttggatgaagagcctggcagggagagactgccgcagttccggctcggctccgcgcggagagagggccgcacgccgccgggctcgcgcctcaggcccacggtgtatcctgcccgcggcggccaggcgccaagcgacgcttacctcctccgcgacgttctctaacacacaaaacacttccgcaattcaaatttgaagagcccgccctccagccagcccgggattggcacgctcgggaattgcgccaccgtgcgtctcacagggacgcaagaaaactgcaggcggcctctgcactccgtggacggcagtgtgtccacaaaaagtaggcgaccctaagctgtcacaggcagggggcgagctcctctagttgtcttcaaagttcgtttcgtcttcgtagggcacgcgcccaccctgaatcccgcctttcctctcgtgaagctctgccgggacaaggctgacgtgggacgacgtgggacgccgtgggccgcgagcacgccccggcactactgcggctaagtttggcctttcctggttgccgtcctcccctacaggctgtgcgccgtagcggctgttatccttcttttccgtctcaggaaaacagcgtgcttggtgggtttgagagaacttctgtttttctgtcctccatgtttgaggcggagaaagaacattttgttcttgaggtgatgatggattgaatgtaaagttacgcacaaagtgggatgtttagttggaactgttccctcaggaaatacgattttttgggcgtgggggacagggtttcgctctgtcgcctaggcctgagtgcagtggcgcaataacggctcactgcagtctggaactccaagggatcttcccacctcagcctccgagtagctggaactacaggcgcgcgcgaccatgcttggcttatttttattttgtagagaggaggtctcaccatgttgcccagcctagtctggaactcctgggttcaagcgatcctccatctcggcctcccaaagtgccaggattacaggcaaccgcaccgagccaggaagtgattaatttttttttaagtcacttcacattccagaaacattaatctcgacaactctaggttgctgtaagcagcttgtgacggtggcccccagactgcgtcccgctttagactgcacccagtgaatctccactctaaccaccgcggagtgaccgggtgtattcttcgccttgtatagggcacattggttcagtcttgaaagtagagaaggggaagccagggtagtaaggtgtgttctcagccctgaaccctgtccaactccagtcctgcatgaagtctgtcctcttccccccatccgcatttgtgacaacagagcttctttttattttatacttccatctaagaaaattagtcaacttctagtcacataccacatttccccattaagaggctttactgaaaaggtggtaatttttttttaaagtgacttttgcagtcccttctaaatcctgcatgtactaaattttgtacacactgaataatcaaaatccaaaatataaatttaaaacatccacgtgaatgcaaataaggaaaaacagttggaggtagggggaaaggaagcaaacttacctggataaaatgaagtttctttcttgtacaccataatgagaaaatggttgg

SEQ ID NO: 60441 - DNA, 1362 bp, Homo sapiens
ggtctgcctcccctgagggtggttgctcagccctctcctcagcccttctggcagaactacttccgttgtgctctctttagtcccagtggtcattgttgttagtgtctcttataaagtgattacagacagcctctctgttgccgggtccacatttggaccctggaaaacattcgccattgcctactcatcagcggaagtgcaacattcgtctaggtcagcacttcacagttgttccttcccagacatgagaagtgccagccacgtaacctttcctcctgacttctaaagggtgagtcaaatggcagtccctatgttctgcaaattctaagatcattgatcaaactctgagtgatcttgttgaagctcccttcacctgaggcaaaaggaagccacctccatgtgcggagcacatgaagtctctcaaaatatttccttttcccagcctcctaaacaccaatctctttcatgagccatatcttgatgacagaccagttctagccgaactcgatttggactacacgttttgcaaatcctggagaagaggtgcagcaactcctcatgatgcaatgtttgtagaattgattggttgttcattttagactctagagtctctttgaaaaaaatgctgaacaaagaagaaaattcacatttagtatccaattgcataaagaaaaccacaaaaattactatccaaatacaaatgttacttatttttcattctttttctctcctttaatacaaacacaattgaattaatattttaggtagggttatatatatcatttgttgttactcattgttgcttatgaggtcatgagcatttctccacgttgctaaatattcatccaaagtggaaatatttaaataatcgaatagtattattgggttttgtatatggggatcagataacttctttctagttcgtaattgctgggctgcgtggagccatgccttgacctgttaaagaggatatgtctacaatccgaaattcctgagcattgactgagctgggccagtgactactactggttctctgcattggctcacttgggaaggaaatgagtggtttttaagtatagctgggagaatgaaatggaaatgtaagctatttctcttttcttctaatctggaacaaaattacatttttgagcctctttaacaggtagatacagctgtgggagtaaggcgtgggtaacagaatgtaggcaatctgtcccataaaaacctcctcgatgatctctactgtcttgttttctccattcatgtttgttagagttccaagcttaaagccgtattagatgactttgtgttgagcgtagtagaacttttttttttttttttttttttacctttttatagcag

SEQ ID NO: 60442 - DNA, 1478 bp, Homo sapiens
tactgttatttattcaaaatcactttcttacttgcagaaaagttgaactctactgactaccccagcactagtatgcatatatagagaaatcactttcagtaatttgaaaacattttatttaaagcaaatactatcaaagaacctaattaaatgaaatatttgagaaaagaatcttattctgaatacatttcaagaaaataagccgctgttcaataactagtgactaacagcatcatttaataactctttgaggactaaatgaagattcattttgaaatcaaatcaggtggtgtagtctgtctcctctacacacatcacattaactcagtaattgccaagttttactttcacaatcgtatacatattggcgagcataaaaggaggtgctaaaaagctataatagaagtaacattaaaggtgttaaattgtagaattttaagagaacaggaatatgatgtaagaatttacaaaggaagaaactttgaaaatctaaaaacataagtgataataaaaaatattatatcagctgtaataagtgaaatgtcatctagttacagggaactctgaagaatcccctccaagggttgtatgattccctgatcctccagtagaatgaattaaccttcttacgggaatcagttggctaggcctggcgtaggtatctctttcagtgatgagctgtgtatatgcaataagagggaacaacatttcacagaacctgtgacaagattgctgtcgaaagtcctcttttttgtctgttgaagaactggaagaattggcctttgatactcggacagtgggtagacaaacagatagaggattagatagataaacaaatctaatcacatgccaaggacaaatggatttttaggaaataattataacaaaatgttaagcagaattttttttgttatcctaaaattatcactaaggcttatagctaaacatgaaattcattaataagtctacatcctaaagcaatgtgtgagaccctcaagctgtgaccaaatgccttctacagaatcgattaagaagagcacaactggccctaaaaccactgaacaccaataaaccaacacctcctgagagtttctctgaaggtcttaggagtacagattttgccgtaaaaccacaaacattttaaagatttcctttcctctatgagaataaggggcgtgttgaactttatcctatttgaagccatatgaaagaggcaccaagatatcaacaataaagattaagaatgcctatacgaaggaaagactagatagtactttatctcccagaatctctgcttaagcagaagacttactccttagccaaagtatgcagaactcataataaaaaccatgaagatcaaaatggaggcctgagaaggtgtagttgttttgtttttgcttttttaagctgaactggtatcccagatatacagccatgattaagaaataattatctttttttctccccaagaataccac

SEQ ID NO: 60443 - DNA, 1282 bp, Homo sapiens
ctctttaaaattacagaaaaaattggtttcattacaactttcttagagtcttttaaagatgactaaaatgtctgtctctgattctcccaacctttctctaattctttgaccttgagattgaatatgcaccttccctaatcttactttctaatctaaacataacaacaagtaaacattgcatttaaaaatatcccagccattcagtatgagtaagtttggttattataaacattatgggatgatgaatacaaagacacattcctggagtgatgaattgcctcctgtaaggacaagtacaaatgatgagtgtctttaaatttgtaagtaagtcagctttctttcttttatttgctagactcaatctgtgtcaaagtgactcaagtttagtttccacttaaataacatttcagaaaataaatcacattaactcagtgagatttcttgttacttcatactactgtttttcaaaattacaaattgtcttgacactaaggtattcacaatgattaatttggctgattactcaattatttccttctaaaattagaaacttcaaagtgtttttagatttaaatgacgagcattccagtaatactgttgatcaatcattttatgttaatgattaaaagcagtaaatgttcctctattcgccttagctactccaaatagtgtgtcaaacacagcaagctctatttattgtcatagcattttaacatgggccaccaagagtgagacagcatagattaaacactggtcaaggagtttatattcttcactcaataactgatttcagtggttttgggaaaggactactccataattaaaatgtgttatttaataagccatgctatttgggcatttgttttcttctagaaataagttttgtgttttgaaaagctgcattttcaggattctgtacagcagtgagaagatgataatttcctaaatggttccagcaggcacttaattattcacagagaataatgttgtggagagttagtatatctcattgtaggagccataatttagatattatacaaattagtttaattaagttttgaaatcattaattcgacacagaaatgatcatggttgtttaaatgatacaaactaacaataagctattatgcatgaagaataaatttatcaataagttactttgttataataacaacttctcacgtcttcattttatagaattcacttctgagccatttcctggtgttaagatgggaaaaaaacataagatgtatggaaatttttcatcaaatggctattcttt

SEQ ID NO: 60444 - DNA, 886 bp, Homo sapiens
cacgcggcctcctgactggagaaagtatgtcgagtgtgcaggctcatctcatccacttcagaggagtgatgctgaagggaagggtcactgaactcttttcaatggattcccccactacattagagaaccctgaagaacttatgacctgggagatctactgaactattgctcctgactatcctcatgtgccattggacacgtgccttatctaagagtctctcagtgttcctttaatataccctggagcaaaaggcgctgctttcagaccctccagattgatctaagattttaatcactaccccctaccccttatcaaagtaggagggggcactgggcctttctcaacgacccaggcagtatctaagctccagtcacatcctcctctaattctgttgccctctctgaccaggaaatggcatttatctcatcaggcattcctcccactctaggggttaaggtccaaattctatgctctgaatctcccaggcttcaggccttactatttaaaggcaagcttctggaattcatgaaatctaattttctgacctgagtttctggttccttcaattgaaagctgtagcttttaagacttttatctatgctatagatatacaaaagtatgcacaagagctcaaaagcctagaatttactcttttctttctgtatcatctcagccctgcatagcagagcaatatagataactttcactgctgtttcgatgataagaagtgaagagttagaaggaattggaaaaatacacagcttaatatcaaagtattacactgctacacgtgacttatttacttcctaaagaggggatgctgaacataattgtgcattttctgaataatgtatgctgcttattggcctgggttgtaagcaaatg

SEQ ID NO: 60445 - DNA, 552 bp, Homo sapiens
tggtcttactccttcacttttgcccaagtaattcctattcatctttctggtcttctttctccaggaatccctctcttgtctggtgtcccaaagctgacttagatgcttgtctcatgtgcacccatagccatgtattaaaattacttgcaggcttatctgtatgaccacaagactgcaagtatcttgagggctgttactgcgaataattgtcttcacatccccagcacctacgctgtagctggcacatagcgctcaataaatatttgaacagcgtggttcactctcctggcctaatcatgaaaatcttacaacagagtttgccaaactagtccagtttctttgaccaggataaaaccaaacaagctgaaaacgaaagcagtacttttggcaagatgttctcttttccttgactaataatataggcaaagtgcctagagccaggcccagcacaaatcagactcagtaatgttcttatttccacctcatcctcttcctcatatcctttgtttttcaagtgtaaactcaaagatcattcatataccagagattgtt

SEQ ID NO: 60446 - DNA, 1309 bp, Homo sapiens
cacagaactcaaagaaacaccttacttacatttacccacttattataaaggatattcaaaggatacagatggactgctggatggaagagatgaattggtcaaggtgcaggggaggggcgtagagctttcatgcccttttgggcgagccaggcttcaggcatctgcacatgttcagctatccagaagctccccaagctgagtcattctgggtttttatgaaggcttcattgcataggcacgattcattgaatcattgaccagtgaagatcaacctaaccttcagcttctttcccctatctaaaagttgaggggtgaggttgaaagccccaaggctctaatcacatggttggtatccctggcaaccagcacccccactcctaaggctgagagcccgggccaccagtcatgtcattagcatacaaaaagacacttaccacttaagggatttcaagggatttaggagctgtgtgccgggatcaaatggcagagactaaatatatatttcttattatattacaacataatggtggtcaatcttcacaataaccatgacaagtctatgacatggtactattatgatcctcatttttactaataaaaaaagcagtgatttaagaagttacacaacctggccaaggtcacaggactgagaatctgaagcttggtagttcaaactcctgatctctaggtacctattaacttattatattttccccctggttgcataaccttttcatcaattatcttaggtactttcaagtcatttggatttattcctgatcatcataatgtaaagtattgatacatactttacagatgagagccgcaaagaaaagaaagaaatataataggtagaaacttaagtaacaggctaatcattagaaaggtttaagagagactactcattcaggctgctgccaagtccacgcctctaaatgcactccattactcttttaaagaacgctaatgcatgaagttggttattattatcaaatctctgacataagggaaatttttctgattttttaaccttaaaaattgttccttttaaatcatcatattagactacctttttttaccattcagacaggtaagcaggaatgtcttcttttttttaattgaagaaaagcttagtttttccctgcaactgcatataaagccttttaactgtgtgattactctgccatctagcttcctaagcctatatagctgttcatgagatactcctggggtatattagggataagcactgctttggtttaaaatgccttggtttagattacttaaatgttcaatgatcacacacaca

SEQ ID NO: 60447 - DNA, 2180 bp, Homo sapiens
aagcaggcggatcacgaggtcagcagttcgagaccagcctgaccaacatggtaaaaccccgtctctactaaaaataaaaaaattagccggacatggtggcaggcgcctgtaatcccagctattcaggaggctgaggcaggagaatcgcttgaaccggggaggcggaggttgcactgagcggagatcacgccatcgcactccaggttgggtgagtgcgactccgactcaaaaaaaaaaaaaaaaaaacttggggtcagcggttaatacatatatttggttagaaaatatctaggtacagccgcgcgtggtggcaagagcctttagtcccagctactcgggacgccaaggcaagaggatcgcctgagaccaggaggagttcgaggctgcagtgagccgtaacaacgccactgcacttcaacctgggcgacagagggagaccctatctctaaaaaaaaaaaaaagagaataggtacttacaagattgataaatgaaacaaatgtaaaacaattttagtggcttctctaaagtgaatttcaccaaacacaatacacggcacctaaaactggctaagctatctaggtaaaaaagggagtaggaaagactaagtccttcaccttctccattctattaatttgattgcccaaaccatcaacactgtcaccagctaccaactaaaaaaagaggaaaagctcttggtcgaatgctcagaattaccactccagggaagatctgtccgtttgtctttcgcggaaaaaataacccccacaaccttctctgcccaaacaacatggagtacgcctgcagacgcctaccttaatgaaaccgatatccttcgcgtactgacggaaacactggcggcacatattgaggccatatttccggatcagaccgtgccggtttgaacagacacgactgtaagaaaagagacagcggttttgcaggtcatagaaattacaagactccgcactcagacggctactacccgcatcccgggactcccaagccacagtacaggcctgtaatggcggcaccagcgactcccagtcggcgtgctccctcgtgccgcccgtggcctcctctacttgagattttaagcagcctagcgctccacggcaacgcttccccaaaatcacaaactatttctcaccaagagcgagaaccctggccgaattttcgcgggtggctccagtacagctgctggtgacccatcttgctctcagcagtgcaacgaggtaaaaggaagaagctggcccacgcatgcgctcttcaaatttttgagacagtttacccagaatgcagtgctcaaaggaaacgcgtgcgcagtgtggtcaggttgtttcgctgggtgagtaaaatgaaatcttagaggcgttgtgggctggcccagttgatgacgtcaccataccacagcttctagtgctattctgcgccggtatccgaccgccgggcgcggtggcgcgtgcctgtagtcccagctactcgggaggctgaggctggaggatcgcttgagtccaggagttctgggctgtagtgcgctatgccgatcgggtgtccgcactaagttcggcatcaatatggtgacctcccgggagcgggggaccaccaggttgcctaaggaggggtgaaccggcccaggtcggaaacggagcaggtcaaaactcccgtgctgatcagtagtgggatcgcgcctgtgaatagccactgcactccagcctgggcaacatagcgagaccccgtctcttttgaacaataaatacgttaattttggactctcaagagatgaatattctcatagtcttttttattgattaaaccttttactttcttttaattaaaacgttacacttgggaaaggagtttttcctcgactcaccagtgacacctactggaataaatttacaaaacaacttaaaatcagctgtaatgatcacgagtcaacggtagggtttgcttttattttgttaaagagagtacgttttcaaatttatttttttgacacactcctccaagaaatacacctacaccattccaaaaaaaaatgagattctttggcatttagtgtatttgattcttaaatgtaattggctgaatgtaaagtaataaacaagtaatgtgcagtgtatgttgctttgaccagataatttggtgacaaaacaagtaatgaaaagcaaatgcaaaa

SEQ ID NO: 60448 - DNA, 2308 bp, Homo sapiens
cataaagttttgcttaaatgctgagtcgcgttttaatgctctactagatgtacatataagaatactaaatggagggaaagtaatttcttttttttttttgagacggggtcactcaggctggagtgccagtgcgcgattacagctcaccggagcctctcgacctccccaggctcaagtgatcctgccacctcagcctccccaatagctgggactacagacacgcgccaccacgcccggctaatttttttgtatttttcttagagactgggttttgccatgttgcccaaactggtcttgaactcctgggctcaagcgacctgcctgcctcagccccgcaaagtgctgggattacaggcgtgagccaccgcgcccggccataattttatcttaatcacttttttccaggaactattacgtttcaaagaatgaggaattaactgacaacacttcaggttcaacatgtaaatagggacgctcatttgagaataaatcacattttgtcacagttgtattgaaaaatcggtatttctgaacgtcattttaccattacggaagtataactcagacacaataaaatgtttaatatacggctaggattaggttaaggtgagagaggcgcctagagcacaaattttaaggaggcaagaccacgaccccgaccgtgagcgcctgcttaacatttgctccccaggcgcttcccactccccagccgggccccgtcctagttcaatcaatcaagaaaatcaagagtacgaaggccttgtgcggtctggacggtctttccacgtctcaggtgcagttaagccagtcacactccatccacctacccgccatgaaaaattatttgttcagcaggaattgccaagtcaaatacagccatataaagccccccttcgacgtgccaggtgtgcctccggagagcagccaccaaaaccaccagcagcccgtccgcgccgggaaatgcgccctcgctggcttacggggccactcagacagttctaagtgcctttccctgtaacgcagaggcacacctgccttccctcgggaaacagcggcccgacgtgcgcccgcaacgcgtaaagcgtcaacagctgaaaccctcggaatcctccccgaacagaaacaaccaccgctgccagctgcgcgctcgggggaaaagacgttgcgcccccgccgactgccggtttcccgggcgcgagcccggatccaggtggtcagtcccggtacgcaaccacggcgagaacccggccctgctaagggagaagggaagccgtttcccgcgggcttcatacagacacggtgctaagacagcccgagtcgcggaccagtccaacaggcaggcagatcagtgggcagcccgcgtgcgcgaggaccccgatggcggcgccgggtggcgggaaggaggaagtttcaaagccagcttgacgtggttgtggccgttgggcgagatgaagctacactgtgaggtggaggtgatcagccggcacttgcccgccttggggcttaggaaccggggcaagggcgtccgagccgtgttgagcctctgtcagcagacttccaggagtcagccgccggtccgagccttcctgctcatctccaccctgaaggacaagcgcgggacccgctatgaggtgcgtgaagtgggcaggccctgtcagtctcgcgttcttcttggaagccgagacgcgggccaccctcggtcctcatgctcccggctgctccctaggcgaaagcccgccttgggggttcctgaactcccagccttgagacctaccatcagcccgaccccagggtcctgtgcgtcttcctacggacccgaaagaagaaagctttgagagtgtaccttttcgctatttttcctccccacttttacgactttgaatttacagtgttgctatttagtagtggatggcaatcccgcctgtttcaagtttctgaaattttgcgtgaaacaagcgcaaatgaagcagctgtccagttggggaacagtaaaataactgcagttctgttcagtgaattctttctcccacaatattctccctagcttaaaaaagcaggtcggccgccctccccacagttgccgtctcccccggggccggccggtcttatgatccggcggatcctcctggggaggccgggacggggagagggcgcgggcgccgagtggcgggggcagcgggcgggcgcggcgaccggggccggggcggggatccgggcggcgaccgcggcggcggcagcgccgcgggcctgcggccctctcccctccggcgaggggagtcgctgcttggggccgggggggcggccccgc

SEQ ID NO: 60449 - DNA, 5332 bp, Homo sapiens
tggcgtggtggtggtgcatacctgtaaggagaatcgcttgggcggggtggggaggggcggaggttgccgtgagccgagatcgcaccattgcactccagcctgggcaacaacagcggaattacgtctcaaaaaaaaaaaagaactgaggcacaattcatataagtagaatgtttatttggggcaagtttgaggattgcaacccagagcacagattcaaaatgccctgagtagcagcagttgcaagtgggtttttagaggaaaaaatggcagttcctaaattgtctaccaagaatttacattaaaataacacaagcgattgattggctatacatcattcttttcatgacaaattccaggaacgcggacataatgggtgaagcagctagtcaggaataaaatgccaggcattaagtggggaggtgtctgaagtcccatactgctgtctctctgggcccggcaaattttgcacatctcaaataattaacaatgctccgagccattcttcttttctcatatagaacaagactcacgaaaaccgacagcagcagctttaggaggcccaatacagtccgttttccgtacgaaatgagtttaatttattgtgactgctccaaaagaaaagtgcggttcatctaattttcttccgaaaaggaagttaaggaccagagtttctttgacccccttccccccacccacctcctccattttccagctctagagaatggctggggcagcgcgcgacgttgtagctacggttacgacccgccccgttccttctacgagaaccacatcagcgtagtatcacttttcccctccgaagcacagtcacccgtcagcagcctcgagggctgacgtgtccttatcaagccggcgcgccccgcgattctatagccgccatgcctgagacctttttcctgaagggagaagcctgctctcgaactaaggccggcgagggccataggtctcgccttccctttcctaagaaggcctagtcctacccaggattctgagcaagggaggctcctattggagccgctacagcctcgttcttagcttaccgagaaacagcgcccgacacctggcccttcgcagctctcgcctttcgcagctctcgcctaacaggaaagggaagaaacaggcggaagtgggaactgcacctgagcgacagtactgcaaaccaataggcagccggccacggcggtcaggcgccttcggtcgcgtctggaaagcaccaaccaacggtctaaggggcgggccggaggggtgtgggccggagggccgcggtgtgccgcggggcagttgcgggttgtcataacggtccccgccggagtgaggcgaggccgcgtcgctcagttctggccgtctagggcccctgtaaggatgagagcgcagaggacgcagggccgctggaggcgcaggtaacgaagctagggtgcggttgggaccgcggctgagctttttccgggacccgtggtgctgaatggagaggacggagacgaagccgagccgcggctcctagcggcggcgccgatgctcgagctgtagctgccaggcgaggatgtgtggagcgcaggcggcgcggggtaaatgagaggtctcgggccccaggacccccggggcccgggatgagttagcgagggcagccgcgggggccagttccgaccgtgacaggccaaggcgacggccgccgcccgcccgccccttccgtgcagaagcagctgctcctttccgcgcccgcccgcctgcgctcccggccctggagaccatgaggttccgcatctacaaacggaaggtgctaatcctgacgctcgtggtggccgcctgcggcttcgtcctctggagcagcaatgggcgacaaaggaagaacgaggccctcgccccaccgttgctggacgccgaacccgcgcggggtgccggcggccgcggtggggaccacccctctgtggctgtgggcatccgcagggtctccaacgtgtcggcggcttccctggtcccggcggtcccccagcccgaggcggacaacctgacgctgcggtaccggtccctggtgtaccagctgaactttgatcagaccctgaggaatgtagataaggctggcacctgggccccccgggagctggtgctggtggtccaggtgcataaccggcccgaatacctcagactgctgctggactcacttcgaaaagcccagggaattgacaacgtcctcgtcatctttagccatgacttctggtcgaccgagatcaatcagctgatcgccggggtgaatttctgtccggttctgcaggtgttctttcctttcagcattcagttgtaccctaacgagtttccaggtagtgaccctagagattgtcccagagacctgccgaagaatgccgctttgaaattggggtgcatcaatgctgagtatcccgactccttcggccattatagagaggccaaattctcccagaccaaacatcactggtggtggaagctgcattttgtgtgggaaagagtgaaaattcttcgagattatgctggccttatacttttcctagaagaggatcactacttagccccagacttttaccatgtcttcaaaaagatgtggaaactgaagcagcaagagtgccctgaatgtgatgttctctccctggggacctatagtgccagtcgcagtttctatggcatggctgacaaggtagatgtgaaaacttggaaatccacagagcacaatatgggtctagccttgacccggaatgcctatcagaagctgatcgagtgcacagacactttctgtacttatgatgattataactgggactggactcttcaatacttgactgtatcttgtcttccaaaattctggaaagtgctggttcctcaaattcctaggatctttcatgctggagactgtggtatgcatcacaagaaaacctgtagaccatccactcagagtgcccaaattgagtcactcttaaataataacaaacaatacatgtttccagaaactctaactatcagtgaaaagtttactgtggtagccatttccccacctagaaaaaatggagggtggggagatattagggaccatgaactctgtaaaagttatagaagactgcagtgaaaatcacagttacaaaagcgacagtcttctatttttgatatttgtccaaacaggacatacaattgaataaaagagtttaggaactggtttctgctttaatacaaaaacaaaatcttgtaaaaggtgtccaaatacatagtaatcttttccagttatgtctgattaagatttaaaactgaaggtttcattttgggagtagggttttaaagctcaatctgttatctgctaaaattgattattgttgatatgagagaagaggggaaattttatttaaattgcatttattaatctttttatctgaaactttgtacacttttccactttcaaaacctattttaagtacagcaaaatttatttaaaactgtcatagcagtaaaaagtattacgatgaaattgttagggtattaatggaacaaacccagtttcactctcttgacacacttattaggaagggattgcttcactggtttaataatttaaaagttatgtttgttaaacaccctgtcagaacagtcattttcagtattagattcctgtactattgtgttttgagtgtgttttggaaccttcatagaacacactttcttttggaatgtatttgattgataagaaagtttaaacattgttttcacctcaatgtagaaatacagtggttttgtttttttttttcttttagtgctgacaaaataaaatactcatttttgcataaaaaggttcctaatccttttgcagaataagttttgtttactctttataccaaaattcagtgaaggcattctacaagttttgagttagcattacattttaatatttactattgctacattgtataattgagtttgaaataaaacccagcttatgacaatgcattccctgtgcaagaaactgtttggctttcaaattacccaggcattgaaaatgaatgataaaaagttgctgtgtaagggaaatacagcctaaattgtttttgaaagccagaaatgatacaaagttcagtcatgccaaagtgaaatactttctagtgccagctttaacttaaatcatacgttttaaaaggacagatacagaaaattataggaaacaggcttaaattttgctccatatttaatgtagacgtttatagaagtttcccttaatttgtaattgcattcaaccgagaatttctcataaaagactaatttctgtgtaaagatattacgggctgggtgtggtggctcatgtctgtaatcccagcactctgggaggttgaggcaggcagattgcttgaactcaagagtttgagaccagcctgggcaacatggcgaaaacccatctctactaaaaatacaaaaaattagccgggtgtagtggtgcatctgtagtcccagctacttgagaggctgaggtgggaggatcctttgagtctcgaggcagaggttgcagtgagcctagagcgtgccactgcacgccagcctgagcaacagagcaaggctccatctaaagaaaaaaaaaaaaagttacttaaacttgtaactattaaatggcagtctcaaaattattgcatcaatttaagattcatagtagtttaagagcacatatgcttatctaaggtgaggcaaatagttctcttgctttacgagctacctttagacttacccacggcccagtctggtgcaagattttgcctgggggttataaataagggtgaatcaggaggctttgtacctatttctggtactctgacctgacatcactagttcaaagaactaaaaaattaggttatttccaggactgagctaagaaggccagagtgtgaagtagtagctgtttttgaaacaaatagatcagctcctggctttggggttagtgattaaatcaacaaatatttccctttctgtatttccttcctttcattttctttggctgccctaaaattttttgtaagaaaaaaacctgttaggatcttctctttgcctcacattttaggtgttataaaggaaattgattatgcaggaggctgagatgagaggatcacttgagcctaagagtttgaatccagtctggacaacatagcaagacccatctcttaaaaaaaaagaaagtgattaggaaacactggcttttttttgtttttctgtgtaataatgtaatgaaggcaattttcctatcagagcaaattgccagattttaaaaattccagttttactcttaaatttctataaaaccacaagatgttttaatatt

SEQ ID NO: 60450 - DNA, 2870 bp, Homo sapiens
tcgcccaggctagagtgcagtggcgcgatcttggctcactgcaagcttcgcctcccgggttcaagcgattctcctgcctcagcctcccgagcagctaggactacaggcgcccgctaccatgcccggctaatttttgcatttttagtagagacgggatttcaccgtattggccaggctggtctagaactcctgacctcgtgatccgcccgcctcggcctcccaaaatgctgggattacaggcgtgagccaccgcgcccggccggtaatagcaaatttttaaagtgagatgggatatttcaaatatgaggactctggaaagaactgttacctccaaagaatcgttgtttacaccataataccactctctccaatgtccatggctctctggagattttgccagttctatcactgcattgtttgaagaaatgctaatcacaggttctgtggtactcaatttattctctggagcaaattgcaaaaagaaggaataaactaagtcttgtgcggagaagcgtaatttgtaccagaggggattcaaatctccttgaagactttgcggctggatccgaggcacctgaatgagcagagtcaaggtttctttgtcctgattacacagtaacggaggacacaaaggctccccgctcttggtcccgggaccacccatggcgcaggctgagcgctggccgcccgtgccctccgactcctcgcgtgtttccacactgctatctccgcgcgcactctctcttcccgcagaagaaccccacgccaggctccgggaggacaaacaaggggagcctccgccaccaggtgagttttctcctccaggagatggctcctccacgctgcccggcggtgaccccgcgtgcctgctcaagtcctgctcccccggcttggggacacgctcctctccagctgcggccggcggaggcgccacctccgggtcgcccagggtggtgaccccggagcccgcagccccagccacgcaggtatcgtggcctccgtcctccgcgcgactcctcgcgggtcccgcctccccctcgcgagcggaagcgcaggcctggccgtcagttccggaccggtccgcggactcttccggcgcggcggcggcgacggcgacagcgggctcccggcgcgcggccggcagcaccactggcagcgtaaccaccagctgccgccgggccttgttgaattgtgccttgccgcggccatcgtccactgggtacgggagcgagagccgcagccggtagtcaggtttcctcgagtcgaggcacagcagctttctcgttacctccagcgccgcctgctcggccgagcgcaacagcggcagttcgatggtgatcaccagctcatggggcacggggctcggggctgagtccctggagcagcggtaatcctggaggtccacgtggtggcgctgcaccacgctgtagcgaggctcggtgggggcgggctgcaaggccgcttccggaggggagggcgcccggggcccgggggctgccgggtactggtaagggtaggggaagtccgggagaggacccttcggctccccgtcaggccttgcggggatgaccccgggcaggggcgtgcgcagcaccgcagcctctggggtccccttatacttggccttcagggtcttggcattcctgcggtccagcttcacgccgaactgcttctcgacggcctccagggccgtggcgtccagcatctggcggaagccctcgtgccgccgggccagcgcaagcgcgtctggatggaagaccacgtcgtagaccatgtagcggctgctgctgcgccccgcgtactcgcggccgggcgccaggctgtagggcagggaccagtggctgccaggagctgcgccccggtcgccaccggagccgggccggctgctgggcgcgcccaccaacgcgttgctgcagacattcacaaagcagcgccgcgccccgtccaggctggtgcgcagcacatggccgggctccgggtgcacgaaccgcacttccaccccgcgctcacgctctagcgcggtgatctccgcctcgtagcgccgccggttctccgggtcggtgagctcctcggcgtactgggagaacattcgccggaactccgggtcctggaaggcggaggtgagccgctggacctcctctccgctcaggtccaagtcctccagcgacgaggaggccgccgctttggccatactgtcctgtggctcctcgccctcgggccaaaggcgatcagtctgacactgggttgggggatccgcctcagagtttctgggcagcgtacagtgacgcggtggaggtcggtaacggctggaaaattgagccttgagcagcgcgtgcttgttgtcatagttacaccactaacattcgggaggaggggtagagatcatggtggaataggccgggcgcggtggctcaggcctgtaatcccagcactttgggaagcctaggcgggcggatcacgaggtcaggagatcgagaccatcctggctaacacggtgaaaccccgtctctactaaaaatacaaaaaattagccgggcatggtggcgggtgcctgtagtcccagctactcggaaggctgaggcagtagaatggggtgaaacccaggaggcagagctcttgcggtgagccaagatcgcgccactgcactccggcctgggcgacagagcaagtctctcaaggaaatcatggtggaatagtggaaatgccagaaatagccctcttagattcttcaaaccaacccaccaccgtactttgttttgttttgttttgtttttctttttttgagacagagtctcgctctgtcacccaggctggagtgcagtggcgcagtttcggctcactgcaagctccacctcccaggttcacgccac

SEQ ID NO: 60451 - DNA, 1692 bp, Homo sapiens
tctcttatcctatccttgcgcaaatactgcatttgctctcttcagatgccatttgttctatttattgggaagtagaggtccagagtagatggctgagacctactgacttaagtgagatactgtgatagcacatgccagatcctaatacataacaaacagcttcatgagacaaaacttaatgcactggaattttctattctgccatgactcattaatatttcaacccactgatcagtttgaccttcagtctgaaacactgctcaagataaatgatcttgtatatcttcagtagcatgttcagtaaggaagtagacgaaggcaggacaataccatgctggtgaggcgcctggactccagtcagataacccagcatcaactctgctgtgacccttaccagctgtgtgactttgggcaacttatttaacctacctatgcctgttttcttcatgtataactaaaggtgatagtgaacctaatgaggattaaattgcgcaatgaataagcacttaccacagtgcctagcatagtaaacatttaatacatgtattaaagaattggagcaatggtcttgcaaccttttccacaacccccccagccctttaattcagaaaacctgcctaaaaatgaagcccaaagtgtaagcacaataaaaacaataaaagtggagcccttgaatagagtgggtaggagccttggctccagagaaaacgcatatatgtgcataggatcagaatgaaatgtcccattttaagtttaccttccctgctatgagctaccaccaccattacaagaggacactaaatttcacagatggtggtgaatgactggggctcacctgattttgcttaataaggatctcttatggactacaaaatcaaattcctatgcctgtaaggcagggaaaacagttcatgagcacaatccaatctgtaagcatgtcttcttggttgcaaactgcagtttaaattagtgcttgcgaagtcaggatattgtaccgaaaaatccagatttctctaaaatggccccataggcctggtttcctgcatggctgcccctggctgaagaatgcttcattcggtctgtccagtctctggcattctgtggtttccctacagaaaccacgtgtttgctttttttatagtagagaaatcttaccactatctctgtgtgttaacaatctggctcctgctttgaggtgcaccttcacttaatggtgcctcgtaaacagattgcagcagtgagatcagccgggcttcagctgattaaacacccagttgggaacacccagctgggaacacactgtctctgttctttactaaagcaaagtccactctttcacaccggctcctctgctgtcctatcttacagaccttggctttcttttccatctctggacgatgttgatcctcacctggttctagttcctgccttaccttattctaatattgatggcctgcttctggcaatttacactgccttgtttcacttcacttcatcttgtttaacccctaaatgcaccctactttcactgtgttcttgaaaagatctcaaaatacctctgctttaattatagaagcaattatgtatccactgaatgagaggacaccttgatttcaatttccatttataaacttctgcccatcatcattcatatttagctctgtgagtctcataactgcaccagcagccttg

SEQ ID NO: 60452 - DNA, 973 bp, Homo sapiens
cttagaacttttttttaatggagtctctctctgtcgccaggatggagtagagtggcacgatatcggctcaccgcaacctcctcctcccgggttcaagcgattctcctgcctcagcctcccaactaactgggactacaagcgcgcgccaccacgcccagctaatttttgtatttttagtagagacggggcttcaccatgttggccaggatggtctcgatctcctgacctcgtgatccgcccgcctcgacctcccaaagtgctgggattacaagcgtgagccaccgcgcccgaccgcttcttagaactctgaaatttaaggtcaagccccctctcggcgcgcggggagccgccgcggtgcgtcccgctgccgcaccaggcagacgggccccagctcttccctctcgcccttcaagctgcccgagcccactcacccacggagcagcaagccccgcaacttgaaggcggagagcgcccggctccgcagccgctccggcgccatatttgcgatttggcgccaccgccgcagctccgccccttcccgggcgcgcccctcccagctccggcctcggccctggcccgcgtggcgctaaaccctgttaagatccctgcttggtctccgctgcctgcgccgcagcaactcagaccttacagttcgcaaccccggaccgagtaggctgaaagtggagaccacctcgcgctcctttgctgccgggaaactgagggccagagcgtcttccctggtgtcgggctgcgttgagccagccacagcgctctcaccgctgccctagacattgcaggactgcggccgagcttcccggacacaggatcccccttctttcgaggccatgagagctgttgggttccctacttcgcacaagctctggaaatactgtgcctcgacatttaccggaagctgttataaatctccatcgctcccacctaccccgatttttatttaacttgagggcttcgt

SEQ ID NO: 60453 - DNA, 1218 bp, Homo sapiens
caagagagaagggagagaagctattctagagtaaaacagacgtaaagtcttaagaggcgttaacaacgaattacggtgctgaacaaaccaactatagaaaagacattttgagataatcaaggaatctgactacagactgactactaaatgaggctgtactgccaaaacacaattccaagagagaaggaatctgcgcgtggaaagcccaggccccttgcccactgcgaggagccagaacgtccctccacagccgcgccgcccctggctcgacttcccgagcgagagccgcgggacgttgcagacgcactggctccgccttcccaccaatctcgaccctcgccgcgttccgttcgtgcgtggagcagtcggggctggaggcgaggccgccgggcgggcaggggttgtggcgcggcaagcggcgggccagcgacggcgcgaatggcggactctcagctgttctgtgtggcggaggaacgcagcggccactgcgccgtggtggacggaaacttcctctacgtgtgggggggctacgtggtaaggggaagaggcgggacggggtagactcgcgccgggagaccctcggcctgagcggacgcagcgcccgccacacccgctcccgaggctgcggcccaggcctggcgcgcccggcgcctgcagccccccagcccctccgctggccgccgcccccacagccgcgccagggcttgacgtcgtcccgccgttgcttcttctattaaagcctcagacccggctccgggcctcttaccactctccgcccctctttgccagcaattcagtaaccacggtttgcccaatgcaaaggcagttacagcgcgattaattattatccttaaatactggcgcagacctagaaggacccgaggacgccgtgctgtatcattttgtatatatttccttattcccacggcgcgattcgaaataaaatatcgaaatcactgaagcatttaaatatttattttcttttctttttcttttttttttttttttgagatggagtttcgctcttgttgcccagggctggagtgcaatggaacgatctcagctcaccgcaacctccgccccccgccccgggttcaagcgattctcctgcctcagcctccctagtagctgggcttaccggcatgtgccatcatgcctggctaattttgtatttttaatagagacagggtttcccatgttggtcaggctggtcttgaa

SEQ ID NO: 60454 - DNA, 4229 bp, Homo sapiens
cttccaaagtgttgggattacaggcgtgagccaccgcgcccagccgagatattaattttggattctactaaggacgacgggagccagctcaaggtttttaagtgactcgatcagattcacgaggttggttcacaaggaacttcgataaccccaaagtctagtgagcataattcgactgggagaagacactgctgcaaggaattctgtgaaccagacagatttgagggcaccaaccagggtggatggcagataaggtcttaacagcctcaaggtgatttgcttccttgttgaaggctttaattaatcctcttaagtaactttcaagttcttgagttcaagtaaacacactggcacactaggggaggagtggcaggctataagcattttaataattaaaaaaaaaaagccttttattgttcaaagtgttccttttctatggagtgctcccaaccagaagatgagggaaatggagataatgaagcacgtccctcctaccaaacacgataaattctacaggcactgtaagatcaagaatttaagattatttttgtcccaccctattttacaggtgaggtatcaagcacagtaactcgtaattttcttttggcccaattgaaaggtatcatataagagaaagctgtgtgtgcgtgaaaaggatccgcctttctttctgaagaaaagggtggttacggcttcggaaacgcttttcaagccaactctgcagcccggctggcggcggcagcggcggcggcggcaacgtcagattcccgcagaggcggcgcccggcaggggcggcaggagctcaggagaggcccccggggatcgggctgggccccacgtgagagctaagcgactgccctcgcgcccgcagaacagcagggcctgcatcgactctaaggcgagaccagaaacttgctagtggagcaattctggtgcccctgcccgggctgtgaaccctctgagatcatccctcaatcaaacgaatagaaatcctcgggaagaaaaaaaaaattgcggcaatccggctaaaattcagcagctttcagggaccgattcaggacattatccctgtggttccctcagtgaaaggagactcgaagcgcgactagaagtcgccgggccccatagatctgcggtgcccaggccgtaggcggaggcgcgggcagaggcggcggcggcggcggcggcggctggaggacccggcgctgggggcgctgagcggcagcctcgcttccggagctcggcgggcggcgtcagcggaacgggcggcttccggccgcggcgtaaacaaggccgtggactgcaggaggcggggcagacgggctgcaatagggagccggcccgacgcggaccgcttccctgcagtgccccgagtcccgggcccgcgccgccgccgcccggctccgctcgcggcccctctgtctgcaggcgtgccccggcggcggcggagagccgtcctcggccgaggaggctgggaaacgcgagcgcaggcggcagagaggcctcaacgccgtccctttcgccaccgccttttccttgcctcgcgccgctgtgcatttctctccttttcctttgtttttttggcccctcgcgggtgtgggcattgttggttagcaaaagtgcagcctcaagatggctgatggcaacgaggatctgcgggctgacgacttgcctgggccagccttcgagagctatgagtccatggagcttgcctgccccgctgagcgcagcggccacgtagccgtcagcgacgggcgccacatgttcgtctggggcggctacaaggtcagtgagtggccgggccgcgacggacgtcgctcggctgtgactcgggtctgcgttcgcggccaggcggggaggccagagcgggccgccgagggcgctccccgcctgcgtcgcgcgccccacctcagactctgcccgttggttgttttttttttgcgcgcgggaatcttccttctctcgagtaccccaacccgtctcgaacctccagggctgctgtcatgtcaccctggtgctcacaaagccaactcactcccacccccgttgttgccattggagcgttattccggggaaggccctgttaatgttgcttgggcggtgcattcggaagggttggggtgtgaaaggtgacggtgtgtgatatcactcagacgcgttatgaggacggcctacgaggacttcaccctctggagctgggaaccgctgcccacttacagggaggccgaggtgtaggaaaactggaattccaaaaggttacaggaaccaccttattcagccttcccgcctgtgcaaatggccatcaggactgttttccttctggcttcagctgggttgaagtttttcagcagacacccctattaagataatggaaaagctccaccagtaaccaaaaaatccccagcatcaaatgaactacagagtgcagctctttgactctccgatcccctggttataaacaacgtgattagttagcagtttaaagccagttgccattctttaccctgctaacctcggaaatctagaattttatttgctaggatggctctgagccagtcctaccacaaaattcctctttggtcttgaaaatgttctccgccctccccacgcccgtgccttggatgacttgctttgtgattgtttttagcttatggtacagctgacttgatcatagttgaccatttttgagatagctttcaaagatggctgtcctgatactttattttggtttaactgcaaaagtaattttttgccaatcctaatgaatctgcagtgttttccccagtttccaatgaatgtggttagaaaatagaaagggggccgggcgcggtggctcacgcctgtaatcctagcactttgggaggccaaggtaggtggatcagctgaagtcaggagctcgagaccagcctggccaacatagtgaaactccgtctctactaaaaatacaaaaaaaaaaattagcctggcgtggtgacgggcgccctaatcccgtctacttgagaggctaaggcaggagaatcacttgaaccagggaggcggagtttgcagtgagctgagacggcgccattgcactccagcctgggcaacaagaaggaaactgtctcaaaaatactttagaaaggggtagagaattgcaagaaggggggcgggggggcaagcatgtagtcacccttataaaaatgtaaattaattcccctggagaaacctgtcaatgacacttctaagctacctaattcataattgtatttttaaaatgacagcatgagagaataagactttgggagtggggcaggggaggattcttagtgtggaatatttcttgtggatttaaaagggcctggatgattggggccgattcagggaggagcagcacaatcactgaattggatggttctgaaacagactgccctccccatttatggctggtggctggaaccctgagggtaggcacagaagtccttggagattgtttcaaaggcaataaaccttggcttcctacatagtaggcagttttcctccccaggacaggctggtcccctgtgggtcagcccgcttccagcctttcccttcatcactggtggggtggaaaaagaagttgttttacgtggtcaactgttctgtttctgtatgtttaatattcaagcttgctggactttgacacccatttttggctaaccgcagtcgtttactgtgtcaacattgttcagaaagtggctagggagggtcaaaggctgggaatgtcaggcagttgttaaagttcagggaaaggatagaatcctggctccatcattacttcataaataaccttgggcaaattacttaaactctaaacttgttttctcataacatcagctactttttagggttgttgtgaggattaaataaagcaatccatggatagctttcagctgtggcatatggtaggctcagtctgtgttaggaattaatacctgaagggaaatggagcagaacaaagaacttaaaattctgcataaggatttaatattttgcatatttgcagttctgccctctctattgctgcttagagaatggataggtgaaaggaaggcatggctagaaaaccacgcatcgtgttagcgtggatcaggcactttcagtaacagcctgctgaccatggcacaggcagtctcctgaagtcatgcagctgaaatttggtgcatggttctgttcaggataaagctgccttagagagttcccagagatctctt

SEQ ID NO: 60455 - DNA, 2312 bp, Homo sapiens
taaaatgttcttacttttgaagacgaataaggtatgtcttattatccacatcataaacattgtttactctcattcctagcaagctgcaaagataaaggaaacatgtaacatgttacactattgtctgaaacataaaactacacataatttaataaaagcttcgaaagagcggatctcagtctctaaggatatggagtcagccgaggagcagagtctgaaagccatttggagattcagttcaaaacttaagagtaacgatttaaaaacagaagtggtctatcagctctaggaacaacacactatagcttgcgtcttccaaatgacccaattttgggggagaaatacagtaaaatataatccaattaatttattacaagggagaaaaaaaaaagataaaagagggccccgaaaatatgacaaagctcacagggctgaataatagaatccagactagaatccagatctcagtccaaatctgctcaatccagctaaaaccgcgatgctctctctctctctggggtgaggggagggaggtgttcaagaaaccaagcccccagtctggaaacctctgaagcaaacgaccactctggcgtctcgtgttttaacaaacgtttcctgcccaacccggacaacccaggccaacaatgcaagagcttcgcgctagcggggcaagccagagagctgggaggacgcgggggatggggcacgaggtgcctgggacccccaggggtatcctaagggtcacgggaaagacaccacacgcctgcccactcaggcctaggcaggtccatagacgcactaggaaataaggaaacatatcaagctggtctgtttgcgccatgggactccggcctctgcctcctgcactccccacacgagcctcgtcacttagggtactgtacctagcattcagctccgcgagtacggcgcggaggtcaatggtgctaaagcggctcttcatggcgaggcccgagggtcactaccgcaagttcctctactgcccggccggactcgacgccacttctcctccgcgcaggcgcacttggcggagctctacggccgcgcagaagacccaatattcctcgaggcgaacgtatttgtgtcgcttttctgaagatttcgattgtcaagttgcagctgactctcttcattgtaccaaaattcaaattcgaataaagattcaaactgttctcttgaaactgcattccttcctggaacccttacggaccagtctggttaccgtgccccattgtgtcttgggctcaagtcagccttcatagtgacccctgctggtcgaaacaattttcgagatgattatcaggagtatttccccacaggggggccgtagggctcagtgtagaagagcaaggacccctttctgcgcgcttactttgacataagattttgaaatgtaacgaaacggaactgcttcggtccttctaagattatcctcaacgatcgaggcgaactctcaaaacggagttcctattttgatgggtcctgctctcggaaggagcattctgcaattgattacaggattctcatcgaacctcggtcttggtacccctgagactcaccgcagtacctggtgtacaatcggtgctccataaacacttggcagcatgaatgtgcaagtgtttagctagataatggtgaaataagataaaaataaaaacaagaagattcccaatgggggtggggtgggaggggggattcacagtgtagtgaggaaaatagtcctgtaagaatgtaaattctgcatttcttttgtcttaggatagatgcatgggaagaaaggctactttataaggtgagaactcaaaagaggcagggtctcactatgttgcccaggctggagtgcagtggctattcacaggcgcaatcccactactgatcagcacgggagttttgacctgctccgtttccgacctgggccggttcacccctccttaggcaacctggtggtcccccgctcccgggaggtcaccatattgatgccgaactcagtgcggacacccgatcggcatagcgcactacagcccagaactcctgaactcaagggatcctccagcctcagcctcccgagtagctgggactacaggcacgcgccaccgcgcccggcgctcggcgtcgctgcaaaagagctgctagaggcttgcaggctacacatggtagcaaccagaattcctaccaccagaaggcgactctaaacagaaagggcgccgctgctatttcagaactggtaccagtagatgcaaaaatggctatagcacatactgcacagcattactgtcatacggtacagtaaacca

SEQ ID NO: 60456 - DNA, 3395 bp, Homo sapiens
gcattcatttggaggtgattttttaattcttgaaaagttgtcctgaagaaccggaatcagacctattccatgtggttgcagagggcagacccagaagcagccatgggggagatacctgttttattcaaagaggatcttttctgacagttatccttgttcaaaatgcaatgaactacctcaaaaaaaaaaaagggaatacaattagctttataaaaaatttagtacaatgcttctttcctctttcattttatagacagtgaggaaaatctgtgtttagtgcttagagtctttaaactcccagtagattatcagattaatgttaagactgatgtgaatgcttaaccagtttccactggccctaaaatgcctgaatttaacagtaagccctccaaaacagttatttcatatagatgaaatttctaatcacagaccaccaagaacttttgaaaaatttaaaggttgtcttctttcatagcttactcacttatttctgtttttaaaatgaagcatgattatgagacatgctcaaggacagctcagtggaggatgcagaggtttttgctctcattaacactgggttcaagacccaggcggctgggcgcgttctttaaactccctttgcttcagttacttttcggcgtctaggtgccgttccctttttggcaatccgacggagagagaagcaagcgaggagacagggtggtgcattctgccacgctggcccctcacctctgtcatcacagggcgttctgggttcctctgagaggagtttttcccttataaggaggcagtagtgggattcctcttcggaagattagccctgcctgtagccaagtagaacgaaaggatttgtgtgtaagactgttgattagcccgtctttggtctatagcattctaaagcaaaaaccttgacaggacaggggtgaaagaaggtgacatccgtgacaggaggtaggcagggaagctcaggtcagctcagtgcaggggaataatgttggtaactgcaagcagcatcctgaacggccgcgggaagaacttggaaattctttaagagaacgtactttttgctctctgtgatccggcggccatttttttccgactgtctgtgggtaaacgagcagcccctgttggctccgaaggtaataacagcttttcgcagagacgttttgaatatgcgccggtagggggcagcgatgaggcggttgcaaatccccaagcatcccgtcaactggtgagctttcgcgctgaaggaaacgtaaaacagtggataaatataagagtggagagagaaagccaactataaacctcagtaacatctttctctatatattttttcctttagaggaagagaggactcgtctttaaatgtgcacattagtatgtttcttaatacgtatgaaccggaaaggaggcaaacttcttaacttcaaagacactatttacttacaaaggtacccttaatgagggaggggggcaaaagagacggggtctcgctatgttgctcaggctggagtgcagtggctattcacaggcgcgatcccactactgatcagcacgggagttttgacctgctccgtttccgacctgggccggttcacccctccttaggcaacctggtggtcccccgctcccgggaggtcaccatattgatgccgaacttagtgcggacacccgatcggcatagcgcactacagcccagaactcctgggctcaagcgatcctcccacctcagcctcccgagtagctgggactacaggcacgcgccaccgcgcccggcggtcggagacgctgcgaaaagctactagaagctgcagggcagttacgtcattggggagcgggggggccacgccgggcgacgtgagcttggacacacccacactgggcggtctggaggctacgttagtgtggcgtcatccgagctgggcagccgttctgccttacagggttgggaccccggaagcttatcggcgcggttgcggccgcggctccctgtgttttgatcagaacaccacgttcctgcttaacagaaattggtcagtatgcgcttaatgctcatagtgtggcgtccggacacgcagcgagagaaaaacgcaataacctggtccgtcagcgttgcttgcttcagcaggccttaaatatgtgctgcatcttttgggggacgttacttaagaggcaaacatctggctcgaagtcttccattattttcagcaagcatttaggaggtgactgcactataaggagaataacccacagtagcacaggttgggagtctgcacagtgccgaggccagctcagtcttcactattcgaacgaaggaagcctggggcaactgtttgttttctctgccctgcgtgttagttgcccgttgtttttggagaaaaaactagtatcggggtatattggtggaaaaatttggatttggcagcttgaagccttttttgcgacaagcttaggttaggaagggatagaggggaggaaagaaaaaataattttcgaccatagtagatctgcgaaagcagaccttctgtttgtcctcttatctatagtctttccctcaccccccaccccttgtctcctaaaaaccagtccagactttccccgccacctccgtccttgtagcagataacgttgctccttccttcatggataaattgaaggccaacagacaaaaacttttcaactctttgctgctctgtccgctctaaatttatctttacaccttcagagaagagcacccttctgttttcccctcctacctcaaacccagtaggtcaaaattcttccatcaatcatttttacccattctatctctctctttcatttatacagattccaagctgcctttcttctaaaaaaaaaaaaaaaaaaaaagtaaaaaaactcctttgaccttgcctttctaaatgaaatctgtctgttgttttcatggctgcacttcttgaaaccatgttctacaattgctacatttgcttcttaaccttctgtcttcagtccatagcccaccaatccactgaaactattctagctaaggctacgatacccaagcctcctaattggcaggtctaagggaccctttctgacataggtgatgtaatttaccaccaatctctgtcacttgtgactgctgtttcctccctgaacgtttcttctccctggttcttgttcacagcccctgatatttcctcccaggctctctcttctgcccacccagcaaatgtttttgttccttacagttccctcctaaatgttctctgttctctcaccgtgttcttcatgagtgatgtaataaattctcaaggctctcaaatctgtagttccaatctgatgctgtttccagagcttcagattcacatttttagttgccttctggatgtcaccttgaaatcattcaaaac

SEQ ID NO: 60457 - DNA, 1712 bp, Homo sapiens
tgtaaggccccggcaggcggatcacttgagggcaggagttcgaggccagcctggccaacatggtgaaaccccatctctactaaaaatacaaaaattagcctggcctggtggcgcgcgcctgtagtcccagttattcaggaggctaaggcaggagaatcgcttgaacccgggaagaggaggttgcagtaagccgagacgtgcaactgcattccagtctgggcaagactccgtctcaaaaaaaaaaaaaaaaaaagtaacctgtatgaaagttaattttgtggcactgaacattggagtagataataacctcatctgaaatgggatgtctcaatctgtctacaaaaaactccatgccatagagctcaaaagtttgtaaattagtcctttggagacgttaaagagcatggagtcatacgaaaaggctttctgccctggtaagggaagaaagcttgtgggcaggttgagtctggtccttgagttctcagctctcaccagggaaggggtaccagacaaagctgaggctgaacttgagccgcacaggccctgattgctgggccgtgagagaacacccgaggagggggcccaacgcacctgaagaaaagacgacgtggaggtcataaacgaccaagagaaaggggcgcaccgcggacactatcgccagccggaccccagatcaagagaaatagaagaggagccggggtctccaaacactacaggctggggtcccagggcaagggactgggccgccggcggaagcgtcggggagaggcgggactgtcggcggggtgtgggagaggcggggcgtgggagaggcggggcgtgggagaggcggggccaccagcaagtgggcgggcgggaggcggggccgcagttggggtgtggaagaggtggggcagccagcaactgggaggggagggaggcggggccgccggcggggcgcggtgaagaggcaggctgccagagtgcctggccgacaaattacccagcgtgagctcggtcacctgggtgtggcggttcaaccctgagctacgtcctcccacggcgcccggagtttccccacccttgacacaatgcctattcgcagctcgctgcagcggagtcatctactgctgctggcaggattttcattgcgacgggttgttatgtgcatttcaggacataccccgtgggttgtccctgattcagttacatttaataaacgagcggtggattaaccggaattacagtttgacagaaaacacgttttcttctcgacaacaccctgcgtgtaggaagagcctttaatatggttgatacacaatatttaatcgatccagaaacacatttcttgtgacaggcttttaaatatcagaataaatcctaagagtgaacagttgaagttacttatccaatgttacactgctaggcctataaataaacttgcggggtctattttctcccatttgaatatgctttgatttccatatgacagttctgccgaaatgttttgacattttagatcttagtagaactccattacaacacgactatttattacgttgattctgatctgacgtgtaataaatcatgtccccaaaccaaaactccatacattaatatcctgatatttaacacactttatccaactattgattctatctgttcacaccaatgtggtaaaagctttatgttgtatttaatttattcattttgaaaatatttaaaatgcttca

SEQ ID NO: 60458 - DNA, 2740 bp, Homo sapiens
tgaaggtttcacgttattttaagtctaattttatcattaaccatttgatacaaaaatgtgtccttggcagggcgcagtggctcacgcctgtaatcccagcattttggggggccgaggcgggtggatcacctgaggtcaggacttcgagaccagcctggccaacatggtgaaaccccgtctctactaaaaatacaaaaattagccgggcgtggtggtgggcgacctaattccagctgctccggaggctaaggcagaactgcttgaacccaggatgaggaggctgcagtgagccgagattgtgcaactggactccagcctgggcgacagagtgagaccccgtctcaagaaacaaacaaaaaccaaaaaaccaaaaatgtgccctgaagtcttccacattgtattatttaagcctcacgtgagttagcaaggtcagtttacacgagataaacttagtaaggttaagtgcccagatccaggccatacaagcggtcgttctatattctaaattctatgcttcttaaagttaagaatgggtagtagttaagaagctactactaacagtatgagataaaatgatattttaaagatgaacagatgtcgcattctaaaaaggtgaaaacgcggcaaggcacaggaactcttcataatactgcagtttttaagaaacatgggctggtcttgacgagacctataggcagacagggctcaaacattcaaaagagctgcagagtaaactcaactccgggaaagcgctgcactgactggcagattccacacgagacactggcctcccacgtgtctttcaggaaacatacaaaattcaagggataaaggaagccaagaaggggttgcgaaaaagggaaaaaaaaaaaaaacaaaagcgaacagagcttccctgggacgttcagggagcgcggagggtgcgggaaggctggggcgggcggagggaattcgcagagcatctggcgggcaccgaggtctgggaacaggcctggaggcagctcggttcgtggagagagcgggctgcccgtgggccccaccctgtagggccccccagtagatctgctcccttggttcgggtgggcaggggagggcagagcgcaaaagagaaaagcagggaaggagacgctagaagagccacgggtaggcgcgagtcagagtccgaggttcgagggctctgggccggccgcatctgcgagccctccgaggcgccgtagccccgcccctccggcgcgtggcgcccatgacgctaggcgcgcgggccgctctccttacagaggtcgctcttgtccgaacggtcggcctctgctgcgcctgcgtggtcgggaggggaagtgaggcggtttcctcggcgccttttccggcagcggcggcggcagaactgggaggaggagttggaggccggagggagcccgcgctcggggcggcggctggaggtaaccccttgggccgagctggaaaggcgggccacctcggtcttcgctcctttgtggagctctggcagtaactcccctccctctctgtttctctgcaggcagcgcaccgagttcccgcgaggatccatgacctgacggggccccggagccgcgctgcctctcgggtgtcctgggtcggtggggagcccagtgctcgcaggccggcgggcgggccggagggctgcagtctccctcgcggtgagaggaaggcggaggagcgggaaccgcggcggcgctcgcgcggcgcctgcggggggaagggcagttccgggccgggccgcgcctcagcagggcggcggctcccagcgcagtctcagggcccgggtggcggcggcgactggagaaatcaagttgtgcggtcggtgatgcccgagtgagcggggggcctgggcctctgcccttaggaggcaactcccacgcaggccgcaaaggcgctctcgcggccgagaggcttcgtttcggtttcgcggcggcggcggcgttgttggctgaggggacccgggacacctgaatgcccccggccccggctcctccgacgcgatggggaaggtgctatccaaaatcttcgggaacaaggaaatgcggatcctcatgttgggcctggacgcggccggcaagacaacaatcctgtacaagttgaagctgggccagtcggtgaccaccattcccactgtgggtttcaacgtggagacggtgacttacaaaaatgtcaagttcaacgtatgggatgtgggcggccaggacaagatccggccgctctggcggcattactacactgggacccaaggtctcatcttcgtagtggactgcgccgaccgcgaccgcatcgatgaggctcgccaggagctgcaccgcattatcaatgaccgggagatgagggacgccataatcctcatcttcgccaacaagcaggacctgcccgatgccatgaaaccccacgagatccaggagaaactgggcctgacccggattcgggacaggaactggtatgtgcagccctcctgtgccacctcaggggacggactctatgaggggctcacatggttaacctctaactacaaatcttaatgagcattctccacccatcccctggaaggagagaaatcaaaaacccattcataggattatcgccaccatcacctctttcaattgccactttctcttcttttgaatttgaactctggagttactgttctacagtttggcggggacggggcttgggggttttctcttttgtttgtttccctttctttttcctttttttt

SEQ ID NO: 60459 - DNA, 2766 bp, Homo sapiens
cagaaccgtccaccagcagatgaacagataaacaaaatgtggcaaatgcatgcaatggagaaggattcagccacaaaaaggagtgggattctgatacctgctatgacacggatgagcaccaaagacattatgctaagtgaaataacccagacacaaaaggaaaaatattgtgtgattctacttctttgagtgacctagaataggcaaattcacagagacagaaagtagaatagaggtttggcaggagctgggggaaggggaaatgcggagtgattgctcaacaggtacagagtttctgtttgggatgatgaaaagttacatacagcattgtaaatgtccttattgccactgaattgtacacttaaaatggttaaagtggtaaattttatattatgtatatttcaccatagtaaaaaaaagttttaaatacacattccagggccccacccttagaaagcctcagaggcggccgggcgaggtggctcacgcctgtaatcccggcactttgggaggccgaggcaggtggatcacctgaggtcaggagttcaagaccagcctggccaacatggtgaaaccccttctctacagagatacaaaaattagcctggcatgatggtgggtgcctgtaatcccagctactctggaggctgaggcagaagaatcacctgaacctgggtggcagaggttgcagtgagccgagatagtgccattgcgctccagcccgagtgacagagcaaaactccgtctcaagaaatcctcagaaggtgatacagtaaatatggatggggtgggaatctggaatctgtattattattattattatttttaatgccttcctatctttctcaggcatagtcaggtttggaaacttatgatttagtctctgccagttctttccaaggggctggtgcgtctgtaaggaagtgttcaccagtctacgtgaaatacatgtgtatttctcatgcatctgagtgtattaaatttgaagtcctgttttaaaatctgagattgtcatgattacattgttttggggttaaagtgtccaatcatctcccaccataaaatgatggtgacaataattcaggttgttttttaagtgtctgtgcttggcaaaatagaagtgagcagtcctatgttagtctctcaaaaggttttcaaaattttaatggtttgttaaattccaaagattgggaaccattcctccagacaccatccctttgaaaatactgaaatagaaactgcttctgctgtttattttatttgtgccagaaagaaaaaaaaaatggaaaggacctatacatttttctgtggttcataggacctggagcaacaaagggcagcattgaaactgacagcattgacatgtaatttgtcctgctgcctgttggaacgttctttttcagatgctggaggagcatgacagaggagaggtggaggtaggcgagagtaatataatttctccaggagaacatctgagaggggaagttgctttcctgccctggccctttcaccctcctgagtttgggggctgtggtggggcagggattgaccaacagccattcctaggggatggatgcctttgcattccagagggcagctggctgaagggagtgctgagtctgtgggagccatagcccgccccaccctttaggcagattagttaattattgaaaagtgcctcagaagcacaaaggtctggagagactccatgagctattgctcaggcccgtgtgggagctggcatttctgaggagacactgagactcttctaggaggctgtggaacaagaaatagttccttcccattgtggtgcagtcctttcaggtttggtgtagagagacagttccagagaattcttatacagtgcatataacttctcaagagagaagttaaatttatttgtcttaggatttgtgaagtatttagataaatgaaccacatcagatattttccgttgttttaattttttgtgtgtgtggttttaatgttttaaggacattcaggtctttttttttttttttttttaaacggagtcttcctctgtcacccaggctggagtgcagtggcacaatctcagctcactgcaacctctgccttctggattcaagcaattctcctgcttcagctttcagcttcccgagtagctgggactacaggtgcgcgccaccacgctgagctaatttttgtgtttttagtagagacgcggtttcaccatgttggccaggatggacttgatctcgttatctgctcacctcggcctcccaaagtgctgggattacaggtgtaagccaccacacccggcccattcaggtcatttatgcataaacgatcacatgacatgttctgttctctgacttacttttttcttttacttaacaacattccctgtagctctttctgtgttagtgcatataggcatcccccattttaactgttgcattccttctagatgtatcatagtttctttacccactattttagcaaaggatcacataggtggttttccatttttcaccattacaaacaatgctgcaacaaatgttcttatacacaaatgggtgtgtgtatgtatgagtgtttctgaaggatattatttctagaagtggaatttctggatcaaagggcatgcacatttaaaatttttgtaaataatattgagtttctcccccaaaattctgttctgatttttatagccaccattatactcatcagcgttggacataatcattttgttaaaactgccagcgtcatgtgcagaaaaaacag

SEQ ID NO: 60460 - DNA, 1510 bp, Homo sapiens
atgtcaggattatgagggagaaacttggcaggggagcaaactgtgcaatatgcttgacaagacttgagaaacaatacatctcagattttttcagatagttctcaatttctggttcagaaatatggcccagaagctacagaaagggaagcaccactgcagctccacggagggtcactgcctcttagacttcactaaggagccaacaggggccatttatgcccagaaagctgaggtgtctgcaggaggggaacttactcctgcttccaccaggagtacatggaaattgaaaagagagaatttatgtttttttgccttaaatgagaaaaacagaaggtagatctcccaaggcagaacatctgtaatgatagagcagtaaggaatatgaggagggaaacatgagcatgtttgcataaacatttagatttttctgggcttgcccaatcccagtcttttggagtctgtcttttatgagggcaaccgtggtttaagagtgagcaaatgttagttcatgtaattaaaacccgttgaattgaacaggaaacattcacgggaaatctgcaggtgtctgcaagcaagagtgacgctagaaggatcttagtatgccagctccctcttcctcaagggtagtgtccctggaatgaagccaccagcaacaggagaggaaacagatggggttgtagaaagtaggagcagcaaaagcttctgaacttagtaataagctgcttgccccggggtgagtataaaaggcatctggggtatttgcttttttgtttattggaggaagaaaggtgtctcgcaacatttctctctctccccttcctctctctctcaaatttattcaggatatgaaatttctaaggctactgccatcttagggtttgaatctcttttcagcttcattcacacatattaaagagagacagttccagtatgacttaagaaagaaaagccaggctgatttccaagatgcagtgttgtgccacggatgagttttcttcctggagtgagctatttgagtttcatttttcttaccaccttttagcctcttcattccaaggcctggacacttcaggcagagaagccctcatcctgggtgtcggggtgggaggtgttctcatcatgaatgggaggcgtacccagatccagctctgcctttttttaaccaaaccagagtgtaaacaaatggctgtgtgactcaccataatcgacatagcaagatatgatacatgccaggagagaaaaagaaagtgctgatggaaaaataatctcattagggagatttgtttgtggtgatttattttattttatgttattttatttttttgagatggagtatccctctgtcatccaggctggagtgcagtggcgcgatttccacctccaagattcaagtgattctccagcctctgcctcccaagtagctgggattcttggagcccaccaacacacctggccaagttttgtattttcagtagagatgagggtctcatgatgttggccaggctggtct

SEQ ID NO: 60461 - DNA, 3398 bp, Homo sapiens
gtattactggctgggactatagcatatggccacctctcactgcaagggaggttatgaaatggagtatttttgctcgggcacattgctgctctaaataaaactgtggttctgttagtaaggagggacaagcaaaggatggagtttcaggagagcaaggcaaaaaccctgcccaagggtttttatctaatgtgtggccaacatctttttctcatggtacaatgaatattatggcaccttatttactgagccttatagaaataatctgtacaacttagacataagaaaatgtgagcttttagtccgaatcaagtattgttttaccaatttcaaatgagcgattggtagtttcgtgcagaattttaacgtcatggctgcataatgtctaagtgtacaagcccataattccttagaactattttcacttttaaaaaattcatatcagttatttttacagaccatattttgggggtgaaaattattaaaaattctcttaattcaagaaaaactctgtgtcatgaatttcccccagtctttgagtatctatagcttaaagaacatgttctactttgtgaacagataggtgtttggtaagaggtatataaatatactttttctggtttcatttattttaagataattttttttcacctcatgacagtcatttggggctgacaatgttaccatggtaaccatgttccaaaattctggttgctagtgaatattgatccttagcacttcaacacccttcattcactacaatgttcacttctctacgtgaaggaggctctgctcagagagcacatttaggtcaaggagtcctggcttggtagcggctaggtactccagaataaatctacaggattttcctcccaggaaccccatctaaagatcccattgagaatctgactcaacccacaacattctggcttacattttcactgaaacagataggagcaaaacttctttgtttccttttcagctgcatcgcgagagctcagaagctcagtcaatgcaaaacagaaggcactgagggaaaatttcagatgagaatggacgtaccctctccagaggcaaagaagtttgcaaattactttttgaagccctctctatataattttgaggttaaaaatgctttcctcctgcgaaggagagattttaatctggattgtatgctggagctcaatgattgatccaaatcagagtccagaggcctcatgggaatgatgatcgtcagggctacagtggggcaactgcagatggagcttgcccctctcctccataaatggggaagagcctctcacctccagtgaggttttgtgcataagaaaggggaggcttgttagagacagcagctttgaaaacttaattctccttgccaagaactaatggactatcttcaatgtgcatgaaaatgtgtctgcacagtgaccagagaagccaaaatgaggcctctgcagacctaatttggcatcaatttatctccatatgagaaagtctggttgtacttattttactctctgctctaaccaagaaaaaaacaaaaacccggcaaaggttcattgagacaacagtcggtcactaaaaaggaatttgaaccagtcggtcacagaaaaggaatttgaacgaagataacgtagttacattttacccacatgttcctgaggccagtgtgctaatagttaacaaatgctatttagcccatcaccattagattaacatttaaccaaatcagcatagactttgtgtgactaaaagaatctacaaacacacacacacacacacacacacacacacacacatcttttttttttttttttgagacggaatctcgctctgttgcccaggctgcagtgcagtggcacaatctcggctcactgcaacctccatctcccaggttcaagtaattctactgcctcagccttctgagtagctggcattatagatgtacgccaccatgcctggttaatttttgtatctttagtagagatggggtttcaccaagttggccaggctggtctcagaactcctgacctcaagtgatctgcccgcctaggcctcccaaagtgctgggattacaggcgtgagccaccacacccagtcacagatatcttttgatatctcaagaactatggacggaattaaagaattccaagaccaattaaagaatttcaagtgagacaattcattttcttatgatcttggtcctgtgtttggagaggcaaatgtgtgttttagtgaaatgtaaatccagggagaaggtgcagtagaagaaactgctcacctgtccttgtagctatagctaacctttatggagctctatcagctaggcagtatttactcatcagttctgggaggtgaatgctgttataatctccattttccaaatgtgacaacagagacacagagaagttaagtgacttgcccaacatcaaacagctagttttacaggaccatgctccttgtataagttgttacacatggtccccctagctttgtggctcacgatcctgtgtgcagaatgctattgtggaaagcagggagaaaatcaagctgcggtatactgggagagaaagaacaaaggaaagctcttaaggcgacaacaaggacaatgtctccaaggacagtgcaatttcccatcagtgaggtactggtcaggctccccagcctcagaggcccatccagggtttcttcgctgccagagtcatgctgttcaactgctcgtaggggtgcttcagccctggaaaggagtccaggcggtagggctgccagagacctggctggtctatccaaagacaaaggaggatgccattcctctgtaagttctctttcaaatgacctttctgagatagatcctgtttgctttagtgtctgccctcctcagtacatcctccccggctccaaaaagacacatcccttgatattcatccagttctcccaatggccttggatgcttgtgactgtgcttctcaggggaatggagtcattcctagtgctgggtttctggaaggatcttatcagagtgaatgtagtgtgacgtttggatacagattggcttattagcaaaagcaccttttaacactgatgctgcccgttttccctggaaaatgagcctctgtttaatccaaataatatatggagaatgttcagaactgtgatgttaccatctgttgctggaaattgaaaagcagagaggaaatatgctaatacctctctttggaatttcttcacctgccctctcagtatagtaacagtctgttaggtctcaaacctttgcaccatttatcattaggccataagataatgaatgcctctggccctaaaatgtgcatcattacaatcatttggtttaaaaatatatgagtatctctaataaaagggatgattatatcaattttaaa

SEQ ID NO: 60462 - DNA, 2507 bp, Homo sapiens
aaagagctttattctctcatgtaagtgagtagtccggaggtcacgtgggcttcagataaggcctcatgaacagctggacgagacaatgaagacccagtgtctttctgtctcttcttagtctccatggtgacggctttattcttgggctgtcttgccagatgatcacaagatggctgccagacacaacctgagttatggatgtcctcattcacatttcctcagagaaaggaaacttctttcccagaagcccctggcaaagtcaccttgcattggcctgcattgggtgactatccctaagccaatctctggagctaggatgataggggtcactggttggtttaaacctcccaaggtctacccagagaattgcaatgatgttaatccctgccaacagcatggctaggaagtatgggaccctgttaggaaagagaaaagaagaaaaatgcctgtggggaggccaccctatgccctatatttttcctcgtcatcctcaccaggtagtgttatttaaaggactttaatattttaaaaggcaaattgctcccaaaaggtctattgccctcaaatttcattttcagtagcctgaaacccagtattagacttattgatttggggtaaggcgcgggatttcctgaaaaacctttgcttcattcattcaacttacctcattcattaattcctcggtagacatttcttgggtgctggttatgtgtcatacactctgcaggtcttgcctgagaggataaacacatcataagccattaggatcggtggcactagcacatggggcacttgtactctttatgaaggtcgggaagcaagtaggagggcacgggagacaggacaggtaagttttgatcgtgaggagggaagaggcctaggagttgggcatagggtgatgcccagagagactgcacctgcatgagtccctcagtgaggacccggggtgggctcttagttctttgaaactcagaaagggagactgctgtgagggctgcatttggggacttgaagcagtgcctgttttgccgtcttatgagggcaggctttgtaattggggtttccagtcccccagttaggaagtctctgggggaaagatgactagagtctgtggttcttgatttgggcttggagaggatttgggggtaagatgctaggaaatgagagtgaaatctctgaaacttacaggaagaatcttccccagtccagcttgtctgctgctctcctgacgctggaacagcttctcaggagttttccatttttcatggcacaattctttctcctgcaaggataagagaataagagcttcataacccaaatagttcacagcgtggtattcgcctctatttaaaatcatctcccattgggttcaattaacaatgtacatgtcaaattatgtcacacccattacttgctctaatttggtcaggctgggtcaggcagtccctgaactgatggagctgttaacctcccagcagagagtcacggtggctgtgcctgcactgcccttggccttggctgtgtcagggcagaacactgtactgggaaagtaccaggcagtgctgcaggaaaggtcaagttcgtgacgacagtgaccagtcatcaagccctttaccagagctttgcctctagagatgactatgtgaattgaatcgtggctctgtcatttagcagctgtgtgatcttgggcacgtgaacttttctgagcctcattttccacatctgtaaaatgagactattataacacttcatttatatttatacttttaattatattgatatttatttcactagggttgtagtgaggattaaatgccataatgcatgtaaagtgttttgcataatgcctggcacttaggattaactcaataccagctatttagtagtagtatttaatttttaaaaaatcttgtttggtccctcaaaactgggattccttctgagatcacattcaggaaatatttcatcagccctcaagaaactcggagaagacaggcagtctttcctggaacgggtagaggggaaccaaaggatctgcaatggtacctagacatcaggattattaatatgtgtgccaagagcaaccctgactttaagaacacctctgtgtgggcacagaaagcttctttttctgccttggggtttcacaggtcaatcaatctgtgtggtcaatctttgtgcggtcaatctgcagagccccaagggagaaggtagaagggtgctgggcactctctccattttaagtagaggtaaactggctgggcgtggtggctcacgcctgtaatcccagtactttgggaggccaagatgggcggatcatgaggtcaggagatcgagaccatcctggctaatacggtgaaaccccgtctctactaaaaatacaaaaaaattaggtgggcgtactggtgggtgcctgtagtcccagctactcaggaggctgaggcaggagaatggtgtgaacccgggaggcggagcttgcagtgagccgagatcgcgccactgcactc

SEQ ID NO: 60463 - DNA, 5476 bp, Homo sapiens
ccccaggaacaaagaaatctggcaggacacacacaggtacagcatggacctgctttcggagttatgcataatgattttttaagttggagtgtgtttggatgaggagggacaagaaaactgcttctgcaggggaggtggtccccactgcagcttcatctgtccctaggccacctccctgcagccaccccaggcagtcgtgcaggacgtcatgtcctggctgctttcctctgagtcacagagctcgccacagcacttcttcctccgcctcttacaggcctggccagccaggaagtcacaaccacagctaagaggttctgtgctgagcatctacagtagcccccaagtgaggccagaggtagatggtaatgggtctgaggcttggggccatttcacaggacaatcatctctatacttttcattttggttttagaactctgtgggatttctttatctcaaatgcccttatcagtctgcagatctcctgaaggctcatctggtttgctaggtcttagtctgctcaatacagatgataagatagtgggtgaaacaagaggtttggtaacataagttcctgatgacatgagttgtacacagtatatgtgcaatttctcaacacatgtttggcctaaacacttgcaaatacaccatcctgagctaagagagtgactttctttgattttttttttctttaagcaatgacactaatccaacaacaatcattggagaatgcctactattttccaggcattctcacaagaccaccagattcaatgtgagagatcccctgccctctagagttttacaggttaatggaaaggggtttttaccaagaagcgcaaatccaaattactcgtttcttatgttagcaacttcaccctcaggagtaagcagcagcagcagccaaggggcacacagagccacaggctaaacacggtccacagcttcctgaaatcaaagggcttcaaagatttggaagacacatttcttttgatttttaaagcaaccacacacctattctggaatagtgtacaaaaatcacataggccatcccgactcctaactgaatcccctcttccaccgtcagaggacgagggcactttttggcatgatggagagaagcgagggggcaggggtggccagagagacggctggagtggaggcgggggcaccagcgtggggtgaaggcagaggcaccacgggaatgtaaattgcaggacgcatcctgaggcagtgagtgttcggggcattcttgtgggtggtcacttgggccctagattaaaggcagaaacacagaaatgccttgggggacgttgtaaacttcaacagctctatctgttgtttcaggaatgagggagaaacattcaccagaagcttcagactgggaggagacagagtctttgaggcaacccaggggcttcttagctgcagctgtgtctgctttgaagttcagtccactctccccaggaagccaagaggctctcaagtgcttgcagcagagaagtttcatagaacagaaagagcagacagaggcacgctgcgccctccagcacggctgcctggcaggaagctttgctgagtaactttggttttagttggaaaccttctgtcatgttcctgtcggggcagtgtggggagtgtgggctgcactgtggcgggtgggttagatttcctccttccatgcagtggacagggatgtgggatgggggcacgaagccatggacaagtggataactgaccttgagaagatgtagaggtcaccacagagggtttccaactcacgaaagcatttctgctatgggaaggacaagggacgctggcctatggaacaggccaccggagattccagagcagagccctgcccaggcctccagacttgtggctttaattatccagttagtcataggtttactgtcatccaagtttaagaagcttgactgtgacccatgtgcaaaaaaaggttgttcaggctttttttttttttttaaagccactctgggctgttcagcaggctgagacaggatccccagagcccaccagccctgcagaagtggggactgcctacctgcacttttctttcttaggcacttttatcttgaacacagagcctcaggcattggccagtccggttagtctggaaaaacttgagagccaacagtttatttctgctctgagggcagtttcactagcacagagcacatggcgagcagagcccagattacaaggctgggcggggcggggcgggggcgggggcgggggcgggggtgcaggtgaggtgcttcggctctgacgggcgctgggctgctcacccagttttacatgggaagtggtagggccctgtctcccctggcccctgcccatgccccgggagaaatgggtatgtttgggtggtaccttcctgcatgggcagaggcaggtgattgtatcgccagccctggagctcagcgtgcacagcttgggcttccatttggaggaacctgatccttggacttgaacactctgctctttgtgttttgcacaacaggagagtcctgctcctcgcttagctcagcacagcgagtcccctggcttcagcttccctcctgagcacctgacggttgtcggtttactgtgactcactgccattctatctgcctgggcttatgtttccagcatctcaccagagctgttgtgacccatctcctgggcaaagccttccacggagaggctgccgggccagcaggagaggagacccaatccatccatcagcatttgaataattccatccacacatacttctcttccaaacacccgggctattttcctttccctgagccatgcaagcccaaggagccagcagggttgcgtgctctcaggagtaggacacgtcacatcaacttgagtgctccaggagccctgccacaatggtttctttgtgagatcatctttgcagcggtttcctgaagctctggcctccttcctggtatcttcacacattctaggtgtttcaattcagtaaaaacataagggccttttgactgctcactcctgcacttcacactgggaaggacacagaagtccccagagagtgccctggacgacaaaatgtagttcagaggtatctaaggtgggttccacccaaaagggtcccacaaagaaagaattccagggccaattaaatttggggatctgcatagtccatctctctcttggtgattcaaaacatatatttatatatattaaaggttctgagaagtcctgtaagtaaatcctgttccactttttaacccaccatctcccaaacccagcatgatactgatatcagcatgctactcttttcatataacacctacttatatatgaaggaactaattgaggtcttttgagatatattttaggaaatgatctaacagtggtttttaacctaaggaaacacctcactagagagtgcttgggcacaggaggtggcattttgggttgtcacaaagatggggaggtgctacttgcatttcatacataggggttgtgggggcaggggcagctagtgctgttacagtgatgatgcaatgcggccccgtcccaagtggggtggggggcactgtcctgccctaaatgcccacaactctccccacgccgctctcccaccccattgagaagcagtggttggacctacgctcagcattgtgctcccaggccctctctgcgggttcaaacgcctcttgatgtcctcttggtctctgcctccttgcttcctctagttgggatgcctgcacgctggagagagttgggtcttttgtggcttttgtggctctggtcccagtaggagatgacagacacaaccagagggcaggattccctcgttccacggttccatctactctggaggcgaaaaaggggtgtgtgaagtggtccctgggaataaagagaaagctgctcacctttctgaaaaacttttcacctctcagggaaaggggacctgagagaagcctaagagaaaactcctgatgcttagccaactccttgagaaggaaagtgagaatggaggctgaagccccttccatccttcctggtaaagcagcggagacgccaacacccacgatctgcaactcaaagtcaagggattccgtgtccctgcttgtgtcaacatagaaaacgcccatggcaacgggcaagtgcggcctgaaatggcagagtgtgtgtttcacaaaacaggggtggctcacggctgcagccgcccggggaggtcctggccttgccttcgaggggctggtcctcggggggtggatgcagctttgcggggctggctccacgtcgcgccgcggcggtttgggctggggagcagccctgcagggaggcgccgccgggtgggccgcggagatagctgcagggcggggcccccgggggcgcggggacgcccagcggccggatatcagctgccacgcccgcgtgggcggagaaaagagcaatttgactttggacggagagctgagatgcggggaggaaatccaccaccggcctctggcgactcctgtcctgcgcgcaggggaggcagcgcagcccgtgaacacccccgagcccggtgcgggccgagcagttctccgcacctccggtaaaggtgcaggaccgggtgatggtctctgcagcagtcagaaggctcctctcccagcccaggaacgtctgcaataaattgcttccatgtgcgggcttcccgcttcctctttctctctcagggttaatgtgggaaaagggaagtggcttttttttttttattttgaaaattagctttagggcaaagtcctgccaagtgtgtagttcaataccccatattataggtgaggacactgagctccagagagatcagattccaggtcacactgctggtgcgccgccaaaccaggtggagaacgctggtgcctccgctccttgggcattttgactccggcattcatgattgttttcccttctttaatacccactacagcaaaaattttgttgctgtttccctctgttaagaattattaaaacttggaggaggggaagcaaaaagttctttcaatattaaattaaagcactgtctaacgagcccatctgagagtcatttggctatctaggggaaggtagctttgacttattttttactataaaatagagtccaaacgttcttaactctgaaattagttaggccaggagccccggctcatgcctgtaaccctagtactttggaggccaagatggaaggattgcttgaggccaggagttcaagactagtgtgagcaacatagcaagagtcccattatcgattttaaaaaataaaataacatgagatagtactgtgtagaaactattaaaatgtaagtgctgtctgggtacgggagctcacgcctataatcccagcactttgagaggctgaggtgggcttgagctcaagagtttgagaccagcctgtgcaacatggcggcaaaaccccttctctacaaaaaatacaaaaattagctgggca

SEQ ID NO: 60464 - DNA, 2049 bp, Homo sapiens
aagttccagctacatgagctataaaatcccaagcagaactggagcatcaaattgctgtgggttcatttttggctggcaggcctcttctattagcaccataaacaccaccactatccccacaacacacacagagaaatacagcctgaggataagaaggcacattgaggagctgagggcgctggtgaggaggggactggtccactagccatgacgaggaatccctttacaaaggggccagctttgatgtgggagtggagcagggaaatctagaaagcctccatcagagacggaatccaagacctgcagtcccaggactctggttctgtttagactcttaggttattcctccttatgggaaatcctggaactggaccagcttctgtgataacctgcaaccctggggacacattcaatttgcagatgtgttgcacaatattgagcaaaggttgattcaacatttataagctgggagtcgcagattcatggcttcttttggagaaacagtaggtattggtaccccaggccctcgtggccaaatagactgggccttttaaatagagtgaatgactcacaagtttgcactttccaccgctccctgtgacagccctcataagaggccaggtgatcctgaccttgcacgtgcactgctgtttattcttatagtggaaaaacgtttctctgtatactcattgccatcaaacgtgatttcccacacaggacttccctgactcctgaaggtatttgattttgcaacccctgatctaaagcgccttgattagcctggattgtttcaatcacaagggatggaagataaacccatccaatttaaacaaaaataaaaagagaggctgacaggctcccggtgctgggaaggattcctgggcagtcacagaatggaaggagggactgcaggaatcacagaaaatgaccagtgaactctgccaggattctgtctccagctctccttcctgcctgtctctgtctttggatgttggcctcattctctttcggcagagacgcctttgccacgtggtgaggatcatggccaccagaagtcccaatttagaaatcccagtagaaaaaagagcttcctgtctccagttctgaaaatcaatcccaggaaaggatgctggcctcacttgggtcatatgctatagagctgaaggctattttcttttcaaatcaaacacttatgtagctagtcactgttctaagcaggtcacgaatattaacttatttaaaccatattttaaagagcctatgagttaggtgtcattattgcctccattgcaaataaagaaagtgagccccagagatgttaagtggctatcccaaggccacaaagctattaattaatggagttgacatttgaagccagccagcctggctccagggactatgcttgtaccccattgtatggttgtgcaggtttgtaccacataactccaggaaagcaaccactgaacttacacagagcatgacctgtacaggtgttgtggagagcctgcacgtgcctgaaatttaataaccagtcctagaatttgacctgttttggatattccggctcagtttctacatctgtaaagtgagaggataagcgttatcttctgggattgttaggatttggggagataagtaaccatctagcatggctctcggcacaaagaatgctctagaaaaggtcagccattaaagacttaactttcttcctggctctcatgggcaggtgtcattcccagccctctgctctcacttatgacaacatctagtctgtacctctgagaattacacaggccctgccacctctcctagtttagccttggctttctaggatgaaacataagccctgctccctgttaaggagggttgcaaagggcagggataaggccaggtgctgagtatgtgggtggatgggtgggtggtggctgaggggaatcagggcaagtgatggaagaacaccaggtgctttcatgatgaactgtgatgtgggtgaatgagatgaaatacaaaggaaaaggagcagaaagagaggcagggagaatgcaacta

SEQ ID NO: 60465 - DNA, 3537 bp, Homo sapiens
gctgggattacaggcatctgccaccacgcccagctaatttttgtatttttagtagagacggggtttcaccatgttggccatgctggtctcaaactcctgacctcgtgatctgcccatctcagcctcccaaagtgctgggattacaggtgtgagcctctgcacccggccaaccttttctttctttaactagacttccctggctgagaccaagacaaaaccagattcccctgagctgtgcacctgccgggactggagcagcccaaatgcccatgggagggctgttgactggggctgtcagaccaggctctccgaggaggactcccacacccacagccaactccactttacaaaaccagctccagccagaagtatgctcgggggggcaggagaacagaaactgcagtagtgtgggtggattttaaatctgcaaatgcaactggctgcccaatgtttgggagataaaataggtcactatcctccccttggttcggcgtcactcccaggccctaaaggggagggaagaattttgtgatctttgctgtcacaggctatggacaaatttggttatgttcagctttacaagagctgcccgcccacctgactcttgttcacaagacccctaaaaatcagaaaaagatcagtccaggctgttcagagttggatggggaatcttcctgaggacagtttttaaagagtccattttgacaccagccaagacaaaagccaggacccagagtctagacagctcccaagcctgccgttttcaacttggccttaggatggagtcttctgttctctggcaatgaatgacaggcttttaaaggagtgacaaagagcaagccctggagagagccccatgaggccttggggtaagggcttccaggactgttcatgagaagctgtgcatgtctccctccagcttccccagatgagacaccaagattgagaagtgaagagtcatctccaatttggcagacatcctgaccctccacactcaccattctgatatttagtcattaccatcctggcatagttaaccacttctccttctgactgagaagctgaaagtgatattcagcctgggtgtgatgtggggattttctgggacagggcggagatgatgagatgctggagttgcatgagctggtcattacagtcaagacttgtgaaccagttgtgaaacccttggtaacctgaaatctgctatggtgggagtatttacactacagaaattggccaatgctgcaaatcagggtttctttcttttttcagtgagacactgcaccagcacacactgcattactcacgcaggaggagctctgggagggcgggagaaaaccatgggtgagcagagttgaggatgtttggtgcttcccctgatggcttcatcatgtcatctttcttggctcttcatggtcagtgttttctccgtggaaacaccaagagattctacctctgctccgtcagcaaacaaggaagtcattgattttcatggcccctgtgctagagaactccaagagcccaacttcttcaagcagcaggcccattttctggtggagaagagagaaggcaaagccagggaagggcatttaatagtgacaactcagcgaaaagtagaggcagcccaatgatcaaaggtgtcttccttcaaagcccctgagtgaaaacagcaatccatgcttaccgatgaaggccacaggtgatgtttcttatgtgagtgcatccatctgcttcaggtcatattttcagaggtcatacaaggctgaaaggaagcaaatcattttcatgagaaggataataaatgagaccaggattggtatcgagaaaagtttttagacatttctgagctggccagcctggggaagaaagtgcttctagatacacagatttccaggactctccctgagagggttagattctgggggtctgcagatggggccaagaacccgtgttttaaacagccccttcctcaccccgtgatcccgctgatggcagcctgcggaccgcacttggaggaactggtctagtgagggtcctcggagggcgttttgcagtgggtggaactgaactctgagtgggatcttccttcagtacctaggccctgccctgccatggctatggatcttcagcactcatccttggggactggtgctgggtgttacgggaacagcataaaaacacaaaacaaaaaaattccatttctcaccaccggcggtgagaaatgggggtggagcctggaactgtggtcacagggctccaagaggagcagccaggatgccattgcacaaccagccacctctaagagaagcaggaccaggcccagggctaagccttcacaagccctgccgccagctgccagccacccttcctccctgggagagccagaaagggaagcatagtgaagccctacatggtggcctccatcaacagggaggcccctctcctccctctgccgcagccatcctactttcggccagaatgtcccagggccaaactgaggacagggcggcctctccagaatcctgcccttaggggccctgccagagactggtttttcttgttggaggcacctctgcacagtttgcatttataaggcctgaagaactcatcccaagaacccaagcccacttgcaaagatgggatagagaaggggcatggcattccacagatgggctcactctggagaggagctactgacccagcagcagttccccctccctcacccctgctcaccaccccaggaagacatccgaatccccatcaaatggtccctgccaagagcatcgtggtaacatggggaaagagaggatgctaagttgcccctctgcccactggactccgtctcatctgaggagaattccacagcagccccttctgggctgtgctctttatgtctctaagccacttcctgtttccttttctaggtcataagccaggcttatagttggtgtgagtcacttacctaggaagcccagagcacacggctgcctctcagggagggagcaaaggatacagcttagaagtgcaaggcactggtttgctcctaaaacacatagattgtcctagacttttagcagtgctgtgtaccatggcccccaagcaacgcacgcctgggagatccgtgatttgcccaatttgcgttcctctgctgatgccaggctttcagttcccaggaggcaccggacaagcgtagttttgcaaatgaaacattgctttgccaaggggctaggcctatcagacaatcatcaggcaacagccagcaggccctgtgaaagtcatggccaagaagccattcaaaagcattgtcttctagtaactaaatttcaaatccagggggaaaccacagctcagacatcggccagtgttcagcaatctggattcacagggaaacggacaggaatagattctgcacaagtctattgtgcattgttttcccttcatgacatctaggcagtttattcctcctgacttccactactcactgcatgaggattattctgtggaaaccagagtactaaggacgaggcgctggatgat

SEQ ID NO: 60466 - DNA, 2951 bp, Homo sapiens
aaaaaaaaaaaattagctgggagtggtggcgcacgcctgtagtcctagctacttgggaggccgaggcagaagaatcgcttgaacccgggaggcagaggttgcagtgagccgagatcacgccactgcactccagcctgggcaacagagcgagactccgtctcaaaaagaattttttttttaagtagcctgttggaaatggatgggtctcctttgaactttagggctggccttactcgctctcaaagtgttaagtgtaatgagtgcaaaggaaccacaggtcccttccactcttctgggctaaaatgccaccattagtaaggttaaatacctattttatcttcaccactgagagcaactctcaagcccttcattcacttagcttcagggctcagttctgacatagtgctctggctttaaggaaagatgtacctttttatcacaatgtttttcaggattttctcagagttgctgggcctcagaactctcttcttttgagtcctaatttggataatttgggaaactgcagccacaggtcctccctcccttgagattggctgagtgaggcagactacgcctacagcgcagaaagcagggcaggaaatcatactctaatcataggtctttattcagaaacccagcagcctcactaccaaataacctcaggagtcctaaagcctcagtgtcctgacctataagatcaaagagtctcatgtgatgtccccaagtggacttttaataaaaagtagcactgccagtttctgttttgaccttccaaccacaggatcatgccaacattcagtagtaaatgcatttttttttcctgccaaatcgactccttgttcttttcaacacatcctcacacagagggaacaagccactgaggtttcctgttgaggaaggttctttggtgttctgtgaggaaaccatatattcaaagaaaccatgtgtaagttttctgtgtagtaggacagaactaccttaatttaacttgatgtcttttcgacaaaccatgtacccctaacatgaagaaatggaaggaaggtgtttattttcatcccagctcttactctgctgcattgttcctgtgtacatttctcttattccacagagtaggagcttcttgaggaccatgacagtcatttatttctccctccctgctcctggcactagcaggacctcccttcctccctcttaacaaagttttcagtgaataagtgaatgaatgaactttcccctgtttccttatgggtttcaaccagcacagactacctgcctttgttaaaatggttcctgtgtgtctttgtctctacgggcactgtgttttatgggtttctcgaaaccttcccatgcacacagtagtgtagcagtaagatcagctacatacattgtaggacccactgaaaaatgaaaatgcagggccccttgttcaaaaattatttacaatgtcaaattattcaaaattaataaaattaatttttaaaccctaaattaaatagtaaatgattaagaatttcaaagctttgcagggtacagcagcacaggcaagcctggttctcgtccaccacatggctcagcttcctgttcctcccctctgctcggagtcacagtcccgaggccagcggggtgtttaccgacttgggcctacccacaccctgccctgcatcctgtcaccagagtttcatttggagtcctgagcaaaggtctccaattgctgattctactgccaacagaaaacactctcccccttctggatgtgttggcaggaaaaccaaatttttatctctccaggtcagctaaaatcttgaggccagttaactttcccagtgatctcatccgaatcatccttcacttctgcccccagtgaaactgaatctgcactctgcccgactctcagcccaagtgaggtgccacacccacacctcacttgtcttctactgaggcctttcctgataacccgtttccctgggttgccctctctcacccttgagacccctgttcagttgtgaacagtctctccattctatggctgcagactcttgactgaaatctgtttgcctccatcaaaactagatgtttccaaggaaaccacctgcccctgtgtggctctaacagttcccaagtggaatcttccagtgcctctccccactgccagatctgccatcaccacagaaaagctgaattttcatgtgtgaatcagccagtatcctggcctcaaatttgttcacctccttaactttggtgaccattgtctcctctccacctcagccatctctatatcctgtacattctcaaaactcagaactgaaatggtaaacttcaatatccctaaacttattgaaaacacacaaactccaatatcccacattctcatttcaattccttggtttccagcattcatactgtcaaacatcagcatttttgtgctcctccacatggcctgtctccatgtggagagcttgggcttcctcacagcatggtggtctcgaggtagtcagacttgctacatggtagctggtctccaagagtaaaagcagacgctgataaaccttttgaaagttaggcccagaactggcacagcatcctctctgccttgttctgtcagtcaaagcaagtaataagaaatcatgaggtgagtccagattcaatggaaggagaaataaacttcacctcttgaacagtggagcagcatgtgtatacaatgggagaaggatttgatggtggccatttttggacactgtctactacagaggagagagaaaataaatatatagacaaacaggaaaataccagatagtaattgtcaggcctctgagcccaagctaagccatcatattccctgtgaccggcaggtatacatacagatggcctgaagtaactgaagaatcacaaaagaagtgaaaatggcctgttcctgccttaactgatgaccttaccttgtgaaattccttctc

SEQ ID NO: 60467 - DNA, 3264 bp, Homo sapiens
agactcgggagggagagggcagagcagcagagggttaaggatgagccaatggtttctaactagggggactagggaaggcagccttaactgaaagagaatacaagacaagccagtttgggtgttctgttttgaactcgataaattcagaagctttgcgaggatctagggggagaatctcacagattgctgggaatacaaatctgtagctcaaaaacgcattggcagtgcctgctgcttgatgaaggcatgggtgtgcgggcttcatctggagaatgcggaagattccatcatgcctagcaggctagcacggagccccctctccttgtaaccaggctcgttggcgacagagatcctggcaaattatgaggaagtagaagctgggagccattcaaagtcatcacatccacgtttctcttcagggactcagccagggccgctcctgctgcttgttccaaggcacactgggagttgttgggcaaatatttgcacaacatttaggccctaaacctgcaatggcctgagcccctccatgacagagcctcctacccgggtgcaggcagctctctcagcttctccatcaaacctagctacagcaagggctgttgagccactccaagctcaagtctggttttccagaaaagatgtcctgccaagaaatgtgttactgaagagggaaagggaaatataaccaaaggccagggtactggcacctttctcctgtcctctcctgaaaacagggacctctgcttccttttgccttcttgttctgtgttcaggaaaagttgtgtctgtggttaatctctcgagatccggagggagttggaaatgggtttgaattccagtttccccatccccatcacttccttgggagtcagtgaaagtcactgaggtaacacagcagagcgctcggcatatgagaagcgtgagccaaatgtgagctgttctctcccaggagcgtgtctgaatggggctggagatggacgcctcctttcctcatttctctcagacctcctggggtggtttcctgtcacagaacagaagcaattgcctcaaatcagatacccaaggatgctgcagggagaagaggctggaagagggtggctggggtttcacttgtgtaagccacacacctaaaataagcccccgcaggagactctgggaatttcctgtaattttcactgtaaatgtcctatttataaagctgagtcactgcaagccgttgtttcacaaccacccagcatgtggagacaggccggcacaggaaacaaggagcataccccaaaacgcaggcctcactcatggcctttgggggttccctggggccagcctgggcctggccgttcagcccctgtaaacacctccacaaactcaggatttgggtcactgggccaggcttacgctctcatcccccattagccctttttctggcttctttgctccaaaatagtcttttttttttttttttttttttttttggttatacatttacaggaaaagtctggcttcttcgagagttgcttacagacagtgccaggcctgtcccctctggagacctgaagggtctggccttaagtaggatccagggcaactctctgctttcccacatgaatagacctgcctggatgcctctgctcatcaccacctctataaaacaaacagattctcccaggacagattccatacgttcagggctcagggtgcctgaacccagaattcattaaaagcagtgaaggggcaaaaacgggagcagatgtcagcaaagcacaactgcacttagcaagttcacctttccatccagagttccttgcaggaggggccaggagggaacacaaaaccctcctcacttcctgattttacaatcactcagctagcggctacaatcagggtcactaatcacagctgttgaaccaggccgccacatcctgccaccagcagccccggaagacactgtgcagagcaggaggcaaccctatgccactggttctctggtgtgcagagaagtctccaaatcaaagaaaccttaatgcttagtgacagcttctcgttaaacaaggtaaacagtggtccagtgaaaacattctcaatgttgctgagaatgtttccctcaacacacttctttttgggagccagctcagaggcccagctctgtgtgccttgtgggttcagctctgatttctgggagccctgggaatgtaggaggtttggaccctgagaagtccctgggccggcagtgctgtgtgtcagtgtcaaggcagtgcagtggcatggggcaaggcctctgtgaactagtcagcggggaaggggcgggagggcattgccaggtgcccaaggctatctccagtgccagagctcctccctccccgtccccacattatgtgaccaaaggtctttgggtgttgctgccggatggtgggtcttctggtccagctgctctctaacacctgatgcccttttatcaccctctgtctctcatacttcccaggccccggcctgagccccaacccaggcaaagtcccctgaagtcgctattcctttccttattctttattttcatcgccacatctctctctctctctctcacccccgttaccagagaatttaggctaccttttctccatcagcatggcccgtggcccgacagcaaatgtctgaatgtgtgtgtggtagctggcactcagcttctcatgagctccgtgatgtgagctccatctatggaggacacagatgttagtgtcacaaaaacccaggcattttcaactcctgtctagtgagtcacccttcccctaagccccacccccacctatcacagagattaactggggttgggggagggtgcttcttactgtagcagtaaaaaaacaaagtaacctgtcaatttagaaaaaacagattcaggcccagtgcagtggctcatgcctgtaatcccagcactgtgggaagctgatatgggcagattgctttgaactcaggagttcaagaccagcctgggcaacatggcaaaaccctacctctacaaaaaattagccaggcatcatggcacatgtctgtggtcccagctactccaaaggctgagtgggaggatcaactgagcccaggaggcagaggttgcagtgaaccaaaatcgtgccactgcatccagcctaggtgacagagaccctgtctcaaaaaaagaaaaagaaaaaacagattcaaaccaattagaactcagaaggttcagcaagttcaccagacacaaaatctacctgcaaaaatcaacaacatctc

SEQ ID NO: 60468 - DNA, 1537 bp, Homo sapiens
gccatcagtatgaagtcgggtggagaaggaaagccttctatttcttccccccttaaaaatgccaaacaaatatttcaattgttttaataattcaaaatactcttgttttataaagaaccggaaagtccccttccatccttttaatgaaacgcaattcaaaacaaactacaaatcaatatcttaaaacaagctgaaaggccatacaaaccatttcagtaccttggcttgaacagaaccagtgacaagatgcttgttcatattaatattcatcttcagcaagtcttgcaattcctcaagatcggtgactacaacatcagccctataaaataacgtcgactgaggtgtaggcacaggggggaaagcctgtaatccggatttccccagcaagaaggcgcccccacatcccgcccgcccgccagctcttacccgagggtagcagccatgagccccacggccccggtgcccgaacccagctccagcaccgaccgccggctcagcgcgtgggccccgtcgccagaaaactcgggcgtttccaggtatttagaaaggacaatggcagcgtcccacacaacgcaacccacgccaccggagctatactgctgtagtcgtagcactgtaccatcccgcttctccaaaactcgcacaaagctccgcagtgggtcctccagcgaggactccagcgtatccgccattgcgcccggcaacagaaagcggcgcgcgcagggacgtcacatcaacgcgcaccgccccgccctgcggctccgccccctgcccgccgctgagttggcgacgcagcgcgcgcgagttaacaaagcccggaaggcagcgttacctgggcggggccgagcgtggggcccctgcttacccgacgcgcttggcagcctccctctaccctaaatcacacgtttggcttaacgaagaggccgtttaaatcactttcccagacaaaactattataatctgctctttaaaaaacaaagccaacctcagagtttaccaagttggacacttgatttacatagtagttacaaggcttaaatgcaatcagcttccaagatcctaccaaagatggctataatcttacaatcttccttttcaagttcctagtatgctcctagttttttgtatgaattcataaaagtggttgctagaagcctgcagctcacatttaacagtgaagaaaaaattgtgtgtgtgtgtgtgtgtgtctataggactcaacaatctccccctttgttccttataatgaaaacacatattttaaaagtcttttaaaaattaagactggggtgatttattaatcttgttaagaactctgatacaaagcacagtaaaaggccacaaaccagtaaataaacaacgtggcttttggctactttacaactgctgctacagcactatcagcaaaacactctatcactttgaacgaaggcatccaaatggcaaataaaagctttactcacttatctgattaaaatgtttaataaagctttaagtatttgctggtttaaatattaccaatctaaaaaatatattt

SEQ ID NO: 60469 - DNA, 1276 bp, Homo sapiens
tcacttctacatgttaaaatgtgaatgtgtaatactttatccatttgaaaaaactttgtactagcatatattcttatgtaaaagaagaaaataattttttatggacatggggtctcgctatgttggccaggttggtcttgaactcctggcctcaagcaatcctcccatctcagcctcccaaagtactaggattacaggcatgagctactgcacctggcccatggaagaaaataatttttggttgttaatttttaacatgagataatgctaaatccactagttacattaaaattccttttgattcaaatatgcaggatataatcaaattactgttcccttgaaagagagtccatggttaatacaaaagacatatagttgatttatgtcaaggggtaacacaggtaatgctttgaatactcagcataaaacactttaatggaatattattgctccaaatataccataccaaaattaaaccaaaaatagaaggctacttaatcattgctgacagggagccaagtacagcaagttaaagtacattcctaccgctcatctagttctggctgaactcttcgggtcagtttgggtcattattagtttggaataattccaaatgactccctcgagttctactgttacattcagcggctttaggaattccagaacaggctcatgtcacaaaaatcacaggatctcttattagtttttggctttgacttgaagtaatcttttcaaaaagcaattctgatcaagttaatctaattactttgctatgtaaatgagaacccaacaggacttcctattctcaggcagagaccttaactcagtgtacctacagtctaccatactagcttcatccacttattcttcttgttttttaaaataagtcattaaattcagaatctgagacctattcaaaacaaacaaacaaacaaatcatgttcttactttcccctcagcctcaaatccttcccccccgccctttttttttcttgttaattctactgatctttcagataattgtttacttccttattgtctgtctctctgccacagccacttagaacacaagctttataacagcaggggctctgctacatcttccgtatcaagaacagtgtctgcagccaggcgacgtagcttacacctgtaatcccagcatttttggaggccaaggtgggaggatcgcttgagcccaggagttcaagaccagcctggagacagtaatattactatatttgaatatataatccagaaagaagcacaaatgttgctt

SEQ ID NO: 60470 - DNA, 2478 bp, Homo sapiens
ttaatctttattttttccttattttagaatgtattcttggttattttgcacaaaaggcagaagagactaagtctgcattaacggcaaagaaagaaagcccctgctcaacaggcatgacagctgatcacgcacctattcacagtctttaaatgtcttgatcttacagaaggatttattataaaaatgatcgtatggttactacctaaattcacagaggaagaccgccaccatctacaggaaagatgcaccctagcaatgcacccaaacatgaaagactgatttgcaggagttgcccctttcttgttccttaaaatgatttcaagtcctaaatcgcaatttggtcgtgaagacactgaagacactgaccaaattttctaagggtaatctcttgtaaacaggtaagacaccgtttgcaggaagtgggaaggcgctttaaatttaccttgagaactgtaaaatgaataagaatattatgactcactgacatttcacacatgtgaaacatccatattacaaaaaaccattgcctcataagtggatacccttgacaagcaaaccgcctagggggaacactcccaaagaacttaattaaaagtaattacccggcctgaaaatgtgcttttgttttagaaactgtctaaataccagcgggactttctcttgcccgattccagcctgaggacaacaaattggtcaacggcggaagttgcctgacgaaatgactgcaacatgaaatccagttttatgatcataacaaaaccttccttccgggaccaggcaaaaaaaaaaaacttgagaaacgtccttcagaatgcaacaggcaattgtgagccccccattgccagccaacgagaaacggctcggccccggggactcgagccctgtgggagggacgacctgctccccgttagaagctcggggggccacgggccacccgccggccgccccgcccctagcactgaccttccgcagggccgagaccaacagtccccgccatttcggactgttctcctcgctgaagaactcgtaaggctgcggcgcctgctgcatggccccggcgacagcgcctccgcatcgggggcagcccgcgggccgggccggtggcctgacaggcagggcgcgggccgcctcgcctcgccggcggccgccgcctcccgcccgggccgaggctacggccgaggcggctcggaggcggcgccggcgggctggcggagaccccggggtcggcttcctccgccgaggcggccctcgcctcccgcagcgcccgcagaggaagcgcggcgacccgcaagcccgggcgaccccgggcggcgacctcctttcccggcggcgctggcccgcttctggggcggctcctcctcctttgtctgggttcgcggcccgtcaggggtacagctggcccagccccgccccgactcccgctacggccgcggcgggcggtgagcagcggcggcggcggcggcggctgctcgtctcctcatcgcctcctccccgccctcccagccgacagcgccgcccggccctgcccactcgagtcacctccacagagctctggggaccgacccggagtgcgcgtcgggcgagcgagcctcgctatggcgcgcacagcgctggccgccgttgctgcccctttagcagcagcgcagagtgccttggggtcgccgctgagccctgagtcccagcagccgaggctcggcccgccccctcggcccggcgctcattatcccgaatagcccaagaggcctaacacggagcatgcgcgccgcggagcaggcacaggcgccagcccggcgcgggggtgcggggcctggggccccgggggagtccgcttttcccgagactgtgctgggggccgctccagactcttcagtttgactgctttttacccatatgctccctcctctcgacctgcttaagacaatccggactcggtgccactcttgtagcgctggagccccaggactaccgtcgtgggaggctgcatagggacgtggagagaaaggggcattcgggctggacaggatatttaacgtatttgtgctctacgtggcttgttttcatgagtaccgtatgtttacacaaagtaggtactatatataatatatcgttaggagatacagtaactatttcttagggtgatggtgtggggaccgagagatgaggcgtggaaagcccttagcctggtggtagggtcagaaggggcagatgacagtgacgttgatcaagcttgaattgaaaggtccttcacttgcacgggcccctgtgcgttcacaaaatcatatcgtttttacaaaactttcaagatattttcgaattgttttcttaatcgtgtcatccaaattgtgtaggcttcaggtcctacaaaacctggatcggcgtctaggaaacactcattagcaacccagaaaagatcctgacaagcttttcaatccaaagaggcataggctctggtaactcattaccacaaatttcatccca

SEQ ID NO: 60471 - DNA, 489 bp, Homo sapiens
cactgcactccagtccagcctgggagacagcgccagaccctgtctcaaaaaaaaaaaaaaaaagttagacgcattaaaaaaaaaaaaaaaaaacctcaaaagttatacgcatcactggtcagtagtataatcaactacagcttactggcaggcaggatagctggttgcccaatctgctctttatctccatagcacggcagccaggctggttacataagtgactgcagtcatgcgttgcttaaccatagggttaggttctaagaaatgcattggtaggcgatttccttgtgcaaacagcatagaatgtacttacacaaacctagatgatatagcttactgtacacctaggctatatgggatagcttattgctcctaggctacaagcctgtacagcaggttactatattgaatactgcaggcaactgtaacacaatggtaagtatctgtgcatctaaaaatgtgtacatataaaaaaggtacagaaaaaat

SEQ ID NO: 60472 - DNA, 1958 bp, Homo sapiens
atggcccaccttctagtcgtcaaaatagccaaaacctctccaagccttacagccttcacacaaactgtttcttctacagaggacagagaaagacaatggtttcgaatgtgacgtccaaactataaatcacaggacactgaattctgcgggctttcattagcataagagctgcctccgacgggggcaacactatgcggggtgtgccaggaactgatttaagactgtattcagatcttccaagcaacgccaaagactccagcttataaagagcatatttgattgcttatactgtgtgctaggtccttttatccttcaaatgaccacctacaggagagactaaggtccaattcacaactgagcctttaaggaggttaagtaactagcccagagttcaacagaaagtggacgggttgttcaaagccagagctactcccgacctctactctatacactgcctttcctccggcccgtaaatacaacgaatgaacctgcaggttggtagctcctgggatccgaggttggagtgccacaggaccccaacctgctctcaccccgggacagggaaatacgaacaggggcacaggtccaccaccaggtgcctccgcgaggggcagcagcgcaggcggcggggaggaccagcggccactcacctggtgctggcgctgcggctacctccacacagcggtcttggcctcccagacgcgaacccgcacgccccaggggagccaccggcgaaaagcccgcgggcccgtccgcaggcaccaaccaaataacgcagcgctggcaccatcccctacgcacgctcccctccctcagcgctcagaagaagccacttgaccctccacggccgaggacccgcgctctttagccccgcccctcacgcgggggccaatgaagtggcgcgccttcgccccatgtgggagaggctgcggtggccaataggcgcgcgcgtcggagggcgaagggccggccagggtgccgcagacgcggggacgctggctcgctccctccctccctccctccgacgctgtgagtagagaagctaggccccgagccgggcgggactagggtggtggttgtgttctgccctcgcccgtcgccaacgctgggctgactgaaaacctggccctttgggtcgcgcgtcttcgaccttcaccgccatgcggacatggggccgtgggagaaactctgggcgggattacggtgaaaattcttgtttgggcgggccctgcggcttctttcttccggctcgccctcggccccgcccccgccccgcccccgctccagctccagccgggtcctcgctcggccccgcacgcggcccgcggtagacggagggcctgggcacccaccgtctccatcccggccccagcccagtcgagcgtccactagaagggcgctccctgtccggccctaatcctcgctcctcacggaggctctttgtcacagcgaagactgacagcccgcagtcttctggacttcttttatggggctcctggcggtgctattcattcagtcattgattcgtcttgtaaatatggagcgcctgctctgtactcgacccggcactgggtaccggaagaaccagacagctcggtttttgccaccatttataagtctgtgtccttttcttgagtactgaaccgagatacagttttaaatgtgctgtgcggtctctgagcagcgactcacctgtgcaggtcacttcacctgattccctttatgtaaaaatgagggcgatgggctgtgtaatctctaaaggaccttctaactctttaaaattgtcactgtgccggtgttgctaacactcattctgtatgcttgatggcagtttttaatttttagggttaggacagctgaacataacaaatagaattatacagatttattaccagaaggacttcgtgtgcctctaagaatcttggttccagtctttggtcaggtagctccaggaaatc

SEQ ID NO: 60473 - DNA, 1046 bp, Homo sapiens
aatcaaaacaaaaacaatattaaggctgaactatatatgggataaatgaaacacatgactatttagcaaatattggataaatcatttaaatctctccttggcctgttggacaacagcaaaagagcagcctaaaataaatctagtaccatgcctgtcagagcctgaatcatcccaaattcctaaaaggcccaaaagagccaagaagagtgaaaggaaaatgaaagtagggtagccggtcttagcagagaaaaatacaggacacccagttaaatttgaatttcagataaacaaataatttttttaggataatacatcccatgaagcacttgggatgtacttatactaaaagttatgcttgtttatctgaaattcaaatttaacagggtgtcctgtatttaatctgacagttttaggtgaaagggaaaatgttgaaaggtccgggtgaggctgcatcatggttgcaggagctgcaaattggtgcataagcagaattcacaattcagttgtttaactgtgaacagaacacagtcagcctcgtaaacaggacaagccctgggcctgctgagataagctgggaagagaagggtggcaaccacagcttgccaagagatttcccttccagctctgacattcatccggacaagataaacaagagtaggcagcagccctcaccctctggggagagtcgctagatgtcagctctgtcccacacacaagtgctctgagagctgcagccacccctcgagatgcggccccccctccagaatttagactcaaatcacctgtggtttccagcccacagccaacattcttaaacagggtgatcttagagaaaagaacgtttgagaatcttcacatgattttctcattaaatgacaatttctttggcaaagaacaaatcaacaacctaattaagagttactttttttttttttttttttgagttgggtcaaaatactgctcagggtccctaataatcttcctctttcccaagtgttttcctcttaggaggagaatgctagatcgtttgcaacctgagagaccct

SEQ ID NO: 60474 - DNA, 592 bp, Homo sapiens
ggaatgagatatggaaagaacggctgttcagctacaatctgcactcaggcctccacagaagccacaaatctcacagctaaggccctgcgggagaacgggcagtataaattctgacgaccagtcattgggagacttcagagtatggtgtttggtataaagtgatggatggttctggtatggggaaaccacatggcatgaacttggggacagacagaactgtgtctgcattccagcttactgaccgggaggccttggcaaatcattaaccatactgaatccatttgtaaaatgggataacaatatctaccttctaaggttgttattagtgtaacgatatctaccttctaaggttgttattagtgtaatttgtgcatcctaagtaacaatgatacttggcagtttgtccaaatttactaggtcccttgcccctacctgccacatagcagtagatgattccttctctttgtctcacttgtttttcttgttttctggagggagacatgtcatagacaatgtcccagctgctgctttcagcccttgaccaatgctggtctaatatattttaacgcccccataccacctgccataggta

SEQ ID NO: 60475 - DNA, 1252 bp, Homo sapiens
cgccactgcactccagcccgggcgacagagcgagattccgtctcaaaaaaaaaaaaaaaaaaaaaaaaaaaagaaagaaagaaaagaaaagaaaggatcttcacatagtttgaaaacgtcgcttataaaatattggcaccaacggactgcactagagccccacccaacgatgagtgtttgtcacggtcctagaacagaacagcacatgttaaggaatgaagagtgtacccgtgtcggcaatggcaacgcgatcaggagtaacagcctagagttagctgcctccagtaacccgattttaatcgcccgttaaataccctgtaagttaaaatgtaacttgccatcctaaaacgagccgagctgtaagataagctatctttttaacgttatcgttcatccgatctaagacacctgagctggctggagtacggggagggctaagggcttccccggttctaatttcgggtctcatttccctgcggcaagaagacacctcccggctccccgcggaggcggcggcgaggcttggccgcaggagaccaacccgcgccccgcgccccacgcccccgggactgggaaaaccctcccgcgcccggacgtgcacctcagccgcgccgcgcagcatggagcggtgccacgtgttggccagggacggcccgcgcctccttgcccgcccgggactcacggcgccgcggcggtcagggacgggcctggctcccgcctcgccttcttccgcccagctcggctcggcgtggctcggcccgcgatccctatgggaaccggctcccgccccgggtctgcctgggcggggccgccgcgccccagcttcccacccccggcccggcccagcccggccgccctcccggctgcagggaaaggcctcggagggccgccctccgtccatgggagctgtcctgaccgcgggccgagtcctgctgccgggagagcagacctgctagatttgcaaacttccgcaggccgtgcaaagcgcagctgtaaccgcgtctgcggagcaagacgcctgcgctaggagcccctcctgagcggtccacatttccctgcaacagcagtccccacacctcagaaccgcggttattccctttggtcccttggaggcatcttctgtgtctgtgctgatcagtgctgcggcgtcagtgaatgaatgagagggagaaaggaaagaagaggaaggcgtgactgcagaaattgcttaaagtcagcactttcctctacagtagggaaggttccacggcag

SEQ ID NO: 60476 - DNA, 904 bp, Homo sapiens
aaaaagttgacatcagaagttgaggaattgttttacactaaaagagactaaataataaaaaatcagctgggagaggtgatacacacctgtggtcacagctatttgggaggctgaggcacgaggattgcccaagcccaggagtttgagctgcactgaactatgactgcactactgaagtccagcctgggcaacagaacaagactctgtctctaaaaaaaaattattttatacacacacacacacacacacacacacacacacacacacacacacacacacacacatatatataccccctctgtcatactttttaatagtggcatttaaagccaatcattataacctgtctttattattaagtagaaacacacatttcctgaaatcctctactgcctaatagcttctgtttgctaattgctagacactggggtaggcttgttccttccttgaaataaagtaaatatcgggagtgattcatgtttcaaacaatcacactgaaaagcagaggtgttatgtttgttttcaaagtcacatggtaatgacagagtgggaatccaaacccagatttatttgattccaaatttttgcctctgaaaatgtttcctcacttcagaaacatagtctacattttaaaaaagttattttaacatcatttcagatgtacagaaaagttgtaatagtacaaataattcctaaatacctgtaacacaaattccacaaatgttgaacatttactacttctgcttgatccttctctcttccttatgtaaatgtttgttttctgagctgtttaagataacttatgagcatgatgcctctttactttgaaatatttgtgtacattaaggaaaaaaagtcatataaccacaagacattaatacttaaacaataaacaaggttatct

SEQ ID NO: 60477 - DNA, 1359 bp, Homo sapiens
tccaggtcaataagtttgagaagcacttatctagtccactggtcccacacacttatccacagtcattgcaatcaattaggcggctttcaggattcttagatccagtcccaaagactgtattctataccagaggttggcaaactttttctatgaagggccagagagtaaatactgcaggttttgcaaggcatacagtggttgtaactatggaactctgctgttatagtgtgaaagcagccatgtacgatacataaactaataagcatagttatattctaacaaacttatttatgacactgaaatttgaatttcatgtaattttcatgtgtaataaaatataattattcttttgatttcttttcaaccattaaaaatgtatttactattcttagtttgtgggctgccatagtttgttaactccaaatgtataggcctaatgtgggaacctaggaatctgcatttctaaagagctctgtaggcaattgcagtacacagacaggttaggaacaactcatgaaggccagccccctcacttaattgtagaggtaactatattggagagatgaactggggctttttaactctgttacagtattttttcccatgacatcatgtgactcacctttcagtatattatcattacatagcatattctgattaaaaacaaaaacaaataaaaaaccttaatgatcaatacatgatgctttttggtaaaactcaaaagctttaccttcattaatggcataactttttcaagaatgcaaattaaagcttattagaataaatcacatgccccatactgttcttatgtaatcaaataaaatatagttattaaattagaaaacaacttacttgccagtatttgcaccatcaacaaaaggattccactgtaacatgaaatttgggtctgatgacaatccctgtaaagataaaaatatagtttaaaatgttactttgtaacaggtattaaccattttatttgattcaagaaaacattccagtgtcatgattattaatcatcttggcattcaatcaattttttaatctctagctagatttgctttgtcatttgacatatttaggtcaatgactcattatcagtcgacctgaacttaagaaattccataaacatactaaaggtagcttcaaatgtgacaaaccttctttatcagtatgtgagcatattccaaagcaaacaataaaagaaaacaactgaattatctacatcatcactccattagcatggaaaactaaatatcatattactaaactgtcatgaatttactggtgctactacttttccctcttagcatggaaactggggttttatcatacagcaacatatttacagtaagaaga

SEQ ID NO: 60478 - DNA, 3815 bp, Homo sapiens
gttggtgataagtacaaagcaaaaaatagagtaggaaaaaaagatcgggaggatgtgaaaaaaaggaggaagggagcaagccatatagtggggggcggtggtgaaggggagacattacgaagagaggaaatagcaagaacaaggacccaaagatggggagatgcttatcatgtttaaggagcagcaagcaggccagtgtgactagagcagaatgactaaggagagtggtagatgaggctgagaaataagagggaagggctgtcttgcccaggagcatttgggtaaggctttcatggacaggtattacagcaacaggtggaaatggaggggtggaaggtgattccaagtaattagaacaaaggaaaacaaaagacaaggagctaagaacgccttaaggatgtttagaatcagaggctggcctagtgtgcaatgaatatacatgtaagtgtgaggaagcaacattgtgagggtagaggaagcaacattgtgagggtaggggaccatgtgttaaggggtgaaggtagagtatgatgaatattcggtttttgattctgtttgggaactgcagaagagagactagggcaggaaggcaccagggtaaaaggcaggcattagctgccccttaaatataatctttgctttttctcaggcatgaataaaatcctgctccagagttgctttagttactacatctatgaagaaaaagggtggaggtcttaagatctttatgggaaaaacactcctaaaactttattgtagtagggagaagagaatatatacaagtagaatttatactattgtaaattaacatgaactaaattgaactcgtctaacacacagtgaatcataagacaaagatgactaaaaaatgagactgagaaaggaaataggaatttcaattttctgaagagcattccacaaaatggctaatccctggataaacaactaagttaactacctctaattttacataaagaagaagaggattgttacaaacatacactttgagttcaaaggtattcacaaggtaagagccagaaccttgctcacaattcatcacctcagtacctctaccagtgcctggtacagaagactcaaatgcttgtttaagcaataaaaagcctatccattacagtttatctcagtagaatcaaacagtgctagggctgtttgataataccactaccttgaaatgctaatattaattaggaggaaattaaaagtaagtagaaagaggggaaccacctgtgcaaaacaacaacctaaccccagaggaatctactggttaattacccaaatgacacaaaaccacttcagcgatatgcagaagtgttgtttggcacaatgcgatatatatcatgatcaaatccaataaacaacgccgttgcaaaaagcaaaggaatttgcccttaatattcataggctgcactaatgctccctttttggaacacacaacaaaaagcataaggcaatctcaatctctttcctctgaaccattcaagaactcagcggatttggggaattgggtttgcttctctacaatgttttttaaaatcctaaattaggtgtaacttactctcatcgtttgtcttaagtaatacaaaacagcacaatacaaagacagcggctcatatccactcttggttataggatgttataaatccctgaaaggaaccgctaaagtaaaacaaaacccagcaagttaatatcacatttttatcgccaaccaaaaacaaacgatcaaacttccaccaggaaaagcatctttttatatgggataatgcttgcataaatgtcaccaatattagtttgcttacagttaaagctcagagacagggtttcatatggcttttttagtcaaactcatccattgaaacaaatttttttaaaaaaatgcaaatgtctgaatgtcaatattctttcctgtctatcttccatgaagcatttttccatgctaacactagagcatccttcggtgtaattccacaagcagattcaaattcccttcaataccataaataagccctattaaaaagcctttaaaccacaaaaaaagtgcaacagcggtttgcaactgtgtggttagttctgcctgttggtagcgattagaacaagccatgagtcgagggtgctcagaaccgagtaaaagggaccccggccgctttctccccaagaggcaacaataaaagcatcctcctctcgccccaatacttcgcaggaaagtggccccattcccgggacccagtcgaccgcaggaaaaaagcacggccagcctcacttaccttatagacgtccccgtaggtgccgctgccgaccctctggacgagttcgtagtcctgctgcgggttccgcctcaggatgtccgcggcaggccgcagcggggcctccatcttcacttagggcccggcccccgccagctcaccccgcggctcccggattcccgctaacaagcacgaacggcgccgcttcccaacatggagcctccgcccgcagctccgtctgcacgagggacgagcaaaggctggttggcgtcgcaggctacgacccccagcggcccgcgccctcgcggcccggccccttcccttccgtcccgccaggggccgtggaagagaaaggggcctggaagggcccccggcgccccgtatccccgttcggtctgcggcccttccccctccccggccgcccgcgaactgcccgacgaggcctccccgccagccggggcccagggccggctccgtacctaatgggggcggccccgtctttgttgagcgcggagcccgggacctacttcctagaccgcacccgcgtcctcctcccgcgcgccggccggcagctccgggtttgccgtcgccgccgccgccactcagccgctgcacggcgcgtcctctcgggggcggcggaggcgcgtacagtcgccgccgccgccgccgccgcaccacgttccccacccggggctgcgtcaccgggagacacgttcccagccagcatgggtcggcgcccagcggcccgcccgagcactccggccgcagaaccagagtgccgccctgaggcctgctgagaacacaacaccctcccgaccgcgccaccgcgcccccctagccgggcgcgtccttgcagggcctgggctgtctccctcccactctcagaaataaggcacacgcctgggcattcgtgggccaacgggccttggctaaaccgtccccacatttgtcaggtaggcctgtagggtgacgggtagaggaagaagggcgatgggaacgtagccctccaagttaaacacggaaaaggtacgttaagggcaccgggccagaagtaacctggcagcggggcgccggggaaggaggtgggggagtgccaggttaactaagtcccggcacaccctactgcaccttcctgttttgcaaaccgatcccggtggtaccagtttgaggctgcactgcacacctgcacaacctgccttctacttagttcttctgagacatttctgaaagtctgaattcctaggactgctcaatgacctttgtccctgttgggcacacgcagtgtctcatcgctggtattgcacctttaatgagaccaggagttccgcaaaagtaaaacaaaggggtcacagactggttctggttctaccacttcctcagtatgtgctctgggacaaaacagcatatttggcaacatctcggtgtccttatctgcagcttgaagagggtaagattttgcatctgacacccaggaaagtgtttataaagcgttttacaggatagtaaggggggttatcgaatataagaggtcttaaaatacttaacaatgcacag

SEQ ID NO: 60479 - DNA, 2418 bp, Homo sapiens
tactgatgtactcaactgacatatattttgttgaaagtattgcaagtaccaccataaatctggaaggctgacaatgtggttatgatggaaaaacatgctctcccatctgtgtgatcttgggcaaatactagaaacctaactttcccaattacaatatgaggtaatacttaagtcacaaggttactaccagcttccaagaaggaaacttaagcaaagggcccagggcgcagtaagagcaccaaaataccagctccatgcctcacaaatgtcctgaacacacaagaattaaaaattcaagagattcaactcaaaaatcaaatacttacattaagaagaaaagcagcgggggaccggaggtggggattgggagtgggatctaccctattaaaaaaaaaaacttttcgaggggggggttctctaatacgatagaaattattttgagttgccttcttggaatctcacgaatatagccaaatacaaaggcttttggctctctgctctgctgtgtaagagtgatgaggctttgggtggcggctacaagaacgacggtatgcttttcaccttctcaagtctgcatccggcagcaggactaaggaattctgccccagagttcgcacaacttgcagcacagtcgagagacacccgcaatgtttgcaaacatgacgcacatctcgacgcatctaaaagagtaaaaagtgtccctgtctaattacttttactcctatagcattaggtgataagcaatttaaatgtttcctactctctcttccagtaatcaaaaccaacaactctgcctggtggggcgaggaagtctgttatttttagggggtgctcttgggggggttaggcgcgggggggactaacccaagtttcttactcttatgggctttcaatcaacgaataccacttcagacacaagaaaatctcaaaaccagtatttcacgcgaccaaggacgaaggagaagccctggagacccgccggcgcccccgccagggtccccggagcacctggccgcctgggccaggtgtgggcacgccccgcctgacactcactccgaagcagaggcgacgtctccttcttcacgtacttcccctgcacctcggccggcttggacacttcgtttttggttttctttcgggacagcatccttctcgacgaggcccgaggccgcgctgaactgcctccctagggctccgcgccgggcgccggccgtctccgccgccacctccgccggcgccgccgcctccttccctcccgagccgccgcctccgccgccgcctgtccggagcccggggtcgcccgcagggactgccgcatgttcagggcgctaagcgcgccggccgccgctcagtcgctggtcagttccttcccggaagtcggcccgctctgcgacgctgctcggggacgccgtgaggaaagcccagcgacgccgggccagggccagggccatggtccgccgcgggccgccgaataaccgctaccactaccgccgccgccgcctacatcccgtaaactttccccgcggccgctgggaattctgggaagctcgacgcagcgcgggccgccgctgcccctcccccaccgcggctccaggcgcggctccggcggcgggactcgggtgccggcgctctaggctaccgggccgtccccgccgagctgcggctgtcctcactcatcctcagcgagaagcaggtcctgccgactgagaagatgaaggacgaaacctgccccgctgagtgcgggagttcgtcgcatgcgcatgtcgtggaacctactctccacgagtttttattgttgttgcttttgtaccccctcgggatccctagcggaggcagtgactctctttccccccaagacgttgttccctgtttgaaggtgttcttcctaatgtttcctaggctgctgaattcagctctctaaaaaatgcggaatgctaaccatgactcccaggcaagtgctacaccaaagcatctattctgctggaaacgttcatgctgattaactagaaataagttgatcctctactgagtatcagggagtgcgtttttctataacaggaaaaaacggaagaatgcaagatggaatttccagtacctctttttaagatacaattggtgttagcatattacaattattttattgcatcatcactatcattagtatgattaatagccacatatttcctcctgacgttatgtgttatgatcttagaattttgaagactttgaccactgcgagtcgggaccgggaattttctatctaaaataatagactctacttccttctatataacttagcaagactgccaaatgtacaggataacatttggaaaataagattggattcatcccctagtgaccaaattaatgctttaataatgaggaatgctttccctgagatctaaaacatctcacaag

SEQ ID NO: 60480 - DNA, 455 bp, Homo sapiens
gcccgtgctctaactgtatactatctccatgtggtgggggtagtgtttggggagcagggtgagggaatggagattcacttttgcatatttggagtttgaggaaactgtgcagatatgtattcaaatgcaggggctgggaaatccaggatcccatcctggcactgactcaaatgagtcatctgaccttggaaaagccaaggtttctctgtcagatgaactctgaggtctaaaatctgagacagacactgaagaactttaagtcccctctgtccagacaggaagctactcataaaagtatccgtgaaataatgatgaaatctaatgagcatccctaatcacagaaataaggcattataaaatcaggtcggtagaagagaatggccatttagcatttgttcctccctgcctgttctaagtccaggccttcccaacagctctcccctctcgatccctgt

SEQ ID NO: 60481 - DNA, 1786 bp, Homo sapiens
ccttctcctgggcattatactgggaaactgtttacgcgcatcgaccccgcacacctccaaaaatctccactttccgggctccaagcagctctccgctactcagacagcccaggctaacacctcggatttccccatgcagtttcctctgcagcgtctcaatcacaaggctgtacgggcggcacatgccaacggaaccaccaccccttctgctccctcggggactcaagcctgctctcggtcaaagcacagaagcggctttcagctccgggcaggcggccggggcgtcgggggtactggaagtgcccaaacccagcggtgctgccgcgcggggaagcggaggtgcggccgcaggacaagcgcgcctcccaagtccctggccacctgcgatgcgtcctcaactcgcctgcccatcgccactaccagaaacctcagacagcccattgtgtgggcaggcagcgcgctcccccggccccgccgccctcgcctaccttctgtcggtctctccggagcgcccgcacagccggcagcccgcctccagcgctctgcaaagcgaaggaggacgctttgttagggctggagaaacgggacaatacttcgcagccggcgcagcggttccgggcgggcgtccttcaaaaggacgcgaatggggacccgcgtgagcgtcatttccatatgtaaggggccagctcttacaaaagcgcggctctcgggggccgcgggctgcagcgcgcatcctccccgcccccgccggcccgcccccgcccgcgcagcccgcgcctccgggaccggcccctcctcccgcctccgaagcagccccgtccccgcctcgtcctcccgcccggccgctgcttcctcccggcccgcagggattgcgccccgctggccccggaccccaaatgggaagcccccgagtgatccggtgcccagttcgctccgggctctcagggcctcgccgacggcgcgggggcagcgcgaggcctccgtgcacccccaggccgtgggtccgggtccccggggttgcgccacttactgcgtcccggggctcaggcgcccggcgccgccgcgggaaccatggccgctggcgcactccgggcttggcggcggcagcgggacggccgcgcccagcgcgctcggctcccggctcggccgcggccacccggagctctggacgccggggaggaagggccgggcccgcgcggggaggaggagtcagggcgacgccggccccggcgcggctcctcctctgcggcccgcgcggctcaggcagcggagggaggagcgggcggcgccgcctgagccctcgcagacgcgccctcccgctccgagcgcccgcctccgagatctgaagttagaaacgccggggctccgggtgcgggtgtaggaggctggcgccccgaggtcgccaccgagctggggctggcgctgccaccctcgccccttgcctgtccgcctccctttctttcccaacacgcctacactcacccgcaccgcggacactcgggccgcagcgtcttcgcgcagaggaagggcccccgccttcagcaagcgggactttaagggggtgatttcccagccctcgggtgtcgattggccatcaacattggaaagggtgttcaggaggcagaagggctgtagaagtgactcggaaccctgtagagcgagcgcgaccctcctgccgggtctacactggcttccgcacctgcccaccacgtcctcacaggctcccgcccctgtgcagccttctccgggtgaagctaaccctcggtcgcaagccacacaggacgaa

SEQ ID NO: 60482 - DNA, 485 bp, Homo sapiens
tccacataatcatcttcctttctgagagattatgatttaacaccaggtggacatctggtattaaggactatttatgtcctagtccccccaagatccttgtcttctgccatctttgtaaagcagagtgctaattttattgcttctgagaccactttaaaaaaatcattacagcttcatgaaaatgattttacccatagagaagtttagagttacatatatttaaaacaaccaagaatcaatagcagttatctgagatccagttccaagtggtgtgtgtgtgtgtgtgtgtgtgtgtgtgtgttttgagagagtctcactctgtcacctaggctggaatgcagtggtgcaatctcggctcactgcaatctctgtctcccaggctcaagcgattttcctgcctcagcctctccagtagctgggattacaggcgcctaccatcacacctggctaatttttttgtatttttagtagggacagggtttcgt

SEQ ID NO: 60483 - DNA, 974 bp, Homo sapiens
gtattcaggtttagctgtgtacctaatctagcgtcagctcccttgcagcttgttctggcatcaggtactgactgcagaggcaaactgtatgagatggtgcagctgcagcatggagaaaagtgtaagctctaaaagtccattattgactctgttacttcttacatgaccctgggcaagctactaactctatgcctcaattttcctatttaaaaaagtggaggctaacagtacctacctcactgatgattgccgtgaattaaatgagattatacaaacaaagcatttagaactattcttgggcagatatccctcaataaatgttagctattatcattaaaaaaaattgtgtgtgtgtgtgtacagtagggttaaaacctcagaaacagtccagtaccaagctgatattaattggactgagggattttgaaaatgaccgaaaggtctcagggtcagacgttccagaatggactaaagttcatcttttcatgaccacagcatatttactcagtagggtcaaaagttgtcaactcaaaaccagttagtgggttactgccctggagacctgggtcctgacagcaggcagggaaactgcagtcctgcaatccagctggatggggtaaaatcctttacttttccctggggtggataagaagctgtgggaagccaaatagcatctgtgaacttgggcacggatgggactgattgccagctagctccctgccccaaagtgctggggatcacacagcagagtccacagcaccactgggcacccatgacagagctctgcagccctggagatcacattggattgctcattttacgatgaaagaattgttggtcaggcaaatgacttgttccatcctgactagatgctaatctagcccaggcatggctaaaggtggcctactgtgaaacaactgggttcttatctgaagttaggcaacccatgaaactgggtattttttttaaatgga

SEQ ID NO: 60484 - DNA, 628 bp, Homo sapiens
ttaaatatattcatgaaaacaacttagcacattagggttaagacttcaagcttctcctttaaggaggaagtgtattttacatctcattaagcaacagagaaagtatgacaacagaatttttaaagctgatcattttcacaaattgccttgatacatgaataacaaagtttgatcatttcttaaaaatgagatagaagcccaaagtaaagattgtgattctgatagcagaagactcaagtacttttaaaaggcttgttcagacactaatttctgaaatgtaatctgtgaggaatgctgtcaaagactttgattgcaaaagaaaattctcatgagtcataacgagttatctaactttttctggttgttcctcttaaatgagagattaccagtgatgtatatttctaaaagtttgtaatagccacatctatagaggcgatttttcactcttattttactttatttttttgtgcaatgtccccaagtttcctgaagtgcacatgaaatttaaagagacaggatgagagaaatctaggaacaatgtacctggtaaatggcctcatcacaggcattttgcagaccgaggttgatcatggtgttctgtaatgttcggcccatgtaaaattccaga

SEQ ID NO: 60485 - DNA, 2983 bp, Homo sapiens
gcttcaaccctggaggcgaaggatgcagtgagccaagatggcgccgctgcacttcattcagcctgggcgagagtgagactctgtctcaaacaaaacaaaacaaaacaaaacaaaacaaaacaacaaaacagtaaatatatgtatacataaagtgttttctaaggtgcatttaaatttttaaggatacattttagcagttgctaccttggtggaggcctaggtctttggggtgaagaagagttactttccatttgaaaactgttacagttgcaatttcttactatgagaatttacattcatttcctttcttaaaaattcctatggggtttcttgggcactgggattatagaccatttttttttcttcacacctttacataattaaaaagttctaataaatgtttatatatatttcccactgcccctgggatgtatcccaatcttttattctttccaatatgtctctacctggcttctccagtttcctctcccaatacagactcacacccgccctcactccagcctgcacacaatccctctccctgccatgtcctccccagtccttccccactgcctctcgccctcttcgcaaactgtcaggcagagatattgtccctctgtaggtccaaaatcaccctaaggaggtctctgctcccgcccccacgccgtggatggaggtggtccctgaccagccttcctcagcagctctgggggcaggcctcgggtgtggaagggctaagggtcgggggagtgtgtgtcttcggggaggacgagtccagggcattgcctggccctgggccgcctttgcgaaagactcacggaattccaggagctacacccactcaggagaatgggtgggcggcgctctacgcttggagcgggaccctgcccctcctctgcaccacacttagccactcccagaggcctgagacttacgaccttttcccagctcggcgtttgtctcccctcccaaaataccaagctccagcaaggcaagatttttgtcccttttgtttagggctgagtgtccagggcagagaatagtgtccggcatacaggacaagaggcccccgtcacctcttgattaaatgctgagagtcaaagttccaaaaaagtttgtgaagtggacaggcgagaggggcctgggcttttgcccacctggcggtttccaggggcggacggcacagtggtttgggcgggacactggcgggtggcacctcggagacatgagttcggcgtctgttgggaggcctaatctgtcccccaggctgcccgcccacagcctagacacgtctcctctggacttcggggcaaggaccgggtgcaagggaccactctgaggggttctccacctcgtcccgcccggccgcggccggagactccgactccgggctggaccccggcccgccgtcccgcccccggttaccttggggcacttgtcgtagtagtgctgctgcgtgcggatccagcgccccaccaggtggtcgcgcaccgtgtgcgccagcgcgaagtagtagtcgcgggtggtggccacgttgcggtccttgaccagcgtgaagtgcaggtgccggttgaaactcttcttcagctctgccacgttctccacgcccacgatgccgcggatgctgatctgccgccgcttctcctggtccgtcaggggcttcgccatggctggggcggcgggctgcgcggcgggctgcgcagagagctggaagtgcggccggaggcgctgggctgccgggcaggggtggagtccgccccgccgcgccagcagctttcaacgcgcacgaaagtttggggcccgccccctcgggcggtgccgtccccgctgcactcccaccgcgtcccggcccctgccccaggccggagggcagaggaagtgcccggcccctcccgaggctctggggccgcagtgggctcgggggtgggagacgaggtccaagcgccggcgagacccctgccagcccgggacctgggctcggaggctcccttccggatttccaaaatctgcggaggcagcatttgttccgcctctcccctctagagtgtggagacaggaggacgtctgtgtagggaagcacgtcgttggcagactgctgttttgccgatgtttatttgttatgccattatgactgttaggatttctcacctggagtggcttccgccataagcgccgggatctggaaggacggcacgtttgacttctgttgtcccaacctcacttgccagcccttggcaccgccccagcttggatcctcagggcgcctctgttattttcattcattttttttgaggactccagggttcaggtttcttaactcctggaccaaagttcgccccgctcgtagcaccctgtctctcatccttagaggtaggttactaagaatcagagtaggtgaggtgaagctctagggtcattatgcggcaggggcttttaccttaggcttcttcgaattacgttttaactgcagtggagggtgtggggggaggagagggagaaaacagaagggtatgtgtgtggaaaatgaagggattactcactggactagttgccttctttacaaaaaacaacccagtctgtgttactgtgcggtacaggctgatctttgcacctccactttgggtggtatttgaatatgcgtgtttatgtgtgcttaaaccttggtaaaggcaaacacttggcattttaggatgtcagaggttttttcttcctcattaagtagtattaatatattattttagaaacagtccattgccagaattaagttttctttttcctttttcttttctttttctttcttcttcttcttttttttttttttttgagacggagtctcactctgttgcccaggctggagtgcagtggcgcgatctcggctcactgcaagctccgcctcccgggttcacgccattctcctgcttcagcctcctgaatagctgggactacaggcgcccgccacctcgcattttttattttttatttt

SEQ ID NO: 60486 - DNA, 1215 bp, Homo sapiens
ttgcagagacaggctgataccagcaggtggaagaattcaccatttgaactccacatcataggctagtgaatggttcagcaggatgtgactgcaattttaatcactgcttcatttccctttctttgttccagatatttatgcaccaaaaccctgtgagaaaatgacccataatctgaagaagataaataaaaatggattatttttatcactctagacagagcataaagagatggcattttctccattttaaaatcttagatgtaaatacactgaaatccaaagaaaaaaattattctgataaattggagaaatttaaaaattataaaaaagtatggggtttcaacattcttatgatagatttaaagaacactcaaagtttgatgtgctggtggcttgggcctcccagtgaaccacatgagcttacaggattagggtcgtgaagtagagggagcggtgctggggtccagcacagggtttcaggcctgtctgggcacacctgtgaactggtaagacaggcctgggcgaactctatgtgcctaggggaggtggagccatctgggaaagatgtcagatcacaccccctgctgggatttagatgtatgcggacatgtctagcaagctgtgagggctgagaagcttcctgggtgagaactcaccctaagggcaggagtctgctgattcacttcacccaggaagaagccttagttgtcagaggggagcagtaagtctgactatggcatggtagcagtttctggattctgttccctggtccagctacctagaagcctgtataccctgtggatgtagagggctgtcagcaaaccctgaaagaattttctcaccaagctttgtagaaaatactcagactcagaaacagcatcataccatctaactggaagaagtgagtcattctcttgtatcttagaggaggatctggatgaactgtgatgaccagtggggcagggcgtggccagcaggactgggagcagcacatggagacacctcctggagactcctagaaatacaggacatgatagttggaggtttggtgagacaaatgggagtgagaactactggcatttgtgttggagttaatggaatgccctctgattcaaagactcaggggaactggagaggtatgcatctctctttcacacatattcaccacatatgcacatctcacatctcatatatgtgtgtatatgtgtgtgtgtg

SEQ ID NO: 60487 - DNA, 4246 bp, Homo sapiens
tcccagatttagacaaattagcaaatggacaaaaagtcaaagggagtggagaggaaaaaaaaaagaaagaactaacccagagatatttgcatctgtctgaatctattcctccatgtgctgagaattagttttccgttttccttatttacccccagtgatgttgtatataaaaggtgaatgtgccaaaattacagcctcattagcagaaactcaggctgacattctagaaaaatatattttatagtgggtgttatgttatcctatttaacttcattaggcacaaaataaatggtctactagaaatccaaagtactttccaattaatctatcttttatggtttggaaaaggatagcattacagtttctggactgaaatctaaggaagagcattgtgttttactggaactcctgttattggggctgtcatagctatattgatttttacactttcttgatcattctggggcagcttttgttttttccttaagaatgaatttcccctgacctgatcagggttccagcatttatccttcttttagcctgtaaaatcaagctttaggctaaaaattcttctcttaaaatacaagggggaagctattctcactgacttccttgaagaggtctggcggagctgtggttcaaaattaaattttccagtagcagcttcttataccaatgttttcaaatgtcttccctttttaaggccactctatttcaaattctatctcacattttatttgtttaattttttttttcagtgatctttcagattgtgaacactcacaaccatccagaattcctctgtgaaagtacacaggagtgtggcagggacaagtgagaagagaagctgggctcccaacctcaacagggaacactaatcataagggatgctttcaagcactttactgaatgccagagagtgttgtgagaggtttacaggtattcactcatttaattttcacaataatcctataaagaaggtattgcaattatctttattgtgcagctgaggaaatggaaacacagtaaggttttacagctagtaagtggcaggactggcatctgaagccaagcagcctggctccagaggctgtgtgcttagcattgcatcatactgcccctctccagtccggtgtttagaaatagtgtactggaggaaagtctgcacgtctaattcccaaagtttctttctgtttcctataatgtgaacaataaagattccccaaataaagattctaccttcacaactatggtggttgggaatgcaattttactgtgttatcttctctgaaggctcatttgtagactgtcattcccctttatggtggctgaacaatacaaatggcatctgaggaaagtttagactttagcagaactacaagctgtttctggaaagctattaccggtacactgttaaagataaccctgaacgcaggttttgagtccatgcatttcaggctatcagcattaacagattacatgcaagtgtgtgtgctcattccatccccgctaaccctctggcagctttccccctatgatttataggggactctattcagatcacactgtccttgcccatgaccttggtgcatactcagggctcttatattcaacttgagtcaataaaaataaatacacccttaggtgagtagaggcacttaaggggattaacagccaatggtctatgtgctaaaaaggcttggtgaactgttaggtcattgtttcgtcctggttcagaatgaacaaactggcatttcacttcagtaccatgactcatgaatcttgggattctttgtgtacttagacaattctgggttaatatttattgggggaggaagtaggtatctgaaatctattctcaaccaaacagtaaagcccttggctgactaggagaagacttaaaatttccttcctatgacctggaaaagagctgatcatacaaccttagaattaagtggaaaatgtttttttaattactctctaataaaagtagaagacaaaacttaatatgttgttttctataaaagaaaagtctgaaagaccaaatgccacttccagttttctggaaagagggtaagatgattttctaatcaaaatacaaccagaaaacgtgccattacaatttagggatatttgaaaaaaggtaccagccttctccagattgatcccattgcttgagggtggtgtggaatcagaatgggtcagttaaatccgtagctaataagagagtaaaactttagatagtgcattcttgctgaatagcagctggtctgagtgaaaatacgtaaaagccaactgcaaacctactttcttttttatcaacaacaacaacaaaaacaacggcaacaacaatggcgtctatgatgagcttttgaaaccagagatgtttgataaaattctgagtcaagaagtaaacagatattttagttatgattttgagtcagaactttaaatgcatactttaagtaaatttgaaaatattttaacttcctcctgtaatcaacttagcacaattagaaaatacatattggattacatgtattgttagtttcacaatggacggattactttaataccactccaaatgctacttctttctttgaggtgcagtttcttgacatattttttactgacaagttgtgaaagggcagtttattaaactgacaaagaatatctttaaaaaataagaagatgaacgccacaacaggaagagttgtgtatatattaacagatattacagaggccaatagaagtctgaactccagccaatcaagttctattgtgtcatgacctttggctttttctttccatcgcaagcatctgacagatgaaaattattcagattctaaagaaggctaggctctcactgaattaattaaactcaatgagcacaaagcaaagcatataaattaaccaggcagagtgataataatcagaagtaaattaaattagacaaagtgttaaaaaagaaaatgaaaatggaagactataatccagtattataccaaatggcctgttaggttaacttcatgaatcattgttctgttttttgtgtggtttcagatggatttgtgctgggagagggttctgcgttttggccctgagaatacttggtattctctgctgtgtgtgcagacttgaacagactggacaaacagccttgtccctcttacttttgtgcgcagtcctaagtggccaagtgacagtgctttagaaatgtggtctgtgatgcagagagcatgaactcgcagttcccatacccagtgaagggcctgttcactccagctcaatctctaccatcctgccaactggcctggactccaccgtgagcagatggacatgactcaggagggcaatgaatgggggaggagaggattttgacagatgattaaagcatttcaaaaccctgaggcttttaccctctaactgcctcctcctcctgccccctcactgaggctaattgggttagctcattttttcctctttcaccaaaagcctttctattgctcttttgtgacatattttttcctttaagctacttgtgacatacccttcagtgatttttatctcattgaaagaattgggaatagagagaggctgatccagggggatttatctggggctctatattttattaaggatgggtttattttacaggctaccacactggtattaaaaatatttttttaaacagcaagaaagaatttctgcaacaaaaatgtagatttgttaatattaagagatgaattcacttattccctgaagaagtggctcagtgtggcaccagctttacagcacaaactagaagttgtaggagttggttctctagccatgctccctgactttgaatcctggccttgccactcactagctgtgggagctcaggcaagtaacccagtcttcctgtgccccagtttcttcaactgtctactagggttatgagaataaaatgagttatacgtagaacactttggagaatgtctggtttggttagcactcaataaatgctaaacatttttcttactgtaacaaagcatacttatttccaatctatacactatttcaaaaatttttgaagccatcttcccaaagcaacacatattaaaccaaaaaaaaaaaaaaaaaggacaaaataagagagagcaaaaatccattaaaaggctgagagatgtacacataccaagtacaggaacgcatttaactgcatcatgtggaccctaagtagacagccctaagacttaccgcc

SEQ ID NO: 60488 - DNA, 1802 bp, Homo sapiens
caatgaagatgcaaatatgtagtatgtgttttcatcacggcatctttggtggtacaagcagtcatttaagggagaaaggtacgttctaaagctgtttataatgcctaagcagtgacattcggatttcttggatatttgttttctaggttactgaaaaggtgtcacgatctgaaggtgaatgagaggagaaaaatgatgcagctgaagccctgatctccagtcaagttgttcttggctgggagcatgctgagaatcaccgaggtctcccagaaagatgacaagttgttcaagcctgaaggagagaaacaaagaactctgcctcctccttccctccttgcgtggctttcgtcctcagcttccaccctgaccctggctccccttgcctccccaggagggagagatcaggcacttaccctgggactgactgtggaggacgtttcaggacctacttctcacgctcagcaaatgggtaatgcaattcaatccatcccgcccaatgcctgacttgcccaagctgctgagtgtgcccaggcagaagacagtatcttctttccatttcccactgtaaacattcttcacgtggccttttcccctcaattcaccacaaatattggatagcgataaactgggacaaatgaaaagaagctttctggctgtctcggatctgaagttacaggcacaggatgggtcaaaagggtcactcgaagagttggtacaaaacagaggaggcggcaaacaagcactggcagcttgatggctcagaaaatgacccagctgcctccccgggcgtggggcaccttctggtgctgtatcacagtgcatgccattcaggcaccgcaacaccactgggcccaggagccaaagcccactcccgctccttcccaggtacaaagataaacacaacactcaggaaaaaagtgatcattgatgcaatgggactttgagggaaggccgccaaggagaataacagtttttctgatgaaatattgatctctgggtcacattgctcagcaattacccattgccggttactcagtacattgctgacatagtacaatcaaaaagtgtaagcaagaaattctaataattgtaagcaagaaattctaataattgtaatacattggtcatttcttatgagccaggaactctgatgggtgctttcaatgcaatcccaatcacctccctgccattttgcagaggtgccgagaggatacccctgagtgaaggtttcaccactcacatacggaacagctggaacacaaaccctcatctgatggcaaactcatgctctttgctccagcctcccaaaaaaagagaattctctcaccctcacaggccaaaacaattgtttaattgtttaatccacggtgagagcatgtacaaccagagaaggtgagaggatgactatgattgattatgaggtggtctgattatgcttagcagccagatagtatgtaaattacagcatgactagttaacctatgaaacattcaacttttttcctgcatgaagttttctggtgaatttgaaaaagtcccctaagagaggagtctcatggaggagggaagaagctttggattcaggtccactgacaactttgtcaactactggcctaagatcttgggcagagattgggtgaagtgggaattaagtaaaggaaggagacctcacagagtgactggtacttggggaaccatcaagctgagctgtccaagggtcctgattccccctctaggaaacatttctattcctcctgcttgcacctttagtgcctgcaagaatggatcccttctccggtttct

SEQ ID NO: 60489 - DNA, 1157 bp, Homo sapiens
agctgggaggatgcagcctcatgtttcccataggtgagacagtataggtgacacagtggccaagatagggtgttttaaggtttgaggtaaggcgaccatgagctgtcaaacttaagtcctggccctcagtctcatctccaattctgttttttttttttttttttttttttgagacagtgtcttgctctgttgtccaggctggagtgcagtggcacaatctcagctcactgcaacctctgcctcctgggttcaagcaattctcctgcctcagactctccaagtagctgggactacaggcccacaccaccatgcctggctaatttttgtatatttactagagatggggtttcgccatgttgaccaggcttgtctcaatctcctgtcctcaggtgatctgcctgcctcggcctcccaaagtgctgggattacaggcatgagtcaccactcccggctgtcctaaaccaattctaatgagtctccctgttaaatcaacattcctggtggaaaagacacggatatgaaatcacatctcatagcatagttcatatagcaagccttgtttcagcaacagctgctccataccttggtttcaatacattataaaaaccagtttttctcagaggcatcatggaattacaatagtcacacaccattatctgtgtaacgattatccattcttctttctgggcatataaaagcgttttggttatgcaatcaaactagaaatctccctcactgtgtgaacgacccaattgagcaaccaagtaaacctgaagctctgtgcctgctgaacagctcatggtcttatcagtggtcttatcagatgagccagtggtctcatcatcagtatcctgaacttgaatcaacaacagtaagggcctcactcagcctatgtcaggccttgaggtagttacagtgaggacggagctctaaacacagatctaaattctttaacatggttggggagataaaagaacagtaggacaggaaggaatgtagtgggtatattgtgccactgataaatatgatttaatatctaaagaaaactatgagatatgaacaaatactaaatgaaattaattttcaaatccaatatttatacaaattttatagtaaccttttcagatatatgaattaaataatttctctaaaaacac

SEQ ID NO: 60490 - DNA, 1288 bp, Homo sapiens
ctagctctgtgagccgcagccgcgtagccgccgcgccgcgcgccagcccggaccgcccctacctgccctcctagtcccgccccggcccatgagcagcggcccattgggcggggggcaagagatcgaagctctcattggccaccagacccgtccgtctcctcgtctccgcaggccacagggggttcggtagagtctgaggatagggcagtcttcgctcgcggctgcaagatctctgaagggggccggcgtgcggaggctaggggaccgggaaggaggagttaggcgggatgattcatcctcgcccggcttacttccgacctccggtgcagtctcccaggagctgggggcgtgagaaacccctccccgcagcgagtgggctgccggagggggctggggcttctcgccagcgtttgcgtttggctcccagctctgagctccgcgcccacctaccgcgggcgagtgctgcgcagcacggaggacgccccttctcttccgctgctggcagccttcgcaggcgtctcacccgggcctaggcttctgcacggcagtggggcttttctccttctccgtgaatccgctgacgccgtgccctggagctcccccatcccgggagtctgacggcgctggcgcaagccctggcgacactcttggcttctttcatcctgcgtccctcgtttcctaaagagcatgtataaagtcgatttcctagtgtcgacatgagattcaactgggtaaccgatggaaatggtcagcattagtcagaatctatgaccccttcgtttcatgctttaaattatagctcggcccagaggcctcagtgccgtggtgtgaacgtgcttccttccacggatccttcttcctcctcgcggcctcccaaagcacctggctgagctttttcgaggcccgctgggcctttggttcggttgaggcaagaacagtttgtctatttctgagtgcccgtagtttagtaaagctctgtaaatgaatcactgtgtgactgcggagtctcagtgtttcactccaaacagcattattcaaccccacgtgccctgggcatctgccatagcttacagcatcgtgtgcctttctgtttcttccaacgaggggcatggtgaggcggtgattctagtgttagtccctgtacaaggagggagggagggagggaagaagggaaagagggagagagggaggaaggaagggggggggaaaggaaaggcggaaggaagggaagaaagggagggaggaagaagaaaaggaaaggaaaatctttgagtcaagtgacattctg

SEQ ID NO: 60491 - DNA, 475 bp, Homo sapiens
ggaggttgcagtgagctgagactgctccactgcactccagcctgggtgacagagcaagaatgtcccaaaaacaaacaaacaaacaaaaaatgtccagtgtgaaagaaaaaaaccaaggctacagttttccaaagtggaggcaggagattgtgcaatcctttcacaaaggtcaaaccacaaaatgttctaatagatttaaataaacaaccaaagtcagtatccaccagctttcaaaatccatcagttgggagtgccttcattaactaaccaatcagaactggtttgcaatttaggatttctgcctagccaatgaactgcctatggaaacaatttttcatggaaatcccctatagaaaacctctcctgcatttgccttacaagacactattggaggctgccctgattcagtgtaccagaattgcaattcttggtttcccaaataaatgttatttattttgacctcatgttgatcttt

SEQ ID NO: 60492 - DNA, 972 bp, Homo sapiens
ttcctcaaagcaccgccccactttttacaccacgcctccttttgctctgttccttcccccacaatattgggacaccctaggcggtagaagcagccgcttttctgtcatgcgcattgcggagagtcgttcttccctctttcccgacttcaccactcactgggatcagacccctgtcatgcgcattgagagtcctctagacaggcgctcctcgcagcaccgtagtgcgcttgcgctgagcagcccgcgagggcggaagtgggagctgcgaccgcgctccctgtgaggtgggcaagcggcgaaatggcgccctccgggagtcttgcagttcccctggcagtcctggtgctgttgctttggggtgctccctggacgcacgggcggcggagcaacgttcgcgtcatcacggacgagaactggagagaactgctggaaggagactggatgatagaattgtgagtgcggggcggccagggtcctacgtccgtgcctggacacacgacttcaccccgcacgttcctcgtgcgggtcgcaggctccccaggactgcgcctccgagttgcggagcgagcgtccccgacttctgcagctccccaaactcttgggatctgccgccagcttggtcccaccccctcgtctcttacccgtgaatgttaagtttcttctggggtgcaccctcgtttcgtttcttgggttgtggtgcgcccaaagggttagtgccaatgcgaattctgacatttttcatgactttgaggatgcgactggggcgcggggagggaggtgtccgactcgtgtctaagtagttaaagtgattcttcacagacttctacacttattttcaccacattttacataagagaatattgagcaaaatttctcctctcgttttgtctgtccttaaaagatagtctctttatggtgttggaatttggcgcttttaagctttttttaatggattgggtacgtttctttttt

SEQ ID NO: 60493 - DNA, 940 bp, Homo sapiens
ccgcagctgatacactatggaattactggggaggtcagatgaagattaggttaaaataataataacagtaaaaactcttttaactaaaaagcactatatattataattcatagtagtaataatttaagtgaggccacatctgagcttcccctgcagggccttgaaacactgacatccagagaagaagaataataaacaagaaagtggctgcaatgccagagtttcaacagatcctttgtggctctagaactggaactctgtctccttttctaagacaggatgtggggaatcttataaaaagcttcatatttgtattcacaagttaatgtgggaaagaaaccaggatttctgtgtccttaagtgatacggagactctggctccagcaagacaaggctccgatcccagatgtcagtccccagcgattcagggacacttcaacatcctgacttcaaatgaaaaatcaggttgcttttcgagagttgtaaaagactggaaactccctgaccactcgccaactcacagatgccagaaactctgcagccatagccctggccagagatttttctggcagagtggggtcccctgacctctttaagaggagcactgctttctgagggctcagaaggcaatctgaggctccagcatcttggccaggggctgtgaagagacaagtggagcacagggtggggtatgcagggagcaggaggtatcatgggcgggcccctcagggagggccgtggattattcaaaagtgccctggcctgctgtgcattctggaggatattcaccatcaaccctgccaggaaagaaggcctcacaaaacaccaggtctgaaggaaggatcaaggaatttctttgacagatgttaatcaagaaaacctgaacaccaagggaggctattgcttcctcctgaaactatttgactggcttggtctcttt

SEQ ID NO: 60494 - DNA, 1891 bp, Homo sapiens
ggtaccacctgcaggacctgggccaggctcaaagctgaaagcaactctgtgtggactgcctataagggagccaatcacccttgggaggttggcagagactgtgcccattaaatccctccataccatgcagtgctaaatggcccaatcaaatcctctatttagaagaatatatatcagatgattaaagagaaagctgatgactcagctttaggctgttgttttttctggagcaatagtgagcaaatatcactggttgtttacgatactggctgcacattttaatgggtaaaccaatgtccctgaatacctacaccgctgatcaataatgcctccttttgctggcctttcccatggttctttgaaataaacttttatgttggttaacaatttgtgcatattacttccttgtaaccctgaaggaatggctagtagagccagtacaatagtgctttacagaagggagtaccccctgataatcctgccagtggtaatgcctataagcagctgggtcccaaattcaccaattccgagagttgtcactaaaacctttttttttgggcagggggatcaggttcaacatggtgttgattttttttttggttattagttagaaaaattgagtacttaaatggtccttacttattttaagccaagttcactaatagagaaactggcctctggaaaattggcctttagtgttgactgctaagtaatgttcttcatttactgggggaattcatctaatattgacttcaaattattcaacaatgaaatcatagatttactgtagacacaatagtcctcaagcttacagaatttgggagcccctattgtctacttgaaactatcattttgtttctgtcattcgcatatgtacaagtcatggctaacttgattgctttggtgttttcccaggtaatattgactccaatccagaagacagtcatcagttaagtaaataaaacaggaacagaacattggtacttacagtaggcatgattttaagataaaccccaatgagtcatatccttgtataatctcctccccttgagtgttgttggagctaatgagttgcatttagtgaacagaatatggcaaagatggtgggatcgtcacttccgtggttatgttattgctatgtaaactgccattatagcagactggaaggattgattctccttttggccatgacgtagtgaggtaccatgtgacaagaaactgcaggcagcctcctgagtctgagagtggcccctggctgacagctagcaagaaaacagggacctcagtcctccagcttcaaggaagtgaactctctgaaatcacatacacatggaagaggaccccaaactccagactccagaaaagaatgtagctgtgtcgacacctagatcacagccttgtgagaccctgagcaggggacccagttaggctgtgcctcaactcctgacctatagaaactgagatgataaatgggtgttgttttaagccactaaactgggatgtgttatgaaatgacagaaatttaatacagtctccgtattcagggtggagtgtaagggagtgtgtttaaatctcagctttgctacttattagatgtacaaccatggcaaattacttaacccctctgaatctgttacctttatggtaaaataggaacaaaaattatacctatttcaggatgatgaagagggaatgaaatggtacacgctgagtcacttaacgtggtacctgacacatagtaacttctcaatgcatgtttttcattgtcatcagaggttggacattttaaatcccataatcctaaatgtttttttcattatttttttccatgttgctcatgttttgaagattttcatttatcatattacctgattttatttattaagtaatc

SEQ ID NO: 60495 - DNA, 3079 bp, Homo sapiens
gaagatctaacccactgctgttaacaatacaccttacaggattttgaaagctgaaagtagtagctccacgcaaattggagttgttttttttaattcctttattttgaaagtttaggcataatctggggtagaagttcatgtgttcgtggtagttaaaaagtcaaggtcaaactctacatgccacagggaatcataaaaaaaaaaacaaaaaacaacaaaaaaaaccctctgttcttctccccgcttaaatcagaaccaaagaattccccagtgagaacatatctctcatctttcactcagaacaaaaagcagcagtacaaaacatgaactgcatggtgtttgctacccttgggtggcagctgctagcatgagcattaccatttgtattcaagggatcttttattcccagttgcatgagccgagccacagggcttgcaagaatgcttgggatgcttcttatggacttaggacacaaagaatctgtggtgtggctctgaaatgggaaccgctaaagacagaagaactgaaagggatatttaatatgttagtaaggacattgctattcatgtatggagtatgtatgtgtgcagaagactgtgtgtgtgtgtttatgaggatatgtatatgctgattttaaagtctctctgtttttagacaattgaggttattgttttctatatatacccagaagagtgtcaaaatgccttaatgggcagtgagccatcatacctgtggatggccaagttcaacaaggcaattgcagaattagagaaggggactgtgtttttcttattaatggttaagccattgccccgataagagattttcaaagtttgcaaacaggaaactggtcacccaagctggaagtccttctaaaatagactccttatttcagtcagtattgagtaattttagtatgccagtggctctaacagaaattgttttccataaaacatgcaaattgatatgttttcaactcattctatctctcctaaaaagactccagaaaagtcacccacagtactacccggtacagaaagggaaaagtttgaaacatttttgtttacatcaaagtcagggaaaccatttcatactctgaatgttcttgagatgattaatgcctgcattgacagcacctccttcttaaccaatgttgcagtgaaagtgaacttgagtttatagttcgtggtccataactgaaacatcatagatttaggtatacagaaatagagctggtaatacaaacaagaccttgaattttacctgaagttggtgatagactccccttagctattttccctttatttattttttccaaattatagatgaatttatgagcagtttagggtaaaggggaccctaaggatagatcaattttccttaatcccatgtaactaacaaatagaggtcatatgcaagtagagcagcttttaggtgtcaggctaaaagagttcttgatgagattgctcatgtggaaagaaagtatcccttttaaagtcacccactttgcaagggtaccattgagctgtgtgagctaaataaggcttgtacagttactgcattacttcccttccagccctggagactacaagcaaaggaagatacttccttatttaatttgataatggtactaaattaaacaaataacacataacgacaagctcttttgagttagagaatcaaaagaaggcaagatgtattaatagcagaaaacattgaattaagatacagtaatgactctgttgttcagattgatccagttctttatttacattattgaaaagatagagagtagcggaaatgctgcctttggtgacagttcaacctcaagggatcaaatccagcttcattctggtctgactatatacatggaagtgatgcctaatgtaaggctcccctggcagtacttgtaatttacaagattgattttttttttcctctgaagagctgttaaatgtgattaattcaactgaaactcaggaaaattccctttttcttttgcaaacaggtagaggaattcacagtggtctggaacacagaatcatcagtcataaggtcagtcccctgctttgacctttgccaaatggtgagttgattgacttttcccagtatgaaacatgaggaccaatgcctgacactcaaatgtgaagatacccagggcccatgttaattgttaactttgtgatttctacaccaaacacagggcttacttttaagcatctgcagaaaatgttttttattgtcacaggaaacctaaaaataaccgtaaccctgaatactcagaccattgagcttggttaagacaccaaccaaactgcagtactgaggtcacggaccacctctgggaggaatagaattctgtctgccctgggtgctgggtgtatgaatagggctgagaaagcaggcaagtctaaggtctccatggagctcaatccagggggcagggcctatcctgggagccagatgtgaaagtttcctgtccatttctgttgctggctttgctttcgtgagcagacaattcacagcaaatgaaatagaaatggcccttaaacatgaaacttgttcacactcactcataattagaggaatacaattaaaacaacactgagatacgatttcttgcctgtcaggctggcaaaaattaataaattttacaacacattctgttacatgcatttctggtaggatgtcaagctggtacaaccttttaaaagtgaaatttgacattactttacaaagctacatgtgcgtttactgtttgactcagaaatctcattttagaaatctagcccaaaattcacttccaatgatatgacagtacatatatacaagattgttcattgaagcatgatttgtaattgcaaaatattggaatcagtctaaatgcctacagatagaagaatgattgaataaaaccatggttcatttatacatggagtactatatatctgtaaaaaaaatgaggaaaatctctctgaaataataggtagtgattttcccggacatacttttaagtgagaaaagtaaaatgcaaagaatatgtgtagtatactatgcttgatgtgagaaaaaatggaat

SEQ ID NO: 60496 - DNA, 1916 bp, Homo sapiens
ttttatatctgttaaccgagatgaatacaaaaatatgctgtcttctttattcaaacacctgaaaagtcaagtttcttgacaagccttacaggcttgttatcatccgtgtgtgtgctcaaaacttcgtaccatcagacagcccaggggagtgccagcagttgcagtgtaaggaccgtttttatctagcttattctgtgaagcacattaaatgtttctcatatatttcaaaatcttaaaagcatttgtggatgacagtgactttaacaattctgagagtagaaagtgctcagtggttttgagcattgggggattcaatctaggttagggatcccttctcccctcctccgctctctcttgtcctttctttgcctccctaatcttccctcctcctttctctttctcttctctcctttcctttctcttctctcattctctttctctcacatatacacatgtactcccacccctcttttttcgaaggttttaaattccatcccttgatgaataattttagtaattgcccagtgatagtgctaattaaattagacctccagagggaaggctactcttgagtctaaatggccttgtgagttttcctatctctacttctattctagcaaacttctagaaagcctctgccttgcttgtctttagttttactatcttctgcttattaagtatttatctcttaccctgctccccacatattataagctcctcagggcagaaactatgccttttaaatggatgctattctagtgactactcaggaaatgtttgttgacatatttgacatgttgagtctcccaggtctatggctgctaatgagacattgctggtcacttcttcctcctcttgggcagccccctttaggataactatatgccagacctctttagtataaccattttggtacaaaacatgttgaagctttatgttccattccacctcagaagaacagcaagaaaacaaacagagtgacgtaccattttctcaagaaaccatggagtgcaaaatagcagaaatcaccagtgcctggccttatgcctgcatgctttctgagcttggattcctggtgcataaatcactgcatgactctggcttccccatacttgaggttgtgaaggcaccaggatggggaaaaaccctgcaggattttaatcttacgtgcatcatccataggcttctcccccttcttgccactactggctcaggacacacacatagttcaatgaaataaaacatatttgttccctatctttcaaacagtcttttccaatctaatgtatcaaagacattcaaaagtttgagcaaaggctgttctttctctgactttgtttcatcatgggcaagtctgctaaggaaaacagcacatgctagccagaagaacttgaaaaagtccaagatgtatagatttctcatttctgtccccaaaatctttctatttatattctctgagtgtcaaaatggatatgactcagctgtgatccaccaaaagatgaggcagcgtgttaattcaaccctcactctctctatcagcatatggcaaggtttatggctgccaaaaaatgcacaagctcttgcccccaaatatgaatgagcaaaacaccctgtgctttatgaaaccaaaggctgcatctccaccagcttgcactggatatgcagtctttctgggcctgaccgggctgaaggtacaaatgatgcacaggatgaggagttggtctttcccatgcggggtttgtgccatactcttctctctgaaagtctgccttgctgcagcctccatccccatcttccaagagaaatcgtacaaaagatctctctccccaagtccttctgaagtagtctctcctttaaaaaacaaccaggacattgtttcctgagcatttgccaggaatgccagaacaaggcttatc

SEQ ID NO: 60497 - DNA, 2416 bp, Homo sapiens
tgtctcaatcctactcacatctgttccattccccacccctcaacaccaccatccatgcacgattaatgctcctcccttagctttctcaaagcaccttacttataactttaaatccctatcatggccaaaattattttcttattgctttgacgtcatatgattctagcttggcagttatgtactgtcttgaagatactactcccctgtcttttctggcttaatgctatcacagagaagcttgtattgttctaattgctattcctttgtaggaaatgtgtcttttctctttggatacttttaagataatctctgtgtttggtgttcacagtctcaccatgatggattgtttgcaaatttccttgtagttaatatatttgggattttttggaattcctaatgtttgagaaatcctcagttattatctctttgaatattatttcttgatcattctctttatcatctccttctggatttccaattatatagatagcattcattcttactgtattctccatatgtctttaaccattatagcaaatatttccattgctttatctgtctgggttgcattctggataatttatttgcattcatgttccagttcactaatctatatttaggtgtgcatgtgtctaattccatacattaaagttgtaagctccttacagtgagggactgcatctatttcatcttggtttcatgactagtacacagccggtgataaatagtgtttgctgaaatgaatttgttggcatgtctgagaagcaattgttaagctgatcttcctgtgtaatccgaggtagaaatatatgctgaaatataagttagttacccattggcaaggaaagagggaccatggtcatttagcgcttacagtaatggcatatggaactggttggcttgtactgctctgtctgtagttcaagggcaggttaggtcaggcagaagcatgtgacacgtgtgttcaaaaaccatggccaagccagggtctctcttcttcaaataaaactcctaaataccatcccacttatgcaataaaacttggggcaggaaatgaaacatttgaattggatacctcccccagctcgtcgtgggtataatcttgacattctctctcacttaaaaatgcatgaaggaaggttaccaccaaggaaaaggagtttggtaagcctcaaaaagcttgttcagactagtcatggtacctcatctcaggcaccaggtaaatgggacaagggtaggcaaacaatgcctgcagtctgcctttagaaaaacctgatgctgcttgtaatcatgcagcccatcatgtttcattaaaatagagattcatctctgctgttgttacagagcagatgtctgaccctcagttgctgtacccagctgctggtggccacagtcatgcacaggcagggtcacagtccagaaaagatatgcatgacttcagagggagtttcctggagtgtttttggcaagagggaaagggatagtgggaaggccaagctctccctgtggcagtcagtgtctggcatttagccattcttcagtgggaggttcttcaggagaaacatgaaaatcagtcttcagggtagttcaacaaaagagcatggtggtgattttgagattccacccaatgagaaaggaatctcagtgcacagtggattttcccatcacagcttatgggattatcaggctaatctgcaccttctcttgtctgtcagtgctgctgcagaacagttccaaagccacaaagaaggagctggcccactgttccagagaaggccatctgaaacagcaggaggccctggagtccctctttggcaattctgaattgagtatgttgggtggtatctgtagtgatcccaaagagtgtcaccaaattctctcaattaaattaattttaattaactttattattaataaaaaattatcaaaaagcatatagtagcagtatctgatagagccaaacattcaagagtgactgtggaagcctggaagtcaggaagcttggctgaattaaatccaataaaacacaaacccacagctgatggttcctgggtcccacaggaaccccccagctcttgggtccacataggggaacagatggcagcaccagtaggtcatactctgatttcctctgcctagaaatctgctcctttatcacagctggggatttcagctattcctgatggcagcgatttccatctgggcctgtggtgaaaaataaacttttcctgaaccattaaaattcataaagctgttaacagttaagatgtaaaaagctcttgagatgtctctgtgcatgtgattgttgtctgtttactgtgaaaacaatcatacctgtggcaaaaattcaatatacttataaaattgaatctctcgtgtcaagatcctgtgacttactgccacagaggtaagaaga

SEQ ID NO: 60498 - DNA, 3403 bp, Homo sapiens
atatattgtgcccaccccagggtccatgatacctcactgatcacctgctactgattatattagcagtcatatgtctttgagccaattttccacccaggtggaagtgttaacacaaaacatgacttaaattagtaaaaattttgttttgtgtgcttatttcataatttcctgagtctgaagacgtccttcctatataaacaaccacctacattgactgaaactcttgaggacagagtttgtacttagttctgtcattattttcagaatcatttttctctttttgcattacaagcttcagatctggcccacaaactgaccttctcaacagtaatagtagtaaggagacagagctcagtcctaagttatcctaaagctcattcaaccccattttgtaaatctttgtcaacccagtgctcagcacatggcctggcacttagtggaatgtcagtgaatgttgtcaatgtcatccagccctttgagggctgcaatactgctattagctcactctgaataatgtatctttagaacagtccagaaaatgttatgtcctacaaccaataatggtctctgcctcctccatgtcttgccaagtgcttaggtcacataccttttgcagctctcttgattttacctaagtgtagcccaatgacaaagagaggaccattcagaggaattacaatgccagatgaacaaagccaagacctacttaggtttttgctgggcttcgaggagtctgggtttttttctggggtggggcaggctgatggtagggaactgctctgctagagaggctttggcaattactcagagatgtttacaaggatttatttcttagagtggtttgatttccagaaaaattgcctttaaaaaaagctggataaaacaggttccacattacacttgtatgagttgtcctgaatggcataaattatttttcctgaggctattagctcagagtctgagcaacacactggtgtttttacaggagtctaatgcatagagattacggctgactctccattttatataattcctgacctagtactgagtctcaccaaatgttgatgatcttcaactcattcagcaactgggaaataatcacattcagacatttctaccaggcttgtcatagctactaatgccatcctttaaaaaggaaataccttctgaaccctatcaataaatgtaaaaaagaaatacccttctgaaccctatcaataaatgtcgtggtctcaagatgacattgccaggcccttagacccaggtttcctgtttcctcctaggatgccacccctgttccactttcagagagcgtctctgggtcttggctgaggttgtgcctagtgagttcttgtcactgcacactgacaataactcccctcacttgcagttttcctggtgggctactttcttcaatgtggatccttttatctctttcaattatagtaagaccaataggaagaaagtcttttggggaacagcagaattgcagcttctaggtgggtggggaaaggacctaattcacagccttgggttgactggttgttgcatgtgcctgggcagctctgccagtgccttgcacaaccaaggagtcaagtctatggagggtgggggtacacagggaactcaccctgctcctgtctgcctgtagggacagccatccacatagttcaaacggctgtagatctcaattcattctaaagtctactaactggttatgttttctcgaaccacatgcttaaaccaacttcttccacataagcagcttttacccatataatatcactattacagggaggaaagattttgtcactctacccatggtaatgtgtgatgtagtcaccagtcctcaaagcttaattacaacagtgctgcatgattggagattgagttgtttcttatgatggttgatttttttattggacaagggcttagagcctagctataggaagttgtttcttttggatacaatcctagaagttttccttttaaaacattctttctacctttcctattttcaatacctatcaggtctatgtaaatatcaccgtctctctcttctttgcccagacagctgtcacactatttagcttttccttctataacattctacttaaagaggttgccagtgtcactttccctcctctaaaactggggattaaaattcccagccttccagaacaggtaaataattgctttgtcatgagaaaaatcaatatctgctaccacaggaagtcgggcaggaagcagttggacaaaggcctgcacttcagctgtgcagcagagtcatttgtgtgaccccaaaggttatgctttcctgcttgttttacaaaaagctgatgagccaggcagaggaaccagagtccagataggactagaagtatgtgccaggtactctccagtggagaacgcagggccccggggcagccgctcaattagatgtattgttgacccaaggtgagattcaagaggagataaagactttcagggaaagggaagagcagtgagcagttcacccacattccccaccaaaagtgaactactcagatattttgcagttttctcttctaatgctcagggagctacaaggacattttgagcctattcagtcatcttttgattgaaatcagggaaactcagtactctcatggcttccagggtcctcaaacctttctagccccacttaaaaaaaatagcttattgaaatataatttacacacataaaatttgtccctttaaagtatataatacagtggtttttaaaatatattcacagtacgtacaaccatcacacaatcaattttagaacacttttaccacctcaaaaagaaaccctatactgtttaccaatcataatcctattctcccctcaccccatccctaaacaaccaataatctattttctgctctatagatttgcctattctggacatttctactttctatctccacagatttgcctattatggacatggaatatgtatagtcttttgagactggcttctttcacttggcaaaatattttcaaggattatccatgttgtggcatatattagcactgtgttcctttttatggccaaataatattccacgatgtggatataccacattttgttgatccattcaccaggtgatgcacatttgggttgtttccattgtttggttactatgagtaacgttgctataaacattcatgcacatatctttgtgtggatacatgtttttaattctcttggagtgaaattgctgggttatatgttttgaaacactgacaaactttcccaaagtggctgctccacctaacaatcccaccagcaaggtatgagggttccaatttatccacatccttgtctacacttattattgtctgatttttttattttaagctttcctggtggatatg

SEQ ID NO: 60499 - DNA, 3341 bp, Homo sapiens
cacttgacttatctatgatatgagaatattttgtcccattctgtgggttttttactttttcggtggtgtactttgaagcacaaaagtttttaattttaatgaagttccatttatcaattcttttcctttgtcacatgtgaatttggtgtcatagctaagaaatcattgcctaatccaagaacaggaagatttactcctgttttcttctgaaagctttatagttttaatgcttgtatttaggtcaattatatgttttgaattaatctttgtatttggtgtgagatattggtgtaacatcattcttttgaatattgatattcagttgttctggcgcaatttattataaaactattctttccccataattttcctggcacccttgccaaaaatcaactagccacctaagataatagggtttatttctagactctcagtgctaccccattgatctgcgtgtctatcttcacagcagtaccacaatgtcttgattactacagctttgtggtaaggtttgaaattgggaaatatgtcctctgctttttcattttaggatcatcttgtctattttaggattatcttgtctatttctacaaaggaataatctgggatattgatggggattgtgttgaatctgtagatcaatttggggagttttgcgttcttggatggttcattgctagcatctagaaatacaatggacttttatatattgatcttgtatggcaaaacctggttggactcaggtattggttttaatgggctttttctatttttgatgggtcctgcttccactttgcactactctcctcatttctgaattccaccgtttttgaccttttttcaatttctctaacacactaagctcccccttgtcacagggcctttgcacatgctgttttctgtctggatgtcacccttctgaattcttccacctagttaactatttttcacctctccctccctgagctgcccccacctcagtccatgtctgtcccttttgggaagccatcatagtactgtgtttcttctcaacatttaccttagcttatgagctcatttgtgttatattttgaccaatgtctatttccccagcagacagtaagcctctgtttttctcattattatatttttcaacatctacatagtgcctgacacatagtggatgcttaacaagcattttttgaaagaaaaaaatgaatacatagatagcattgggaacatgcacctatcacaaagaactttgggcaggttggtagggggagcaaatttaaagttgggcataccatctatgtaaccaattctggcttccttctgggcaattacattccagaatggaatgtgattgtctgggagagcagaggcattgagtatgtagccagtaacgtggttcccccaacccccacctttctctctctactaaagtttcttgccttgtggtgggaaacccagaaagaaaaatccagccatctgagtcatttgcagatgacttctttgtctgcttcttacctttcctgaggtacagctgacttatgagggtggggggagtagaggaaggtggggagttgaaaagattcatttactttccttaccaaattagttcactctaacaaaaatagggaaatccccaaccagctgttccagtgactagcaagaaaaatattctcttggaacactccaacaaaaggcacactttgtgtgctggctgtcttaaaaagaatgctttagagccttccaactattgcccaccctgaatgctttataaatatcagtggcaatagttagaacgtgttttttttcttaattgaaattctagtgctttggtgatggcatagatccccagaatcaggagaaacattgagggtgatagggaaccaagagaagactagctcaggggccaaaaaaatggagccaagatatggtggggctgccacttgttggtgtgtgacaaactttctgccctattcttggaatccatgttccagttgtcaggccggacagaaggaaaatgtttgcatacagagaaagaaggttgggaagtagatatttttcactttgatgtatattttagatgttccttatgcatctgaaatggggttttgcttcaggtgttttgagaccttttacccgtggtgaaatattgtattgtgaaactgcgacaccatcatgataggggccgtgctgttttgtctttgggtcttcattggctaccacaatgcctggcttagagtagaggctcaatgaaaattggacagaatgtcttaaataagatgattcatggcaaacttgctttgcaaagtagattttacagccctgtgaagtaagctcacttcctgtgttttttattttgtcctgaggctcatcctttttatcttctgtgccacaagatacaaatatttatagtacttaatttttagttggagtagataatttattataaataaattccatgagcaaataaatgaaataattgttttgctgtcaataaaatttaaaggaaaatgattcaaaagtgaaaaatatagcttactagtcatggtttttcaatgctttgtcataggaaattttaaaatactaggaattcatattgaaacaagaatggaaaaggaagtttatgaaagcacaatactcaaatccatttacttttttagactaatatattaaggtaaacaccatgcaagaagtaccctctcttaactttcctcctatttcagaatacttctctattaaaagaacaaaattacaacttgagtcccttcttctgaactctgcaatttccctatcagttatgttgatgtggggtgtcttagagcagaggtttctgagtactcataggcaagtttccagttgcttcctaacaatattgcctgggacaaaatagagacagaattctaagttgggatgactttacttgagttaaaaaatttgcaaattgttacaacctaaatgggtctagatcattgaacttgggttttcttagatttcctctattctcaaagctttgcttatcatgtacatgctattttggttccataaatattcactgagcattgactgaagtactcatctagattctgggaaaagggcaatgaataacacacaaaactcctcttctcatggagtttatatcctggtagagcttattattttccctatagtaaaatgaaataaaaacagtataaatctcacagcgctcctcttaggattcaatggcggggtagggtaaggaggtggaagacaaaaactgagagacaaaacatctgctggcttttcaaggatcttggctgtgtacggatgtaagaaaaggttaagggagacccattgttaggatgcagacatgtagg

SEQ ID NO: 60500 - DNA, 3758 bp, Homo sapiens
ttaatatcaacttttgctgttcacccataaaatacagaacattgaagcactctttttaaacacagcaaaaatctgccccatgattagaaaggagtacagaggttgacactccactctgtactccagaggtgtgctctggagtagtacaaacgggtttacaaactgctagagttaaggaagctgcatgatctgtcttccgatttagtttcctgcagtggtggactggagtctattttacctgatccaaagagctgatgttaaatatgcaagaattttgcaaactagtatttaaactgtcagttgcttgaaatcagccagggtgggagtatttacaccacaaaaatgagtcaactgtcaatctggcttccctctcatcccccagagccattttaccagcacaccactgcctcccgggtaagtttaaggataaaatgagttagtttatgtaaagcgcttttcatagagctccccatagacaaagcattcagtaaatgctagctaccattattgttattattatttgccattgaaaataaatgcagccaactctcaactgtttatcaaattgataaatcatctatgtcctatgtttgtttgcttttgtccctatttgacaattttactagcagcatacaagggaatatgttcgggcataggaaaaaaaagcagtgaaatcctaatcaatccatggtagtgcttattattatagcattgtgatcttgacaaaatatttgctgagagagaaagaattaaagttgaaaaaaatgaaaatgggattatatctaaatttaaaatattcactctatttttgtcttccttaaaacagctcatcgaaattccattataaatagaaaatgataaaataataattttgaacaattgtagaaaaatatgacaagtctgtatttcagtgataaatcatagaattcctgacacacattatcttaggccaaaaagggaattattggttcttgtaaatctcaaaggtaaaaatcaaaggataggtctgtgtttgaacacaccttgatgcaggatcacattaggccatgagtgctcggtttctctggcttctattagattattgctatttccagtctccacgtggcagcctcagcagctccaaactctgcctttaaagtggaatgctcttcccaaaatcatgtctctcaggaaagagaaactcttttttttttctttttttaaatagttcctgtaaaattcctgaagtttattttgattgatctggctttggccacacatctgatgccagtttgggagaatatctaatggggtaaaggtaatttatttaaaaaaaaaaactgtaagagtatatctaacagggtaaaggtaatttgttccccctccccatcaaaaaaaaaaaaaaaaaaaaaaacctgtggtgttattacactaagataaaatggatgtcatgcaaccaaaatacaattgtctactccaaattatcttcattgtaattgaattcatgttgatggcaactcatgtatacatgtagagctagcacactgctttctcttggaacacagttctgataataaccttctcagatcaagtttcagcccagggcacttctgaagccattaaagaccctagtcataaagaggcaaaaatagagatagtatcactacaggaactaatttgagaaacccgggtaaaagagtgttttaaaaagcaaatgctagccaaaaaataatttataacacctcctgccaggcaaagttcaagtttcagctaataggagaatattcctggtatgatctcggtgccttccttaaccaagaattagagccccatggtacaatgaccttagaaattttgaaagcagtagcaccaggaaaagtgagaggtcaaaactctgtgtgttctgtaatggacacaaacctgttggcatttaaaaattccacagtgttttgctgtcaaatttgttttagaatttcatttcaggaaagtaagttctaactctaatgttatggagaagtttaaatatttataccagaaaaaataaaaagcacaaaaccctctaccctagagtctcaaccattgacaagttacataattctaacgagtgtaaagtatcaagctctgtacatcttgctctctgctgggaaggtgatgcttctgtttctcttggctgtaagtttgtttggcctgagctggatgtcagcctgattcctaaccctcctcatggagtcacaggctgtaatgcatgagtcacagaggttaaaatgcagccttttctggtttatattgtatgtggattctgtaatagtcttggaatagtgttctgtgattcatatcctagtctggtatgccttagccaaatgcatctcctggtctggtgatgtatattgagagccctacgacgcttattgagtatggagtgatttaaggaaaccatttttctatcccctgggaactttctttcttataatatcccacccaaatgtgatttgtttaaaacattgtgatgctcacctttatcttcaccattaaatatgtcatactaaataatcttgtggccataccaaggaaacaccaaatataagaagagcatttattttacaaaaaagaggagacacatctgtaagtattttggagggtgagcatatttcccgaagatcttgagattggatgttggcaccctgtgtggccctgaaaaaaaaaaaaaaaactatcttgggtcttttgtaattgaactagaaactgtaccaacccagagtttataaacagtatcatataacattcattttgaaatatacagaaatgttaatgaggtgatggatgtgaaatcagcttttactaagaaatacaatgtgtgcccgcatcaagcagtgggaataattaccaatttattttctcctatgaaaaaatgatactcagacattagtgggatcttggaaagggatctgcgttatttgtggaagtatcactaaggctaaacaactgtggcaccaaaggacaggcagcataattttctaaaatatagaaaaatttaaaagaggcattgccagaaaataaatgagaatgttcattctcgctaagttctatgagtaatgtaaacatatctggcatttgtccccactttcttcctgggacctttaaaatgaaagtttagtgatttattcttaatcgcccacaagctgttaggtaccctgtggcttgtagccatcagaattaattgcaggtggctttgcgggtctgcagcatgcagtaaacatgatcatgatggattcctaacacaacctggctggcttagggtaattagctctggatcccttcttcttgttctgaagtatgtttaattctccgtggatttctgaagcaatattttgtctttcttgaaagaaaattgaagaaagtctgtgaaatagaaaaataattggactaaactctcaattttttggaaggggaaatgtgggggaaacggggagataagttaaaggctgaagcacttctgtgaaactgtttctctaaagcagaaaaagaagagtgaatttagtgatggtatatttaccctggaatttaagaggaataactctttctggtgttcagaagtccatacttactgatgtactgtaaaaccttgcccttctaagtgtggtcctgggaccagcaacgtcagcatcacctgggagctaattagagatggaaaatcttggccactccagacctgaatcagaatctgcattttaacctggaccaaggcgattggcattcttatcaacatttgagaaccattg

SEQ ID NO: 60501 - DNA, 4383 bp, Homo sapiens
tattttgagaataaatgagaaaacatatcctaatgtaatttttgtgtaaattttgagctttcaatgttggattttcttttaaatggggtaaatctgttgataaattgttatgaaaagttcacatggaaaaaaagcctcatttaaagggagattaagatagatctttactaacatctgttggtgaacctgtctgtcataacttttcattttagaaccgcacagtgatttagcgttgaatcctatttggactaatttaagcctgcaaatctgaaaactatctttcctttaaaatttgagggctttaagtgcaatgtttttagggattggacaaacagttacaagagggacgagtagcctttgaattccctgccagtaggcacaaaccctgatgcccctaggggctggcaatgatttcacaggttaagtggcgcagatgggaacccactgcagtcactctgcaaaactggagtgcgatgcatgacggagagtcagcgttcacccagtgctagtttccaaaaggcagccactactgaactttcatgtggcaaggtggggtccaatggcaccagcttgttttctttcttcaggagaagtaaaaaacttgaaaaattatgtgaaattcttgattctgaaataatggcagctcatttaatttaaaatatgaaactatgcaagcaaaacaaaatccacctgagaacaatgagcctctgggttaagctgaggaactgtttaaattgcctaaaagaccccagttactcaaatgccaggtggaagactgcttcagaagactggctgggtctgccttcctcaagggtgcgacacgttgctctcatgagccagatctaggttctcagtggctcctgcaggaagtcgtaagtggatgcaagaagtcccaagctggcagtctgccaggtgattccagtaggtaatgtcagttcaaataggggagactgccaatacctgtgacctggcacagtgaattggcaagcagatcagaaagagatcttaatacattgtgaataagtcctgatttctagagagatctccaaggttgaattattaaaaccctcacatttacctcctcttggagctctgttggagttaaaagtctctactgaatcttaaaaaggacgcaaatgtcaaaaagagacaaatcccagccaagtgatgggaaatgtgatttcaggataatagcatctgctcattggtcattaaaatacattatttccaatgaatgcccttaactctgcaggatgggaacatagctttaatcagacaggttcccagatcagagtacatcaaaacacaagcagcagattctgtgctgcctgatcaacagaggaaagaaattcagaacattttcttttacatttaaaatgctttatgagggaaatgggtagttagtcatatttattattgagcatttataagaatacttgcttattgttttatttccttattatttattttgagctgagtttctggttattaagaaagggtcctctttcttaaagggtagatacctgattgtgcagctaaaaggagctaaaaggtgcatcagaactgaaacacctgcctagaggtaggaaagggatcagattttctctagggatacctactgatcagttctaagagacacaagttcctgaaggagttcatttttctggtggctttttctaacgctgctttggtcctgaaggagttgcagataatgaatagctaagagaagacggtggagtttaccgagcggatgaggggcaggctgtgaatttagtaggaaaagagaaatgggtctgtgaaaatctctaggaagatgagaacaaacttgtacttgaacatcaaaatagcaccctaatatcttattagcagcaagcatacttggtgcccaggtgttgatttccaaggccattatccaataaaaagaaccagggattcttggagacacgaatgattctagggctggagcaaaaaaatatacaagatgaacctagggcaccctgtagagccagaaaataagcaagttctaaaacaaaacaaaggccaaaacttacaatgatgagactatattcaaaggaacacaggagccaactgaaagagctcccaatggccaaagctggaacaatttgacaaataaaataaataaataagcatttggattatatctcaaaatacaaaataaatatccatgagtccatgttataaataaatgattgaataaataaatagtataaaagagacaaatctcccaagcagaaaaattccatattttgtggagatactctggcctcaaggagatggaatgtaactcccaattccttaattgaggctgtgtatagtaacttccttccaaagagtatagtctgggaagaagcaaaagagtaactttacagtggggaaaccttacaaacagtacctcaaccgggtgctcaagatcaccagcacagtgacaagtcatgttgatgctatgttatccttgatatgatgtgatgaaaatggcatctgtggaatctgtgactttctccccagaatccatgaccacagtctagtcatgagaaaaacatcagacaaatcccaataaagggacattctacaaaatatccgactggtactcccgaaattgactgttcaggtcactgaaagcaaggaaagcctgataaactgccacggccacgaggagtctaaggacacatccaatttccattcgcatccaaaatggaatccgagacagaaagaggaccttaggtgagaactaaagaaatgggaacaaaagtatggactgtagttattgacactgcatcaattttgtttctttagtgctaataagtataccgcaaaatgtaagatgttaataataggagaacctgggcacatggtacatgggaactctgtgctattttcacaatttttctgtaaatctaaactgttctgagacataaagttggtttttaaaagagccatcctggcctgcactaggaaatacttactcgatgcattgtggacccttcctccaattcaagatgtctcaagtagctttcttggttaaaagggcagtgatgtaaaaacaggcatcattttaccaaagggccaccagatggctgtcatctggcagaagtctacttcctgggctttctagatgcatacatgactatcaccgggagcattcaacctccaaagaagagttctactaattatgtctgtctaaataatgtgataaatttaagtttcaagtgatagcagttagttcacattgtaaatatacaactcagtttgtctgtaccaaatttaaaacaaatttgcctactgtgtcccaggaaatatttcagccaggtacctttgattttcacaattgggctatgtagaaattgcttttggagacaattaattggaagcacttataaggttgtagctttaattacatactgatgtagtctgctcctggttaaaaaggcaccccataggtcaggcttggtagcttacgcctgtaatcccggcactttgggaggctgagtcgagcagatcacctgagtttgggagtttgagaccagcctgaccaacatggagaaaatttgtctctactaaaaacacaaaattagctgagcatggtggcatatgtctgtaatcccagctactcgggaggctgaggcaggagaatcgcttgaacttgggaggcagagattgcggtgagcagagattgtgccattgcactccagcctgggcaacaagagcaaaattctgactcaaaaaaaaaaaaaaaaaagttatctgataagtagtagtgatacgttaaagaaaaaaatactactgttgaagttgctgttaattacatgttgggtactgcttacttcctatgtaaggtccaaattctttggatgatttgttcaaaagttggaacaagagatatgcagaggcactttataatcaccttttgccttctgaggtagtcatttgtacctacctcagctactcataatctccttcaaaactagggctaagtattgatggcctttgtgtttcccatgcaactgccaaagggccttgcatcaacacattttggtgaattagttaaacaaggtacacctctgctgttcctaggacttaactgaaggcttagactggaatcacagaatagtcagaatgtgccatcttgattactgcttcctttctacccacagacatcaatggtaaaatcagacacttttgttctctcagatttctgtattttaatgtactataaattacatatttgaatgcactgtattcatttttcatatcaatcactgaataattagaaggtatttcttcttaacaagtgtcaaaacatttcatagccccagtttactttgtagaatttcacattgtgagtaggtgagagccttaatcatc

SEQ ID NO: 60502 - DNA, 754 bp, Homo sapiens
aagccacttggagaagcaaaggaaccagatattccaccacctatgtaattagctgagtaacctagaggtgactttgtgtgcatgcttactatgaatacgtgtgacattacatgtcaagaactgcattttatacacttccctttttgaaactcacctcatatgcccatgaaacaaaaagccagtatatggtttaagatgggtatagctttcccgtttgtcatacaaagcttctattaaagcatcaggagtgccatgtggaagcccccttattttccgtagggacaggcagtgttgctcttgctaaggcagtgacctattattgaaccgttttgcatgtaacacagtgagtcattgttctggcagaattccctgctctccacacacatttttacctacctttggaatgtgggaacactgaccttgtatatgatagcctggcaaaaaagtggctctgtcagagattttactactgaacagcagggagtggggggaaaaagaagaaaagggaagagagaaggcagagagagcaagggctggagaggtagagggaagacagggaatgatgaccaagaggaaccagaaatcattcttccagatgcagtgttgctcataatggaaaacctgattgagaaaagctcagtatgttagaattgcttgtcagtgagataacgaacatgaatgtgggcctattatgtaacatatatttaatatgatatattgctgcacatatatgtttgagaccttgggcaaatta

SEQ ID NO: 60503 - DNA, 1187 bp, Homo sapiens
ctcatcttctctggatccccctaaaagattttaatggctggcttgtctcgaaactcagggacatttatttgtgagttctccaagatgctgagtaagacggcaatctttaagaaataaagtctgccaagcgtggtggctcacgcctgtaataccagcactttgggaggccaaggtggaaggatggcttcagcccaggagtttgagaccaggaccagcctggacaacacagtgaacccttgtgtctacaaaaatttacaaaattagttgagtgtggttgcataagcctgtagtcgtcactacttggaaggctgaggtggggggatcacgagtccaggagtttgaggttgcagagagctatgatcacaccactgtattccagcctggatgacagagcaagaccttgtcttaaaaaaaaaagtttgccaaattccttccatgggtaataagctgagtgagagcggatagcatagtgccaatccccaatgccagtgcaaacagtaactctgtccctactactccattgagactgggagcctccagatgtgggtggttccgcattgttcacattcctcctggagacacttactgccgggctactgctccgggagccacagctgacagatgagcctcttgttccatgctagattttacaacctggctcccgcaatgatagggactgaaggcaaaggtgattccaggggactgtcagtcagctccccatttgtgacccagattgtccaactttctcctttatactgagtgtatggctcaaatgaagcaattagaaacttgaaggacaaaagctgagttgcagatggaatgtagaggggtgtagcaacctatctgagaactttgatcattcttttttagtctgatcaatttaagacacagtagagcttacactgttggaatggaagaggtgtcatccaacactgccctattgactccttcttgccaaatgacctcacataattccttgtaattatttttaaatgttctacccactagaaatgggctaagaattttgttcccagtccttcctgttccatatacatatctaagtttgaatcagtttgagcagggacatatcttgggttcttctcccggttttctgatacatagtttttgctgtccgaaaatcagccactctctgctaagaaagtggacacttcaagtgtcaggatttt

SEQ ID NO: 60504 - DNA, 3406 bp, Homo sapiens
catctttggatgaaaagagcagggcagttttttttttttttttttttttgagacggagtctcgctctgtcgcccaggctggagtgcagtggcgggatctcggctcactgcaagctccgcctcccgggttcacgccattctcctgcctcagcctcccaagtagctgggactacaggcgcccgccactacgcccggctaattttttgtatttttagtagagacggggtttcaccgttttagccgggatggtctcgatctcctgacctcgtgatccgcccgcctcggcctcccaaagtgctgggattacaggcgtgagccaccgcggagcagggcagttttaaagttgacttctgagagcatcagattttggatagtgtcctttctcaggtcctgtttccttgtctcctcatcccattttaaaagccagacacataaaccccggcactcctttagcgaagggctcagtgagggcgtttttgccacccgtggccaggggtcattgggtcagcaaagtcagaggaaacctagaaaggcagaagcccaggaggttgacgccctgcgggtctaggggccaggtgctgggtgtctctcctttcgtgtgcggttcccagcagcaggtcctggtgggcgcagactgaccggagaggtgtggctcgccccctccccagaccccgaggtggcaatgaaacctccatctcctggcttgattccttgtgctataaaaaatcttccactggccctttgcatctctcgccctccatcccccaaagccactatcgggaggggacaaaaataatttctgaggggccatgggcactaaaaccacagcagacagaggctgtgtctacctgaggaactggagaggtagaattagagggggaggctgggcatcctcggcggcgccccctccatccagcgtgaaacccacgaggcgcggcgtctcgagtggcgggcgggcagggggctgcaggattcacgaagccacctccgccggggaccgccttctctcggagtggcctcccctccggcgttccgctttagtaagacgacactcaggccaaacagccgcccccggccagcccgactcggctctggagggagcgccccgagggagtccagccggaggcggagaaggccactcggccagaaggtggggagccgccggcgtcccctcgcacctccgtctccacagcagggggaaaggccctgatcgccgtggtccacaccaccgcgtccacctgaggctcgcctcgcttcctgggtccctagaggggtggcgtactccgctttctcctgcccccaagtggccgcacccctccgcgggacgcttggttgggtccagggcggggcgggcgggcgctccccgtactgccgcgagctcagcgcgcagctcccgcggctcggctgccgccgcggccagttggggcgggtcgggggcggggtctcagggggcggggattcgggggggcgggtcgggtcgggaggcgtgggtggggggcggggcggacgcggagcgcccctctggctggcggggccaaggggctgagaggagtggggcaggctcggcgccggtaggaagagtcagaggggtgaccagagagcccaacgcctggtgctcaagactttctccgaggtatgaacaagaaccaggcgtctgggccctttccgctcgccccatcgctcagccgccgcgccccggacgcccgctgtgccccctgccggcggggcggcggcgggactgggtttcgggagggtttctggaagtcgcgagtcccagcgaaggcagtgcaccgctctccgcctctttcttcgccttcttctcgctcccttagctctgggtgtcgggcaccggtggtaaggtcgcttctccgtgagtcggaggtcgctcactctgggacgggcggacgaggccctagggcagccgagcccggcagcgggggaggcgtggagctcggggcggcttcagcggcgggggcgggaggctggtcctggctgcagactgcgcgcctgggctccgtgcgcggtccctggttctctgcatcgcggaggtccccggatcacagggctccctggcgggccccggcacccaggtctgtgtcgctgtggctgggcgccgggactagcacccgagtcccgcgctcccgggggctgcgccgtgccgcctgttgtgcgcgcgcagaggccggacagcccggctgcgggaagggacccgagcgcagggtctgccccgcgtcccggaaagtgcctagtctgcggagccggaggttgagctggggcagatcggcgccagacgggggcctgggtgagatacgagttgggggtgcggcctgcagaatttgggtttctggaggagcttacggcgcgctggcggagccccaggcgaacaggagcaccggattcggctccgggagggccaggcactgtcaggtatggacagctgcggtccacccgtgtaagtgtaaagtctacagagattaaaacaacacctcgagtcctgggacagcataacctaatggtgcgggcgttttcttaaaggcacgaatagatgggaaaatgtcaaaataagcatattttaaagttgaaagctggcagattttcaggccgtgtagttgtgtagctagtgtccaaagaaatattagctcgttttcccccttaacaccttttcatttttatttttttacgcaaaatctgttttgccagtatttccctcaggagctgtgcattgctcacagcagggaaggaaaacttcagcaagcgttctcaggttgcttctgacttccagcctgtgctctccagcatttctgaatgtggagaaaaagtatctcttgctggattttccgagtatgattcccttctgttcttctctgggaccgggcaatgtttgtttatgggttttataagcatctatttaaatttagtttttgcacgaaatactccctcttgccacagggtgtagtttggggtttagaaaatgctgttggagaaagctgctagtggcttcattttccaagaatgtaagtcatttcctttctgtgatttcagggagttgatatttcacagcatcaaaactttgtggggaaaattttccgtaatacatctgtcattaaaaaggcttgtgacttttgggtttccttcttagagcagtgcatgaatttaggttcagcagtgttaaaggatgagaaatttttttttagaatttagagcattatgagactattgtagaaattttaactaccaggacctacaggatggagagtgggggaggggagaagaccagaagagaggcaggaaaacagatgcctttgctgatgtcctttgtagtataaaacttaacagcaccacagcacctaatcattttctcaggtgtggctttgagaaataaacgttttatgttaaaaatgaaaata

SEQ ID NO: 60505 - DNA, 1329 bp, Homo sapiens
tggatgctgtgaccgagggtgagggggagtgagggacgatctcggcttcagatttcactctggctgaggatatctggaacgatcgcatcgtattaacaattgtatgtttacctgtggatcactcccaattagtctgaaagcatcttactatagggaccttgctttgtagtctttgtattaccagtgttagaagagcacctgttatgtaggaggagtaataaaatgaatgaatgcactcaaaacactaaacagtaattctgtaatccaacgggaggtacagcgaataccaaaagcctacatatactattctctgcatgctatagcaagaaagaaaggaaagtggcttcccggtggttttctgcctattgtacaaccaggaagctgacaataaagtttatttgagcgtcgacgtgcgccgacgtggccccgcctccccagccggagccgcgattggtgggcatttgccggcggccaccgcttttaagccacgattggcgaaggccgccgtcatttcggagcgactcagcgcctgcccgccctctcgccgcgtcgccggtgcctgcgcctcccgctccacctcgcttcttctctcccggccgaggcccgggggaccagagcgagaagcggggaccatgttccgacgcaagttgacggctctcgactaccacaaccccgccggcttcaactgcaaaggtgaggcggcggcctcagcccggccgcgtgtccctgacctgggcggaggtcccagcctcagtgcccgcaccccacctccccgtcgggaccctcggcggcctggtttccgccggcagcctccgggcccctctcctctgggtcgccacgtacctcggctcttcgccgccccttcccgcctttaaagccctctcacctactcctgtctcggcatgttactttctgcacttgcttaactccaagcatcacgtaactaccttctctgtacataaaagggagagcattcgtctttctcactcactattcaactccatggttccctgggtaattaggcgataccttgagcacctgctaattatgggccagcgcggtgctggattctgaggaaggtgctgagtaacttgaagactagttcactgcctgccaggagctaaagggacgaggggtggaagcaatcagaacccactgagcagtttgagacagtacacaatgaaatcaggaccgatcacagtgggagggtaagcgcgtgtagtaacgggctagttgtgttatgtggtgttgcaaaaaagttaatagcagatgagtgggaaggttgaattgtgaatacaaaggtatttgggattttacagcattagaatt

SEQ ID NO: 60506 - DNA, 603 bp, Homo sapiens
cagtacaaacttactgcttgatatatccttccctccacccaaaccccagaaagttcattttaagactcatttactagtacttaaatttactagtacttaaaagtttacagaccaaagaaaggagatctaagtgatgggatttcattttgtagtaaaatctgttagtgctcacattcactgtgatgagaggttatctatttgcattccatcagtagtattacctgcatctgcccagcagagcagtttagagaaagggtcaaaggttaagccattgggcaatccaatgtctgtattgatcagaattcttctgttttctccatctaaagatgacgtttcaattttaggagcttctctattccagtctgtccagtacaagttgctgtaagttaaaaatcaagattgtaaaagaatagccatgtagcctgtggtaggcagcatctaagcagcccccagtgatctccatctcctcatgtattatagccttaagcaatccccttgagtttgggctgcattagtagtgtcttgcttcttctagtgcatagagtatagcagaagtgataggctatcactgccgatattcggtctcaaaaaactggtttctgc

SEQ ID NO: 60507 - DNA, 1525 bp, Homo sapiens
attcaaaatacaagctatttctacaaatttctgaatacattttcattaataatagcatactgtggatcttgttaataatgactatcctataaccaagaagcaagtctgaattaaatcattgtagactaatgagaaaagcacagaggtggacttataggtcaaattcttgccaagtgaaggccaaatgataattcaattcatacatgaaagattcacagcagtcaaacagaaaaacactcatggaagaatgagtcacatagtacctactaggctaggcatgctgaacccaaagatctgtacctcagcagtcagcactacattcatgatgtaagcattcaacattgtcaacattgggtaaccacaagattattttctttaaaaagggtacatactttccctaagattgagcaatactgtctgtaggaaagcaaacttactagagtagctcagtaggcagcatggggagctcatttacaatcacagatttaatgagacaactggccaggtgcggtagctcacgcctgtaatcccagcactttgggaggcgaggtgggtggatcacttgaggacaggagtttgagattagcctggccaacatggtgaaaccccatctctactaaaatacaaaaattagctgggcatggtggcatgtgcctgtagtcccagctactcaggaggctgaggcatgagaatcgcttgaatttgggagaaggagattgcactgagctgagatcatgccagcctgggccacagagcgagactctgtctcaaaaaaaataaaaagagagacgagagacagagagaaaatttattaaaatatttttttagcccatgctacatcaaagtagaaaagacacatgagattataaactagaaaggactgtgtgtctgtactttcatttctaagagtgaacagagtgaaattccagtcaatggataaactatatctaaagcaatgacataacagaatctgtttcagcttcttttcattttaggtaagtagcaatagaaaagtacaccattatttccatataatttcctcatacaaaagactctctacttatgaatatgtctcttaaaaagtctcttcgtaaatccatgtgtttgtaaatcctaagtgactcacaggatgggaaaatatatgactgtagatctcagatgcatatccatttccactaaactagaatacatattttcctctgaacattcaaaaccaggcatattctcctccttggtaaaaactgtatatatgccaaaatatatggcaacctcaaatacaagaaagtactcaattatctgaataaaaatatgcacaaaaagcttttcagctactataaatatattttaattgcataaaataaacatatttatttagcaatattattttttctactatcacatcttattgaataattatttttatagacacacacacatacatacatctgttttttagctctgtcagcagggagagctgagaagcaagaaaaccccagtaactaaaagcactcctaacccctatatt

SEQ ID NO: 60508 - DNA, 2137 bp, Homo sapiens
gctccggtgtttcccgccgttcatgcagcgaaaagagaaagcaaaatgccctcaggaggctccaggtgaggcccttcggtgccccagagacgggtgtcttaagtcagactccggagctgtgcagtgcagccctggctacagaaagctgcttcgtctgaatccccgggtctgcaggcagagcccacagcctgaagggccagcgctgtcacctacctgcccgggacctgcgggcggggacctgggccgttcccgaggccgcgcggccaacagttcccgccgccacgcgacggaggaggaggcagaagacggggccgtgccagactagccgggtagcctggaaccacttcgccaacctgcaaaggcgtagcacttctccctcccagcctgcagccgccaccgactcggcggagtcggcctcctgggaaaaaacaacctgcgaagctcctccttctcctcgtgctccctacgcgaggcactctctaaccaatgggaaacgtggtgggcggagcgagagtgacagacgattacagagtcctcccgccggcgcgaacgggcggtgcagtagcagggccaatcagcagcgtgggtgggaagtacaggggcgggagaaagtagggaaattacgcgcccaatcagatctcggggccctcgagcgacgggtcctgcggcccgtggccttccgagcgcggcgctcagggggcgtgcctgcctgggccaatcggcgcgagcccacagtgcggagcgagcgcctcaaatgctcgggtttctcagctgattgtctccagccgagagttgttttttgcagctacggagccgagccgcagcaggaggagccgagacccccggggggtggggggaaagaggaggcggggtccgggggagccgcggctgctttgcgctggactccgggtcccgtcacggcgcttcctggggttagaggctggggtgggtggggggtaagggggcagtccttctccccttcgacggcggctccgagtccagccccttccttcccgcgctcgctcgcccggcccccagccccctcatgagggtgtccgtgccgggtccggcggccgctgccgcccccgcagccggccgcgagccctccacgcccggcgggggcagcggaggcggaggcgccgtcgctgcagcctcaggcgccgcggtgccgggctccgtgcagttggcgctgagcgtcctgcacgccctgctctacgccgcgctgttcgcctttgcctacctgcagctgtggcggctgctcctgtaccgcgagcggcggctgagttaccagagcctctgcctcttcctctgtctcctgtgggcagcgctcaggaccaccctcttctccgccgccttctcgctcagcggctccctgcccttgctccggccgcccgctcacctgcacttcttcccccactggctgctctactgcttcccctcctgtctccagttctccacgctctgtctcctcaacctctacctggcggaggtaaggcgggagggccggcatgcggggcccgggcgggtgcgcggggccgccgggatcaactcccgctgaggaccagcgggggcggggggtgggcagcgagaggcggactggaaaccagcctggggaaactgaggcacacctggagtgtgagccagtgttttcgccttaaacttaagtggctgattggcttgattactgaggggttcgggctagggggtgagtgagtgagtgtgtgtgtctgacaacttaaaacagcaacggaacgaaccctttgttcggtgttctggccctccgaggtaaggcgttggtggcaccaacaaagtggcatcgcaagaagtagcagccccggtggctctgccgaagccggactgtgttgagggaggttggatgctgaggtagcagcagctctgctgaagctggactgctgccagccattacgtcaccaggcagagctgttcctctgctattgttgctgcgtttcttttattagaagcttatattccctcctgcatctcctttcctgtggctcgataagcctcacataaatttcgttcgatagttccccagcagggttgatgatcaataaccaatgctgaggatcaggataaggacctccataaagcccttaatgtttgccccagttgcttc

SEQ ID NO: 60509 - DNA, 2785 bp, Homo sapiens
gcaaagaatttaaagttctattttaagcagaactccaaaaaggttattaaggaaaaaaaaagtaaaagttgaagagttcaacatgtacttttattccagtatccaaatctccagaatgtagctgaaaatgttacattggacatcttctttccgtaaagaatattttattttaaagtcacttatttctatcttattttttaaatgtttaatctcggtgttgcgttatatttctaatcagaagaaaaatgacccttttccttttaagtacttgattgtgtgtcctttgtaatgattgaaggtaaaggacttttcaatgtctcagttgtaaagtagcaattttctttcaacttcccttagtttcctagataacactcacctcaactcccaaatcactcagcaaaacaacaaaatccaagaatgtaaagtagtgaaagagaaacctttcataatatttaaatgcatctttcctttgacatggtatcatgcccctaaacacataaaatggtatttctgataataaattaatagcaaaatccacttaggaataacatggatgcctaacccttaattttgtataaaacgtaatttttatcaacagagtcaaccaaaaagtggctttgacaagagtaatcacattgaaatactagatactgaagataatggaaaactgtaagtttctctcaattttttgctcaagaaaccacatctcttacagaaggaaatgatcataatccgcttgtaattaaacttgtgcactgaagaataaggaccttcctcccaattcgtaccagcttaacgggtgtcacgataagagaatctcattacattcgagaaaaagagcacacaggaccagaaaccagagggcaactgcagtcccaaagacatcaggtagttgggcttacacacagaaaaaccgcaagcagccattcttccgcctaacatcgaaatctgagatcagcccacaaacgtcttagccagaaaggctggcgaaatgcacgcagcacaggtactgggtacacaagttcctggtcaagagagaagtgagaaagatccaggttctgtgaaaatagcaaatactggcagggcattatacactgtgcacactctccccgggcagataagaccaacaaagatgcataaacccactcaaccgcgtgcacccaacccctctcctggtccgaggcaccggagggcgcggcgacgtccaggctgccgtggaggcccggtccacgccaagccagactcagtcccggccaccgggcagcagcaccggagtctcattcccggtgggaagagatgcaaggacgcacccccagccgctcacccgccagggcgtgcgggacagtgcacgccgcggagggcgccgggaccctcagcaccaacgcgcacatcgctcacctggcagaagcacctctgtgccgctgtctccgggggctgctcctctccgtggcccgagctgagcagccacacggcgcccaggaggccaaacaagaatccccagccgcggcccattgcagctccggcagcttgtcgccccacgcttgggaggccagtccgcacgctcggtcgcgggccgtgcgccctcagatgaagcccgtgcgggccggccccagcggcgccccacctccgggccgcctcccaggcccgcctcggccctcctgcctctcagcgatcgccacctcgcgacccagcctgtggacgtgccgcggcgcccgcgccggcagcccggggcctcggaccggttccttcccgccgcgtgaggctgacgcaccgaccagcttcccggctcggccccgcccggtccgctgcgcccgcgcccgtccccgcccccggctccctgacgcccccggcctggagacgcaacccgacgcgcacaaccccagaccctgcgcgggagtcgggggtccttccagttcccagagcgagagcgaaagccggaggggcctgtgttttcctgcggggttggggggcggggggtgcccgccccgcgccgccccgcccagccccagcccgctcactcccggccaatccttccgtatctcaatgcgagacaatcaaatcgtacgaattacgtgtccaccgtgttcccggcggagtcttaaagctgaaagggatattagagagcatctagaccagggcagcatatgtcatttatatttttagtagccacagcaaaagagtaaaaataacaggtacattttatttttaaaatatttttatttaaccccgaatgtgcaaaatattatttcaaaatataaccaacattaaatttattcataagatatttgactttttttgtctttgaaatccagtgtgtattcgatgcgaactagacccatttcatagtcaaatgtggctggctagtgcccactgtattagacagcgagggtggaagccacccgctcatatcataggaagaaacaggcctagagaagtgaggtaaggtgagcaaggattggaggtcctctgatacccagtcctggtcttttaacattcagagttgggactagtctatccgctttttttttttccagacagggtctccctgggtcacccaggctggcctgcaatgatgcgatcgcagctcactgcaacctcgaactcctgggctcaagcgatcctcccacctaagcctcctgagtagcatgaactacaggcgtgcgccaccacgcctggctaattttatttttagtagaaacgaggtttcaccatgttgcccaggctggtctcaaactcctcaagagcgattctcccgcctcagcctcccaaagtgctgggattactt

SEQ ID NO: 60510 - DNA, 1563 bp, Homo sapiens
ttgtacatgttcgtggaataaatgaaaatctttcactggccacagtactaataaatgaagattaggccatcaaaaatgagaaacacaataagaaaagaggaaattaataaagcctatgattttagaaggaagcaatctgaatatgaatcagcttaacattttaccctaatgcaatgacctgtaacctgggggagcttaaaaatgtcagtgttctcatgatagaaattattttccataaaactcaaactctttcccagaataaatttctagcaaacttagaaaaagtatccactttttttaccttattgtctagataattataatgttttgtttcagatttgtaagcgattttagaataagtaaatacagttttatgtgtgtgatgtgaatatcactgaagtgtccatgagaatctttcaggccagaaggaaactccctttgcatgagtttgcttcttcaaatatacctgctcaggcaatcgtctcacctgtgttagaggccatgaaatcactgattagtcattcattaactatttaaagagcacccacagggtacatagatcaacctttgatttctgaaagcccaacttcccattcattacaactttgctaaacaacattaaattttttagagatgaacaaggtcacaaacttgtttttctaatactagtgattataacaataacatgacttagatttaatgcacacagcatttcctgatggaattctgattactgtgtaaataacagcgactatttttttttttatgaccaaagcaggaaatggcttgagtccagtgtctcaaaatggtatgtggggatttctgtgggaagcttctcagtacccatacaatttctgtcattgaatagactggaagaaaacaatttaaaggaaataaattagtacaaagaaaggctaagtaaaaacctaatgggtttagtgctgatatttttattagaatcattcctgtcattaatatttactgaatatggttgcacacgtggtacattactagacatttgtctcaaggtgcttagaatcatctgaagggggaagacatgacacgtaacatcttcaccttctttacctcaaattcctgaaagcaagctgtatgcagtcactgacttcacttatcattcactcctcaacttcccactcacattttaacccatgatgcagtctggtttccagctctactcccctgaaactcctctttacatggccttcctattgcccaacccaatgaccaattttcatgaaatctctgctgcattctgacaatgctgattcctctctccttcaattcgatttcctgcactccagcctggacaacaagagcaagactctgtctcaaaaaaaaaatgtgttttttttttttttgagacagagtctcgctctgtcacccaggttggagtgcagtggcgtgatctcggctcactgtaagctacgcctcctgggttcatgccattctcctgcctcagcctcccgagtagctgggactacaggcgcctgccaccacacccggctaattttttgtatttttagtagagatggggtttcaccg

SEQ ID NO: 60511 - DNA, 2021 bp, Homo sapiens
gttgtggtggcgcacacctgtaatgccagctactccggaggctgaggaaggagaattgcttgaacccgggaggtggaggttgcagtgagctgagatcgcgtcaccgctccagcctgtgcggcaggagcaagactccatctcaaaagtaaataaataaatacataaatctgaaggttctatcagacttcaaagttcctgcctcagcctacttcagcatctttatcttgtaccccacatctctacaacccaccccctactggtctcattggcctcctttctgttcctggaagtgagtcaagctttctacccacaacccccaccccactccactccaggacttgcactgtttgtttaggttttcttcagttgttgcaaggctggctccttctcatctcagatatctgttctagattaattcttcccaccatacttctcaccgtgttttaattccttcacagtatttgttaaactctgaagttttttttattattatttcctatcaaatgataagcagatctacctttaatacctcattcactgactgaatggatgaataaaactgtctacttctccagcacgtggaggtcttggacagtactgtgttataacaaaggccatctgtgttgtgtcgacaggccatcggaactcctttgaggtattacacatttcctacttcacttccatctcagtttattacagagccttttatacttccgggacagcagtgacttaatactgaggcctctcaggggaagaccgggataactgagtcctgctttacctatctcggcttgcaagaaacggtataggtggaggcctctttcagtgtatgccggcgctctaggtgaaccgagacatagaggtggaagtggagtagaaagacggggccaaccggaaggggagggctcatgggcgaacccacccctccaggcagggtttcgcccctcgccccgccccttcccccgcccggacggccatggccattcccggcatcccctatgagagacggcttctcatcatggcggaccctagagataaggcgcttcaggactaccgcaagaagttgcttgaacacaaggagatcgacggccgtcttaaggagtgtgagtgcacctttctttccatttaatcaagtgcctcgactcgcttctgcctctgacaaagcagaagcctttcgccgagcccggcaaccgagccttagagatgaccaggcctagggccagggacaaggcgctttgtcatccggccctgagcttgtggagcagcactccttcgggtgtagaaatggcccagtccagcccgggtgacagaacatcggcggccttgaggtgaaaatgaaaaagaagtagaggaggagtggggaagtgggccgaggatgtttcccaggttagggtgcaagaagggcagtcttggtggagtcccgggacttggagaggggaaggcgcttgagtcaagtaagctcaaacaagagatgagactcagggagtcggcttgttcttggagtcgaaagacggccgcggagcttaagagagaagtgttccagttgtcataataacccatatcgtcttgtgtttcgtgttgtactgtatcaggcatacaaatttcccttacctcctgagtgcttaacttttttttccagtgcattttcattgaaaagcatgagtagtttaattaaatggaggaccataattacatgattctgtggagaactgcatttgttgactttatttagggtagaatgtcagagaacaatccacgtgggtaggtgaagaggtgaggaagggtctaagtgattatcattcggatttgtagtcgcaaatcctaagtgtcagggtgtcaatatcttctaagactataacttaagatgtgcttaaacaagtattgccgatcaacaaagtaaaagtatggtgctttctctgtaacattttgttgttatacatgccacctactcattacaaacagcattatttcttttatggtttgaaacagtggatgtgaaacttaggtaaagtgaagtagac

SEQ ID NO: 60512 - DNA, 1295 bp, Homo sapiens
ctctacgtcctgtctggaaagggcggagctggctcggaccgccccactgcctttcccaggaccttcactcgtcctgtcccaccgcagccccgcctcctccacgccgggtgagctgtggcctagcagcatccgaggctccgccccccccacccccaagcgtctgcgctctagcgaaggggcggagcagggcggtggcgcgctgacacctggcggcggcggagggcgggcagaaggcgagcgtgggctgggattggctgaggcgacgcgggtggagggggcgggaaggaggcggggagacggttgtcgggctggttcctgtgctggatcctgggcggcctgaggggtacggagactctgggggagggagacggcagcggcatggcggccgggtgtaagacgcccgaccctcctcttccctgtcttcgccgccgccgctgctggagtcactgggaccctgtagtctgcgtgtgttagttgtaatcccgccgccctcctgtcagccctccgctccgccggccctccttccttccgccgccgcagccagcccgagggtcggccggctgtgtaacactctcccaccccacccaccagcccgcgggccagcaccatggaggacgtgaagctggagttcccttcccttccacagtgcaaggaagacgccgaggtgagtcgctcccgtggctgccacgcacaggcctctccctgtggctccggccgaggggcgaccccagtccccaaccgtcttagccgccacctgtacgggcgccctgcctcctaagggcgtcccgggacctctgaagccgagcggtcggctccaatccccactgagttgctcgtcctctccagaccccgcggaggggcagcgtctggtgtacttacatttgagaagaggaaaagcaatcccttagtccctaggcttggcatccaggactgacctggagtaaggttcctcttttattgtcaaagtaacaagagagcgaagttggtttagtctccttttgaggaatatctgtggtgtaaacgattcacttgtgggacacatggccccacatgtgaaatagactcggcgcctgaagtttggaagcgcgccttcgaaaagtttcccaaagttttttgtttgtttttagacaaagctatgacccgcacaacaaagtgtctcaaagctagctcatcttaatctgagaactcttaatcagaaatcttgacctttggaggaaaattaatattgaaagtaaaatactatataccttttctcctggtttctaatttgtggctatttttactccaccttagat

SEQ ID NO: 60513 - DNA, 2605 bp, Homo sapiens
ttcaactatttggcgtctgagcctctgtatcaggttggaatacgaatggggagagaggctgctgctagaagcaaccaacggagagcaacaagtaatagacaccggagatgaagattttaaaagtcgatctacaaattttaaaaaatacaatctaaggccaaatctaaaccagcctatgtatttctcaagagctcctggggaaccttctaagtacaggtgaatgggggaggggcggacttcggattcctttatattcattttataacaatttcgataacaagaatccattctgaatctattccgttaaagatttttaacacacctggccatatttattaaattgtgtaactgcatgaatgttcaaaagtattttctgatagtttgacctttacaatctaggcgttattcccagtctaccgatgaggaagctggagcacctggaactcccaagacttgccccttaggtaacacagcaagtaagtgacttggggctagaatcctcgttttcgcatcttgagctcgattaccatcctcaacagaccccaatctttacatcatcataccatacagctagcgctctctcccctatttagcaaatcctgcctaaattaatttcttaagatccattctaggattcgttcatgagggattatcctaacaaaacgaatcctataatcgcccgttcaattttgtatgaaaattttaaattagtttggcttacataaacatcagctcccgcaacagaaatcacagtacagtactcggtatttctaggggtaggagcctaggaaaaagagacaaagaatgtccctctgtaccctggggaaagcgccgacctactcggtgcggaggtggtcttcggagcagctgcctcaatggctccgaccaccgtgggatgcgcccgggaatgggagaagagaaggggcctgggacgttcgtgcccattcaaaaccgatggctgcagagagcgcgaccaactgtctcatttcccacgccaaagtctggggagcgaagttccgaccccagtcccagttccagccctgccaggccaagaccagcgtatggccggaccgctggccatcatccttaacctctgctccaggcgcgcgtgcgttcaacttcctgggaaccgcgctccacaccatgtgcacccagctggcgaggattaacgcccagctcctccacacaacacccccgggggcctggccggggcaccagacacacctgttagataaacctgagggcaggcccgccccagcccccaggacacacggtcctgctctcgcgccccggccccggtccctcctcacccgtagaggccctgcggtcggcgctcctagccaggcgcgtcggactctcccccaccagtgtgcacagcaccggatccggatccggcttcagcgccagccccacctcctcctccaccgcccgcgccacagttgggaaccgcggcccagacgtggcagcgccaacgcctccacctcgcctctgccccctcacgcagggccgcgcgcaggcgagcggaggcggaggccaaggcgccacccgcccaggcccggagagcgaggggcggggcccggagagcgggggcgggaccaggagggcgaggggcggggctcggagagcgggggcgggaccaggagggcgaggggcggggcctgaggctcgagtcgcggcgcctggggcggtggccgccggaccaaagctggcctctcccggctcctcctcctcgctccccaaggcctttcccaccgcgtcattgtctcggtttatctgcagatacgtctacctagcagtcagcccagcagcgtaagtggtgaccagtgtgggcctctttgatcctgagaccgaaggctcggccactggccctctccatttgttccttgttgccctcccttcatgattcaatccattaattaggacttttcctaccagctggcagttcagagctccgcatccccaggcctctgagtcacagttcctgccttcatgaaactaggagttggggccactgcattctactccttcgggactattgtttcatttctcagtccctcaaaccctttattggatgaacatggggttaggacagcggttctccactgcaacagttttgcctcccaggagacatttggcaatgtatgaatcattttcagcctctcatctggggtgagatgtcattggaatctacagatggtggagggcacaggtgagtagaggccgggaatactgcttcacgccttacagtgcgcaggacagcgccgcacaacaaagaattacctggcctgaaatgtctggagtgctgaggtttagaaacctttcgttaggagaagaaaagtgacttttttcagagccccatttctgaagtgtcttacctaagtagcactttgtccctattttaacagatgaggaaacagaggttcagagatgttacataatttacaaaagtctcatagctagtagctccccttccttgccttgtaccataattttcaatttattgaaatcgcaaagtattttattcttaagcaatagtattcaaagaaccccatagatcatataccagaaatcatattttttgctcatttgtgagatttaaatttca

SEQ ID NO: 60514 - DNA, 849 bp, Homo sapiens
cttactttcaatgggatcagaaataaaaatagataaagaagactgttactaatagccagatgaaggtggcgggtttatgagtgcccattattctattctcccaaattttaaggatgtttgaaatttttcaaaataaaaacttggataaaaaaaatagttctttttactcttccctgtttaaaaaaaaaagttattatgcaatttcccagacagaatctattcccaaactatgaattagaaattggagatcatacaaactggaggaagattcagaaaggattttgttgtttttcttttaaatctaagttacaccactcaagggtaaacttagatctgaggcaacactgttcatgaactttgtcacaacaaatattgaatgtttatttgcctgaactccgtttaaccttgcacattcaccttcgtgttggcgaagagttgtatttcataattcctagcaaggcaatgccacctagtccatgtaagtgttcatattatggcacacctaggggcgtggtgggcagtggagccaggacagttagaagatgcagtttcacttggtgagtttacaatttaattggaagcaaaacatgatgaagctgaagaacacgctcagaacaatttggaaactacaagttaaaacagcacagttccctgggaggtggaggttgcagggagctgagatcagccattgcactctagcccgggtgacaaagtgtgactccgtttctaaataaataaatataaaataaaaagcacagttccaaaagtggtaataaggaggaagccattgctaacattggtgtggaaaaaaatctgtggtgataattcagatgttaacaatgaccagac

SEQ ID NO: 60515 - DNA, 1808 bp, Homo sapiens
ccttttactactatggcgattgcctggaggaagggcagaaaggagggaagagggagcacagagatttggaaaggaatgccatgagttcagccttgagcatgttcagtttaaaattttggttaaagaaatggttttgttattatatgtaatgcttcagtgagcatatgatggctttctaagatgcacggctagaagaaaatctaggaaaaattaagaatggaggatttcaagtaagttggggtaacaggaacttgatttactctcctgttttatttaaacaataagaaataaaggaaaagaaaaagaaacactttcagacattaggcaacaagatgcacgaaataaagaccagaaggatgagctgagtgcaccagcttactgcctatgggcaggggaggggcgcatggggcctggtcttgcagagttgagagatctgggatggcattcagggatgacaaggtggctagaatgtgtggggcaggggacaggagagaagggagctccacagagagtgctctggaggtctgcagaggtgtttcctggagtctagctaccagagactgtggaaagaaccgacggctaaaagagttaatgttcctgtcaaggagaacagaaagacagagtactgagaagaatccccagaagactatgacctcagtaatgaggctaaattagtgctaaggctaatgttgcctctggtctatcctaataaagcttcaaagcaaaagaatccaactaattccaagtaatttggtgatcagaaaaaaattcaagactactcaatacaaaaaaatccagccactatgacgcataatgacacatagtcaggagtaaagggtgggggtggggaagcacaaataactcagatgataaagaatattgtaatagctatataaaaatactccatatgtttaagaaactagaggaaaacacacataatagaaaaatgaaaaatctatataaaaatgaagccaaaatcaaacttctagtgatgaaaaaaacatcttaaatgaaaaaggcactggatgggattaacagcaaattagcagcagaaagatcaatggacttgaagatatgaataaatcttaaaaaaactatttcaggatacatcataatcaaattgctgataaccaaggtaaagataaaatcttccaaggcagacagaaaacatacagaggaacaataacagacttctctgaaattatgcaaaccagaagacaactgagggacatcaattattggggggggggggggaatttagaattcttctcccagctgcagtgtctttcaaaaatgaaggcaaaattaaaaaaaaaatgtttttgagacagggtctccctctgttgcccaagttggggtgcagtcacacaatctcaactcactacaacctttgcttcccaggctcaagcgatcctccccgcttaacctcctgagcagctggaactacaggtgcatgccaccatgcccagctaattttttggtattttttggagatggggtttcgccatgttgcacaggctggtcttgaacccctgggctcaggtgatctttggcctcccaaagtgctgggactacatgtaggcatgaaccactgtgcctggaccaaatcaaaacttctataaacaaacaaaaggtcaaaacttcataaccagtagacttgcactataagaagagaggcatatgaagttcttcaggtagaagaaaaaggagactacatggaaaggatacttataaagagcactgaaaaatggtaaatacgtgatatgaaaaaccattttgctcatttttaaatacttcactgctttagg

SEQ ID NO: 60516 - DNA, 543 bp, Homo sapiens
gaacacattatgatgactttaaaatacttacgaataatggcaagcaaatgaaaatactactgtatcactaaagtagtggtttagttttccatgtggcatcaaaatccataatgaaataactgttgatattccctgaatttgcataaactaaagctttggaaaactttccatacaggaactcccttacatgttctaatctagactctggactatgttctaaataaacatttctgatttccagaatggcaggcttggtatttcaaacattagatgaccaagtgcaacacacacacacacacacacacacacacacacacacacacacactcagcctggcacttggccagaagttagcaaacatcaccggagtagattcattcatctgcattataaaaccattcaaggcatagactacgctcaaaaacttgctctgagagtccatttctccaaggtcatgattttcagttatcctccaggtacaggccaacttttattcagtatatcttatattttaaattttgatgttaaactttcagaagtaac

SEQ ID NO: 60517 - DNA, 745 bp, Homo sapiens
acttccacatgtgcacacacacaattttaatacaatgttgagggaataggtcatcctgagatctatcgacttcagggaaataattgctgctactgaacattatctgggaaaatcaccttaaaatataatgcttttggtattcatataccgtccaacagattaagaaggatatcagacagtctggagtttgaaaatgtaagtgaatgctctggtgtcttctgttcataactgcttcaaggccacagtagcccaagtctgctaattttccatcactgctctgcaaacctgagacaacagactttgtaccatctcatccctaccaccatctccaccttttatctagactctgcaagctgctttgatcctctctagccactgttggcaagtagtcatccagtctgccctttaataccttcagtgacataagtcagggcttcagaaggcaggtcattccagttttacgcaactctgaaaaattacaaagttcttttctaatttgactagcctgatttgtggatgttttaaatgctgccctaccgaatctctcctctatttacttgctgataggcaacgaaatagcttaccattcaaagcatctaatcctaaaaaccaaaagcatcacttagctctacttttaccaaacaggaaagtcagaggcactttctatttggaattcaaaatataagaggaatcagtatgaattcagttcagaaaagatgtaaggtttccatacgcacagcatttc

SEQ ID NO: 60518 - DNA, 2551 bp, Homo sapiens
caactgtattatgtacaaaaggctctttaaagctcaggaagatagttctctgagcatttctcttatgatcaaatcatctatttagctgactcttccagatgaaaatggtttcattcatcacaaaaatgtgtactgcacactcttcacacacttcatactgtaagataccttattattttaaatcggatatcaatccaatacatatttgtactcaagcaaacaccgtcaacctcaaattagtttaacaaagtctgctttttaacacaaagttctttccttggcttgttattaatataaaaccgaacgctcgaaacggcttacatcgagcatggactatggataccaagtttgtcaagcactgccccacccctagtaagagtggatgactggaacattttaatgcactccaccacgtagaacagccacagaaacttcacactggcgccagtagttgcacattttccagcacagatttttcttaaatggattttgcatcattctctataccaaacgtcactaacattcaggtatgctgaagacatagataaccacggacactgtaatatcaccctcccaacacactttcctcattcttttatcgttctgtcagtaaatgttaagaattaacgagttccccggcacacatcccccgtcccgcgtaactacgcaattaaggttataattgggaggctcgaatcattacatatgaaaattcagagaatagcaaaacaaaataagacgcaaaggggaacaggtctatctgcttaaatactgaaagattttacatctccaaaaagcatttgcgagatgccaagatttctcaaatgggcccctcccccgtcgtgagcctctttcctccccctaccaattctgggaagtcattagttggacgcggctgggatgctactcaccgagtttctccaccagcttaagcatcacgcctccaatgtgcacctcgccggtcactctcagggtgacatcgcggttcaggtccgtcacatggacactcagttcccacgtcccgtccgcgtagcagccatctggcatccttatcccgtccagagccatggctccttcctgcgagcgcggaggaaatggctctcgtaagcgtcactcccccaaagaaaggcgaatcccaccgaattcgcagcgccggccacgggctgggaggtggtggaggacccggggctttcggcagaaactcgggagggcggcggcggccggggctgcgggaggaccctacgccccgctcgccccgcagcgttcctcggtcccggcgccgcccgccccacaccgtccccgcctagcggaccgcggagggcttcacctgccggccggccccgagacacagcgcgggctgactccccgttcccctccccgccgcgccccctcgggtcccggcggggtcccgctccctcaccgcgcgctcctagcgctccgggcccgggactcgcgcggcaacaggcgaggggctggaggctcgcggggcggcggtgtccgcgtccggttcctcggctggcgaagcgctgcctgtggccggagcggctaatggagtcccgtcgtcgcggcccctcgcctggctccccgcgctccaccctctccccgccccctctgtccgagcctggctgggctgggcgcgctggctccctccttcgccgcccgcagagctgccctgagcgggtccggccggcctcgcctctgcccccgccctcccggcgccgcgctcgggggagggggctgcgggtcccgggcggggcggggcggcgtggggcggggcggcgcgggggtggcggggggcgcggcggggcggcaatctcggccccgcggagcgctgcccttttatggaaatgaaggacccggctcaggaattgaatccaacatccgggctctaggcggcgggccctgaggagggggagcgggggagcgcgggcggcctttcccggggcgctggtggccggcggggcgtctagagctcaggctggactggggcccccgcggcgtgtgtccgcgctggcagcagggagagggggcttgtccgtgagaaacggccccaggaaattcccagggcaaggtcgttttcggagaacaaagtcctctcgccccctccccacgcctgcagcgagacaaaaagcctcagggaggtgagaggtgccgcaccccgggagctggagagaggagtctgggacggagaaactttaaaaagtaaatgcccaaaccaactccttgaatgtcctacaaaagaataagaaaaccccgagggaggtgaaccacaaaaattgctttgcaagcaatgtccggcaccatcagcaactcctactggactcccaggagtttgcaagcgttcttaaccccttcggacgctccagccagatgccagtcaaacagatgatgctcttgcctgaggggaaaggaaagacacaacctagtgccacaggttttactcagaaactgtttccccagcttctccagctctttgtacttatttgtgtgtttttatatgcaagttagaactaacagtctattaaagctgttagatggagatacatgttcc

SEQ ID NO: 60519 - DNA, 658 bp, Homo sapiens
cgtacttgtgtgttctgtactggggaacagtcagaaaaccaacaagtgacctctcagcctctggaatgaagcaagttttgaaactgatgcattataccttcctcataaggccagtggtacactggttgtggatagacatgccgagcctttctcctttttataaacctctgctgcattagcatctccaatacaatttaaaatattaccgatcatcaaaaataccaaaatgagtgagcttttttcccaagaactctggaatgctgctttgtttaaatgaccttggcagaagctacgaagtttacacatacgctgcctgctccattgaaatgaactcatactctgctgtatcttccaacattcttatggacaaatgcccagaaatgaactcattgagttgaataatttttcaggctattgatctattctctaaccttaatttatcctttagcaaatgtcacatactggttggcccactgattaaaagaaacactttttgaaatgtatgaagtcaaaatgttaaaagatttatacattgaatcatatggcatcatatcaaaattaaatgtgtcatttaagcattattttcagaaaatattagaagtaattcaaatgtatattaataaagttcttgttaaataaagtatgatacatccagatg

SEQ ID NO: 60520 - DNA, 869 bp, Homo sapiens
cacaacagtgatgccttacataaaatgttatcttattaattctttataaccaccttgggaaacaggtagggtagttagaagattaggcattagctcaagattatatatgatagaccatcctaatccagttttatgtctactacattgtaatacttccacagagatttcatacaaattaaaaagacaaaacagactttcctactaagggttctattttcctattgcaaaaagccagcaatatgcaagtacaattctgcagtgtacttcttgtgtgacaatctgtggccaagcactgtggaatgcattccaatcagggattaacaatctcaaaagaatgttgaaaccagagttggcttgaatgttgtacaatgacaccaaggatcttggcccacttcccaggttttccctttttggttttctagcaagttcgattatgcctgggaatttgtggaatatggcacttggatcagtgacttcctgaatatgacattgagatcaatggcatttgtctgcctgaaagattttggactatgatttttagatatattgcagttataaataagttctctgttgaaatggtactcaggaagccttgacacagggtgcaaagaggaagaggagtttgtgaattgcttatggaaggcagagatcttgaaagaaagttcttttgtgaatagtgagttgcatacttgggcacactgacatttcagctggaggatcttcaagtctttaaaaaaagatcgagtggattaaaatctatctttaatgcctcatttgacaaatgggcactcaccaagggtcagccaaaccgttataaactgggaggtccttcttaccatcgccctagttcagttgagagctgacaaaga

SEQ ID NO: 60521 - DNA, 631 bp, Homo sapiens
ctttaccacttccctcagttgtcactgtatttagtttttcatggagtttgctgcctttcacttcacttttcatgacctttactgctatttaaatgctgacatgatactgtaacagggttggattaaatgatctctaaaaatctgtacagacccggaaattttacagttctttgaaaactatcacaagcatctactgaagactgaaagagaaagcatataacccaggctgtcaccaacttagcactaacatttactaaatgagacctttgagattcttatgttttaagttcagccagagtaccatcagattcctggcagaggcttgaggcacaggaatgacagcggaatacagataagggatagaaaactttagaatagctacagaggtcaactaacccaaacatagtttagcaaaacttagtttctttttctagtatatgattgctacgttcttttttgctctgccttgatctttaatattttacgtgtttttagaagagcaattttaatacatacactcaaattagttttctcgattgtccacatgccttactcattaattagctgagaagatagaaataccaatctaatggatcaaaaagaaatttgtcttctactacagactttacag

SEQ ID NO: 60522 - DNA, 2132 bp, Homo sapiens
gacgtgccgctatttaaatcataggctgtttagggtaaatgagacagaaccagatccccaggtggacaaagctggtaggatcacgaaattaaacctcgggctgcggatccggtcctggatcacttccaggggatggcagcagcacccggctcacccaggaggcgctacccccgaaggtatccagtcctcctgaccccaggcagcttgggttttgccatctgctcgtttacccttcagctgccgacgctccctgctcaatctccatcctgccccagccaaacgccaggcctcacgcgcctccctcttcgcggcgaccagtcccaaacccacaccggtgcgcatcggcccatgcaggggcagcccgtcctgccctaaccccggcccgctactcacggttccagtacaccgggtagcactctccttgggtcacatccacctcgtagaggccgccccgcacgcacacaggctcgatgttcacaagctccaccatctccggctcgtgccccgtcgtactctggcagaagccgcaggcgcggtcctcatcgtcatcttctccggaactggaggctgggcccgtgggggagcacacatggtcgccgtcccggtccccgccctggggccgggcacccgtggtctgcagcagggtccggaaggcgagctcgatgcggagcgagtcgtagccgatgaagggcttccaggtcttcttgtcctccttgtagaaccagcgtacctcctccgggcccagctccgtcactacctcatagcggtgccgggccgccgggccgccaagccgggtacgtttcctttccccgggggaccctcctgtcgcgccgccgccccccgagttcgtcgggaccagcggaggctgctgcggcgggtgcagcgacaaggagctgccgccgccgccgctctcaccctcgctgtagtagcgcagcgaggagcccgactcggcggagctgaagtcatagttctcgtcactgaggcaggggtccagcgcgaggtggtggttgtggtcgtcggtgcccggcgccaaatgcagcccgggttccccgcgcagcagggccaggggcacgtcgccgtcgtccgggtccccgccgggcaggtgctcgaagcagcagacgccgccgccgaacgctggcctcgcgtctgagcccagctcccaggcgccgccgccgccgcctcggccgttatgctcggggctccgtggggacccgcggcccgggtaattcatgctgtggagacgccgccggctgtccggcggcgcgcggagccgtgacccccagcgcttccgccacacattcaacgccgccgccctctccacccgaagtttctaatctttcaaatcccgacccgagctgcggcggcagcggcgaccgctccgcccccacgagacccgcagccgccgcagctgcgttctgccgccggccccattgtcacgcagcccgacgtaggcggtgcttcggcccccgccccgccccccggccgcgtgcgccgccccggaagcccgggctgcaccggcgccgcgcgcggggttcccccctgcccctctggctgggagggcagggtggtgtcaggtcgcccgccgctcttgggcctcctcggctcccttcctccttccttgcggtcttcatgcacagctgcctcggtcccccgcttctggaattcacagcccagatgtggataggctttaccccactcatccttacaatgtgggtcatgagcccagagccttaagctacgtgttaggagggccccaggatgtaggattcagcattgctctttttgaccttaggccctactgcggcctcgcctggacgttttgtcacctggccctggtgcctccagacagaaccaggacgcataggtgggtggatacgagggcactccaccccacacccatcactcaccttggtgtcaccactcccactgggaaactggaatctaaaccttgcttcatatgccatctcatattattacttatcttttgatgcttggatttcctgttttctcaacctcattgctaggcccttgatggaaaccaagtccatgtcagcctctcccacacagtgggtgcgcaatcagtcttagttgattataatgatgtcaagtccaaccagctgtggtaaagagtg

SEQ ID NO: 60523 - DNA, 1333 bp, Homo sapiens
aattcaaacttttaatggtgacaaataaaacatattatttgtcgggaatttaagaaacacatctcattaattacacttctagtctaccgtaagtcaattccactcacaggcaaggcttggtgtaacttaggaatcccacaatgaagttcagccccgcctctcagaatgacagagaatttccactgtactatgaactctttgtaaaaaaaaatcagcatctgcatcttcagctttgcttttttcttacctctttcggtccttccccacttgcttgtttcctgaagaccagggggcaagatgaaggttactgcatggttcactgcaaacactgtctctcagttttacctcaacctttgattcagatgttttcacttcctcctcttcttacgtatggccctttggtctctgtcccctaggctgactttcatcatccaattagaaataacaccgtcttcttgctaccatttctctgggaaccgtagggagtagacccccagcctcctgcactccccacaggggccagccgagcttcaaaggagtgtgttggcagcaccacctcacggctgggcttcctttctgtttgaacagcttccattgctcactgttgatcagtaactcaatgattcattaaacacacaaacaatgagtgaatctgttccattagcaaggccacctgttgatctcagacattcttagctgaactcggcaaatacgaacaacagaatgcctacatcagtcgagtgctctgtctctatttgatggcatgttagagcaggaaaagcagagtccaggctttgctgatgcttttatgcttttcctttcatctggtggcagggctgtaagagtaaaatgtggaacacaacccacctctctataagcagctggaaaactttaagagcttggtcgctgttccttcctcagtcttgtagaattagagaaaaaggagagtgggaatattctgtacccttttgcttgcaggtgcaagggcaatagaattaaccaagccctaaacacacacacacacacacacacacacacacacacacacacacacacacacacacaccaaaagaagaaaaactgtaaaagacatcttattgattgcaatgacaccttctctgccttagaaaaaatacaatctcttttctatgtagcttctggttcatgtagctgttccaggcctttaagaactggtctactagtgtttacaagcttttaaaaaatattatactttatttggctactaaaagtcatataaagcagactgggttaagctgttgatacaggcatcacggtcaataaaagttgaaattttatttttaaaaatagcatt

SEQ ID NO: 60524 - DNA, 571 bp, Homo sapiens
accgatatgagaacaatagtgatagagccagccagtttcatgtgaactgcttgttgcaaatcaactgaggagtttgctttttggtattagctcaatctcacttgttcatgtttggagttacagcaatgcaaagtgcgtcctttttcttgacaattgcctttctatcttcttgtagtgagattaggaaatgagccaagtgaaagcttggtatctgcacaagcacagatggacattgctctgtaggtggttgaactctttccacagtagccattggctggtgcacatctgattaccattgtttggtcgctcaaatgggattgtttttacttttgctttttgatttgttaaagaaaaatacagagttgaggaaacagctcaggaatgaaggctgtggctctgtgttctcactcccaaatatgactcacatctctaatgaggcttggggccagtcacttaactcctatggctcaatgtctttctctataaaaaaagaaatggtagcaccaaatgatctgcagtggtgtttttgaaattatctaatgagtgtaaaggaatctgagaaaaaaataag

SEQ ID NO: 60525 - DNA, 1327 bp, Homo sapiens
tgaacaacctaagatgcttagatgtagtgtgcactcaataagtgcaataaaaactataataagctcaaaaagaattcattaaacaggtgaacaggtaaaggagatgtgatgacaaaatgagacagaagaaaattctgaaagggcagagttagaagtccaagcaggaggctggtgctctcagattgtgtttccaatgataacctccagttaccgacacaatgtctatgtgccaggttacattcacattgactcaaatgacccttaaagccaccctgtgaagtaggaatttaataggacgttagctaaagattggcaaggttaagcctcttgagcaaagcaacccagctagtaagacatacaacacacattagggagtaatttgtgttaccatcaaatggcaataatccaactgtgaagcacccagcatgcctttctctggacggagatgagccaggccaacaccaagcaagctctgcaatagagccacattctgagactaaagagtacacaaaggtatcagggctcaggaatgtggggtcaacagtagagccgtattacacagtctgccaagaactttccttatcgcccaaactattgttagtacccatagagatggggaaatagcagacatttatttcctgccacatttctaaaagtgatgaaatttaaaccactgtcctgttactcttcagtcatgatttgctattagtattaagtgaaaatgccacatttcacggtatttttgatacaggtgggtagggttcaaaatccaaatacagaaacaagagctctgaaaggatcacagtctgcctaggaaggagattataatggacacttgtgttgcctagccagcatccattcccccatcttctgtactaacacccttcttttcatttgggtaccacttccctcacctaaattctcctggttttggttcgaactggttcaatcaagagctgatctgaaaggttgcattgcaatatcaggaaagaaaaggttttcttctgctgcgattggatttgtcagggaatagccagtttggccaagcccacctcatggaggaagttggaagtttgcaccgctggatccacacatgccaaaagttccacccctagacatttcaggtctgtgggccaatgatttcttttctctaagtctgattaaataagaagttttataatttgggaaaaataatcctgacattgagagctacacgtaactcaaaggctatcaattttgtcaccaatttacacttaaagtgaactgattgtgtgaatatagtgcacgggtaggaagagaatggtgtgaaaaaaggaagattggtcct

SEQ ID NO: 60526 - DNA, 1924 bp, Homo sapiens
acagttagaagattatttcagaccagcgaagatggtaccttggtgatggctttgatgataaaaacagagtcaagagctatttagtagatgaaatatcaacaggtggttgactatgaaaggataatgaaaagggagagatcaagacaaacggatttccaagttgagcgacatattcagcaattcttaacctagccgtaccttaaactcacgtggagatcttcacaacagaaattctgatttaattggttcagcaggtggtccaggagcaggtatgtttcaaagccctcagatgtttcaaatgtgtactcaggttagagagtccctctaaatgagacaatcgttccaaggtagataacactggacagggaggaagtttcagagaaaatgccatgcattccatcctgtatggatttttttcagagaggcttgtaactcttccaagtgagatatcaagttaagagttgaattacatatccgggtgttagaggaaagatctaaattgaagacaggtgaaagtgattgacattcctattgtaatagaagtcatggttgaagaggcaatggccaaggaaaagagtatagtgagaaaataaaagggccctgaaaaacctcttattaaagatagaggataatgagtcagcaaaagagactgtgaaggaatgttggtaagttagaaggaaaccaggaaaataggcgttgccaaagtcaatgcaagagaatgtttcacgaagagagtgcataagtgggctgaaagctgtgtttaattttgacaagtcctggaactccatccttctcccaactgtctaacctctgggttgattttaggctctccccgtgataaggctctactttgccaaaataaccattagcagagaattatgatttaaaagtcaaattgtgggaaactccaaagcccattttttgaagatttggaaaataattacaatctcatttcagatactagacacaaaagatagcattctatgttcacatgcagtcacgatttctagcactttcttatattatgttcacctgtttgtgggcttgcaattggcaaggattgcaactctttcagtgtttgctagcattctctctgttgccaagcagacacagggcagaacgaatacagagtgatctttcaggacttgtcttctcttcgggctcttactgtaacatatacagatttttgttactgtcacagtatccatgtcattttatttctttcatgtgtgtcctcttatgctttccatgagagcaggtaatattattagatgagcttttatctctggggcctgtcacagtgcctagcactgtgaactgaatacgtgtttgctgaatgaatggaaagttgcataatttttctgtgaactcatgaacagccaatctgcaaattccatctctaagtactctttcatcgtagactgtaaaatattgtttaaataaaggatgtggtttacccatgtttaaattttaggtccattttctatggagttagtaaaatctcattccaatacaaattgtttaatcccttggtgccgggggttttctgcctgtaaaataagaatggcaatgctgatttcccctggcactgcagtgaagactgtagaactcagaactctacttgtctgtaagaggtactcgggtttgacaaccagttgatcaccattttttcttattctatctgagtatatgttggttcaggcactgtgaggggcaacagataagttctctggatctatttacagctgctcctggagcagttgctaaaggctgggtcatgttgattgtgtttgtttttgtttttgttgtttgtttgtttgctacgggagtgatttttctagagttctccagccccttttgggctggacaataggaagtagggcagacctaggccagctacagcaaatgtagtcaatactggttt

SEQ ID NO: 60527 - DNA, 1160 bp, Homo sapiens
gtcaccaatgaggggcaattggagatagaaggccctgtctctgtctggaaggggcagggacagcttcttagagaagaagatattagagccagtttactgggtggaaaattataagaaggtcattctggtcctagagaaaaggatgggcagagacatagaagcaacagcaccatcaaccaattgcaaatagttcaaggctcttggagaacagagtgagataaaggagtgggtggagggtccagattataaggggtctgaaagtcactgagggcttttaagcagagatgtggcatgaatatctttgttgttagaaccatcaccctggcagcactgtaaagatcccattggaagagagatagagacaccattaggaaatgattgcagttgtccagataaaaaatgatgactacaggcagattcaagaaatactaggaattaaaatcaagacttaaagactgatgaatgaggggaagtgggcagagagaaataaaagaggttaaagtgactcccaggtttctggcttaggaagacaatagggccattaacaaactagagaatattggaggagctgtggactttgactttctagcatgcttagtccaacaacaggagctataacaagagtgactcatcaaaagcatgtggagtcagagattaggattcaaattagtagctcatcataatcccaaagacacaatcccaaatcttgaaatcccaaaaaatcaagttatcaaaaatttgattctggaaaaaataattttaaaattatttaaaagtatttatttacatttttaaaaggggtttatttggaaaacatataaaaacatgacagaacactttgtaggctactttacacaataaaataagcaataatgacacacatatttttgcaggcatgaacattcaggtataccaacaacagttgcatgagtacaacagttatgagctggcaaactgtatttacaaagcaatagggccaggtgcagtgactcatgcctgtaatcccagcactttgggaggccaaggcaggtggatcacttgagtccatgagttcgagaccagcctgggcaatacagtgagaccttgtctctaccaaaaatacaaaaattagccaggcatggttgtgtgtacctgtagtctcagttactccaggggctgag

SEQ ID NO: 60528 - DNA, 738 bp, Homo sapiens
aataaatagtgttgctctgaacagaattttttacaatggattgaatttcatctaaaagcatgtaattctgcatagccagaagcagtttctaatctttatatataggaacttacaagggaaagaattcaaagccatgggattaagtgaaaaatgtgaatgaagaaccacaagcccctgctcagctgacaccagaaaagctctgtaatgttttctgagttaatcattgctacgggtgggaaaaattgtggaatatgcctaataggtcttgtaggtcattatttactgaaatgctacattgggtggttatttctttttaaatactaataacctagaaagcctggcctcattcagcaagagggtcagcacagaggcatctgattagtgtcaaaaatgactgcctctctttagtaaaggaatttcctaaaggaaacataattcacaatgacaaatgttggcatttttagaattacaaacattacctacaacttgaattcaggttatgaacccactggacaaagttcagtgattgtttagtagctagcagatgagttccagtttaaaaaaaatgagcacgtacgtaaaactataaataaagataacaaaagtctctaatactcaaaatgaaaagcagttttgagttgtttcccagtgtatatctgaactgactctttcggctgtactttctcaaacttaatgaaaactggtagtagaaggagggaaatgtctgacactggcgaa

SEQ ID NO: 60529 - DNA, 725 bp, Homo sapiens
agggttggaactggctaattgtcagttgttacccacactgggttaatttcaagtctaatggtacctgaagtcagttcctcctctccctcctgggtgggggtcagacagagactcacttagtgaatgcccgggggtccattcagtgatggtggttgagacaatgctggctggtgcagattgcttgttttggaaccagcattccagggcaggcattccacacaagtggccacagcattctgcattcttggaagggaccactacatcccaggaatggatggctttgttatgtcttatctcctaatctgcagttggagattttccttccttttgcaggtgctctcatttccttcattatttgtttattagaaaatcttgtggccttccaaagttattcttatgctaaggaaggtcgaatgtgataacatatttgtgttggccaagagtgaggacatagcaaacactgagagtcacataatcatgagtataactgaaagtggtgcttcactataaacaaaagttccctgcccccaacagtgggggtcattaaagtttcaaaagtagagagagaaggcaagaggttgctccttcgtctgctggtgctacaaatctagttgcttgagctctgtggaagttgtggctggaactatttttaagatttaattcaggggctacagagttcagagagcattgccaaaagaatgcctgagaaggcctaaactggacca

SEQ ID NO: 60530 - DNA, 638 bp, Homo sapiens
gcttctgcgcggccttttgaccccatttcgcatgaaatctgcagagcgaccgccccaaggaccagcgagcgctaatcagatccgtctgtgtctgcagagcttcacctgaggcctgggtccccgagggcggatgagcgggccggctctcgggcccgggctgggggacccgcagtccgcggtcggcggggatggggaggggtggccgcctgccgcgcggctcccgcgggccgtcgccaggtgcacggtccccctggtcccccgcagggaggacgccccctggtgcccccgccgccgccgggcctgggagctccagagcgggcgggaggcggggtcggcggggctggatcttgacgccagtccaaggccgggtgactactggggtctgcccgcgccgcggacgcgccgagccctctcagtgtggcgctgcccggcggcgaggggggtgtggaacgaagcacggtcaagacagaaaacaaagtcagcaggtcacctggcaggttctgggcgaattatgcaacgaaagcaggggaatgtttgatgcgtcccactccacacccccccaaccttttttttttttttttaagctcctaggaagccggttccagtttaagggttgggtagggatcgaccaagcagct

SEQ ID NO: 60531 - DNA, 1823 bp, Homo sapiens
ctatctgggccatgatctcagcgtggcttcttgaaggataaacagttaacattgagggggtgaaaaggggtgggggagggagaattaaaatggcattgctctccactttagaccttcagcttctctcccttttcctccaccctcagagcccaactttcacaacttccagttggttcagagccagagggagggaaagtgagaggcaggggctgggcgaagacagagggcgacagggtccagaagccgagaaggtggtctgggagctaaccgggtggcttgagggcttattttattgtggccgatgagtttgaaatattcagccaaaagtgcctgatcgtgcccgctcatccccagggaaggggtgagagacgattccggagagacctctgtgagttttgacaagagagtgggaacgcgccacggagacactgggggctctcccagacaagttggataggggaagggagtggttagccctcaaggtacaaccccgggctttcatctctttagctccctcgcgctcccctttcttgcaacgctgagagggcgagtgcgcgctagcagcactttaaaaggaacccgtacgcttccagcgccccggctgccgggccaagaagggagcgacagtgctgccagggagcagagtgtggatattgtaaaggaggtccgacggaagggacagccggcgagcaggggtggtgagggcagagtgaattccggggagggggaaggaagaggtgtctactcactgacagaaaacaaggcatataataacagtccatgattcttgacagccaatcttgaacaaacttgctggaaaggctcagggaagctgcagcagtgcgttgctcgggatggcactacggaatggctcctaaaaggaatatttgaatataatgagactccaccgcagacaggctctgtttttcttccagcccctcggagtcacgtgagcgccgaggcccctcccgcggcaggcggcgaaagggcttgcgcgccctcccctcctccacagccccccgcccctcgcgggcccgcccctccaggcgaggccaacctccgcgcccgccgcccgagcctcagcggtccgggaggagctcccggcggcgctcggcagagccctcggccggtgccccgcggccgccgcgctcccagggctactggcgcagcgcacggagaacccggttctcggcgcggtgcgtcgtgctgggcccccgcgccgggccacctgaagccagaggatttggggcgcactgaagggactgcgtctcccagctcgaacccggcttaagtggggccgggagcgaggtcgggaaagtctcacccgcccaaagcctcaccaccgagaggcacttaaaaaggaaagcgcagagggaccctgcccacgcgcgtgtacacacacacccccccacacacacacaagcaaacacgagctccccgccacttcctccccagggtctcctcaaggccaaatattgctcccaatgacagccagtcaccccttggcgaacgcctgctaaggctccgaagagccgggccaccgatctagctcccggctgaaagcagccgaccttgtcacgcgcggggccgggaatgggagggagggtgttagagggtgatcgctgtgggaaagtgagagggagcggctgttagtcattgctccgggtccattaccgagaatccccaaacctagtccgccgctgcgtggcccctctccccatgcaaagcagacccccgaagaagccatgccaggctgagggacagacgccggggctcgaagctccgggcagattcagaaagaggcgtcgctgcagaaaggacgc

SEQ ID NO: 60532 - DNA, 563 bp, Homo sapiens
tatacaaaaaaaaaaaaaaaaaggaaaagagggaggctagaaactgctatgataagatgaaagttcaccttaataagaaaatacagaatcaggaattgtgaaatttaaaaggattaaatattaagtatgaaaattcagtagagaacaggtaagatataaccaccagctgaaaaaggtgaagataggaagataaaaggaggaagcctggagttgagcagagctttttctaaactgcaatcttcaaagaaaatcgacctgcactccacatggggcttcttccaggccctgacagaaggtcaaggacagctgacctgggctggagccaggcaaaactgtgaggttagctgggatttcatgagtcacccttttagacctcccagcaatctcatgccatgaatttgcatctgagccccagaaggaaggaaaattccttctagttaggaaattaaaaagcacagtagtgaccaccaaatgatgcctgagatttcgcaagcatttgtcacagatttgtagaatagtcatgatttaaaatattcaggccgggcacagtggctcacatgtgt

SEQ ID NO: 60533 - DNA, 655 bp, Homo sapiens
accctctagaatctaatttcccattaagacttcatcttttcaaaatgccctcatggttcctccttacccttatcttcatggatacaagtgttcctccttactgttcctcctcattgttcctccttacccttatcttcaaggatacaagtgttggaggagggtgtttatacagtatgttttatttgatctcatcccctagggacaccctaccttttacttaaaatcagctgtctctacctccttccagccagactgttctgtcttccagtgacccatgctcactttgaactatgattttcccctccggagtaaacttcagagttctattcctcactcatcagctcttgagcaccacaccacctgactcatgttacaggagttgtgaaatccctctctcactcacacagggcaatccacatgtgataagcaccagtgtcttcacaaataggtaaacctgtctggtcattcgagctccactgagcagcaaataaaactagcttttcattcatctaccaggcactggttgattagtaaccagtgtctacgattgtgggtgacaatgttttactattgcaatttattttatcctttttatgttattatgagagagaggagaaagagagaaaaagatgtgagaaagagtaaagcacatgct

SEQ ID NO: 60534 - DNA, 1155 bp, Homo sapiens
ttggtggtcagcatattttataatcaagccagaatcttgttagtttctcatagtatcttaacatatgtagttgaaggagtaaaaagctatctcttcttcattcttctttttctattcttagcctccatcttggcccaactccatccccaatttgaacctaaccaagtaaatattacgtggtgttatcatttgtgagccttgcctcaaatgcataagcataaaagaatgtgtgattggggcacaataaaaagaaggcaccatgagaaacatacatcctgtctaccttattgacaatcctctggcctccacactgaatggcactaataacacggacaagcacacagagaaaaaagagtgaagaaagactccccctttcactttcactctcagaaaggcttagcagggtatcctctttggtacaaagagaaggaataacctcattccaatttttggtattggtgagacaacctaaaatcccctggtatagcagtttttagattgtgtttcatggatccccaagatcccacatgaagaagaaattatttgaatgtctgtatgttaaatttgtgcctgccctatcatttcgtgcctcccctttcctctctctccagccaacactccaccagctaggactgagatccaagccacagaagacaatgcaaaaactttctatagtcctggaaagtctgatgaactgtgagctagaccacagaaagtcatggccacatgaatctagtttttgtaccctcactttgatcctccttgccagtctggctctttgtttaggtgacccttggcctctggagtcaatgtttgtcttctaaatgctatttcaacactaacatctggtgatgtcccccagcctgacatttgtgaagcagatgcttccagtggcctggagtgtgccttctgggtcaatgttttcaataatgccctctggcattgatctctgtggtacctctccctaggtaagaaaaaaatgccactaggaaatggctgagaaagaacacttcagaccatctggaggtaatcttggaatataaaaacccagaagttcttgtataaagaaatacctagaggaaggcagtagggaaaaaaaaatcaagtctgtggtatttttttaagttgtactttaaatagtccagcagttcaaac

SEQ ID NO: 60535 - DNA, 707 bp, Homo sapiens
aataggagatgccatagcagtccctagtaggagcttctgatccattctgagggacacaggaggagggtatacggtagcggaagtgacatctaatgcacagccataaagaacctataggagttagcattctcggagggtagtgtggggacaaagaacagcacccaaggtgattgcacagcccaggcagaggcctggaaggtcgctgtcacagcctcttgtgaaaacacaagtagtttagtacatctggtttctgaaaagggagtggggatagaggaaatggaaagggagataggggcaagacccatcatcaggggccttagatatcagcaaaaggactttggactttgttcattccctcaggaactatttgttgaccttactaggtgccaggcatttttgtaggctctggagttaccagaatagtaaacaagataaataggcttctgctttacaaagcaaaataagaatctattcaagggtttaaaggagggaaatgatatgattggatttgagtttagaaagaccacattggctacagtgttggaatggctaggacaagaataagtctctttcagccataaaactgactctatgatttaaaactcaggatataccagattataaaagccccatgttgacattattcacaataaataaatacataactgtattctttttcatatatataatatctttggtttacatga

SEQ ID NO: 60536 - DNA, 487 bp, Homo sapiens
gcccaaaagaggtgttgccatggaaagagggcccaaaagaggagttgccgtttttacagttgaatccaaaagcttttatgagaaactctcctcatctctgcagctgtttgtgtaacttcccttatctgtggagctgtctgtgtaactctcctaatctttgcagctgtgggcatgtctttttaggaaagcacaaagtgcagcttctcttgtttgtgcaactgtgggtatgtttgggtaaggccccaccccctccccatgcaagttcccatggagcctcccatgtacatacctgaaaaggggaagaaactttttcctgggagcctgctgattacaccaagaacaaaggctgctgtgttgggtcttgctttcttatctgtgcagctgcagcctgagttttccccaggctgctgtttgtgcctatagctttgatttttcaggctgtttctctgtttgaaggagttttaccaaggacccatctttagctgtc

SEQ ID NO: 60537 - DNA, 1288 bp, Homo sapiens
ccatatacagtcatcccttggtatctcaaagggattggttccaagataccctatccccacctctgccaccctcaccccccagcagatactaaagtgctcaagtcccatagccggccctgtagaacccaatgataggaaaagttggccccccatatatgtgggttctgtatcccgtgaatactatattttcaatccatggctggttgactctgtggatgcaaaaccagtggagacagagagccaattgtataccaagacagtccttgctaaatttcattaaaactgtttggttttaccaggacccactgctgtacagggcatgccaagagatagactctctttctaatccagggctgttttctgaagcgcaaacaagtgtgaatcagctacagtttggacaggttggctaatactcatgcaaataaagctggaagggcatttcagaaaaacaatgccatcactcagttggaatttcaccaggcttccagacttagtctctgaaagaattagtgttttctaataatccacctgacagattatgttcagaatgtgattttctgattaaggcactaagcacaaaactacttctggactaagcagccgccagacactgcaaaatcaatgcaagttcccccaggtgtttgctgcggaagctgaaaggggcaaagggatgtggccatatcctttctggccaagtttcaggatacatagatttaaaggacagaactgtaaccaggatttggccacctcgggaaggaacgtgatgtttggacaacatccttcccagactgaaagctgctcagacatggatcgtcattccaggcatttggcatgctggtttgcactagcagccaagtgcataattgccaggaagtggccaaatccacagagacaccactcactcctgaatgctgaaaaatgtttgtaatatacggtaataaatgcaagcctgactcacttaatcagatttgaatcccggactggggatttctgcacaagagggagatgtttactgaaatcctgcttttctcggctgccatctcccattccaggaagaacagaactactggatggccttgccatttctgttttatatttttggtcattaatatggattcttataagacatgggttctcaactcattctgaatgtacttcagtatgaagtgattaaaataaggctctttctccttattttagattatatttaagcagaactaagtgctgggcacagtggctcacgcctgtaaatgcaggcctttaggaggccaaagcgggcagattgcct

SEQ ID NO: 60538 - DNA, 535 bp, Homo sapiens
cgtatggaccacgctgacatcctgccatcaagaagcaaagctttccagcgtcccccaagcgctagggccgccttctgactcttccgccccgcctccgccccctgcactctcccaactggcgggaggagggcgccctcccagccaatcaacgtcccacagggcccgcctcccgcgcgtctttcaaaggtcttctaggaaccagtcagcgattagaggccgagtcttcggccacccaaaggcggagtaagaaaccagaagcggatctgattggttgctggaagacgccgcgcccacctcacagaaggacgaaccagtgagctaagctgcggggcgcgggctcggccggggcaccggtgagtcgccggcgctgcagagggaggcggcactggtctcgacgtggggcggccagcgatgaagccggtgagtcggacgtgctggggtttggaggagcgaggcggcagggacgcaagcggtcccggggacccgatcctgggccggagggcagccctagcctggtagcagtgcgactggcgcc

SEQ ID NO: 60539 - DNA, 2422 bp, Homo sapiens
tccgcctcagcctcccgagtagctgggattacaggcgcccaccaccatgcccggctaatttttttgtatttttagtagagacggggtttcaccatgttggccaggctggtctcgaactcctgacctcgtgatcctcccgcctcggcctcccaaagtgctgggattacaggagtgagccaccgcgcccggccatggaaccacacattttcatcagaggcctactaaggttgagctagtctgtatcccaaattatcttaggtattgttcttccatcaaagcagggctgaagatgctcttcaaattactgctcctactgacaagcattctgaggtagcagttatttccgacacagttaatagcctacataagtattcctgattacaataagcagtcaggtcctaaaataattgtaaacataatcacactgcttagcaaaaaggaatggatttgtgatatgcttccactttcgagacttttttgcacaagacgctgctgctgtttaatcattctgcccctccgtatgtttcatagaaatccttgttactggcatgatgaaacctgacttaaaatctacgtaagagtgaacgcggtcattcaaattaaaagcaacattccagaaggcactggaatatggggaaaagagaagcaagtatgagataaatttttaatgaatgatttccagaaggctctcaaggcttttaattttgtgctaaagcaacagaaattcttatctctgtagaactatgtcacagggaacttacgactttttccttagagggaccagtaaggctgtgcttccaccctgcaatagtgatgatgatgtgtgtaacagaaataaatactgccccagaaaagcttaaggtttctgagcatctcaaaatcaaatgaaaactccctctactaaatcaagcaatcctgaatataagggtggcttggaaagctgcctgttgaaactccagcggtcaaagtatgatttgggggggaaacgcgcacatgcaatcaacaaagtaatcaattgaacttgcatcaaagttcaccaggaaacaacaatctggaaaaagagaaaaaaagtgatttgatttgaagagcaccgaacaagtgctgaaaagtagagttggaaattcaccctaagtaggttacattttggccacagttctgtggaaaccctaaaagaaagtcaatctgtattaacaaaaattcggaaaacttcattcacactacggccgtcccaccgcgctgtcgacatcctccccgggaatgcagggccgcgggccggcagaggtcggtgcgaacgcagcgcggaaccgcgggcgcccgcctggaccgcggccgccccatccagtaggggaggagtagcggtgcgcgcggcctgtgccgaggcaacgcgggcgcgtccacctggcgactgcgcgccccggctcctccagtacccgcggcccccagacccctcgccgcgcggcccgtgccagccgggccgcatccccgacgcgcaaagccccggcggccgtggcggcccggaccgcgggcccggggcgaaaagaggctgtgttgccgcctcgccctcctttccccagccccagctactcacgtgccaaatggcgaagaagatgagcgcggcagtgagcagcagcgccagcatgtagcagaaggccgcgaacgtgaacgccatggctggggaggaggagcggggagcggcgccgttgccagcggagaaaggcggcgcagggccctctgggtaaaaccattcacttcccccggccacagccgcgaccgccaccgctaccgccgcggcgccagccctctcagcgcgcctgcgcaccagcccagccgccccggcgccctctgatggccggagtctgcgttgcactgacattgtccgcacagttgttgattgatttttccttccttcttgcgtttattctttcaacaaatatttattgaatgaatgcctagtttgttacaggtaccgcgcttctcgcttcagatacaaagatgaataagatagtacctgcactgaaagaacttagtatagtgccggaaatgaacacctaaataaataattacgttattataaccccgtaaacggatgtgtgtgggatgctctgaaaggtcaaagaaggacagccagcccgccctggagcatttaggcaggattcctgctgtaggtgtttcctaagttggccttagatgatgataagttctccaggcaaaaagaaggtagaactggcagtccaaggaaacagttcagaatgaggaaacgcaacagagatggaaaaaagaaaagaaaaataaagcttcgtgtctcaggtgaaaccagcagcaattctgtattaatggaacctaagtgcaagacagtggtgagacttagaaatgaattagcaagggatcagatcatagagggccttataatgcttcattacgg

SEQ ID NO: 60540 - DNA, 1401 bp, Homo sapiens
agttgcttggcagctcagctcggggtttctgccaattgacagcaagccatacttcaccactgatcatccaggtgggagtgaggcttggcactctgcccagcactcctccagtgccaagggcagggcaggtgggggcgtaggatgctcagagacatggtggtaacataaaagggaaagctctgcattggtgtaaatttatcctcaaccaactaactagtgaggactcccacaaagggagaataataggagaacatctcatcccagttacaaatgccatatgcaatccactatgctttcggatgatctgggcccttgccttgaataatgaggcacttccaagaggaaagaaccctgggcacagaagactataggtcatcagtccccagtcttccagaagatgtttgtgtaattggggaagaagcaatttcacctggtaattagtggtggttgtgggtgggctatggatctagacatgtgactcagacataagacttggaaagaatagttatgaagctggggaaaatgggatgcgtaaccgaaagtgttggttgctcccaaacccactcccacttctttcttgttggcagagctcagagtttgttcaaggctttatgccccctatgccacatactcagaagagaagcctttcccaggattctcttttttttttttttttttttgagaaaaggtagctctgcccctccagaacaatgtgtgattctcagttattttctgtatgtggcagagctgacaatgtgttcatgtttttttctgctcactatgtacctttccaaaaccttgggttacggcagcatgcaagtagagagcttcaggctgcccagcaggatgtagtttctcaatattggtggctgtgtcatccattctgccctttgcactgggagtgcctgttacacaaccatgatgaagggagttaatgtacagaaatgacttaacaatttcatatgtgcaaaaaaagtcactttgttttgttttgtttttgtttttggagacagtctcgctctattccccaggctggagtgcagtggcacgatctctgctcactgcaacctccgcctcccacgttcaagcaattctcccgcctcagcctcctgagtagctgggatttcaggcacccgccaccatgcccggttaatttatttatttatttatttactgagacggagtctcactctgtcccccaggctggagtacagtggtgtgatcttggctcactgcaacctccgcctcccaggttcaagcaattctcctgcctcggcctcccgagtagctgggattacaggtgcatggcatcaggcctggctaattttattgtatttttagtagagacagggtttcaccatgctggctaggctggtcttgaactcctgacctcaggtgatc

SEQ ID NO: 60541 - DNA, 1781 bp, Homo sapiens
gagaagacgaaaactgaaaagaatccattcgattcagtgaccatgacaagatctattcgatgaaagtgggctgagaattgagtggatggtcacagagagcagtgttttgttgtttctaatgaaatttacccatattttaaaacctaatgggatggatccaaaagatccttgatggcgatttatttaattttccactttatttttatgcttggggtccatcccatgtaagaacagaagccacagcccccagaaccaacaaaactaaagttattgacaattactttaaggcccagtgccaaagctttgggtcgaaaggtttccaactgccataggaaagcaaagataaggagaaatcctctgtaggaagctagggaaaggagcagagagaaagaagctaaggtgaggccgagagaattcaatcggaattcgagtcctcccccaaaacgccgccaggtggaagatgctcggggcccaccaacccctggaacctggccacggccctggcagggaaagcaggaattgagggagccctccgatggggcagacccctttccctccaacctacagctcagaagctgaagccctccaaccagaaggacctggcgtggggcctccccaacccccctgctcgtggccgcaccctagtcccatggcccgctgggcgggtccaccccgggcccagctggaagatgctgccctgaggcgtggtggcggcggcagaggccaagtactctagctatgggcactggccagctgctgggagcggaagcggccgccgagccctcctgggcgctgcccgccgccgccggctccggaaaccgggaaaacccggctggccggctcgcccagccctccggcccccgccctcccagcggcaactcaccattttccttccggccgtcagcggcctgtcgcctacactcgggcgcctttaagaatggcacggcggccgcctcccttcctgccccggcgcctggcccagtcgcccccacctatcaacgcggcctcagcgggccggcacgtgatggcggacggcaaaaggcgcggctcaaaattagacagaatgcgatcgcctgatttttttttttttttttttttttttttttttcttttccctgctccctctagaggaggacgctctgcctggctgcaagtgagaaacaaacccaaggtgcatacttaaaagtcatgccagttctccggacctttttcgcagtcttcaagctctgagagcatgttaatggtgacatcaatgttttcaatggtaaatgtgtgtactgaccgcagcctaccttccaaatttgatctccctcaaatctaggcacacctcctttcctcccaccctctccagaaccccacttctgaccacggctgccttccaggacttggttaatcaatctctctctctctctctctctctttctctctctctccctccccctttccctctctctcttacacacatttcttctctctcacacacacacacatttcttctctcttctctcacacacacacatttcttctctctctctctcgtctcgctctgttgcccaggctggaatgcagtagcacgattatagctcacagcagcctcaaactcctgggttcaagcaatcctcctacctcagcctccccagtagctgggactacagccgtgtgccaccacacacccggctaatttttaaatttttttgtagagatagagtctccctatattgcccaagctggtcttgaactcctggccacaaacagtcttcctgtgtgcctcccaaagcgct

SEQ ID NO: 60542 - DNA, 1388 bp, Homo sapiens
aatgctgattttcctctatgattaagtccaatctgaaaaggctgacaagtctcgtataaattgcttgtggtagagactcctttttttgtgttttcactgtgcttatggttatttcattttgtagaatccaagatgcccgccctcctcctcctcctcctccaccctctcccaaatttgcctaagatataataggcagggtttcaggatttagaaacgatgcacgtagatttcagactgcgcctctctctgacatcagaaaacctacattgcctaaggctggcacagagttggccccaaagtctacttagaatttgccggcggaacagcaatgaccactgggccacagcgcttaagacgcccgctgggtaccaatcctgggagtcgggggcggtgcgagtcgggccccccccatcccaggtctgcgtagccaatagctcgggacgggagcgggaggggcgtggcgtgtccggcagggggcgccgtgattggcacgccagctcccgctgtccgcgaggctgccctaaagtctagctcatgagaaccccaggcaagtgcggacctacaaagtttgtccgctccggggcactgtagtggcttttaccctggccgggcgggcggggctcagccgggctgggctgggctccgcggctggagccgggctctacccagagcaagaccctgatggctgcggtgtttctggtaacgctttatgaatactcgccgcttttctacatcgcggtggtctttacctgcttcatcgtgaccaccggcctggtattgggatggtaagtgtcccaggggtgagagacgaaggggcggataccgccagagtggggtcgcgacgagcagcagggggcaccggagccggagggccgcgggccggaggacgtcggggattcggtgtccccgggtgcctagaactccgactttctctgggaggaaaacaaggtggacgctgcacctgcgtcactgccctgcatcaccgtttggtccgtgtcgctggggcatcttggggtggtaccgcattggggtgttttactcagctttgtttctaggcgataaagcagccaggaagggcttgggcttgggcttggtgttgggagaaagtgcttctctagtaggcttctgtcccggattcgggcctactgtgtgtcctggatgagttagtcacctgtgctacagtgcacagactggacagtaagcgaggttaacagttgtgattctgacctgaatggagcccttagcctcagatctttcagagtaacttgtaactgaactgttaccgtttgagaatttaatggtttctgtatacattccacaccttttgaagtaatatttagtcgatagaattgtaaaatcataattttagagctggaagagaccttaga

SEQ ID NO: 60543 - DNA, 4882 bp, Homo sapiens
gacataggaaaaatccacacttaatacaataccttatatttaatgaatgtattttttttttcctttagagtgatgacttcactctggggaagagtgaggccacatccctgggttttatttatactccctttcctttgcccagaggaaaggaattgttaacacacaaatacaagagtactgacagctcatgtcatgctcaactttatatgtcttagagtgtcctgaacagtaagaattcaaaaatgagataaatcaatgtcttttcctaggtcaaaggctggtgtaagaactacacttttccagtagatggcagtattttcattcaccagcttaagttttgttttttttttttgttgttttgtttttagttttactatacctttagtaagctgcaggtgaaaatacatgttaatgaaatttctggttttttcactttcttttaaaaaaaattcactcttgggagcttccaaaagccctagaacgacatctgctttgcctacaatttatagcaaggtatataccgaagtagaccatactctctaatcctccctatttcctgatataagttattactaagaattagctaattcatagtaatctcttggagaaaatctatcaagcctttctgcctctacagtaacaaaacaaaacaaaaataaaacactgacttcaggtttcctgttttctaaatagggcaaaatattcattaaattaagcggatacctcacctgtctggttaataattaacttttaaaaaatccacatttttgcagctcgacctcgacaagacctttcaaaaaccctaacagatggttaggtgctatcacgtgtctgaaacgaactatacgctgcagaaactaaatttgaggaggaagggaagaaagcatttaaattccagggacatatgccggagttggaaaacaaaagtgttaattagtggaataatatctcagatactttctcttcaaaacagtggattagcaggagtaggaaaggctgggtctgaaacacgcgtttcactgccttctcagaattactcccgtataaacaaagcctcaagttgctggagggagcagtgtttcctctgaaatcacggagatagcccagatttagtcatccagtccttcttgcgaatattcaacccatatcaggaggtacagaggtttttagggtttagggtatttttaaccaaacctttactttcaagactagcagaggcactttcgcagcccaccctgcgccactcagcctctgcgctgcgccctcctcgcctctcgcgcggcaaggacctgaagccccggtgtggccgcggccctgcgcactctccagatccaggtgaaggttgcgaggcctggcgacgcctaagcgctgacaggtggcctcgccccgcctctttgtcgcccagggcggcgctcgcctccgctccaggccagaagccgcagcccgcgcgccaggcacagctcccccgaccggtctcaggagttcggccacctccccggggaagagtgggactcagccaggcgccgggccggcctctaggagcctgcgccagagcaaagggcatccggcacccgacccgggccaggcccttggactagggcggcacggaacctagcgcctgggcaggtccaaccctgcgcactgcccctcagcctcgtgaacccttcgcctccacgacccccggaacccatcccagcaagtgcggcagtgacctcgggtctcaccgcccgggggccaaacacctcggccaccccggggccccagaagggccgagggtcagccgagcggacgaaccacattcccaaggacaagcagcgggtggcagcaccgcccccgcccgagcgccctcgggtccctttctgccggggctccagtggcttgagtgtcccgacccctccagaacacgcaggcggccgcaggaagaaattcacccggacccgtcctcttccccgaacttcttcgttcctctcggaggttccttctacccgacccctctgcgccaccagctcctcccactccgctcccctcccctttttctggtccccacttaggaatccgtccccccgccctgcgccgggtccggggttcctccccccggctccccccgcgtgccgtcgccgccgcccgggttcctctccccccgctcgggcgctccctgccaagcccatgatgtaatggtgtatgttaatcagtagcatgtggggagctccggctcgggcggctcagtcctccgcgagccgacactggaggcagcagcagcggcggctgcagcggccccgactcgaagcaccgcactctccccgcgccgcccgccccgacggcatggcccgcggccggcgctccgggcgcccccaaccccgctgagagccgccgcggccccggacccgcgcaagggcccccgagccgccgggatgagccgcgccgaggtgagcgctccctccctacggccctcggcgggggacccgcgggtcactgggggtcccctccccgggggcttccccctccgcccgagaagttctgggagccggaagcagcgtgttgttggaagctagcggctccttgaaggctgagtcgctgggttctcctccccgccggcggcggccacgagaaccgggatgggactgggggaacccccgcagccgaactttctttgctgtcgttggggggcgtgtgcctgcggcgccgatccgcattccccgcggggccgccccgctggccgaagggagcagcgctgcggaccccggccgtcccctcgcggggcgtgtgcccagcgctgtgccgccctcggcctgcgacgcgcgggcgaggctccgggccggacagaccagcccgtaggcggcggcggcaggatgcctgccacacacgcgcgcacacacacacgcacacgcgcgcgcacagtgaccgctccggccggagcaggcccagggagacctcccgggtgggctggtgcggcgcggcgcgggggagccggggctctgggttgcgccgccgcccgctgggcgcggagctttgggtggagagagtttatttttgtctcgagctgctgccgcggctgctcacggcctaaatccagaggggcgcctggcggtggagatgctggctgttgctgtagatggagctgcagccgctcggctgcttctctgggaggaggaggaggagtaagaggaggaggaaggaactcgggctgccgctgcctccgcctctgctttgcattagctcccacccccacccccgcgccccttcgcagccgcattgcaagttttctgcgcggggaagatctgttgctggtgctggcgttcttaagcacggcgcccgaggccaccccaggcgggccgtgaggggagcaccagccgttggcagcggcagcaacaggaagccgcggggtctcctcccgcacctgggaagcaggcttctcgctgttacccggtggggaatagcccatctcccacatcgggtgcggagggggcggagggggcggctggatttcggcgaacccaaccttccgcgggacgccccctcccctggccccagcaccctctgatgccctcgtccccccagggcgcgctcctccgctagccgaggtctcactgcagctctttctctccttccagtggtgatcgccgctcgggaatgcgggcgtgaagggtccgagttgccgcccagcggggaggagaccccaggacgccggaaatcaccatcccaaagctgcaagaaggggggagaaagcattcttcattcagttgtgtgccttgtgggggatttttaaaaagtcgtttttttttttaaagaaacatttccgtgctactgtctgtcatcgtctctggggaaatcagccagaaccaccggaacgtaactgaaaccagacaagagaggcaggagcccaggcagtacctgcagcgtccgggcaccagagccaccttggaacaggaacgcgtctccggccgcggggctgcggctccgccaaactttggggcgggcggggcgggctggggcgcccagggggctctgtagaccgagggcggccccctaaccatgatgtttcgcgaccaggtcggggtgctggcgggctggtttaagggctggaacgagtgcgagcagactgttgcgctgctgtcgctgctcaagcgcgtgagccagacccaggcccgcttcctccagctctgcctggagcactcgctggccgactgcgccgagctgcacgtcctcgaacgcgaggccaacagccccggtaagtgtgcggcggccgccgccgccgtcccgcctgcccaacccccgctcctccctccgcttctctgcctcgggccaggccgaggccagtccctgccagccgcgccgggacctggacggcgtggccccgaggccctcggaatccaccccctccgggtgtccccccactaccgccccccacctacttacctccgccggccgctttgggattttgcccactgtgaactccgtcagccctttccgtgtggtagctacggtagcatgaatgattgatttttctctcatgcagtttcctgggaaataagtaagtcaggtcacgtagagtctggattttctgggtgtgtgtgttttttccttcctcctccttcttttgggcaacgtggctcgctggatttcagcaacacatgatagatgcccgggactgcccttcagaagccaagcttggataaggctgtgtgaggagtacatgaaaatccaattttattattcatttttccccacagatattctggttttagagcttcgtcttcagaataatatgcaggtgacgctagagactagtaaaatgacatttgcagcatatatatatatatatatatatatatatatatatatatatatatatatataatgcggttaagcttactgctcgtga

SEQ ID NO: 60544 - DNA, 1965 bp, Homo sapiens
ttggagcagcactttttccctttgagtaatggagatgacttttcccaatagagcagccaccaggttagtaagtaaaacagttaaatgttaaaataaggtggcctaattttaaaaatctcataatttaaaaaattgaactgtgaattttttgaagtcacttggcattttttttcccttaagacatgtttggccatacttatttgtataagatacccacctgttcatgctgctaaatgatgtagatatacaaaatatagaaccattgtgtaagataggaactggtctccagtttctggattaatccttcgcctagacgttttgcctgcatggaaatctttgcagttgttttgttgtgtggccaggacagaaatttcttaggaggtcatgtgatgatttggtttactttcggagtgtggggatcataaagagcatcaggagttgtcatagcatacctgagtctgtagtgtggctctctgcatatccggaaactagccaagaaccaggaagggggcaaaaagtccacttcgcaaccagagtagatagcatgaaagtccaagagaatatttcaggccctctctcagaatgtacttgctcttattctagacacaatcctaacatttaaaaaatttgacaaataatccgtagtgtattgggggtaacacatttagaatggggtgagggactgctgtaatcagtagtaaaaagtgacccctgacagcctgacaacttggaaagagacagaaaaactgtaactttagacaagaattggggcagaaactttgaaggcttgggaatattagggtgggaaccctcaattgaccttgtaggcaccactctataataacataaacaaataattgctatttactgttgttaacggtgaactatggaaataatacatttttagatacactctttaagaagagaaggaaatgttcaatatactttggaaatgtttacacccagaataattaacctctgagctgttttgatgtgtaaggctcttaccaattcagaaaactaggctgtgcagaatgactcattcattggattgctgagatttcctgtaccgaagtcatcttgtatcactttattttgtaatcatcaatttaaaaaaccctcacattttgtctagtgtttagagattttaaaacttggtaaatgggaaccaaattcatatatgggactcgatctcagtataataaaaaaaaattactagtaatagtatgaatatatctctcgttttatgcaggactgattttaaatagtgagatatcctgcgcattaaacatgatttatttgagatttgtgggatgtaatttggtgctttcattctcttaaatttattgagaatctagtgattcactggttcatcctttgcctcaggctcatggtcattggagattccaagaaatgattgaatcagtccctatggatttatttgtatgtgtttttcttttaacagatatggtcatgatcagttctctagtacagtcttgttcccaggatccttataaccttagataagtctcttcagctactgctccagttgaacattgagacttctggccagtctcagttccaggactagcaggtcatttgatacctacaagtagcaaaaatgcaacccactgactttacctgaagtttccaaaagaaaaatagactttgtggcattgtttatttatggcttttgtcacttggacttgaaatatatttttcatagagatttataagttaatccacaaaaacgtaacccacaaaatatacactatttgtgtatgtttgtggtaagtaaatgacaataaattcctatacttatagttaaatacaagagaaaagggtatccaaaatggtgatgtttgagacaaaaaaataattgtggagcttgaagactctctctcagaatgtaattactcttattctagacacaattctaacttttttaaaaaaattgataatcca

SEQ ID NO: 60545 - DNA, 573 bp, Homo sapiens
attctccgtccatgtagagggcagtgagtggaagctgctgttcatttagctcagagtagagaaaaactttatgatgattagggctgcccaaacaatgcagtggcctgggcttcatcagatttggacgagcctttagcatcaagcagaataatcctttcgagtaagactggctcctgtttattgagcacctgctctgtgccagttgtttgcataacatgacctcatttattcttctcaataaccctatgagatgaggtaggaactgccattattccatttgtcagggaggaaacaagcactctggcttcggaaccaccccacatgcctctccactgtaggaatttagtgtctatttgcttaggaaagaagctctgatttcttggatgacttccaaagtcccttctgaccttaagattctatgatttctatgaatcaggaatgaagataggaacacaaaactattgagagcagaggagaaagagagagagagagacaagatgagtaaatgaatgaatgagtgaataaataagggtggttttaaaagttttcttggtgggcgcactggctcatgcc

SEQ ID NO: 60546 - DNA, 526 bp, Homo sapiens
tgatttatttaaaaacaaaactattttaatatgtccccattttatttatatcttactttttattagcccaaagataattaaacccgaaaatactgtagactctgtataatttaggcagttttatgaatatggattttaactctgacctaaatgagctgtctagtgactcaacaatagctacctcttgcttcaagatagtaggaactgatcagcttataaagctgatgctgcccagttctgttctgagtccagtgtgcatagctctggctcccaccatgcccgttagcctgtgaaattgatttttttaaatggttgtacaggcatttggcctatagccaaagaaatgattgagcaagtgagtcctgtttctgtattgctctatgaataagtagttagaccattcaagactgctgtacatgagtcattcattcccagggacacttatagttcttttacatttggtgcattcagcatcctagaaggccttttctttaaaaaaaaaaaaaagaacttttgtatttccatt

SEQ ID NO: 60547 - DNA, 4876 bp, Homo sapiens
ttggaatgtttacttttaaaaaaacaagattttctgttattgttactgacttatgatataccactagggcaagataagggcttttgaagaaccgtaagggaatacatattccagagcgtattttcttgaattccacttacctcctctaattcactgatccttacctgccaaagtcaacagaaagaaagtgaatgaaaagaaattaaattgatcagactcacaacttgttggcaattctgataaaagacttgagatagaggatttacatattgttgataaacctttacatcatttattgactcatagtcccctctgtttctgaacctgcatgagtaaccaatagttgcttaaatagataaaattagaattctttccatgggattcctttctgtttataggataggatccccatgttattggctagtgatttttcctttcttgcatttgttggaatggcccattgttgaagatcaacaggcattaatcagtagtgaatcagtcttgcctccttgtcatcttgttatagcagctcctgcgactggactgtggtcatgcctcgtgggttggcagtagggaacaggacttccttcagacactcgtgcttaagcagctgtttctctttctccagaaaacactggtttccccagcccccaactggttcttccctgctgagaagccaaaatatgccaaagtcactgctagaccagttccatcccgtgatagtgcaaatgactccagtgcctttccctcccacccagattttcccaacataagcttttctcctctttgtcaagagcttattctgtcatcttgtttccctttccctataaataatctattttttcccaccagactcacggaacagaggcgtgccccacgttgtatgcttgcactgagcattctttcagcgttctttacttgcttgaccttttagttattttctttcatccctaccgaggtctccaaactgaggtcgtgaaaggtcagagttttaaaaatatatatcaactgaatgcttttcttcagaaaactgagcacctcactttctggatattcgcagaggttccctggtctgcagtgacccttgccacacatttcttcactattttcacttcatggtttagatgccctggtgatagtgaggaactgtaaataagcacggtctgaaagtgtcaggaggagctcagatgatcctgagctctttggtctttctcttggtttagaattcctcaagacctattgtagtgacttcttttactcgactcagaattccagggctttggtgctccttaagtctcagaagaaacgcatggttatggtgtctgtcaacttgctgtttattgaaataccttttattgtaatgcaccaagtaaagacgaggtgatgtgggcactaacttaatgatattacacaaacacacttaattgcacttagggagttcagcatgacattagtgatttcatacagtgaataagtctcttctcttttgtttgacaagttttgttgtcatttaacagatttgcttcatgggaggtaaacttatactttctaaggatgaatgagtgctttgcaactaatgggtcatatgttggaatttaaacatattaaagagttaattcatttcaagaacttactagtaaatatgcactacccacaagagatttttagaataacctcttttgaatgattaatatttatatgtaatcatgtgcatattttatttgagattttcagggtataaatgtcgatgcaatttcctttaataaaggaatgatatatatgagccaaagtagtgatgtattcatcatagataacgtctcactgatttccatttgcccccgaaggcatcccaaatttggaagggccattgttgtttcatcatagactccttggccatgactcttatatagacatctgaggaaatgctgtggcaagtttcttgtacctactttggtaattgtaaaccatccaggaccgtatcctttaggtttaatttatcttgctcctctttgcccctcttttccaagggagggtttagaagatgaattatactcaagagttagtgtttctccagaagatcagaccacaagttgtagaaagcacaccagaactttgcacttctgccctttatcttaattcctagcccatgcttaagccttttaggatctatctacatccacctcacataaccatctagaattctcccaaaatcttgtttcagtagcctgggaatcatggcagttatatctgcatttgtgtgtttcctggccatatagtaaaaatggcaaaagagatttatatggtcaaatccctagcctttccattcctttgctttataaatgaataacagtgatctaaaagcgaaagaatgtagctaaccagtgtcatttgggatcttctgaagtagtacggaaactccacattcttcagaccaacttgcggcatgccagcacattcctctccgatgaggtggaggaatactggtggctggcctgggacttgtaggactggggcggggagctgctgtttaaaaatacatttaattatattccttctctgcagtaacattgataccatttttagcccattacaaatactgtgattttcatttaaatcacgtccattatcttattgacctagtttttattttgtaatcaaaatgttctatttctggatagcctcacccagaatctttttttttttaaaggttacagaccctttgtgcagttttttcctttcgtatctgcgtacagatgggctgcatctgtgttcacacagcagaaaatggtactatattgttccctttaagagtgtgggttttctctacttaatctcggactcttcatggagacacagctggcaagatgccacgagacctcgcatttggtaactgttttggtgaatggatattgggagagttaagtaatcctatttctattcgaaatgagaatcctgattctcttcttccatttttgctctttctctgttcgtctgctagttccctctgtgagccttctctttcctccccgcctctccagccgtccactatgaacctcacgtagccctgtcttcattcatgccctctcgggtgctccctgctgcttgtaagatcccacttatttctggcctttgctttttctacatttctttctctcctgtttccttctttccctcttaccttctcttccttgctgtcagccatgtatttctgcactctggttggaagctcaccctgcaaagaacaccccggaggtgtttccagggctcagctgtttttcactcatgtctaggcagggccttgaggcccctgaggaactttcaactttgccctcaagacttcctcttaatattattattattattattattattattattattattattattattattatttgaggcagagtctcgccctgtcacccagggtggagtgcagtggcgtgatgatctctgctcactgcaacctccatctcccgggttcaagcaattcttctgcctcagcctcctgagtagctgggattacaggtgtgcgccctgacgcccagataatttttgtatttttagtagagacaggatttcacgatgttggccaggctggtcttgaactcctgacctcaagtgatccacccaccttgacctcccaaagtgctgggactacacacatgagccaccgtgcctagcctctcaatattgtttttcactgtccttcttgacacatgaaaataggctgtgcttctcttgaggcaataattggatcagaattttaggatttttgcatgaccagccattttattttgtaggcgaggaagcagaagacctgagaatgacttcccctaagattctgaggcaatggagtggcaggaccaagtcagccaccccatcttccccttcccactatgtggttctcctcttactgccctctgtcttagccggggaatcttacagatgttgcatctggtgcttcctggtgttcatttcttccaaccaccatttgcccttgcaaataccattcggtatgaaagtattttagagcaactgagtcttcagtgtgtcactttattgccaaaagaagacacaaacgatggagtacaatggtaggagtctccggctgggttctcagggattttctcaggaattatgttttgctccaagtcgtttcagttgacgtattcattcctcagaaccggtagatgactatgacatataatacccaagcttgagctctttcctgtctaactggagtctcccttttaatcaggaaaccacatttaaagctgtgtcctgaactctgcccagcatgtcagcttggccaggaaggacagggaattcctactggtagtagccactggggactgagggagtcacgggaggtcagatgggagcttagcaagaaagacagcagcagcacagggtacattcaggctgctaggattgtctttttgtttgcgaaactccctccctggttgaggtcaggaaaaacctaggatagcaaccccctgggccggtgaccccacactaggattttgtgatctaaccatttaaaaaaaattgtttttaattgaggaggtttaacatagtgtttagctttgatcttgagaagtaaggatattaaaaacagcaatgttgagattgtcatgtaatgttacagtcctttcatgaaagaacaggcacttcagaatcagaagtaggaagaataaaatctcagaatgaaggctagtcctctattctgtacacacgtagcttcaggaaaaacttgtactgtgttatccagatatttcctatttagccacaggtcagcaaaaattctatcacagaagcagtgttggtctgtgatacttgggaaccaccagccttcactccatggttggtgcat

SEQ ID NO: 60548 - DNA, 441 bp, Homo sapiens
actgatattcctagaaaagctccttgcttgtgccaataaatatttaccgagttagtgacacctctaacagcacccccaaatcgctgggccacttccaaagggggagcagcttactttcaggaaatggattactcacttgtggaatgagaccaacacccaggctactcagtttcaacacactttaaaatgcaaaagggaactttcctgcctcaagctttcaaaccttttccagatggaccgaggcgggtgagcccattgtggtgcccaacaggcctggcttaggctggggctgcacacatctagctgtgcctcccatccctgccctgcacaccgtaccatgaagggggttacagacttccagtgggttgctgataagaggcatccctgagggcctgccctgtttccattggccagacacccccgcccccccccccaaccaga

SEQ ID NO: 60549 - DNA, 2351 bp, Homo sapiens
ctttgtggtttcagaaaaactgatcttagccaaatggttagaagttgcagagaagctgattgtggctttagtaaccccagctctcttcagtggtggaaaggctccccatggttgggagtggtgtgtggtaagaacacttacaaccagaacagagagaaccagaaaatctctgaggtcccttccatctccagaattccatgattttcaggcagattgaggtatgcatccgaagggtaacatctggagaaaaaggaagtggtgtcagatcagcttcagtttcctgaggaagaaaagagggaattgggatgttaaattatctaccagtcaggagaggttacttgctaaactatctctggcctggacttgacaacagaaagtgatgctcctgtgaagctcatacaaaggtcctatgtagtctcagggagatctttctaagctccagcgaaagctttcttgtactctagcttcctgggggatagggtggtgagtccagctttctcagcacaaatccctcatgtctgcctagaaagaagggatgcctttagaggacctgagccctgtctccatgcaggttattctgaatgtgggtgagggagtgggtgaggatggggagtgctgggttgggaagtttcaggagtgaatatcagctgaggtggggatgccctggctcccaacacaattagcttcattctgctacagttgggggttttcttatcattagtcgggaaggcctagccagagaattccagtattccagagcaagtttaattgtgggtgatttcattctgccctttttatgtcgcagccaggggcttgcgtcatataacagtgaattcagggagatttttatttgcatgtgaatcatagcttttccagctgaatgtcacttacttggaatttttgtctgattttgtttttgtttttgtctcttggtgtttttccatcgggctctttggctaaccagaaaaaaaaaaaatagaggaagggctcaatctgactgaaacagggtttgagttggcaactcaaaaggagagtattatgaatgtgaaaaaaagaaaacggatgctttattttgctttgagggagggaccgaagccaagtcaaattgagagctctaatttgggaatagtgttattacaggtcattgggagttggttacgcgctaaattgggaggccagtcacatgaggaggcagcagaggcagatcacatgggggacagttggggcccttttataatgaaattttgttttatttactacacagttgaaatgtacttatgtcattttgagaaaccaagtcaccttattggctgggagttgctccctgccctggcccatcagttgtttgataaataagccagttcttccaatctttgtgctttccggggcttgattttggcagtgggatctgtgcagtgattcatggagctgaccctgtgataggggttatacatctgcccttcccctgactgactccaaggggcttgatctcttctcctccaaaggctctacccattttagacctcaaggtcaagacatacagaaaacttctaacattatataaagaagtgatgacctttgttttttagattatcttccattttctcagcactgttcctcttaatgtcatcttgcaaaataagaaagagaaaagatggatcctgcccctccatgggcagttatgaaccaagtatttcttcttacctcaaaactgcagactttggatgttcttggcatctcggggaggaccaggaagggtggtgtgtggtcagctgctgattttccttgaagaatcaaagttggcattcttggtgtccacagccctgattagttagctgtgtttgaaataaaaacaaacaaaaaaaggcagccaaaaaacaatatctagaattcagttaattcattcccactgcaaacaagttgtgctcatgctcctaaatggggtatgttactaagccggtgacacagagcatctgggccggcgatgcttgtgatcgaggttaggaatagaaggtgtgtggaaactttctataaaaggcagccaggtcccctggacaaggggtcaggaagcttcagcactgttcacggtggcaccagggcattactgcatgatttggggcaagtgtctctgcgccttggtgtcccctaagtgccgtattgatttgggggaatgggagggtaagggcctcaagaaatgtttgagatgtaaaatgttaaatgtttgagatgtgacatgtaagataagtggagggagcgtgatgtcacaggagctcaaatcagggccacgtgtccctgaatggggctgggctgctgtcccttctcaggcatcaccctctgtggctgatgcctct

SEQ ID NO: 60550 - DNA, 1313 bp, Homo sapiens
ctaaaactacaaaaatcagctgggcgtgtggcgggcacctgtaatcccagctacttggaaggctgaagcaggagaatcgcttgaacccaggaggcagaggttgcagtaagctgagatcataccattgcactctagcctgggtgacagagcgaaactccatctcaaaaaaaaaaaaagaaaaaaaagaatcctgactttgggaaagaagggttcaaaggaacgcctttccccattccccttccttcttgtagaacagccagcttagactcagccttttggaatcctccagactgacaaggatttgaatggggctttggctgggctatcagaactctagaggaaaggcaacctgcttgacacccagatttatcttcaacttaaagaaccccactgccaagtctacacaattgtgtagaccccactgccaagtctaaaatgggtccatgacggtcatgagggtcccattgggaatcacagccctaagcccgtgacagagtagacttgaaggcttcctttggtgctggagaagtttgcttttcttcaagtcctatcattcaaagttgagtctgactttcccaaattgttccagctctgatccacaactcccaaatctagcaatggaggcggcctggtttctaggattgaagggagaattaggacaaatgaccccttatttctcaacattcccttctttgtgacacactgtttcattccagaacatgtgttcatggcacagatctggcagggttgctagtatactgaatggcagaatcaaagtccagaacggtcttgggcaatatcaagctgtggttcagagcacacatggtggcgtgagactgacctgggtttgagtcccagttccactgattactacctgtgtgaccttggagaaatagcttaacctctcttggccttgatttcatcaacttaaaaaggagtactaagtgccacccataagcggttgtgaaagtcctctctgggtttacatacagtctttttcttgaagacatccttctattctcctactcccatctgtgttagttaccctcagtctagctttcctagtctaaaatatttgcttctgcagctctagaaaattttcttgaattttcaaaataatttcctctcattaattttcttcctcgctctttaaagaatttcagattagataatagctcctctctattgatcttctaatctccttaatgtttcttctcctattttgttttacttttaatctttctgttctactcaccaggtgattcatataacttgatctttcaaacatactatgtaattttagatctctgcta

SEQ ID NO: 60551 - DNA, 911 bp, Homo sapiens
ttgctctgcccaaaaactgagccatctgtagagtagtaagagctgacaccagtgacaaggactcacggtactaggaaagcctccccatgtgcttttccctgcatcagaatgctttcatttcagtgctgaataaaaacgagatgtcatgggggaaagaggaagttagctgtgtgtatttgtcatccctgttgtgatgttctttgcagctttttcttcttctagagtctccctttggtctgatttgcataggcaagtatacactttcttttcaccgaaagtgtgtggcttcctccttgggcttgtcaggaacatcccgtccaccaaccacatctttgctttgtagcatgttctctcttcttcccccggaatgaggtggagtccaaagtctgtttaggggaatcgtcttctggtgtccagatgttctaagcactggtttttcaagcctttggtcaagaagcagagagcaagcatgcagagttgaggcttttaacctttcagattggcttttaatctattccctgaagcagtgatgacagagcatgttatttttaaccttagtgattaatattcccctctcttcctctcccttctaccccacttacacaaatctggtgttattttttttgttgtttgtttgcatgatgtcactgatcaaatactctggttttgtatgtttcaaaatgtattcttgaagtactattaatcttttcttctccaaagattcccaccacagggcttcagattactggttgtgacaccacaaaaccaactaaagaagaggaatccagggtgtaatatcatttcaccactgagccttgcttaaaatgttgacttttttaaagcaaatgcctggaattatttatacaagtggtgttagcagaacattctttgaaaattgaaagcctttagtg

SEQ ID NO: 60552 - DNA, 1130 bp, Homo sapiens
gactctgtattttgcatatgaaataactttttaaaaatccaaccaaaaaggaaagtgagaaaacgctatccacgctaaataaggaaaaatcatagcagaatactgaatcatctaccaggtggccaaaattccgacttcagaactcaaaggactagttttcgtcattaaaaacaaacaaacaaaaaaaaaaaacactcggcccttgtctctacctcacgtagtcagattgtccttcctccaaaggaggtctcatcatgtgaaacttattctacccctcctggccctgagttcttccttcaaaccaaaaaatctgaagccttcgtaaaaatgaaaacgaaatttttaaaagggaaaatgggagaaaaaaggaagaaaggccaagacaaagataccaagaacctgtgagtgtcctcctcaccacattcagatgagcttctgaccagaatctagaactccttccttggccaccaaagcctggaagtagaaaggcacaagcccagaattctccttcctgccacttctccccttaggaaatttaagaattctggggagaagagaaacattttctgagatctgcactgctggctcagatgcccctccccctacatacaggcacagctctctttctcaggaaatgactgttctgcaggcccctatcaccctcaactggttaaactacgtcagccctgcttcccggagtctccccacaggcttggtacaaacctcccctgtgtcgctggaaaagcagatctcttccatcttgtggccactggaggtaaaacattttgacttcaacatccgtgaatgactacagctgactcttcttggaaagaatgtgctggttcctgaaaccctgccggctgctgtataacctcccggacctgaggcgtgtcagagaggatgcgttcttcagtgctgaggtcacccaacccaacggcagcgccggcatctgcacgtgatgctaagggctctggcagcctccctgcccggacccaggagaagcatggacctgccctggcccttatgcagccgactttgcagggagggcctgtgaagtgaaggcagtctgtgtcctaggtccagaacacttgcaaacatcatctccgaccttatatccctcgccccacagg

SEQ ID NO: 60553 - DNA, 2291 bp, Homo sapiens
gtggctcccagacactgcctcctgctcacaagaggcgacattggaacctggggagatagaggggttccaggtggtagaggggagattgtggtgagaatgtgcacagcactgtcggtcagtgggagccgagcccctactgcctgcagagtgggtgtctcagcccttgattctagaggccctcgaggctgagtgtgttgacagttacctgcagttgctgtggcaggtggctgagccccggctctggagtcagagagggtcttgtcccagctttgtgttagttggctaactttgatgagtgacttcacctctctgaaccccacttgggcttgttgggcagattaaggagcccgcacacctaaagccccccacgtggtctcacactaagaggtgcgtgctgggccctggctttcctctcccactctagatgcatgccaggccctgctctaggcacagggggcagagccatgttctgctccaatgaggtgagcactcagcggggtcaggggagggggacagtagaaagtgaatacaaatatcaaatatgacagctgtgggcgaaggctatgaagaaaaataaagcaggggaaagggatagtgtgggggcatggctcatacaaggaacaaagtcctttccaaggagatgatagagccagaaatgtgaaggcagggagagccatggaaaccaccccagggaacagcggtgcaaaggccgtgaggtaggagggggcctggggcagagcagaggaaggagagagctgtatgagggtacagagataacaagggcctggatcatgcggggccttatgggccagggcaggaggttggctgttactttgatgggaggccgctggagggttctgagcagaggaggcacagactgtgacatgaccagctatttttagtctccgttttgttccaggttcccaagttcacagtggactgtgtttaacagaccttagaggttggttgagcctgagtggagccccttccatgccagcgctgacagtccccaagtcctcccagggaggtacaccagacctttctcctgaaggtggaaccaggtggcaccctgcttatctcctccttgtcaccaacataaccctttatcgcctgcagaattccagcttcccgtgaccgaacctgacatcaacaacaggctggagtcgttgtgcctcagtatgaccgaacacgccctgggaggtgagtgtgttcttcctgcatgtccccatgtccctgttaccgtgtgcctgggagaactggccatctgctgtctataccgtggcaggagctcaggagaattgggggaggacaaggaggggtaggcaggggacagggagaaagagtggccttagggtactgttggaccattttccagcggcaccatgccaagtggccagtgccctgtttctcctccttttctgggaggtgagtcagggacctggcaatcaaagctgtccctctgtccccagaagctccacctcccagtgcacatgggaatcacaccacagcagttgtcccagccaagtgccaggcctggaggagtcagggacatgagacatggcttttagtaggaatatcccgcacaacactggatgcttcccttctctgcactagatcccccagcctggtccaagcatagcccagcttgccttagaaatataatttttgaaaaacagaaaacccagcttgtttgtgtatctcccagttgcaaacaactttcttgacacctggagcccaaagcaggctgaggtgtcctttcctgtgtgacagggacaggttgagttagaggcgcctgcacgtccactgcccaagcccagaatgggggctgtgctgtgcagggctgtggccccacaagcagctcacagaagcatctgtgctcccccgtgtgtttggctggaagccatgcttggtcacagcagccctgggaggccttcagctccctcctggtactaagcgggcacctttctctgggcctggatatttatgatgcttggcaggcagaggagagaagagatgtctgccatttcctgccagcttcctgggaggctctgtgccacagagacacagagaggcctcctgtgagcctttccaatagccctatccagtctacacttgctcttagccaaaaggccgagaagcgatagccctatccagtctagacacacttacccacccagagaagggctgtctgcacacctagagccaagacgtgcgccacctggcagtggtggggaaaagactgccatcctctgctgcttcagagagccttgtcctccagacctaaggttgtt

SEQ ID NO: 60554 - DNA, 1081 bp, Homo sapiens
aaaaaaaagagtctttttaaaatgtgaaggggctgagggtgagtggtgtggttatagtaaggcaacgcgatagatcctgtggtattggaactgtcagcatcttgactatggtgggggatacatagacctgtacgttgcaaagaaattaatcacacatgcaagtgagtacaagcaaaactggacaaatcagaatgagattggtgtattatatcaatgtcaatatcctggctgtgatattgcaccatcgtttggctaaatgttcgcactgggaaaaacccagcaaagtacagaagtgaactctgtgtagtatttcttctaactgtagtatttcttcatacagttatctcaataaaagtttccgtgtaaaactgtgaatctgccaagataagtgaggtgcaaagttacccctgggtgagagaaaaaattaatttgtgtgctacaaaattttaggtgtaagacagttacaatatgaggacagttgcacagcacagggccagggtgggggttgtaaatagcccacctgagtctgtcctttgttacttagggaggggaagacagaaagacgggtgacttttttgtcccaataaatctatacctaaaagcctatcctttggaaatagagatgtccactgcagtgttatttataataagaaaaaactggaaacaacatgacagcccatcattatgaaaataatcaatacatgtgacatttataccatggaacatcatgtagccatttaaacaaagatacaagataagggagggaatgactgtgaggactttagagtatccaaagtattacacatagttacacagaataaggagggacaaatggaagaaaacacatcaaagtgaactctaggaagaaatgtaaggcaatctgggaaaaggtaaatgcagaatatgatatgatatcaagtaatggttgtaactttgggggggatgtgataatgtgcggggattttatttaagtccttaccccttatccattagtgatacatagtgaaataaataccgatgaaatgatagactgtctggatggatttgctttaaatattccagaagcatccagatattattt

SEQ ID NO: 60555 - DNA, 3698 bp, Homo sapiens
aaagaacaccagaataaacataatggattttacattctgatagttacacaaactcctcaccagtttagagttacaccttctaccattaggaagtacataaagtcagcctacatgcaggagacaaagattttcattctgccatgaaagtaaagaatttcattaaatatctctgatgatagcagctgcctggcttacttgggagcagaggtgaaggtaaatgtttccttaattattttgtgatgtttgaattttgtgctaaccacagaattaccagtttttatttattttttttaatttgagcatttaagacagtgtgattacatggaactacaaggtgaccatctcacactcctataatcactcccagcagcacctttgagttcaaagggcaaaggtgatagtatacatcttcaaatatgtgggggcacagagtgacagagggcacctggaaaagattaaccagctacaatgggagccagaggtaacctaaggggctgggcccactggttaacagaaaggtcaacagaagcagagtccagggagcaacatcacctctttaacccagtgtgggtgacgcacatcatttgaccctccctgacacccaactcacttataaaatggaaatactcaattagctgggcactgtagcatgtgtctatagtcccagctacttggggggctgaggcaggaggatcgcttgagccagggaggtagaggttgcagtgagctgtgttcatgccactgcactccaggctgagcaacaacagagcaagatactgcctcaaaaaaaaaaaaaaaaaaaaaaaaaaaaaaagaaagaaagaaaaaatatatattcttccttataacaagtcttccagattcggtgttgggtacacacacacacatacatacacacacacacagaaaatctggaagatttgttttccatcccccaaacactaaaatgcaggaaacaaattatgagttctcagagctcagggtttcatgttgattttaatgtcctgttttgtgtgtgttctagttaaaaagacaatgagaattcattgttggcttgtctatacttcaagtgcacgtgatactttttattcataattattttttaaatatattaaatttatatggaaattctgttagagtcaagtgctgactccaccaaccccttcattaagaggtgattctgacaactgttaagcaagagaaggtcagctaagatttggataagacttcaaatactccttgatcacatgcaaatcaactttcagaaatgagacttcaggcaagaaattttgctctgagattagttgtcttgggccgggcacagtggctcagcactttgagctgagtgtagtcttagcactttgggaggccaaggcgggtggatcacttgaggtcaggagttcgagaccagcctgaccaacagggtgaaaccctgtctctactaaaaatacaaaaattagctgggcgtggtggagggcatctttaatccactactcgggaggctgaggcaggagaattgcttgaaccaggaggtgaaggttgcagtgagccaagatcatgccaccgtactccagcctgggcgacagagcgagactctgtctccaaaaaaaaaaaaagagagagcaaaagaaagattagttgtctctaattggttaaaggtacttgaaagttcaaaggtacaaactgaaacagtcaggttgcttcctctctctggttagacttgttcaatctgcaaatggaaattcctttaaaatttcccaaattgagaggagcggaagccactgtgtgggcccacaagagactgtcatctgtccagatacagacgtcaaaggccgttcttcccaagcaatcaggaacgcagttgaggctggcagcagtgaagccaaagagagacagagaccaaaacccacctccagccaaaactggttgagcagctgctaggagaccaatgaccagatgaccaatacggaccaataattctgaggtccctgatagaaccagaatggttttaagctgatttttatttactagcttttttttttaattcggtttatcccccttggttttagaagtaaaatgtccttgcaaagagaaaagtttccataaagaattttgtcagtctagatagaatgactgtaaaaattatcactacacatataatgggaaactccacaaaaaaacaaattagaaaaaaagaaatctcatttatttgttcagtacatttttgaatgtgaaaggatccaggaaaaggaggaagaataaaaaatgcattctaaaatcagggaaaatcaatagcctgagaggaagttgtacatacacacacccaggcatttcatcacaggactccctccacacaaccttcccaatgctcaccggcagccaaaccacatttctctgggcagcacagtcagttccagattgaaaggatttctcaaaaggtcagagttgtggacatattgctcaaaacaaacaggagaatgtagaaataagaggaaaagtggataggtgcattagggctgtgtaatgcaggtgccaggagttatcctaccaggacccacaagcaagtcatagctgcactgctagggagggaataaagggagctgcttaaatgcaagacgcagtgtgtcttccttcaccaccctttgtcggccagagcctgatattcatactcaggatgtcatgaaaatgtaattgatgaggtcgaggagccggggggaagaaacccaagtactcctactgtccaacccaatggaattccccatgggtaggccctcaaagtgatgccaattactgtgagattcattgttttcacttctgtaataacctttccaccttaaccaaaatcttggcagccaaggaatccaccaagctgaagccaaaggcagcatgttttaaaatggaagccttgcccaaaaaggacacactcagaaaaaagcaatgaattctattctgtacctggggaatggctctaagttacaaagccaaggagagctatgttccagttaaaagccagacagaaccagaccaagctaggctgcccaggagtaggggtttagggacgtggagaagtgttgtggcaaagaacccttcttttccctgtttagctggagtttgacctcatttggacagccacagacattccagcaaccagacagttcctggaataaacacggggcttctccaaaacaagtgaccagataaattttaaggaaaacagaggagggagtggaaagagaacatataagattcttaagagacttaaatcaacctgttgcaatgtgtggatctcgtttgtaccttgattcaaataaactactaaaaactacacaacagtaggggaaaatctagatatttgaattgacactaatttttagtgtgataatggatgtatttgatcatatatttctttacctgattccactttatttagataatctgaaatatttatggatgaaataatgcctgggatttgctttgcaataatctggtcagatgggtatagaggaaaacaagatggcgccattgagttgagacttcttgaagctgggtgattagtacacaggggttcatgtgctcatctctctactgatgtgcatgtttcattttctgtaacaaaaattaaaagaaggcaagggcctctgggagggtgaggagtcaggtactcacacttccccttgatctcttgagacttcttcttc

SEQ ID NO: 60556 - DNA, 528 bp, Homo sapiens
tagttgatccttaaagcatccaaaaaggggaaaaatggaattttcttctggggtgaaagtaatataaaaggtctacagagttacttaacttctagatcaaaagaaagtcagaattctcacttgctctgccttcaggaccaagacagcactatgctagcctaggtgttcagataaatgctcaagtatactgatgtcaccaggcagaattcagataatggtgaccagagatcctgtctgagcaacctggtgacattagataccagacatagaacagagttcacaccacgtcacagaacacatatgaactttgtccacacaacagctgcaattctcttaactcatcctaacttaaagaaatgtaccaattcttggctttattttttaaatgtgtgacaaaatattagaaaaactcggcttggagcaacagagagctaaagaagaaatcaagagaagacataaaatcaagagaagacataaaaatggctattggcgtggtggctcacgccagtaatctcagtattttgggag

SEQ ID NO: 60557 - DNA, 1190 bp, Homo sapiens
aaacaaacattaaaaaaacaggttacctttgcatggaggggctataggaggagggcaaggaggagtacacaggaagacccagccagcttcacgcagtgctgcaaactctttcaaaatcctccctaaatcacatcctgcaactcaaagtcttctgccctgaagatggcattaagatgttttgctttctaccacctgtttgaaaaatttgtcctacaagtaagagcatgttaaaacaaattcaaagaggaaaaaaaaatcgctctctctgctttcactttcatcatgagtacacctcttgttagagcttccgacactcacagctttttgtacttaccaagacagaatttggaaaacttggccaaaataagcatgaacccaaacattccacagactgacacaatggcggaaactaagacgactacagacaaccagtcacaccatctgctggagtgcacagagctgccgcacagctttgatatgctccacaaacttatttcataaactgtaggtttgtcagcaggaaagacctaatgtattgcaaaaaaagtaaaagtttggttattttggaaattttcactccatctttggcagagacaaattcatatgttgctcttagctattaaaatatagccaaagctattgaaatagatgttctcagctgccctcaaaatagtactgacatgcatgtttccttcagccaacccagtactgatgagctattctcatcctctcagccagccttgtcacaaacactacgtttcttggtaagagttcaagttttcacgtataaagttatctttactaacattttgctcctcattacaacagtaatattcatggaagtttatcggtaagatgtagaaataatcaaatgagaaagtgaaagcacataaaatccctccaccctgatgcaattactttactgcctcttaggggaaccgcacgcacagtggttcaagatgtagaatggtaaagtagaaggaatgaataaaagagtccagagctcaagggtgttggacattgatgccaaattacaagttatccttctgccccactgctcagcttctgagatgtgcatggcagtggccagggcctctctgtactgaggtaaggggaaagtacttattttaaactgtttagatttattgctggataaaactgaaggctgccaatcatgtatactattaact

SEQ ID NO: 60558 - DNA, 3231 bp, Homo sapiens
cctcagcctcccgagtagctgggactacaggcgcccgccatcacacccggctaatttttttgtatctttagtagagacggggtttcgccatgttgaccgggctggtcttgaactcctgacctcaggtgatccgcccacctcggcctcccaaagtgctgggattacaggcgtgagcaccgagctcggccaaccagaacagttttctaatgtggaatgatgtgttctttgcagttattaatcctctttaaatgaatcttcgctcatgagatatttcagctaaccatttctcaagtaaatctgtgagtcactttagataattctgtgacctgtctcagggtcagaaattcctctctctttgggtaattagatccatgctagattacagaacactgtcctatgaattctctttaagggaggattcccaaagcctggccgatgctgtgaagtaaaccactttctgtgtctgcaaggggcaaaatgagtaaggccttaagaagacatttcattacattgtgaaatatctcacacacacacacacacacacacacacacacacacacacacacaaatttaaagccctagacctccaaagagctgatcccacagaaaactgaaagtttatttttcagtctttgtattttgaaatctcttctgagattccaaacttttgcaattgaggggtaaaaaaaagtgaatttggaaacagaactagaagtcactgccggttttagagtgtagcatcatttccttttggggccccgtctctttcacattctgatttcccacccttcctttggggtgtggaagactgggcaaaaaataactttctttttcccagggtctatttggtggaatcgctctacactccttcagagaaataactggggcagggagattgcctttccagcgcactgtttttctttcaaaaaacagtgaacggtagaatgcttcttagggcaaataaataaatgtcaccaagacacacggaaggtgtagactggaaaataatgtctttggtcccagctgtagaagccagaagctttatttttttaaacacagaccaatactgcttctctggccaacaggcagcaaagtccccattttccactctccatcaccccatcttgcatcctacccacactgattgcatccccaccctctgggtgaaaagccgacacgcctcagacgctaacagcaccgggtcaacccggctttattttagggtgggagggtgcggggatgagactgagtcctggaacccacggagccctccgaatcccggagtagctttactgctttttgcggggttgggggtggggggaggaaacagatttcagcagcaaactcacccaatcaacctcacacctcaaactccggggaagcccgtgcccaaaattgtgccgaattttgtaaatgtcctgaactggagtaaacttgaggtggacaaaaaaaaaagcacaactctaagactccgatcccctggcaaatcagtgggaatgcaggtccccgaggtttcggggaaggatcgcgccgaggcttcaatccagatacacaccctgacaatgggatctcaataaggaactacccaggaagccgtcgccgcagcaagtgcccaggtgatccttatcgtgggcaagtttggaaccgcaggtaccccgagaatcccgcgctgggcgctcaggcgagagggctccgggctcccgtccacgcccacccggggcgttctaggagggctgcgcgctgggagcgggaagggcccctggaaggcggctgcagcgagttccggggctgagaggtcgctgccacccaggaagccccgactgtgccccacgcagggcctcggcagggcggcaggctagggcgggttcggaggtgacagcgcccggcttcctgcgccaaaagtgaggcaactccggaaacttcctggagccggcgcgcgtttcctgcaagcaccgcccccgccgcccgcacgctctagcagcccgcgggcgcactgacctgagatggtctcctggtagcccttggtgaagaactgcatggccgaggccgccctccagggcgtcttgagcagcccttgccgctgggggttctcgcccagcgagctcaggatggacgagtaggcggctgccaggttagggaggttcagctcgttatcctcctcgctgcggggccgctcgcccttccagccgtccgcgggctgcgcgctcttggcctcgggccgcgggggcttctccgccggcctgctgggcccgggccgcggcggatcccgctcggggaacccattgctgcacctggcgccccgcggcttctccgccggtgcccgcacagggcccttctccatggacccgccgcagccgctgccgttcgggaaggaccccggggcgcttcgaggtctgcggctaaactccgccggtggccgcggacaatgggctgtggccggagtcacctgaggaaggtacgcaacctgcttagatcacactccgagccgggagcggccacaggctggaaagcccggccgcgcctcctttttatggcccggcggctcagcctgcgccgcggagcgctcccattggccggccccgcctcgcgtcacggccctcgccgcgcccctcggcctcccgcccccggggtccccagcaggggtcgcggctccggagacgcccggaggggttcgcaagcgcagggagggaaggaaaagggcgccggcccctaggatcaggcgggacccctccacttattgcggaatgagccgaacccgaaaagaggcagtcgtccaggagctgggatctcagtgagaaagacgcggtctgggcgcccagtcgccccctcttcaggccaagagggcgctgcattgaagggctccggtcccctcgccctgtgaaagatcagcaaacaggtggccttgcctggagagagaccgagttaagccaccgattaggaaccaactcttaagctttcaaggcaagagaataatgtgacttcagactcttgggtttagttaaaaacgcacctgccacctaggggccaggtggcaccgctgtcggggcaagtgtcacatcaagtggcccttatgtgggtccctatgtctagaaggataggatttatggttgctagaactttgatcctggaaaaattgatttgcaaacgaagataggactttcacttaaaatccatttccgtcggtggctcacgcctgtactcccggcgcttggggagaccgaggcgggagga

SEQ ID NO: 60559 - DNA, 1603 bp, Homo sapiens
ggcagtaactagtgatctgacaaaattaataatgtaagatgcagggaaggggaaaatatatggagagaagctcgcatctttccaactcctctggaagtacgattataactttgtcgatatactacaactaccatgacggcccgaatcaaacaataatctaaagaaatatgtgtgccattttagatttcaacattattcctctatccgcatgagtcatttttagctgactgcacatataaagtttaaggataaatgttttaacatttgcacctaaaacgttgtttctcaaagaaccttacctcccagaatcatcaaaacagacctccgtgtgtccctctgtatgcccatatctcattggcttccgtgtggcaggcatgttttcctttacctatctgaaaatgttttataaaagccagtcttattatttcaaaagagaaaagcagcgaggctagggataggaagagagcttagtctcctctagggcccgttctccgcagcccggtttcccccacccgagtgacaccagcgggataaggcagagggtctgtcagacaataagccggaaagggaacacgcatctccttggtggacgcgggcagccggagtggggactcacccgggtgaccgagcctccgccactgaggatccacaagagctgcttcccgcgcttcggctcgctcaccacactgcgcctgcgccgacccgcccacgcccagcgcaggtcccgacagaggtcgccgggtggtggcgtcagctgcggcgccctccgcgtggaaattagccggttgcccgggcaaatcagggaggaagggagggagctgaacacggaagtggtggcggcgcccagggaaccggcggaggcgatgaccgtgacggctgggttgggaccggaacgccgaagcggggttgggggtggcagaaaagcatctgctttgtaagacctacacgaggtgcaggagtggttgggcctcccctctccacttaagcaagcgcccagactgatggcgatggtgatggcagcagttactcgcacaaccccagttaagctgcgctccgggaggtgagtgggggaagggtggccgctgcctggcctcgcaggccggggtcttgttcctgccctccaggctctcctcccaggaaacaatatccggatccctaaaaggatccggtctctttcttggggcccagttagcagacagatctttgagcatcttctctggaaaagaaggcgagatcttctagagcctctaatcttggcatccttcgtgccctcaccttgtcgcttctgtagagataaagaaggaatgacttaatttctgttccggttggttctcttggtacctgaaggtataattaattaatgctcaattaatgcttattctttgcgactctatatatccgttatgaagaaagtaacttgtgttctctattcagatcccacctaaagtttactgaagtgaatatttataaccaaaagaagagttataacttagtagccttgagcacttacatttgatccatgcaatatctgctaaagtcttggccactaagtttaagtttatgcttttcttgtatcttcattctccatattggtacagcagcc

SEQ ID NO: 60560 - DNA, 2324 bp, Homo sapiens
cacaccatataattatcacgacatctttattgctagttagtaggttccttgactggggtcatgtcatctgtgcctgacacaggaggtaatgtttattcagaaatgaagatggcggctgggcacggtggctcacacctgtaataccagctctttgggaggccgaagcgggcagatcgcttgaggctagcagggtgagaccccatctctatcaaaaacacaaaaataagccggatgtggtggcacatgcctgcagtctcagctactcggaggctaagatgggaggattgcttgagaccagcaggcagaggttgcagtgagccgagatcgcgccactgcactccagcgtgtgtgacagaggccctgtctcaaaaacaacaaaaaagaacatgggagaagaggcattgatgaggaaaaatctacaaagaaagcaaatatcaatttgtcaagctatttgcaaacgtcttccctttcctgtattaatattttccctctccccacttttggcccgaggatctgagtcctcgggtcaggccgaaatcagaccgcgtccatacccagcctccttcgaggcctagctgtaaaaaccgctgagcaaaaggaatccagaatcagccctcaagcaactcaagacaagttagcaatttccgccgggaagccgtgaacatcggcagccactggcgtttcctccgagtcctcggaactccggaaactctgggagcttttagcccgcccaccaggggaaagcggcccggagccggcgccaggtggagcccatccccctaggcctggcgggccgcagtaccgccaggggcctgcgggaggcgcacgcggcgcggcctgaggggagggggagaacgggcggaggcggtgcgctcggcgcttcctgttccggcgccaggaggagccgcgcgctgctggtgctgttgccgccgctgctctagctgccgtcagtcaggctgcgcccgcgtcttcagggcccagtccctcggacccatcgccgcttctagaccctactgcggtctcggatattgccgggtgaggctgcttcggtactagtgggagtcgtgaaggggaatcggggagctggggttgcggagcccgcgggcgcggccaagcgggaagcgggcgcggtgaccgaggtgcatcgagtcacgtccagtgctcgggccgtggtcgcctgcctggcaccaggactaagcgtttctatcggtcgccttcctccacgctgcgggctgcctggggatcgccccccagggagaaggtgtcggaggccgctgacgtcgcgcccgacgggtttctgggcgcctgacgtcaggtctggctgcggggcggggcgggcgcgggccggcccctcccccaccccttcccggcgggcgcgacccgctaggaggccggttcgctccggttgatcccggactccctttgttcgtgcgtccctaaacggctgccggcctcgcgccccttggccccgatttcccctctacccccaccctattacactcattcattaatttttaataaaaagggaaaggcctgaaaagattcttacaagagtctcgggcgcttgttaatccgcagtgtgacaacgttctggttatgacttactagaggaattgctcacggatacattagatgaatacccagggcaaaccacgagaagggcagaattcagtgatctccttttttaggactgaggagcacatacctgcgatagcgtatgcatagctggaccgttttcctctttaccttgaaaagcaagagtacagcttttaataggtaaagattccagtgttaaagcatgaagccaggctcactcgaccgcaagaattttttttagttttactactagagaaatacacacctgggggttgtaaaggtctgtttcgaaaaggaaccctcattacaggcaaaggtagccttcagaaacatttcataagttctttgttcactggtgttctttgggggaagaatagaaatttttcatgctggcatctctgagcccacaatgcaaagcgagtttgcttcagaaacttggagtgaattgcaaatattggaatgttcttttcctcactccaggcggaatgggtaaaatccatccccagtctcttaactgaaacttttgaagctagtgtgttttgaattcaaaaatacttggattttatcttcatctttttagaaagtcatgttagacgagagataacacccccagcagagtggggcaccccataatccaacattaatatttgcagcaatagatgtgaacattcattctaagtgggggcgaatagaaactataaatagcttcaggtcacattttgccacca

SEQ ID NO: 60561 - DNA, 1364 bp, Homo sapiens
ctttttctcaaagcaacaggaagccaggtggccagctctaaaaccaatcccaccacataacgtttttcctaacctctgacttacacctccgggttatgcctggttaaccttctcgttttcctcctggggccaagagtgagctgctgaggagtgaaacagacaaagattcacgttcctctccggccgcctatggggagcagtttccaaactcccatcccggatcacgcaggggcggggcagtgctagcctggggagcacctggccgacatgactgaagaggccctgccccagaaaggcctcaaaaacactcgttaaagctagggctgagtcatctgggtgtggaggctgtcgggtcacattcttgaaacataacaggcaaacaggacaggcagagaacatctagactgtggattctgtaaagctttttcaaggccagttcacagaagcattccctactctgtgagcgtgaaatataaaggtgaatgcagccccagtgccagcacataaggccagtcagtgctatacagggtcagcttagccctgggctgacccttaagatcaggaaaaagttatggggcagtgacttctcagcaagtcttttccatgtttctggtgtcttcgaattcctagctgaacagaatttatcaaagcagaaggtagctgtttataccccagtttacccaggcaaagagaaatgctttggaattgagatattttcagggcatgagtggtttagatctctgaaactggaagacgaaaatccaggttattagagatcagcagcacctgagaggcaggcttcctggcacctgaagactcacagacaagccttggtagcctggcttgttttccttgcagttcaaaaccatttctttgaggtcatgatctgaaaggggacactggaccctgagacctaaattctggtccctatgagtaaatgcttcagacagatcaagttggggagcttccactgaaaaacactgagactaacaccctggtgtgacagccacacctgtctccaaagtgtacacaccaccccaccaggacatcaccaacctgacatttaattagcaatgagacacttgttttcactcctgtggtcaaagaatggggaaatagatgctttctgtctccttgcctttggttatttttctcctacttcctgagctgggctgggagcaacagaaaagagaaggaaggagaaacccagcaaggcaagagcagctccttcccttctttgacacatttatgttctgctcctatagtggtggaagcaggaagtagggtgactggcctgctccactcacattctgatcattttctctacaaggcaaggatggctagcacctccagttgtgtggaat

SEQ ID NO: 60562 - DNA, 1226 bp, Homo sapiens
ggggagagggcgcccgggcgctgcttggggcgcggtccggagagggttcggctccccgggaccgggccggggcgcgcgcggagagccccacagcctgtgctctgccctccaggagcggggcggcgggcagcgatctgggcccggggcagtcgcctttgattatcgagggcgctggcgttcggggaaggttggcagcaccttacgagacccacacacgtccccggggcggcacgggccaccttctgcggagcctcgtgggcttcgccgccgtcgcacctccgccgcctgcgctctgcggccccagagtaagccccatccggtgacgagccgcagtctggtcaccccagtcccaccaggtcccgctgcgaggggaggcggaggggctcgctcagcaaaccagacggccgctccagtttctctaattggggttggagccccgtcacccttccccagatcacggccgcgggggagcgaagggacttcccaggactgcatagggcgcctcccgggacccacagcttggctggcccggccccttttgagcatcagctgaggctggacttggaggagatctcgctgtggagcgcgaatgagttcttccaccgggaccagctgcggccgggctgcagccgctgtctggttgctgatcccacagaaaatggtgcttgccccatggcctgagtgggcatgacccggctttgcaaagactgcaaactctaagcttttccgaatcaaatgcccctccctgcccagactgtctgtgcccaggaaatggtgggtgtggcaaaatgttggtcctagcgtgcagagccctaccggggggctttcacaacatgtttgagagtttattctgaattatcgggtgctcaaatagaaacactaaaacgattgccctctgagcagtaggcgttcaggtccagggagtcggggacgcatggtggaggctgggacttaggtttcagccttacccttcaagttcgccatgcgggttccagagactgcggaatgtttgtaaagtgactctgggaattgggttgctgcgcaatgaggacacctggacctcagtgactcaggctgtctctaggattctggggaagaaatgggagaaggctcagttaattctgaagaaaatgagactgatacaattaactacttgggcacagggcctgagaagaaaaagctttcgtcagcttccaaagttctgatttgtttacctaaggtttttt

SEQ ID NO: 60563 - DNA, 1633 bp, Homo sapiens
caacgtttatctactttctgaccggtatccctgccatgattttcataggaaagagagtcagaagggacctttccaattttgtcattttacaaattgaaactctgaaccccagccttccaagctagcagcagaaccagtatgaggatccaggtctactaggttatctaatagtatctgagaccatttacagcttcaggtccacccacgaatattcataaacttgacatgtctgctgattgaaccctggcgtcactacccttcttggctggcctgggaggtttgattcctttccctacagtcgtgctcaaactttcattctctaccacttgggggccgcagacgcgtcatccaggtctcccttttcacttcccccttcccgcccccagtgtccggcagggggcgccgtgaaactctggatccgtggcccctcccccggccaaccgtcgattgggccggcgcgtgacgtcactccgttttagccaaacaaatgggtttcggggcgagcgttgggcgccgccgcgccgcgctgggtgctcggtccgactcagcggtggggagtgagccaggcctcccgccaccgctgctgccgccaccactgcgtcgggctggtgcagccccgggccaggccgcggccggggcaggagcgcaggtgggtccgggccgaggtggggcgtggcgcgagggccgcgcgactggggtccggcggcggccaccgtggccgctccccgccccctaccgccgcctgcctgcgctcccggggcgcggggcgggtgggggtgggggcgggggcgccgcccgcgggtccggggtagggacccggccgcctgcgcctcctccggtgcggctctttccgcgcgcacggcccgggcgctgagcgtccccgcgggccacggagggtcgggcgggtagggagcggggtcctgggtccccgctgaagccgaggagattcacggataggccgtgagcttgcaccggaccggcgctcccacttacgggacccagggcggtgaggaagtcagcctctggactggggtcgcctcgcccctgtcgcgccctcccgggctcggccactctgcccttccctgccccagcgcaggtgagctggcgcttgtccttaaccttcttcaacgacgaggcgggacggaggctcggacgcctccccagcctctgggctggcgcaagtcgactgcggttcgtcctcagtccacgatgaagtcatagggctgtgggtccgtgtgtctgtgacgtcagaagatgggtcctgggatgtcactgcaggcccgggcggggacctgggctcacggaagggccggggggacccgcagggtagaaaaaggaagttgtcttccacgaacgcttggaatcgcagtggatttgaatcgaaagttgttcggtatcagcattttgcaattttaatgtaatagttgtcaatttctttaacttcttgtccagcaagcgttgcgagtacagctcagtataagacatttgatttagaaaaacttaagtcagggtaggaggttttttggagggtgtaatgtaaaaagccttttaggaagctaaattcgtagtttgatagtttgcaatcagaattactgaaaaaaaagagaaccacttctagtgttgataaatcagt

SEQ ID NO: 60564 - DNA, 593 bp, Homo sapiens
gtatttatatcagtggcctttggtaggtcttgagtgagaaagtatctagggaggagacttgaatgttaatttccttttctataagtatgtccataattaattgtgaaactctgctctcttcagtagaaagttttaggtacaaggcatgtggccagggatgtcatgcccagtgtaatgggtttgattgggatcaagaacaagtctgtcagagtgagccaggcagtattatctgagccacttggtcaggacaggttatggaacagttagaacagatgagtcatgtcatgtgtaccataccacagtctactttttcttggcctctctccccatgcctactcttctggtgtctgtctggcagatagtacaattcagcagataggcattagatcagttctaagcatataggaagaatgataattggattaccagcaaggcagagtggcagatcagaggccatagggaactgggaccaaataaggagactctccaaaagatgcaaatgtagctctagcagcaaggaaaggcaaactggttgcaaagttacatgtgtaaagtcgattgagaacaaaaataaagcagcagtcctggctcct

SEQ ID NO: 60565 - DNA, 1213 bp, Homo sapiens
tgagagcaatgtaacagagcaaatgggcctaaatagacccaacataaatgaaattaaagtctgacctgtgtgaacctgataacgtaatatcaaaacaataaatgcccaacttgaatgtcacctctccagagagggctctcctgacaaccctacggaagagtcatcccttcctctgtaccccatcctgccccaggatgctcccctagttccttccatggcacccactcaatgtacagcatctcgatcatttacttgcttcctacctttctcccctgagaagggcaaagggccacctctgtcttggtcacctttgtatctccagcacccagcaatgtgcatgacacaaagcatgagctcactaaatatttactgagtgacgaaatgaacaaagaatctttctccaccaaagagaaactgcaggggttttaaagggttttcccattggggcctttcagtctccatttaggactactaaaacacattacaaagttatacactataaatatgggtctaaacgggttaaatatacttctttaaataacgtcctcttacataaacaagacaatattaacccccaaaaggtgagacatctaaaaaatgttttcagtccatcaagtgatgaatgaataaataaaatgtgtcttatccatatgatggaatattactcaaccataaaaacgaatgaaacactaatatatactatcatgtggatgaatcttgaaaacattacgctaagtgaaagaagtctgacacaaaaagctatatgttctgtgattccatttatataagctgcccagaacaggcaaatctatagacacagaaagcaatgtgtggttgccaggagctgaggggaagggagagtggggaaatgtgacactttcatgccatggggtttctgtctggggtgatcaaaatgttttgaaatgacatggaggtgatgggagcacagtgctgtgaatgtactaaatgcccctgaatggttcacttgaaagctcttcattttgttatgtcaattttacctataactctctctatatatagatttcaaaggatatgctgcttctcaccaggcccctgggttgttttcttctcctccacccagctgtagtaggcagagtagtccccattgttagggaggctaatccaaggccctgtaatgctaatgctggtgtctccgttgtgatcgtcacagacccatcgtcctgagaggtaa

SEQ ID NO: 60566 - DNA, 1981 bp, Homo sapiens
ttgcgaatgaattaatacctgaatttttgtgctcagaatgctagctatcttactatcattgactatcattgacactaaattgttgaaacataagttgagagtgggagatcctgcagctaatcacactaatttttcaattttcttaaccaagaacttgtagctgtttagatttcgaaatgaaaccaaaacattttcctaaaggcaattctcttaactaaaagcatgcagctcccaatctgaattttaaaacaaggccaaaacacgttcccaaattcctaagaatctaaaataatctttagaggcagggaggggaaaggggcgttaacagcaagcctcaattcacacattagagtaagcatgtctgataacaaagtccatctgtgacagactaccaggcccaaatccctctaaagcagttatttgattctcttctactctctcctctagagaatgagtataaatatgctttcgaaaatagaaagccaagcttttgaatgggagtacatacagcaaagagctgggaatctaacttaatggcagcaacgggaaaacttctccagagagtcaccacttattccttttttccccagtgaccaagagcaccgtggggtcaaactcctcttgggtgggtgatggggaaacggcgaccttccctcatctggcccctacgctgtcctctggtagcaaagctccggtgcagagcagctagctacactccctctctctcgctcctctcgctggtatctggtgcccggacggggagccccaggttccagccttcggctgcctggctggaggacacacagcagaagaaacaatagggccgtggcggccgccgtacctctcccggtcgcggccgtcgaagtagacgaaatcgccgctctgaacgcatttggcgcaggtcagccgccggcgggtagtgttgcacagcgggcagcgctccacagccacgtacagcccctccgcatcgtccacggagtccaccaggtcccgggcgagcggccggggcccgcagccaggagcctccagcgcccgggctcccttcccactgggagacgccatgatggcctgagaggagagccagtcacgtgggattttgttttcaaccgggtgcattctgggccaggaggaggggcctggggaaggggggctgggatgccggcgagcccccggacccctccgccgccgcgtgttcctgtcccgggcactgttgtttttccggtctgctgaggggcaacaggtcccgaagcagggggagagttatattagaggggctagtcggccaaacaaaatgtcatctgctggctcaggccaagactacgagttaaagcctcaaacttgtgcagaaaattgtaataccataccctaaggattctgggaaaacggaatgggagcggaataagggaatttaacttgctgtggatgctttaaaatctggctaaactacagcaaacaaagtagggtgaaggggctgggtcttggaactaggttgaattttggctcactcacctgcttaatagctgtgtgacttggggcaagttccttaatctctctgcgcctgttctctcgtgttaaatggatagaattatagtacccatctaatgccgtgaggattaatatggttaatagtattatactttaccaatagtgaaaacaaccaaagtgaacgtgcaaaatcagaattgtatccttctgaaaagttaatcacgtggctaacgtaccttccctaccctgggccatgctctaagagaatttgaactaggtagatggttaggacttcccttcaagtttcttttggtggataggggatatataaggtgatgtgttgggaggatcatatcagagtaattagtgtttgaatatgcctctaaactacagagaaaagtgagtttataggtgagattaaatagaccagtgattctcaaggatgattttactaggctatctactgataaactgccctgaattctctctctagcca

SEQ ID NO: 60567 - DNA, 2491 bp, Homo sapiens
agtggggcagtgcctggcctcctgtgagagattgatcatcggtaaacaatccacacgaaactcacttgccagtggacggggaggatcgctgccatcctttcagcaaagagcaaacgaataaggagagatccgggcccatccctcctcgcgcagcagtttctagatttttaccccggcttcataaatggctaccagctggcagtcacaacactttcataatgtttgcacacaactcatttgggtcgctttcttttctttcctttttttttttttttttttgagagaaacggagagtcttactctctcgcccaggctggagtgcagtggcgagatctcggctcactgcaacctccgcctcctagattcctgcgattctcctgtctcagcttcccaagtagctggggctacaggcgtgcgccactatgcccagctaattttttgtactttttttggcagagacgggttttactatatgttggccaggctggtctcgaactcctgacctcaggtgatccgcctgccttggcctcccaaagtactggggttacaggcgtgaaccaccgcgcccgaccattatttgggtcgctttctaatttctttctccgtttgtagctagcgttgcccgaaggagatttcagagagatcccctggagaaagggacgggggatgtcgttttccagtaatttctgggggaaatctgggatagtcagggggtaaatctagtgccgtttgctgaagttaaaaggcgtggggagccaggtggtgccctggagggagggccgcgcgagacgagaccaaccttcgggacaggggagagcggggctactgaacgcaggggattccgctgagcctccagcccctgagcgtccaccttcggcccagctgggggacgcggtctcgggaagaaagcccggaatcccgagccggccagccgcgagcagcgagtaccggagcgcgtgggcaggcgcgcggaggcagaggcgggccggcggctgtccctttaaggggccggtctcccggcgccgccggcccagacgccaggacgtgccgggtccgccccgccccgccccgaagccgcccgtttcctgccgagcggcgcgacggcacctgagcgactgcggcggcggcggcggcggcggcggcgcctcggagcgggcggcccgggctgtagtgccggcgccgccgcgtcttcccggtctcctttcccggccgcacagggtgagggagagcaggccgcaccgggacgggcgccggcggcggggagcgcggggggaggcggcgccggccgcggggtcctggggcaggcgggagggccgcgccgggcgggggggcgcggccgcggggcccggacgccgcccgctgggtaggcctcgggcatccggttgccgccgcggggctcttgttggggccgggacgccgcagggggcgggctcggagggacctcctcggcctcgcggggccgctctgggcccgaccccggctctgtcgcggcacccggggcgcggccgagggacaccccccaccctccccaaggacgactctcccgaaggcgaggtcgacccgagcgggccctggggtgaccgaggcacctatttttagccaagcctgagggcccccgggagggaaggcggattaccgcctcctcggccggtggacggaggcagcgcgtctccggcggcgtccccgggccggagctgggccacacttacgccatgctggagttccagtcctcgccgctgcctccggcggtctgggcgctcgcccccttccccggcgcccctcccgctgccctttgcgagtccccaggtcagggcgggaggcggttgggcacggaaagcagcatgaggggggactttggaaaaatccatggaccactctcgacaccggcgaagttatcccttcctgtccccgaggggtgtgtcctagcgattcggcctgaccccttcagtttccaaaagtgagatttttggccttggggacctcgccggaaaactacgcgggaagtctagagaagtcgtctggctctcagccatacgtctggtgtgggatgtgcagccccgcatgctggcggtgaaggcgctgggtgcactagatgtgggcagccccggacgcgggcagcggcgtcccagccggccccagttgcaccttgactaggttaggttgaaagtaagctgttcagtgttggcccttctttcctgtgggaggaaggaggaatctaaattcagaactgtgttggcaaacggattccttagccgctatttaagttagtagtgcttaaagagctacggttgaagttaactgttaaggtgtgtgtgtgtgtgtgagtgtgtgtgtgtgatgactttgtggaaagccttgagtaaagagctacggttgaagttaactgttaaggtgtgtgtgtgtgtgatgactttgtggaaagccttgagaaatgtagacactcatggccagcccagctaaagataagcatcttcggtgaactaaaggttct

SEQ ID NO: 60568 - DNA, 2131 bp, Homo sapiens
ttgtcagttttttaatcgtctgtcttgtttgataattcaactttatatagttatcaggccatttagcttttaattgctgggtgtttgtatgtctgtgtacatatgtatgtacacataatttataaaattcaagttctaatttttctgtttttttatgagtgttttctgtgtttctgatttcttttataactctcatggctgaaatttttgttttaatagtctttcacattctgttatcagttttttgggatctactccctgtttgtatgtgctactcttgtttattttgactggaagttcacctctggcaggagtatatctgcaaatactatactgtacggactagattggacagaggtagtttttttccagagagatttttccttcccaagagtttttcctgagtcccagggcttttgtggccattgagccattttttttttcttttttttgagacagagtctcgttctgttgcccagggcggagtgcagtggcgcaatcttggctcactgccaacctctgccgcacagaagcacagattcaaagcgattctcctgcctcagcctccggagtagctgggattaacaggctcccgccaccacgctcggctaattttttgtagttttagtagagacggggtttcgccatgttggccaggtggttctcggaactcctgacctcaggtgatccgtgagccatttttatgtcaatatttgtggtaggaagggggcagtagggggaattggcagaaactgtagatgagaatttaaggttgtacaatcttaatggagacttctggcctttggaaaagcaaacaagctttctcttgtgtctttttctcttttgtgtcaatactacttattaaatctatttttttaacttagtgatttgaaatggcactgtgataatataccaaactttttgtgtgtatatgggctattttgcctttaattgggtgttcttggacaagaattaaaaattcttatttacataagcaaaactttttcagtagtcatttttgatagtatttgatgttctaatttacatttcatgttcagtttgtgagatgttttaggtattatgtctcttctggggataagcaagaatatccccagaagagacataatacctaaaacatctgatcattttagtacttccattgttgagtgacctaaggtgatacacctaagagttattttattaatattttattaattaacccattatgttcaactttaataccctagctaaacttttccaaaggatgataaatttttgtgaatgataaattttgaagtaagtttttctatttgctgctaaatttaatttcattaagtttaagcatcagttattaagactaccctgtggtagtgggattggacagatttgttatggttagggtagagctaggaccactgggagaagttataggatgatgtgattttggatcaaaactaaaaagaacttgtctttccaaagaataaaaggggtttatgggaggtattcatccctgcttttcaaacataggctggctgcctgttgagctgggtctaatctctgagtggctagttggattagatggccctttcttactcagaaatcttatgaaaggaaaagcaggtcaagatggtagattttaaggggaggaaagcttctgtacatggtgtagctgttttacggtatgaatttcatgttgtagtgttaatttttgaacagttttgatgacatgttcttttgtcttcaaaaactgattttatgtgatttgaaaactgatttgaaagactattttaaaaagttattacttttttggtattaaagctttcagtttgtctaattataaattagatttttttttttaccgaataaacttttaaccagattatttcccatggaagtgtttttaaatgagcagtgccttttcctgagaaaatgggctggtttgggcatgatgagtaagcaaaagtctaaaagatactttcagcagctatgacctctgcaattccttttcagtttcttgggaaagctgttcaaatggattgatctattctcatattaaagggaaaaaagtttgattaaaaaatagaagtctcatttgttgtgacatgatacctaatggagaaattaaatttca

SEQ ID NO: 60569 - DNA, 798 bp, Homo sapiens
tggataaaaatttttaagtaagactctgagtgaaggccaaattgggactaaaagccaagactcttgccttccattttactgcctcattatattgctattcactaatcttaaaataatttacttttgctcaggatatatctgcaatataacacgcatactgtatttgaaggttatcaactacatgatggctaatatttacttttagcaggaggagttcattgtatctaaaccttttgcagaatggaaatctaattaaatgatacttggctaccaatagtaaactttttatcactgtagagtacttaccataaatcatttttcttaaaaaaagattaacttgtctgtttaaaaaaaaataagatagtaatgtgggtttaaagaaaggtaaacatggtatgaagagtgtggcacgtttggaatgccaagtatttagattcagtgtgatcagattacagatagttttttttgttgttttttgttttttttaacctatgaacattatttttacaaataacctataataatagctttcagcttaggcctcacagctacttctgtaatattttaactgtattcaaataatgaaataaagctcttataggctactctggaagcctgtatatcttaaaggtgtattcatttagttgtccagacattgatttatactggaatttttatgaaattatgcattcctgtgttgaaaattacctttccctcaacttactgtttttgtttttttcaaatgtgtctgcttgcttagtatgttttgtggtggaaaaagattttcactgtgttcag

SEQ ID NO: 60570 - DNA, 1153 bp, Homo sapiens
catttcacatgtgatctctaatagattggttgtgcctgtctggagagttatgctaagcagaattctgacactgcatctactttttgcatgaaaaacagtcacagttgattagtaatgtctgccctgggtgcaggagtcagagcagtagacatgtttaccacattcactcattcattcagtcaccaaatattgagtgcctatattgcatgcaagggactcttctaggggctatggcacagttgtagttgctgaggttctgttctaggtagagggcagtgttctaaaagctgactgtatttactattcctaagtgactcatcaatttacaagtcttgataggtcaaatgattcatccaaggccacaaaatcagtaagagtcaacaggaacacaggactctgacttccttgttgtctaccttgtgaccctctcaccatcacctgggtgaactgtttatcagcaatttttattctaaagctgtagttgcagaaaacttcttgacctactcccatctttttgttcaatggtggaccttcaatgtgggctgtagcctgggaataaggagacgtttcttccttcttggaaccttccatgcagaatcacctgccgttttcaagaatgtaacagaggcagcaaagcatgtggaaaattcctctttgttggcaaagaccaatgtgacatttagttgaatgaggatattattgaaaggccctataggggttaacagtgcctgcggggagtgggagcttcatggatcaaggtatcacatggtagttgggtgagtttttccatgtctgaattccaggaaattttccctgatatggttctgttgttcaaagtaagcctgttctgcccagggcttttgaaagtaggcgtgtctagatgggtggtggaagggcacctggggggagagattatattttctcagtagaatccagtttattccaccagttcctgagctccccactgcacacccatactttggggaagggtgtgtgtgcctccctgctgggcttttcatctgaacttcaaagcactgcaaaacagactactctgtctcttttcctgcctggtctccatggaaaaatggtgagatctgacctcctcccagtgtctgaacttcctactcaaagctttggaggccctggattaaga

SEQ ID NO: 60571 - DNA, 1574 bp, Homo sapiens
cctttgtacacaaggaaattccttgtgaggaaggtatgtaggtttttttaaaaaattattttattttgttttattttattattattttttaatttagtagctttttcaggaacagaatgtgaggtaggtttgccctaagcagttcccagcttgacttttccctttggcttagtggttttggaatcccaagatttattgtcctttcacagtgcaaggcatttattctaggtgaacaagacaggctccccctctagcaggtaaggtcaggtaaaaatccaagaggcaaacctaggagcaaactctaagattgtgattagtaccatgcagataattaaaggactgaagtgctggagctgctcagtggcccttttcacctaggggatcagagaaggaaggctttttaggaaaggtgacattgacactgcagtcttaggtcaagaagccagcctctgaagatgctggggaagagaatttctgcaaacagttgctgcagacaacatagctgaggcaaggacagaaaggagagggagagactccatgagaagagggaagggagacggggcccttccagtgactcccatgtcacatttttcatgtgcctttcaaaactgaaaggggccctgaggctctcctgtagaaattaggacaggcgggtaggtcttgtggttaacaatgtgacgaggaccagggctcccagggtgggacctggttcacacccagcctgctcctgggcttggcactctgagctcatctgggaggccaggctgtgcttcagcgtaggagttacccagaggtgtggtcagagggctttgtatcaggcccacgttatctccactcttggcaggacaaggtctgcacagccgtctctgggcttggtgccagcatctctcattgaaaaacagtggcactgattgtaatgatgttttgcaaaggaaacaagagagagaacgtgacgtgggctgagatgatagctcaccacatttcaggcccgggcgagttccggtagcaaaggttcgaactcctccctgagagtgtttccaggaaaccccagggtgtgaaactatagtgccagatgttctagtaaaacgaaaacttcccagaacaaataataacaataacagaagggtaaattagtctcgtagatatgagagagagtgagcgagctccaacactgtaactagcaggcacctgagtggttctggacaaattccatatgccacatgtcttgtttccttctatcctctaacccttctcctctctgtgatttatgggaccagcccgtctgaactgctgagaaagcgatctcaaagaggcaagcagctggcaaaaggggatgtgcagcctcccacaaacaacacatttcacacattaaaaaagacactcctgatggcatgtgtagaccacatggtcaaggcaaagctcgccatctaggtcctgagctatagctctgtgctatggaaggtggcgtatgtggcacactatgccagcaatatcccaaggtgcttgaatggaacagctctcccaaacagacagagttgtgtgagttgctttgcagaacaaatgcctgagaaaag

SEQ ID NO: 60572 - DNA, 1325 bp, Homo sapiens
accttgctgatgaaacagagtggggtaaagaagtcggccaaaatccaccaaaaccaagatggtgatgaaagtgacctctggtcatcctctttgatcattatatgctaattacaatgccttagcatgctaaaagacactcccaccagtgccatgacagtttacaaatgccatggcaacgtcaggaattgaccctatatggtctaaaaaggggagtaatcctcagttctgggatttgcccaaccttttcccagaaaactcatgaataatccactccttgtttgacatataatcaaggaaaaagcataaaaatagccaatcagcagccctcagggctgctccatggagtatccattcttttattcctttactttcctcataaactaactctcactttactgtatggattcaacctgaattctttgttgcatgagattcaagaaccctctcttggggtctggattgggacctctttccagtaacagtatgaaggtgggggaaaaaggccccatctcagaataaagaaataataaataagggatagatggtaagaaattctggaattctgggggtaggttttggaaattttttccctagaagagggtaaggatcagcatgttgaagccagctccaactccaagttcagtaatgtcattttgataacttgaaattggccatagtgaaagtacaccacccaaattgacatacattacaggtctctctggaatgctgattgttaaacatttactaatgaatcataggcatttccatagagtgtgtttgcgttattacagctaggaggcctgggttatgttttcctagtagactttatgtaaaaagcccatttgttccattgcccctccccatatcaggttcattgggtgaggtgccaaaggctttgtaccaggtgtctggaaggtagtgttccgatccaagctgctcttctgcctggaactgtcttcctcaggtaacagcttggctctcattgcttcctccttctcttccagtctttatcaaaagccaccatctcagtgaggtctttcctgaccacccatttgtccctgcaacatgttcatcactgcacatcctgtcccactttctctgggcttttccacgtcctctatcattttctaactatatacttcatactatatactatattatgtttattttgcatctctccttctggaattaagctcctcagcctcagaaatctttgtttgcccactggtatatcccaagcacctagaacagtgttcagcacacagtacattctgaataaatatttgttgaatgaatcaaataaataatcctatctctaaacaaac

SEQ ID NO: 60573 - DNA, 1904 bp, Homo sapiens
taagccgggacacagtgacgtcgagagagcgctattctactcggagaggaagttaatcccatcgaactccagccaggaaaacgtgggcttgggaaccgcggccgctcgtttccaggatctcccgcgggccttcgcggctgaagaaccaggcggcgagggctgaggaccccgcgctctaagtttggggaaggaagtgaggaaaaaaaacagagctgctcctttaagaacttcctttcccttttactctatgtttacataacacaggggccgagcctccgccgggccgaggggggcggggagtgggcgcggacggccccacgcgccgggggagggggcgccccgcgggccgggggcgggcgcctggctctgcgtggggcggggcggctcccacctgcccgcgcgctggcccccgcctcccccgcgcggccccagcctctcgtgcgcccgctccctcctccttccctccctcccgcggggcttcggcggcggcgctcagcgcaggcaggtccccctgctgccgggtcccatttgttgccggctctgactcggggcggccgcggcgcgcggagctccggggagtcaggcggagcagccgcgcagccacgacggagcagcagcgggactggccgccccgcgcccccttcgccgccgtgcccttccccggcgcgctcaccccgttctcgggatgggattgtagcggcggcgcggactcggcggggatcgcggcggaggcggcggcgtcggcggcggcgtcggcggccgagcggggctccatgttttcccctggccaggaggaacactgcgcccccaataaggagccagtgaaatacggggagctggtggtgctcgggtgagtcctggggtccctggtcccgggcagcggcgcgggcggggagcgcccgcatcctggagcggggctggcggggtggctcggtgctctttggggaccgccggggcgctcggggcggcaggagaggctctcagggcccggacggcggcgcgggggcgggatgcgccccatcggcgcgcgctcggggtgctgcggcggacgccgggctgcgctgtccgcgcggaggacgcggcggaggaagtggccagaactcgggcgacccagcgggggcagcgccgggcaccgggtccgcggccgtatcgtgggggcgggggcaggggctccacttcccgcgcgccgcgtccgggccggggagggcgggcagggactccatgtgaggcgccgcggtcgcgggcgcttcgcggggtcgcttcccgaagctgagaggccggccggcgcggagccccgtcttcccacctccctcgcggaccgtggtacccgcgcccccgaactccgagcgcggcgccgtgagcttgggccgccgcgggctgtgggatccccggctgcgctttgcaaattgttccgatgaccgccgcgggccgccgcagcccgagagcagtgaactgtgtgtgacccgggccggccggccctccgcttctccccgcttggagtgctctggaggggagggacaggatgcggctgctcggggcctggcaccggggcgcgggccgtatccccccggtcccggcctcgctgatgccctcccggctgcggggagctcgccagcctcgcccgcctcggctccctctctgctggtgaaagccgcatcttgaagatagtaattatgtacaatcgttaaacggcagcaattagagacttcatctacttcctgagtttccttgtgacatttctattgtttacccttaataagccaggagagaggctttgcgggcttaaaactggatatagtgggcagtgaaaggggagggggaagggggaagtgcaggaaactggggggaaggaacaacttgggtttagtgttgaagaaaggattattttttcctttggatgtgtc

SEQ ID NO: 60574 - DNA, 672 bp, Homo sapiens
gagaggtggggaggtggagggttcacttagagtggagtcttcaaatgctttgagaggcttagagccacccaaagctatgtctccctcatcaccctcgggttcacactacccccgtacatagaccctctcctcagccaccctcactggggttcttggcatggcagcctgccccccatgttgagttatcccaacagccacaaagtgtttagagcttcttctgagtctcctgcagcagcacagagtttcatgacacagcatggaatgactcagcaaagtcaaatgagggcagagaagacaatcagagggaattacaacactttgagtagaatgatgagaaaaggcccttattaaagagcacgcacgaagttcagactgccaaacactgtagtgccatctgccggctgagggccctcttgcataggcccccattcttgaagctattctccacgccccgagccatggccaggatctctgagaccactggagatactttcgctgtctgtgtgacctagatttcaaaagaggtcgttctatgagtctgtcatgctctaatggaacctctctctgtccttgaggaacttggatgatctaaaactcagagggatctaaaactgttgaaaggcattgaaggtgttgaaatgaaagaaagaaaatatactaaacctagcagct

SEQ ID NO: 60575 - DNA, 1695 bp, Homo sapiens
tgaaaaaaaaaaaaaaagacgcactagcatattctaatctctctaaaaattactcagtgatttaataagtagcacacagacttattgtaattagtcatagtaacgtagtaaatcgtaataaatacataattgtgattaatgtatttattggcttactttgcacatacggtaaatacaccaccctttttttttttttagcacaggtaggggctcctggctgatcgtggcccttttgtgcagttccaccccgcaccgtagggggcaggagcagcccttcctcgctcgcggttttcgacgctgctttggtctctgtcagacccaaccaagtcagtataaaaggggggaatagccatggagaaggtaggcctgtggccgggcttgctttttaaagggaatgctctcctggtgattaggaaccttaaatcacattataagtaggtgaacgccaatgcgtggtgcactgcgggaaaactcgcagggcctggctcaagggaggcctggcattttctcctccccgcgctcaggcggagaaaggtgcggtccaacccgcggaggctcgacccggaagccgccgtggccgccgcacaagctgcgctcgtctctcggctggggagctccgtgtcgcaccgggttcttgggctggccgtgtccttctccctcggtcgccactggcccatgagtccccatggcgacggcaggggccaggcccaggggcgggcagtccgagtggggctgcggcgctccgggggcatccgcggcggcgtggcggtgttcgccgccgtggccgcagtgttcaccttcaccctgcccccttcggtaccggggggagactccggtaaagtactcgcagggttgccccttctgtccctctcccctggtcccagaacgggcagggtctgcgtctggcccctgctcttggcattcggtctggtcagctctgggcctccatccacccccctgtgcacagcgcactattgtgtgttccagagcccacttctgtttccattcctgtcgttgtggtttctttagttctcaggttttcgagatggggcgtattgttggtttcgcctggtggggcttatcgacctctccacttccccagatcttttatcctggtcctgagtatttactttcagtcttttttagtccacagatattattcacggtgtccttattatgtttcaaacaaaagaacagtagtggcgaacagataattgctagtgttccagtgcggttagacaatacacaagttaatgaataaacagcatattcactggtgataagttatggagacagtaggagggaaatatgattgagagtgggggtaagtagtgggtccttccgaatgactattcaggaaagacctctgaagaggtggtgttttagttgaaacctgaatattgagaaggaactagccatgcagaatatttgcaggagaactcttaaaaaggtggaagccaggtgcggctgtttctatgaaaaagaaaagcatgactcattggcccttaaatcacactaattgttttgtatttgatgcaagaaacaagatccatgttttgtttttggattcaataatgccatatcatggccagtaattttgtcagaatagtgctgtaatttcaggtggtgaacctatggactgaagaagcagtttttgctgcatgactagtgatccccaaattgagcagcttaaac

SEQ ID NO: 60576 - DNA, 720 bp, Homo sapiens
caattgaacttggccttgaaggatttagggggagaatgctagggaaaatattccagggtgagaaaatgagtgagaagaggtgcaaaagaggaccactccagagaaacagtgggtaataagatttgactggagggaacataggtttcatggatataagcctagaaaagggaccttgaaaccatagaaagcttgaacgtcatgctgaggaatctgaacttcgttcagtaagcagagagcagccattgagaaattttagactagggatgcaatccagccttttgtgtgtgtgtgtgtgtgtgtgtgtgtgtgtgtgtgtatgtgtttaggggcatgggggaaggcaggtgttgattataagtgatttcagtatgaagatgaattgaagtaggattggtcaagtctgttgccatagtccaggccagagagagtaaaggtctaaattgtagctgggacagaaattaaatgcagagtattgctatctatgaaaggataggaagtggacagtagtacatttcctaataggtactagtaactttcatgagtcattcatcaatattgattccttacattgtacggtactacaatgtacagggatgagtcagaaatagtccctgtgctctgaatacgtaaaaggttaacaaataggcatcaaattactgcatcataattttagaaatagtcactaatggtgaggaactataaaggactatgtaaagaata

SEQ ID NO: 60577 - DNA, 882 bp, Homo sapiens
ccaatgatatgatggcccggagtagataggatcataatgatttaagtttctaaaaaccactggtaaatgaaaaactagtaaactgagctgagatttagggatgttgggcttcattcccagatgaactactttggagaatcctttcctttctattaggtgaggttaaacaagttgctttctttttctttctcttactttccttggctagtgtacagactccataaaatctgataaaaggggtttcctgtagtctgacccccgacattgaggagactgtaatggaggtgacttctcatgcaagatttggccagcgttctagcagtgtcccgggagtgccatggtttggcaggaagacaggaaccccacaaggccaacttctgcctggacttcggcctgaagagccagtgggagccagtgaaactgtctgactctccacatgcgtcagggccctgccgccctggcaccaaggctggcacgcaccagagggcaagtggagaagcggatggtggctcccatgttatctgactaaccactgggtgggctacactccctgtgcccccgctgttgcctctgataggagtatgcttggttcttggtattgacttgcctttttttgttgttttttaaaagcacccattttgttcaatgcttctgttctgttactcaaaatgtagccaaaatagaagggaatcaattactagtgtattattttgaaagcttcaaacagaaattgtgaaatgttatttctgctcatattcttagtgttttctcttggtagaatcataatgtttagcctttatgatatttaaaacccattttgagtgttaggtttatttttatgatactctgccggtaacttttaagtcatcaggctaggatatg

SEQ ID NO: 60578 - DNA, 982 bp, Homo sapiens
aatgaggaccagaacccaggtccagctgacactcagcccaaggctctctgagccgaacacctcttcaaggaaatggctgtgcccatggctcagactgtggcagggctgcaaagcccctggttagttgacaacattgccaattagctagggcctcccctgaccagttccaacccacgagctgggttaggactgcaactttgacctgtgtccaagggcccagggataccttgaaagctcagacctgctgtgcctgctactgaggcccttggcatttttgccatactgtgcacatcgccacataaccagggcagagttcatttgggaaactccatttctgaaaatgactgcattaatagaattgaaaggaatgttgcattttctaaagagggcagacaggaaggatctgtgactctgatggagtgaatgaatgaatgaacattgttgagtggctgtttgtgccagtggctctccaacatgcttccggagttctgagtataatctcatctgttccctgtgacccaaacctcctgccaagtctaatcttattcccatttaacacgtgaggacactggggatcagagggttaaagtgactcgcccagtattacatcagatgtttattttgcccaacccccaactgcatctgagtgccctgttacccaacagctgccaccccaggtggcgttttggctgatggataaggtcactcatacagactctttcttgccaaatattgtatgtgcactgcaatgacttactgaaaaaaaaagtttccaataatactgttccactaaatatctagtaggaatggtggaagggcttcttccctgttgttggggaaactcctcccttttgatccacatttttccttaaattgcctggggtattcagtggggtggcgcctgctcctgcagctgtctggttgcctgactgcgatcatggtacttggacactgatctggagtaactctctctgcttcacct

SEQ ID NO: 60579 - DNA, 840 bp, Homo sapiens
aaataaaaagtcttgaaaactgtagggaaatatttcctttgatttgtttcttgggaagcttatctattaaaatgcatcaagcgctataaataccctcctcttgattattattcttcacctagcatatcactactagaattgggacaaacaagccccactttatttgttggtcaaagacaagggtattgggattcttgctaaagaacaggacataaatccagggcttttgaagtctttagtggcttaatgttaaaactttgcttcctcaagatgaaagttcaaacacaatttaggtcaaaggttaaagaagtctgccacttcagtgggcagataagggttttgaaggtttcagctgaggcctagtgactgggccaggcagggaagagggaggataaaggagacccggctccaccctcagttatctgcctcctgtttccttaagaactaatgttcattaaactcctctgttttgataaagaaacaaaaattcacaaccaaaaaagtaaatcctacctttgttctggcaaactaggtcagcattctctgttcctgctgtcagttttctgcagcttgggtttcacaatgagtcacaggtatgtatgaaactgcttgatttaacttttcgtttttccctatctgaggactccaggttctcttagtcagacaatgattgagttggcgggtgtttctcttggaagacgcctaagtgcagacagcagatctgaggtctacctttgcacaagcttgacttggaactgaagcatcccacacatacaagctgcgtgcagagatgccacggccacataaaagcagcttagcagcatggaaactttatttttt

SEQ ID NO: 60580 - DNA, 2212 bp, Homo sapiens
attttataatacatgtaaatgcatataatacacttaaggtgcattatatacatgaaacgaagtgttcgttttattttataaactttttttattttataatacacgtaaatgcctcgagtgtattattatgtattacatgaaataaagtgttcacttgaattttgcctcccttcagtctatctctcttcagtcgaaagagataagtaggcctttattgtccaaaaaaaaaaaaattgtcccagccttttcaaatgtcaggttaaactggcagtcctatgaatgccacctgcaaccttactaatggaataattactcaaaacgagaagcccccaagagtcccgatctcaagtggcttcctcctattattcccgcgaggaccccagcgacaagactcgcccaacctgaggctcctggctctctttcctcgtcctgagtcagcccttcccactactcatccggagtagacatcttccaacacccgaaccttccagactttccctcttgcccccacaaacaaaagcaaccctcctcccttgggacacccggcttcccctctctgccgaccggccgcccagcccacctcggccccaagcacccctcccccatttcacgctccgcccgcgctgacacggagctgccaccccaacccttctgtttcgcacctctctcccgagggctcctcctgggcagccagcaaacgcccgctcctcggcccgcccacccagctgcctgcaaaccccgggcctgccactccctgtagagccgccggggcccacctcgaagagctcggccgtggtagccatcccggccggctgagaggctcgccccccactggatgccgtctccgcttcacatgctgcgcctcagaggcgcggcgcacaggtctccgctcggctcgccagctccggctccgggccgctgcgggctccccagctccccacagatcccaggaggggcgggagagcggccatgaagcgaagccgcaaacgcttgtcagctgcctcccggcgccgcccgcgctgctcccattgtcaccgcctcatacgccggaagtggaactgcgcgcgccagggaggttgtcgggaggggccggcgaataaaacgagcggcgaaagaaccgaaaaaaggctcgacgctaccgtgtatgaggaactttgatccttgcgggccaccattccggaagtagaatttagaggaagaaaataccggagttgcagggtataggtaaatttctcaaggttataggttggggttcttagaactttttgtggtgtgtgttggcctagagcgactcagaagcgttagtgacttcacctaaaaaagctaacctctctgctgagcgcgaccggtatgcggcgcaggatgagcctcagggcttctgttaagagtctgtctgagaaagccggtctgcgctgttcctcggtggcgaccttaattatgagatgagctaatgctttactgacttaaccatggcgcagcgggcagtgtggctcataagccacgaaccgggaactccactttgtggcaccgtgagattctccaggtaaatgcaaatctgaatcctcagggatgatggatcagaagatcgatgaagtagcatagttttgtggtgcttcgtggcccaggtttgccacgaatagctgcgtgaccttgggctagccagttaacagacctctgtttcgtctgttaaatggagattttaatagtcctaccttacagtgttgtgagaattgagttgatgactggtacatattatttacggtatatgttttctattagtattgtgttttaaaatgacctccgtctgcttagaattaaaatggagatgactaagggaacggtagaaaatttactgagcactaaacattttcagatttttcaacatgcattgacaaaatcgttccagaacattttaacttattctactgaaaaatccatgctaagttatatcagacttttatttttttgtttttatttttttgagacggagtctcgctctgttccccaggctagagtgcagtggtgcgatctccgctcactgcaagctccgcctcccgggttcatgccgttctcctgcctcagcctcccgagtagctgggactacaggcacccgccaccacgcccggctaattttttgtatttttggtagagagggggtttcaccgtgttagccaggatagtcttgatctcctgacctcgtgatccgcccgcc

SEQ ID NO: 60581 - DNA, 2538 bp, Homo sapiens
tttttaacaaaaccgaatttgttcagtgagcgggtgagttacactacctgtctcagctcagacctgccgggagtcaattgtggactagagcagaaggcgcccagccacaagctcaagttctatcccctttgcactcgataggcagatcccctgggaggatcaggccacctgtttaccagtgcttcctaacctatttgtgtcacaagtttaggagtgtgcttcttagccctggtcactctctttcaccacctctctctaacccttccccaggtgtgctagcaattgcccaacacctgtcagtcacttttgcctccaattttactgggtgcgaggagcagagtaaggagggagaggaagagggctgactcccttgcctcaaagtggcaagggccagctgaacttaattcacactgcaaaccaccacgtttcgacagccatccccatattttcacagctcaaatcttcctttctttttcggtcggcttctctgatttgctccatttttaatcgctcctcccccatcctccttgcccctggtcagggcaaacattaaacgctgtgcagctttaaaagggcatttttaggtgacttgtaaacggcttgttccacaggccccgaattggcgagattcgctacagctcggagtgcgcggtagactttaagcagggagcgcctgcccggtccatccctccccggccccgcgtggcaagcaccgcaggttgaggcgcccccaaaccgaggaagagggtttgggagcctgtgactccaaagccctctgcaacttcccggccccacagccccacccactagcacgcggccttccccgcagcccgcaggagacacctttgtccccgcccctccacaggtcacctccctccacgcccctctctcttggcccgggcagccggcaggcagggaagtgtcgtaaagccaggcccaggaaactttacccggcctaacagctgaggcgctttacggcgacggcggctgagtgagaaccttggcggctgtggaggctgccgcggctgcgaaggaggcggcggcggtggcggaggaagaggagtggcggcagcggcggcggggacccgtgcggggtgagccgtgaggaggggccgcgagtgacagggctggcgggtgggcccgggcggacggggacggtggccggctgagcagctgggcggcgctgaagagcgggggggtggcggggaattggggggcagctccgtgagggacggtttctgcctttgttccccccacctcggccgccccccatccgtcgccccctgttctccgcgctcctcggccgggtttcatggcctcccctctcggtctgtgtcgcttctaggatggcggaggtaccgcctgggcctagcagcctcctcccaccaccagcacctccggccccggcggcggtcgagccccgctgtcccttcccggcgggggccgccctcgcctgctgcagcgaggacgaggaggacgacgaagagcacgaaggcggcggcagcaggagcccggcgggcggagagtcggcgacggtggcggccaaggggcatccgtgcctccgctgccctcagccgccgcaggagcagcagcagctcaacggattgattagccccgaactgcggcacctccgggcggccgcctccctcaagagcaaggtcctgagcgtagcagaggtggccgcgaccacagccacccctgacggaggccccagagcgactgcaacaaaaggagccggggtacactcgggcgagaggccccctcactccctctctagtaatgcaagaactgcggtccccagcccggtggaggcagcggcggcgagcgatcccgcggcggcccgcaatggactggccgagggcaccgagcaggaggaggaggaggaagacgagcaggtgcggctgctgtcttcgtccctgaccgccgactgcagcttaagaagcccttcgggcagggaggttgagcctggggaggatcggacgatacgatatgtccgatatgaatccgagctacaaatgcccgatatcatgagactgatcaccaaagatctgtccgaaccctactccatttatacctatagatattttatccacaactggccacagctgtgcttcttggtaagtggatagaataaaaagagggtgaacccagcagtgatcgagactgtgcggggcagggagtgagggcccagaatgtggcagtggatatctcctgctgcgtatcatagtacgttatatgatgtcaagtgctgtacacattcctagttatttaatgaaattgttttgaaggtaagacttcatgattcgggttaacgtgatactagtgtaactgcagcaagcctgtatggtggcgtgtttcactggggtgggggtcttgtgtcttgtttacattagattataatcgtgtttaaccgtctttaattacccgcccgcatcctcaaacactttacagtcatttaatttgaacatggttctgttcagatacaggccttattagtctctcgattacaaccataatcagggaagagtgtatgcataa

SEQ ID NO: 60582 - DNA, 1551 bp, Homo sapiens
atgttccctatgattaaaccttttctgagttatcctacttgctatcctaagttactacttgtgaggcaggctatgtgcttttgtttaactgttcaaaggtttggatagtgttggcttttcatgtaaagatgtcaggaatgatatgaagatttttattgttttggtctcaaggttaaattctaaattaatgatatattttatggtagaaaaacttcatttccagcctaaaaagctaatgctgattcattcattttttcttttgaaacaatgaatgttacttaatctttaggctgacatcagggatagctttgtgaactttctccttttgtatgattatggttttgcagtttgtgaatacctctgtctctggattagataactttgtcttggtataaaaattttgcttatctgtgtccagtgttattcagatcgaataatttgccatacgaactcttgtttactctttagaagatatggtagctatttggttttcctttgcttgttaaaatactttagtctttaagacccaattcaaataccaacaactcctttaagtttttcttgatccttctggacagaatccatttcacttttctgttatttttgctactctttttgtaattattgcacttaatttcacttgttcagtgccttagcacaatgtaggacagagatgccttctcttgtttgttgctgtattcttagtgcttagtgtgacatttgtgatagagtacctgctttgtaaatattttttgaatgatcagttctgtgcttccagcatgatgtttgtaatccctctctctcttgtttaagtacttttaaattttgacttgtattgttattaacttgtctttctctctgaactttctgtgtgctttctaaaaacaccaattgtcttatttttgttcatagtaggattttttttaaaaaaaggcatctttagggttaaccaagttgttaaaatgcctttgaaatgataaatctccaaaaatacagcgattaatgaaaaggcaaataaacatgtgctttcactttcattaatttagaccaaccttcctttcttttaaagggtttagaaattttgacaaattatctgaaaatctgtgaaagacatttcagaagggttttaaattagattttctactacttaggttattctgctatttttaaaattcttacaaagagagagattttaaaatctgtgaaccttttaatagaggtacatttggccaggcactgtggctcacgcctgtaatcccagcactttgggagtccaaggctggcggatcacttgaggtcaggagttggagatcagcctggccgacatggtgaaaccccgtctctactaaaaatacgaaaattagctgggcgtggtgccacacgcctatagtcccagctactcgggaggctgaggcaggagaatcgcttgaacccgagaggtggaagttgcagtgagccaagattgcaccgctgctttccagcctgggagacagagtgagactctcataaagaaagagatacatttggaaatctccgtgaaaccttactgtg

SEQ ID NO: 60583 - DNA, 1769 bp, Homo sapiens
cccaaggaatcacactattccttcacaaaagccactagatggcagcaactaacattgcacctgggatctcttcattaaatcctttgccacttgatttgagaagcactgcagaaaattgttggtgaaattggcttctgctaaattaaccagtcagatgaaattgcctcagaattctgggtttgtgtgcatgttccttttccctgcccaggaagtgagatgcctcacttcatcatcttcaaagagaacacaatggaaggaactaccagagaatcggttagaatgacaccttattttcactttataatgtaagtatcatttgtctaaagacttctggattatttgacttctcaaacaaaacaaatgatcagcataatcagttgaagcgtctgctaggagatttgggaatctggtgaagggccaggggactcaagagtgctgatatgggggttgcaatgtcaattgattggtcagggtgggtcttatagggacagtgagatttgaacaaatatttgaagatgagggagttatccaaggagatcatctgaggacacactatatgtgtgggggaaacacctccaatttaagctagacctgaaatggttggataagaaggtgatcaggccagaggggacagtgctaatcaactcctcaataaaaaggcccatttgattcggagttccctggcagaggctctcaaagcctctcagctccaggctggataacgctagttcatgacttgctctttatttgaggagtagatgtttaggaagtagaaggtgccaaaaatatatctcaaataatttagcatacaattagatttggtttaataatttaaaataattttagaattttctttggcagaaattaggctattaattagcatgtcatgaggacccagcatgtattattctctcaaaaactcatttgtgctggaaaatgtgctgagcttcatttgtgaagataattatagctgatctctttgggagtgtctgccaagtttctagtgatttccctcctctctgggagctgacttcagagtctacaggggagatgactctgcccacatatctactgcatgagcatatcctctggccatagctcattggaccagagctgaaatcatgagcaaagctgagccgatatcctttctcctaggaatctggaattggagtcaaaaaggccaatctgtccatttgactggaactgtaagatacaagctcagggtggccatatttcattgtgtacctgaagaacagaaaaaactgatctttggggagaaagagtatagcaaatgcacagagaagaacttagggattgagagagctctgcatttcaggttgcaaggtataattcttccctgaagcttaggtgtctcccagatctttggttcaataaaacattcctatatcctttgattaatcatgttagttatttttgctagtcaatgagacttctaatacagtcatgttacagtgatggtacagacttctaatacagtgattacaggtctgcagtagcagggagtgcactttgagtgctttatcccccctccagcagggatgatgggtctcactgtcattcatttactcattcattttactcacaaacctttgtggatctcatattaagtattaatggctgaagacataagattgaataagacatagtctttgcaacctacagaatgggagaaaatttttgcagtctatccatctgacaaaggtttaatatccagagtctgcaaggaacttaaacaaatttacaaggaa

SEQ ID NO: 60584 - DNA, 3732 bp, Homo sapiens
caaacagaatttggcctggaaaatagaaatttattgacttattttaattccataaaatctcctccctgaaatataagacatcagaaaaatatataactttaaaaaatgaaaacaatcttcttagatgaaatagatgatagatagataggtgattatacagagatgagaaagaaatggagtacgtgtgaacacaattcaatagcccctttagtgaaaaaaatttccacaggttgccactgtaatacagcatatcaatattctttcctgatgaaacaagctggggatacagagttaagcctctattaggaaacagagaggctcaacagatccattatggattttattttccagcttgattatcctgagctcttgggagtgctaccatgaccagcgctgcatgaatgaagttcttgtccttcccttttaacaatctggacacattctgacttctagattgtttcatagactattttacagtcccactttgcattttaaatggaaaaatccctgggtaattatgcatctctctccttaagacatgtgaataaccacttcaaggactttgttctctctaacttttagtgggatggaaactatgtccttattttcttttgaaaagatgccagcatattgagcaggatggaaacaacaaacatactggatttaacaatgtaagtattttcagctattttttcagaaggcttactaatccttattttttttattttagtgacattactccattatttaattagattttcctcaactggcataggctgtgtcaggcatttatttttacccctgattacaagtgaaaaaaattgatgaagtaacttgcccaaggtcattcgatttggtatttgatggagctggggtgagaatatgggagatcatgaggattctcatgatcttgttatttatttttaaatgtgattttgtcacttcagacataagctcaccatttattcagttacctaaatcttttttttcttttaattgagacagagtctctctctgtcaccaaaatcttaaaactctcaatgggggtttggataaaaagggaattcctcaataggagcattgcatactcttagtacacattcacgctccattttttaaatcatgtctatcacctatccctctatctatcataaaaaaattcctaaggggaaaattcccatccatgtgcttaagaacttgaagaacataaagaacataaaaacaggccatatagaaacaaccaaacgttatcaattctgcagacaatagccatgaaaaatcattccaggcaagatttgctaggtaccaaaagagaatgtgaggctttctgaacaaggcatccaataagggaaacttatttgtgttattgatccagaaggtgaagaaaagggaaaacaatatacatatatatatgtatataataaacatatatttttctaagtgagaatgtctgtttaattatcattgtggtcatcataaaacattttacatggcttataaaatatcccaggatttatggccacttcaggctcagagcttccaatcataatgggaaagaattctgttagttctgcagatgaccatgaagaatgtggggttgggaaaagggtgactcatccactcctctgtactgcaataaatcaatactgtttagggtggtttcaaaattcatgttagaattaactcactcttaaagtgttgctttcaaaaccacaaagtctggtgcattaaactatactggagagaatgatttaaatttagaatctaactgaaacgcgattgctatcatttatcactagtatctatataattttaatggtctggcaaaactaggtataaacattgaaagcattacaaactgagctgaaacaaaatgatttatccttctcatatggaatagtgaaaagtcctttgtacagtttatactcccattctaatgaacccagaatactttcaactgatgttcaatcctcattgaaagatttgagttttcaaagatagcctaaattcctttacatttcaggaatttagaaactttctgagatcatggagacagtcagataaacctattaataatgctccttggtccagatacacacatctcatgctgggttttatgtttacctgtagaatatcttccataccagttttcttgtaaaggtggcagctgcccttccaaggctttattctggtcctgcagtcttgccagtgaatatgaagtcttttcttccaaattctgattgaatgcaaagtccacacggccagccgagggagtctctacctctttgttttgcaaaggtgctactttgatcaccctaaggtgagtcttagagtgactcaggcccatttcatgtgaaagacattcagaggaaagctgcgagggaagtggttttggggtctttaatatagcttattttaatcaaagcatttcagaagtttaccctcgctttacaaagcagtcatttccttcatggcatccttctagctctgtttcactgcacactaacccttttggccacttcctgggaggctggtttccatggagacttcccttcaactttgccgtttcagacccaaagaatccagttaaacattgacttggttatgctactttctgaaatactcagtgataggaatagaagccactgttgatcattaaacaaatatcgaacaccaggaaggttattaacagagagagatgtagagcagaggtttagagaagtcttaaacttgaccctttcattgcaagtacctttgtaaaaaaactaactgctgagaatagctaagccatctttgcaattaagaggatgcatgctgattgccaaggctttgttaatctttaatttaattaaagaatttatcccccaaataggaaagaaagcagcggagcggctaaagcgtcatttgatttttctgtcgatgacttgagttgcctttgaagggggtgaatacattgcaggacaggaggataatagaaatttttttcctggggataaggggaaaaaattcttgaataaatggtctaagtaaaccttgagtttttgaagataacctatttactatgtttttaaactaaattaaattaatttatttatttttgagacagagtctcactctgtcacccaagctggagtcacccaagcccagcgatcttggctcaccacaacctccgcctcaccagttcaagtgattctcctgagtcagccacccaagtagctgggattacaggcacctactaccaccacacctgtctaatttttgtattttttagtacagaaggggtttcaccatgttggccaggctggtctcgaactcctgacctcaagagatccacctgtcttggcctcccaaagggctgggattacacgcatgagccacagtgcctggtctattatgatttttaaagtagaaaaaaagactggaaggaaatgtgccgaaatattgagtagtgatttttgaatggtgggattatgggtgatttttattttattctttatacttagaagtgggactaactttcaagctctaattgttcatgagcacagattacttgtgttttcatcacatctccataaagaaattaaaagaaaatttatttttcatctttgcagaatccatttcctaagggactaaggtgatgtttggaaagtcttggtagacaatcacgtttatctaaaaagatgcctgaatttagttttttccttactctctttgcattttccacatcatttt

SEQ ID NO: 60585 - DNA, 393 bp, Homo sapiens
atcaagatatcaccctcactgctctggccctctacctggcattacacatttgtctaggtgacccagggccctagacctggctcaggtcactaggcaaagcagtgaaggcttcctgttacctgtggctgagcttctgcagggccagttggatgactgctctggccccatttcttaatttcctcagggcagaaattatatgaccatgatgacatccaattctaactctatgacctcttttggaactctgtagggcaagtttctgcgtgtctttgttgtttaaacaaaaacagaaagcaaatcggcatgattgctaaacaaagggatagagtcaaaagatttgctaatcttaggcttacttccttgctaccaatttgcatcctagtgaaggacaca

SEQ ID NO: 60586 - DNA, 1322 bp, Homo sapiens
aaatataggcaggataccacagcttacctataacttgaaaaagtaatatctgaaaagtgaaaaactctcatcaattatttgtgtcatctctaagacaggcaataactgtaaatctcctcacactaaactggttaaacttaacagtcagtcaaagattatgctgacaaccactgggtcatgttggaaaaagcaatgaatcagcaatactcccaagaacactctgggttttcaaatttatttttgatagtggattccttttcctcaaatacagtcatcttgggaactcccaatatataaaagctcgaggaagtagtgggtaaaggaaccaaggctccagcggctcacctgctcctctcttacaatgctcctttgcccctttctgccttttgaaatctgcctaaccttcaaggccaaagataaatgggcttttgcttcactttgcacacatagatctatcctatgagtgaataattagtatgctctttttcaagctaaggaaattgaagctcagagaagttaaaaactcatccagggtcaatggcagcaaagtgaaggcttcagttcaggacttcctgactccaaattctagcctctcaactgccaccctgcatgttgtctgtaatgctttacaaggctccacttggtactttcagagcatttttcttccccagcatatttcacatcctgcctcgcattacacatttttcttccccatgactcatcagctcctggagagcagacattgttctgctcaatcactcatgatctagcaaaaatttataaatagcaaatggagttttcccagttttctggggcttgccttccttgagaaagtccacccctgaaaatgctaagtgttcaccaagccaggctgcttcaggtaaatgatatgtactgccatcaccccctgcccctcctccatccagctggggtcatgtgactagttctcactaacataatttgaaatggaagaaaaataaagccattctaggctgatgagtcccaggtagccttccctaagttctctctctttcctgcctcctggctagctgcagaggatccagtgaagttgcataggtccaagaagatgatggagatatgggtgaaagaataactgagtgacagtggattatgaagagggcaaggaaccaatatattaatccactgagactttagagttgtttgttatagcaactggcatttgcagacagatacattcccacctatccaaagtccataagtcaacttttttcattagcaagctattctttcactataaaaatgttttcaaaatttaacctttggaataatggaaagatatt

SEQ ID NO: 60587 - DNA, 980 bp, Homo sapiens
cttgtctctactaaaaatacaaaaattagctgggcatggtggtgggcgcctgtaatcccagctactcgggaggctgaggcaggagaatcacttgaacccgggaggtagaggttgcagtgagccgagatagtgccattgcactccagcctgggcaacaagagcctctgtcaaaaacaaaataaataaataatctattacattaaacaacacttgcaaagcacctaccatagcacccaaaacatcgaggatacccataactattcattccttgtcccttccccgcagtgcgcagcaggaagcagtggggataatgggatattccaacaggcatctaggcagagcccaggaccagggaatccaacagaaagcagattgtgaagtattagggggtcaggtgcctccacagctaacctgcagcttactaggacagaccggcaaggtggattgttagtgggaaggtaaatggagtcagaagtggagtcccagggaaggcaccaaacccctggagattaagtagagaagaaagggaatttaaacgggaattatgtataatggggaagggtatgggaatgggaaggaattgaggaatagagtggatcttataaaatcttgaaggtgagtaccttcaataaaaaatactgagccaaggcaggaaaaccttcctcccaagaccaagattcagggacagactcccctgagaaaactggcaagaaaaggacaggggtttggcgacaaaacaaagacccaattatcataactgggatagaaaatgagagcaaggtcagagccggtgacaagatcagatcaggaggaacagctgccacacggtgctgagtcactgcgacctgatgctgagtcagcagaagaccgaccttctgattggtccccaagcttggggcagggctaagcatgcagatggcagtccggagccctcagctgggagccagaagcaggaatctaagcttgacattgaaagagca

SEQ ID NO: 60588 - DNA, 1419 bp, Homo sapiens
cccacagataagaaaacacatattcttgttatttcttgagaagattaaatattaggcaaaacgcctagcacagaatagggtctcagcatcttctgccccccaagagcatgaatcaaaggttcggaattgcgtcgtctctcggctgccccttggcagccaggtcctcagtgacctcttcacagtgagctgagaccgaacctcttcacagccgcgcgtgggtgcggctttggggcgtggtgggagggaaggatagggaggccggctccgccccctcagggcgaccggcgcgcctgatcgccgcggcctccgcgcccccgcactcggattcgcgcccgccagcgcctcttttcccctagtcctggcgacggcagcacctgcaagggtgggtccaacgcggaatgaggcacagcctgggacagcccgggcccggcgcgccgcggccgcgcgaggcccccgccgtcgccgacgcccgagcgccggagccccggccccgccccgcgagcgccgagacttgttggccgcggagactgcgaccctcttctctcagtctgccttactaccatgccgctctacgagggcctggggagcggcggggagaagacggcggtcgtgatcgacctgggagaggcctttaccaagtgagtggccgtgacgccagctgtgttcgacccgaggggagggcgggtggcagagccccaggcactgcctgggtcctcatcgccgactcgctgggcagctccgggcctccccttttcttcaaccagcgcccttgcaaataacagctcttattatttcctccctgggcgatgcgaatccgaggatcggggtctgactcccagagaggcccagaaagcttctgttgaattgccctcgtcgccgccccttgtcatcaccccaaacccaacaaaccctttgggatcatctgtgtaggggatgacaaccgtgacctagaccccgcttaccctgggctcctcagttgaggaaggcagccaaccgaatgtaaatgctcgatgacgaatttcatcataaaatattgaacggagtttattttggtgctgaaaatggaaagatgtttaagacagggctatcgctgctcaagaattagggagactgggcacattaagaggtgaaaccctatagataagattctggaaatcctttgttggctcccctaaactcgaaggttagatttgacatgttttaaacaaaccaacttgtaaacaatagagaggaggttctcaacctttcggatggcatagatctctttaatggctggatgaaaaccacaaatgcacaaatcttaaggtacttatacacagtttcagggaattggcagacaatcaatgtggtcctgggaccctagattaagagtccttgtgatgggctcaacagagagggaagtaacaggcaattacatca

SEQ ID NO: 60589 - DNA, 1979 bp, Homo sapiens
gagcacccaattcagaacccctacttacttagaccctcccccaaattacccaacaaaagccaagatcctataatcaccatcttactgaatcaccccacacttctcccttgttgccatgagtaataaactaaacgtatttgacaacaggtgtgggggttttctggttttttttgtttgttgttttgttttgttttggtctatggctgaagggcattgtcagggttaagagatgggagggaggggaaacttgagcttaggcaaaaggggatgggcttttgctacacaggggaacagagaaatagaatggcagcctgtgaggaaactaggtcgaagtttttaagataaataacagcatgtttgtgtgttgaacggaaaaatcaagaagggagaaaaatggatcctttagtagagagctgggggatgacacgtggagggtacaggatccagtgctttaggcagggttggcttcaggtaggaaggagcataaaccgttcgcctacgtggtctggcgggtgagatcctggaatgtgtctggctgtggtggtccgagtgggcgaggacattctgctgacttcacagttctcagtgcaaaggggagaaggcggaaacctttcctccctcacatatccaattgcctatcctaattttcatatctcagttgttttgtacgtctttaaagagcctttactagaatcttaatttcctagtatccatccccaagaagaatggaagaaaacttgatgtatgcactggtggtataaatctcactacaaaaagaactatttttcactatatatttcttcagggatagactccatattgagaataggaaaaaggacagagagagagagagaggaagagaaacagagaaggataaattggttctttttcttcggagtcctcaggtgcctctgaatgtttttacatccggtctcttaaattttagaagagcagccaaaatgtggggctcataggtttgttaagataacaattaaaactgccctctaccactaactatccaagtatgcacagtaacacaaaaaactagtctttaacagtgggcatttggtttcctctgtgttttaaggagaacacggggaggacgtgtgatttcaattgcgcaaacacagtttgtgacctgtttcgtttacaaaaggttaactttttactggagaatctggttaatattgaaagtgtttaaattaattctgcttgagaactctgtagtttaagtgctttagtgaaagcgtttaagtttcaggaaaaaagttacaacccgcgcccaacgtggggctcgaacccacgaccctgggattaagagtcccatgctctaccgactgagctagccgggcgcctgttacgttagcctgcttttttacttcttgaggactgtttaactacatggttttatattctccgcgtagtttcttttctaaaaaaatttataacgtactattagatcggcacttcagaattatttttcagagcgttctaaatatttaattgtacttagatttaagaatgtttgtatatgtatccaaagatcattgaaaacttatgcgaatctttatcattacagagtcattgaatctttttaacaaagtgtttaaaaatatttaccaaccaatatgttttgtttacataaacacatatcaaggccatccaacttccatcaaatggcattccggattcctacatgtttgggctccgcatttagaaacaaagtccaatctctgaggggttagtttccctgaacaaccgcggggcttagctattttctttagcatggtctgatgaaggagagttaaattcagaaaaggggggcttcgagtcaattaatataaggtctctttagcgtaattgtctgacaatgagagataggacgtttggagggtgctattattctcctcaagtgacaggagctgggaggaaagaattatagtctctgaatctaatggtaaagaatgtgaactctaaca

SEQ ID NO: 60590 - DNA, 2794 bp, Homo sapiens
gcatcacttgaatcaaataacaaaaaaatcaaacctaaattaaggaatattctacaaaataaatggtttgtattcttcaaaagtgttcatgccatgaaaactgaagaaatactaagcaactattttccagactaaagcagattggaaacatgacaactgaatgcaaggtgtgatcttggattttcttttgctatgaaggacattattgggccatttaccaaaaaaaaaaaaaaaatgcataaagttgatagatcatagtattggtaattttctgattttcacaataatactgtgtctctgtgaaataatgttcctgtgttgggggaaaatacacactgacgtattaatatttaggagtaaaaaaaatgctgatgccctatttacaatcggattaaaattcaaaccacttcaagatttggtctcctgtgcacttgttctcttcctgtcattcttccccacttaatcattatgagaggtcactctgacgtgacagttcccagcgcaagccaagttttttactgttccctaaaccactgtcttttgttaccctattttagtttaaatatcactcactcagaaagtcattccctgagcacactgcctaaagttagtacctccattgtctattaaagcactctttcttcttactattttgcttatttattgttacctatttattcccactgaatggaaattacattagaaatgggggtatgctctgttcacggctttttcttgaacacgtggaatatactagcgctcaaaaaatatctttaatcagacttatctttaactcttaccaaaaagcgttatactcatagaaagagcactaatacttccgtaaaattctaagctgaattcaaagacgataccctttaagtgaaacttcacgagagcctgagcacaaggaggtgaagtggatgccatcaagattctgggtcagggtcgggacgcggaggaagacaggttacttcgcgcctactgctttttctactttttgtgagagtataccagcatctctccctttggcttaaagaaagaataaagtgaggagagaataataatataaaagataaataataattccaaggaaaggaatagagcagcttctcagataccacgacgccaagcggctcaaagtacgcgaaccgaaggaggagcctttgctttccccaaccccgcctccattgcttctgcacatgcgcgccgccagcctctcgcggcccgcttttttcccacaatactcctcgtcctgggggccggagccgcggaacgagccacagagaaaaaggttattggttggcagttcagccaatgagcgggcctgttactagtttgcggcatcctgtggtataggggaagcgctccgggcctggaatccctacgcgtccctttgggtttagcacgatgagctcaatcggcactggggtgagttcgctgtctgtcggtgtaatagtttaacctaaggattggggttgaagggaactcggacagaccacatggggttcgcggacccggggtgctctgagaccgccttcggctgggtgggccatttgcagctgtttggagaccggtcgtctttatcccctatatgctaggcctgcgtctcaggtgaccgtgactcctgaagcttttcagcgcaggtgtagccggcttggcgtcgccgcagtgaggtttggagccgctttggattgctgagtcactttcttcagccacttagggaaaccgaaagtggaaactcgtggggcttgaaatagtgtgttctcttgagaaccaccgaggcagtgagatttgggattccggggtctggagatcgtgctttttgtggactgcgtttgcagttcctagggtgctgctgattcacaggccttctctgtctttaagtgtgcagatcattgaccgctcagtttaagagtcactggaaatcctgtcggaacagaactaataaaaatggtctgaaaaacaatctgatgaatccttcagtttttcctttctcgtttttcctatacaaattacctaacagcgcttgtaggcatttattccgtaaacgtttaaatggttacttaggaacttaacagcttcagacttttcatagactgttgaggattttgcagtgggacttgttaacttgtttggctttcctttgttaaacgtattgcatatgtgcagtcagtttactccttttatgtacttctctatatagaaaatacagtttctaaaagatttattggttatttgcactagagttattgaataatgagtttctcagttcctcaatttctacttcttaacaagattctcatgctcagccttaagttcaagtaccggtgttctaaatttgataataggcaacttatgtctggaatggtttaatccattcagttatgaatgctaaagttctgccatacttttcttggataagtaaatgctcaatattaaatcttgtagcaaactgactttgcaattatattaatattaccttgaattaatagtatttcattctacaaaccttttaaagaatacttgataatgtaaccatgtgggatattttagtaacaatggtagggttaatgatctgggtttaacagatcaggaaacagactcagaaagtaccactgctgaaggcttttcttctgtcttcatttctcccaagaactccagatacgaatatttgtttgtctgcttgacatgtctgttcacttgatcgtttaatagtcatttcgtactgcatgtgaaagtagagctctgggttttctcctcaccttgccattttgcatctactacagtcttcagc

SEQ ID NO: 60591 - DNA, 973 bp, Homo sapiens
agcacctaccaacttagtggacaaataactgatacggtttcccactttcatatgaagtaactggtggtcatcagtcactgttaatctttagatgtgatacagatgacagatgtttcagttttggataatttttcaaaaactgacccttctcaaaaaagacccttcaatacatgagtcaaggatgtttttgcttttttcctttattgtggtgaggggcggatttaaggatcaataaagtccctattctgtcactaaaaaaatttcttgatctctaaagattaaaataaaaataccaacatcagacagctttcatgttaaaaatcagaatttatgttaaagtgctctgtaaacagaactgttactaagtggaataaacagtactgtggccgataagaataacttgaagctgaaaagcagtactcacagcaggaacaatttgaactcaggccatgtatacacaccctctagtggactcatgccagtgtcactccattgaagtgttgtgctttcctaagaaggtaatctagccactgaatttgggtgcagggtatcgctggactttgagcatttgtgtagtttaaatagcaaatcattatacctgagtattaatagctaactactacacaaacaactcaaaaccagtaatgtcatgtcattaccatggcttcttttatgtaacattatctgctacattttaccactcaaaatatatttaaaatatgtattttaaaatatattagagcatatggctcaagcaatcctcccacctcagcctcccaagtagctgggaccacaggcaagcaccaccatgcttggctaacttttaaaaattttttgtagagaccgcatctcactatgttgcccaggctggtcttgaactcctggacttgagcaatctgttcacctcagcctcctaaaatgctgaaattacaggcatgagccaccgggcctggccacaactcatatatttaac

SEQ ID NO: 60592 - DNA, 3607 bp, Homo sapiens
atttatagggatggttccaaatattttagaattcaacatcagctcccaaggaagacaacatacagatgttaagagaacatttccaacatgtgagtgaacgaagagccagggtgccaataaagaagaaattctgtaactgttcactaatggtcagggattgaaaagcatctttcatattttactgacaggtcaaaaaagagaaaattagctctgacttaatgcagaccaggtcaatttggtcaaagagaattttatagacgagctttggttccaccattgcaaaacaatattccgttaccagcagtattagtaggattcaggattacactgaaagcatattctactcacacattctattaacaactaattggaatttcatttcataggataaaaactgacagaaaattcatcatttataactaggtgttctatttactattttagctgcaaaagatttttaaaatggttttactgcaacttccccccaaaacattttcaacatttaaaatgtagcccagttctaattaccatctaacctttgacctgtctcttctataagtgaagcaaatgtgtctaaatacagttcttacatatttctggaataaaaacctactagaaatgaacatagatccttccttcataggcaatataataattcattcacaacctcaaacacatttgacatggaaagcctaaaggcaagccacaaagtaggcaagtcatacactaaatagttctgacagcaaaaggtttctcttccttcctggcaaccctctctttcatgataagcagccaaatgaatctttctgacaaatgacatcatatatagacaagacatgccattctcccccaccacccgccctagatatctggacggcttccaaactgaatttcaggagaagctagcctagcataaaatccattcttttccctaaatggaaatctgacaaaacaggaagtacacagcagcacagagaagcaagttttgtgtcttaagtatttactggtaacagactagttcttcgtgactaataaaatgcagaacttcaaatctgagaggaaaacagcaagtctgccttgggttaccatggcctcggcaattctaaggccttaaaagcagtatcacatgatacacagaggaataagaaacaagaaggtggtgcttttttttttttttttttggttatgttccttcatacaaaaattcccctccctgtcccatctgaccaagatctaggccaccaaaattatacaaacactggaagaagctttatgattgcatatatagactaagaaactaagattttttgagaaacagtaggaattctggtttgatttgagggaaataattggggatttatttttatttttttgcttgccataggatttgaggtaaccctaaatgtaaataaatacaaatccctaagatccctaagtgggctatttgaactggcagactcagtaacatattaaacctatcaaacacgccaacaaaaagaaaaaaaaaaaaagaacatgatttcatcctccatgccttttttcccactcaacccactgctgttaggaatttttcaggtaatgattaatttgtatctaacgtctaagctattacacataagtgtagtagtatatctaagtgcccagcaaatgttaaagtaccaaatttaaaacgttatctagttgattcctcaccctgtccaaagaaggttgagacagacctacagttaagtcatgaaaccacttctgtggatcacatcagactttttttttttttctgagatggcatcttgctctgtacccaggctggagtgcagtggcatgatctcggctcactgcaacctccacatcctgggttcaagcgactcttctgcctcagcctcccaagtggctgggactacacatgcgcgccaccacgcctggctaacttttgtatttttagtagagacagagtttcaccatattggccaggttggtctcaaacttctgaccttatgatccacccgtcttggcctcccaaaatgctgggattacaggcgtgagccaccgcacccagcccatctgattttttatacaaatgaactacagaagaaaatattgaatcacacggtagtacttttgtgtgtgggcagtatagacatacataaaactgaaatgtcaccataatgacattaatgaaatgtcaccataatgaaattaatcagtgtggctattacttgaaatatctgttttaccaaccaatgaaagcaatcagaactcttgttaaataaaacagtgagatagagggggcattaaagtttctgtcagaatttgattctaggaacatcagccaattcctcaaatgctaaaattatcaagtaaatgtctaagacttctgattctcagagtttgttaaaaaaaagttaaccttgcaaagaacaggtggatattagaagcttagaattcttgttttaaaaatacggtgctagactgcaaccctaaaatattaagagctgtaaatacctagcccaatgaccctcattctctaaaagcaaaagcagtgatgtatcccaggtcacagccaatgagtaataggcttatgagtagaacacataacatccagttttcaaatccagtgtttcagtattaaagtgcttattcaatccaacgtcctgttgaattattgtaaaaattctgagaattctggagctaagcacacacaatactgctttaactccatgaaggcctatgagcctgatattttatctccccaattcctgccattctcattttgtccaaatcatgatgccacacccttagcaatatcacagcaagcaaggatcaagtgtcctcatgaaatatctcatccagttcctattcttaggctatacccagtttcacacctaaaggcattatggtattgtgattaaaaaagaaaaatacttggagggtgacactatgggttcaataatttattgagccacgtggcttatctatcccactactggcaggtgacgaacccttagccctggatgaacttttcccacatttgtaccactgataattattaggaagatctgtgaaaaatgaggtaacaacaagcagaaaaaccattctctggtggttatttagagatacaatctttttttaaaaaagtgatttcattttaagtgactggccaggacattcttgaatgtacaaacactgacaaaacacatttttactggcatgcatttgtccattaaacataaccttttagcttgtgataccttttataaattttcattacacaaatgaatgcctactaagtcccaaggcctatgataggttctaaacctacaaggaagaaaaaggtacagttttctgcctgtaaagattgcacaacacagtaagagagacatatgtaaataaaaggctaaagtgcaatacaaaaagtggtaaagaatcatgtaagaggaaacatgaaattcacatgatgattacctatatagttctacctattgaactatcagaaaacttcacttaaaaggtagcatttgaatacaaggagatgggataacaatcaaattggtgagaacagtatgaacataagtaaatgagaaaacatatggcttgtacaagagaaccatga

SEQ ID NO: 60593 - DNA, 1693 bp, Homo sapiens
tgataaaaaacataaagtttacttctcaacgtaagttccaccaaatcaagacacttttgtaagcaataataccagtcattcagtccattcctaaagaactgagggtcctgggaatttagctatgtcaatgcagtcttttttacattaacagaagaaaaatgggtgcccttaaaaaaaattggtaagattaggaatcgaagtcagaaggagccaaatcagggctgcaaggtagatgcctcatattttcccatcaaaattcttacaaaactgccctagtttgatgaagggccttggctgcattgttggggtagagtacgttttggtgaagctctctcaggcgtttttctgctaaagctttggctaatttttttcaacaaaatactctcataagcagatgttatcgttctttggccctccagaaagtcaacaagcaaaacgatttgagcattccaaaaacctgttttgccttgacctttgctcttgaccagcctgcttttgctttgactggaccacttccacctcttggtagccattgctttgactgtgctttgtcttcaaaagtgtactagtaaagccatgttctatctcttgttacaatttttcaaagaaatcctttagggtcttgatcacacttgtttaaatttccattgaaagctttgctcttgtcttcagctgatctgggtgtacagttgtggcatccaatgagtggaaagtttgctcaaatttaattttccatcaaaattgtgtaagctgaaccaattgagatgttggcataaacaagattaacttttcccttgcaaatcgatgtgactggtctgctgctgcaggcttcatctaaaactttgcttcgtcttaaactagttatgcatttgtaaactgctactgatttctttggggcattgtccccataaactatttgtaaagtatcaatgatttcaccattcttccacatcacaactttcaccatcaatttgatgtttgtccttgctacaattttagcagaattgattttgccttgatagggactctttgcaaactgatgtcctatccttcttagtgcctcaaactagatcctgttcagacatgttataacaagttagtatgagtttattttggtgcaagaaaatttatgttctcacaaaactatatttttttcaataatgaaaaacaaatctctccttaatttgagaagcatctggttttcctgaacttattttttcttaattcaagttgaactaaagtatcagttacacttaagtctaatagaatggaattaaaagtcacaatgtagaaacaatgtagggtttgggacaatgccttgtcccaattagggaacccgcaaagattttgacaaaatgaagaataaatgcttactggacatttcaagctctaactagcatgtttaaaacagatttcatcatctttaccaaccagtggcttttcttgacttgccaaatcagtgaatggtactgctcgttccctctttcttaaatcttgagtatgtttcattttctttcttcttcacctctataatcagagatcaaatgctgtcaagttttcctccccccaccaaaacaattccttgctcacctattcctttctctctccagttcctactctagtttcatctcatgctgataccacttcaacagtatcttgtctccctacttccaattcctgtgtcatttcttca

SEQ ID NO: 60594 - DNA, 3854 bp, Homo sapiens
caaaaccaacaaaaaagacaaagccttttgtataatatataactatagtgtaaaccgtaactaccttttggaggagggaagacatttttgtattcttctttgggctttttaataatttccaaatgtccatgcattatttggattcaataataacagtttaaactttgatcgtagaattatggatgcttaccccctagaaaattcagtaatatattgttttataaggtcttttaaaaaactgcttcactcctacgagattgcgccactgcactccagcctcgatgacagagagagactctgtctccaaaaaaaaaaaaaaaaaaaaaaaaaaagcctcactcctaaacactcccatttacaagatcttttctatataagaactttttaaataggcgggtgggggggaggaaatcacaaaaatacgcataatgttttataacaaaaacatgaggtatatcaaagtccagaaatgagaaccacgtaaatgggtaaacaagtccataaggatgtcctaattttgggatttcattctaaaatattacactagaaagctaattatacagactcatttgaatctgaccaaacaaaacatcttttaactacccttcctcccattctggtatttctttactaatccatagaaagtttttccaggtagtcccccgcaattctaaggatttttagactttatgactcacctcagtaatcactgagatgttctgttttcttcagcacaactgccaaaaaacccagtaattgttaagtcacacaatcattttctagttatgggcgccaccaatatagcagtagggtttaaaacagaggtattgagggtaactattaggatctatccagtgtgactaggtcactcactagaaatgccaacatgcatttcacgtttttatgaatacttttgagcaaaattactgttacgaataaaaaactgattctgctcggctgttttcttactgagaaaatttagtccacgtggattactgacgatatgtcacattttaaaaattactccattctataaaactagtcaattttatactccaattccgctatttaaaaatgtgtgtttcgtttaacagaatataagatgttaacagaaaaagatcaacgtctatcttatcggggacgtccttttgtctaagatgttttcagtccctgcaaaaccactgtttgctttcaaaaagtagcataagcctcgtgcagagtgacagacccttgtctaaggtcacagaagaagcgtctgcgctggcaagtaaattcctcagcatccagaaagccagcgctttctccagtttcctcatagctttatcccgtgaggagcacgcggaaacctctacccatgcaggatgtttctaagaaccacttcttccctgtcttaactaagaaggctcccacagctggtgccaatcaggtggagaacatggcaagtccccgaaatgcacttccaaagacaggaaagattgcagtgggacagaacccagaaaatctctcacattctcgaaaacccgaaagagaacctccaagaaagacgtttgcctctcctccacctctttatctcggcgggagaggaagcctcgcccccattcatcccgccccttctccccaccccgccgcagggagaagtttaccatggctgcctgcggccccttcacttccggtgccggtgccgctagggctgcgccatccccccagtcaatcggacaaccatagcctccaactgacctttctgacagctctgagactcctccggccacgactaggtgctgtcctggaggaaacggtggaggacggccgcacaaaaaccaatctacctgatgaaaactccgttcccttctcgccagaaacataaaatgcgatggagctacggccaccgctgccgagacaaaatggcgccgacaagctggtttagcgcaagcgccttggacagaccctgccccgcccccgtgcaagcccctggctgcaattctgggttccgtttccatgggacactccgccgccaatcctcgtgtcgaactgctcttcctgacccctcaattcaccaatcagtgcccagtcaagcacatccggagtcgtctctaccaatcatttctcaggacttgcttactcaataaccaactctccaataaagttggttttcggaaaaagccaatcataagtggaagatgtcctacctgctgtttttctcaccaatccatgaagtttcacagctacatccaatgaggacggcaggtagcgaggtcctatccgaagctcttcggcgtcatgagcagccaataggagttcgtgtagaagcgagtctgctcaacagcttgttatttggtggattgtggcagtaaatcggggcgagtggggaacccggcgcaggaactgcagccgcggctgggagtggtgctgcccggacgggggcccacggaggtcagaggggaggaggactctggagctgacagcgcgcacttcacccgcagttggtaggtggggagaggggaatccggggatactgaatggacgaagtggcagtagcagcagctgctgctgcccgaggtcccggtgcagttggaagctttggaggtggggagagggatgctaggcaagtggcacggcgagcgcaagggaaggggccagccattgaccagcggcagcaactgcaggaaccgccgccgcagttgcagccgcctcctcgtccgcttcctcgggttcccgggaaaatggctgtggggctggccgcgccgctaagtttgcttccgcgcggtgaagagcgggctgcttgggggagccgtcccccaactccgcggcgcgtccacctctgcggagtccgtggcaggactcgaggggctacgagctgatacctctctgggctgtacaaaaagttgaggcgggcgctgggaggaggcagcggctgctgcggtgcggctcccctcccctcccacaccctgtccgggccacctcccctcctcctcccctccgccccccgccccctcccccacgcgggtcccccggggctctggcggctcccggctgaaggccgcggcccctgcccctttgggtgaaggagcgcttctcctttctgacatggtgcagagcgaaggaaggagagcaatggcgccgtgacactccgctgccgccaccgcgggcccggggcgggccgagggggccgagcggcggaggcggggcgcgggccgaagtcggggtatccgggggaccgcggagcggaggctcggcggtcgtctccgcgggggacctggggaagcccgaagggagctctggccttttccggagctatctgtcctggagctccgagttgagcattccgggtcaaagtggccagcgaggcgggggcgcggtgggccgctggcgagctccggggcggaacgggctgccctttggcgctcgtggggttctcgctgccccctcagctcctgcgtcctggctgccctcgtaaggggtcttgtcccttggctggtgaggattctgcccctccccgctggcgtttgtttactttctttcccttggtcgctccccgcagttgactgattatgtctgtgcctgtctttccccctccccatagttctagcgactgcgaagatagctcgctgagctggaaccccacagatcaccaacaaaaatgaaggtaagtggagtcaactctgccccgatcctcgcgccctgaacactgccaatcctaaggctagtgccgtggaatgtcatttgttttgctactcaaaattgatgttcctactgatcagcagtttcggcataggaggatgtgttgaatgggtgaaaaatgatctgtgtgtctaaatgcggagtttaggccctctctgtagcagtactttggaaag

SEQ ID NO: 60595 - DNA, 1387 bp, Homo sapiens
tctagttctttaggtccctagcttatgccttttctcctccttagtagaaaagtcagaactctggtatttaggacaaagtcttaccttctttctttctgctgtgtccgctgagtaaggcaaatattagaaaagcagctaggccagtatcatgggactctcagttgtttttgctttgggacctttgactgtcagtctcagcccagcaatttaacgtatttttctagattaaacagtgttgcttctgaattcctcccttggaccttggactgctgggtcctttcaggagacaaaggataccagattggggagtacgggctactgttagacaatgtgaactaggaggtgaccaaagttgaccttagagtcaacttaattttgcaggtgagggaacagagacctaaacgaccactggctcccagtaaagcagattcgcagcatactgtgctttgcctgaatgggtgttgtagacacaggggcagaggcgtgtttggagaaagggttcagaatttggagtgcgacagacgtaggttcgaacagagctctgctactctgtggctgtgagggctcccgcacacaccctctcgaacgctcggcttcctcatcggtccgcaagcctgggtgcgaggcgtcaacgcgcagctgggtgcgcaggaggccccgaggccggatgggccgccgcgccgacgccccctgccggccggcccgcgcccaacgctcggcttgtgggacgcccgcggtcggatgccctccgtccgctccctcctccgcctcttggccgccgcggcggcctgtggcgccttcgccttcctgggctattgtatttacctcaaccggaagcggcgcggggaccccgcgttcaagcgccgcctgcgggacagtgagtgggaccgaggcggaggcgcggccgggccgggcagcgcgggcgggctgccggccgggagggccccccactgagaggccgggccgtgagtgcctcagcctctgccgaggggcccgcggcgcccgggcaggcaggaccactgggcccacgcgtgcctctggacgggcctcccagccagcatgtgccgtgttgtgttcgcagaaagaagagcagagcctcaaaaggctgaggagcagggcacgcaggtgcagtgctttcgatccgcacaggtagctcagtagacgcaggtccgggctcgctgggttgcttggctcctggcgggctcggcagcaggtagttagttccctcagccgcccgtgcccgggaagaggcctgccctcgcgcgccacgcaccgcctcaggcccagtcactctcctctcacaaaagggagggaaggaaggaggaagaagttggagttataaaaaggcagctgcaaagcaaaacactgtacaacaggcacttctttt

SEQ ID NO: 60596 - DNA, 2580 bp, Homo sapiens
cctgccgggttcaagcaattctcttgcctcagcctcctgagtagctgggactacaggcgcgcgccaccatgcccagttaattttttgtattttcagtagaggcggggtttcaccttgctggccaggctggtctcgaactcctgatctcgtgatccgcccgccttggcctcccaaagtgctgggattacaggcgtgagccaccgcgctcagactttaaagtccattttaagtctagacttctatgaaggtagactgccgagatgtaaaagaaataaaattagttatttagcttttagatcggattacattttctgctttgattattctaaagcctccagtaaggcgtaaagggaaagctctaagtagcgcatcctgggaaatgagcagatcagggaaggggtgttagacctggtattatgtctaaagacgattttcatttaaaggaggatcttcccccgggcagctcaaggtcacatcgtaaataccttatagtctaattcagtgtcccaaaacaggaccccgactccccagatccgggttgggggtggctcagggcctaaagttcctaccctcgcccaggtgacaccatctccaggaaggtctgcacccgacccggcgaagcgctgtcccgcttcgcaccccccactgctccaggtacgtgcggcggcctcctcgggagaccccgccactttcctggagcgtagcctgccaccccccgtccgggaaccccggattctcacggcagagaacagacaccatacttaagcacaggctctcgcatccgacatcagtacaaggctgggggttgttgggggacggttgagccttgggagggagggtcagggtctggacaggagccgcggccgccagatgggaaagaacacgtgggagcagtaatgtcaagtgacacttaaacccttagacgccgattcgttataacgcgaggaaatctagaagaaaaagcaggtaccatcagcgaattctaaaatctcctaaggattaacttcggttattttctgcttagacaacgctttctattcccgacttcctctccaataatgacccgaatctgtcgaaacttcttggaagcctaatttacctaatcccacgtccctaacggtcttcggaagcgaagcagtgtcaacagtccctggtaaacacaagtagtattacaagtcgggagctcttcaagtcttggatgagactgtagagcggtcttgtgcggcaatgtgctaccttaaaataaataaataaataaacccctgttatgtccggagtttgtttccacccggagaggaatggaagagcaccagagagcgcttagctttctggttggatgttttgggtgagtttcttggcgcgcatgcgtgttgtgtctcaagggcgggtttgaagggaagtgggtgttgacctgcgggcaactgacgctgttgtcagattacacccacgacggtgcgggtctcgggcgttctggagatacgtaggggtgaatttatgtttccgacgattgcatctggaggggtgtgtaagactctgtggctgaagaaagctattacgcttcttatgtgggtcattattttaaaaatagcatttcgcttttatttgcttgactgcctcttctcaacaaattttaagcccgccactacatgtgtttggttttgccctaccagctctggggttggggagtgcactgttatggttattgttgctcctgtggccattctcttgtcatccccactttcacattttggcgtggtgtattaatagactgagtgggattaatgggtaaatatgactttatagtcagctctaatcctggattcaatatcagaatttagattttcagctttgtggatgttcgacattttaaaaacagttattgcaaagaggtgaaaattttgttctgaagtcttaaggaaacagagaaagtttttccgtccttaagtgtgggacttgttttgtgaccaacaatatgaaaggctctgaggtcagcttggagaagaaaaaaaagattaagatgccagtgaagagacttcgtgaggtagtttctcaaaatcatggagatcatttggttttgctgaaagatgagttgccctgtgttcctccggcattgtctgcaaataaacgtcttcctgttggaacggggactagtttgaatggaacatcacgtggtatgtgattccatgtagtttttcaaccagttttagtttagtaaatctttagtccttatttgtttaaattcccaaacgtaagatataagtctagtttgtacagatgtttgaaaactgaccctgtttcccgggaaaatggccaggaagcctataaaatgtttgaatagatggaatgaatgaaactttaacgtcccctgttgtgctttttttttttttttttgcattgacttttgcatatttttttttttatatttatggtggatacacttaacttgtataatgtgctttattttcccccacgtagtgttttttatagttttcccccaaagtagtgctttttacctaattcactactttcttttcatagtgggaaaagcaggacttctgccaattgatggcttctatattc

SEQ ID NO: 60597 - DNA, 750 bp, Homo sapiens
ctggacaactggttactcccaaaggaggctgtctggagatgtggctgtcagcatggatgggtatctctcatagcctgtggctcccccaggaagcccaggtgagggcctctttaaaagcagatggctctggagaaaccacctcaggccagcagctggtgttctgtaaacagccctcatctgccagatgcttgcctgttctccagttggtgttagagactaagagctctgtcaaagtgggtgtagttttaaaacttctttagctgctacatcgtcccccagtaacctcaccccttcaccccagcattgttcacattctgctaccgatatttgatttacatagaaagcaattacttcatgagctgggtatgtgcagtgcttaagtcttctcactcaggagcctttagaaataaaactcagattaggtaacagctagggcaggatcattgagaacattttttaacagtgacataatgactttcctcagttattttcccattgtttgaaaggaatcattatctctctgtgaaaccacatttgacattgaggcttcagtgaatttctgaaaggctggcccttccatctgaatggtaagagcctacctgccttctgataatgggctctgcaccatcagggtacagaatggatgctgggtgcttgcaggctgccctgatgttatccattaagggtacatatcttacaatgtgagaactatatctgatacagattttgctccacaagaataaacttatt

SEQ ID NO: 60598 - DNA, 768 bp, Homo sapiens
aggcattgttaagatagctcacccggaagtgctaaatctggccagttcctgagggtgcttttttgttctagtaaagccccacgtttgggaatcaccattttgttggaaatctctctctcttctttttgcagttatgtcatgtgatagtcatcttgtatagttagggaccatctagcattcacctcatcacctcgaagaggggcaatgggtcatggccagaggtgcagactcctgtgggtttttataacaacatatcaatccaatataggacttgaccttgggggccactgtgcctgtgaatggagcccttggaagagaatcagaaagattgataagaacttctcctgtctcaaggctggctgggagagaacacagtctgatttgctccatttggctctaagtgaagcttcctccaagaagtggcttgaaatatgttttatgcatgataaatgacaagggcttatatagttcccgcagaggttattgtgtcatctgagtttgcagatgaaattccaggaggtagttgtcactgcattatcatggcttttgtccaagaactccacagccccagcagctctctatgttcatagcaccttgatgagaaggtagcacataggaatggccttattctgcagaaaaaaaaaaaaaaaaaaaaaagacagagacaggagttcttaggactaggtagcctggatttgtgcctatttcttgttaattgcagacttttggaaagctcactttcttgacgaggcctttttgctccaaaat

SEQ ID NO: 60599 - DNA, 641 bp, Homo sapiens
cagaatatggcccaaactcttttcggttctattcatactttcagctaagtgtcaggattcagggcatgcccatagcaaaggctgggctcagtcacagcaacaatagaaaacgcagttccaagcaaaaggcaggagcaggcgtgttgctggcagacagccgacttggcaggcagtggcggggcaccttccgggaactttgctcaacagtccaagtgaccccgagagtcctatgagagaagctcagaaaatcagaagcagagggtcacatttgatcagtccacagtgtcttctgaggaaaggccatcacatgttttacggggaggctggcacccatgttaccagttcctgtttttctgttaaatgttactgtttaacagaataaccttcctggtgctgacttgaccgacaaaaataaatttaaggagatattaaactgttgagagtcaagtgtagaagaggaaggggaaattcttacaaccaattgcaactatgtatccgaaagcaagggggccagaagctttgtattttaattgcaaatttaaaaattcccaatcttgtgattttcttccaaagcagttgttactcagctcctaacacttctcgtattctacacgtctttaatcactcttttcacttttgcc

SEQ ID NO: 60600 - DNA, 489 bp, Homo sapiens
tttgttgaaaatctgccagaagcactatttttttttaaatgccctagaagaggggatagaaatcaaaactctgtagtttgaactctttagtttgaaactcatccttctaaaattctctagcaagccatctaggagacaactatttagagttatctggattttctgtgtggagtcaaagcttctgttctttgggctgcgtattttgcctttctagtcagccttgcccttgaatcaataagagttcacagaaggaaatgttcagggctctcttggtcatgagccaaggatagctgtgccggcgaagcaaaacaaatcctcaacaagaatgtgtaaacaaaaatcatctgactaatgcctggtacaaaatgatggctggcatttgtacttttggttgaattttgcgcaaaggagcaaaatgattttgcttttgttaccctttttttccattgagctctctggaggagtatcattaatttggaattcagggct

SEQ ID NO: 60601 - DNA, 710 bp, Homo sapiens
acagcaacagtcatttaacatcaattttagtcttatctctaatgtttcccttctattcaaacacttccttcaattaactccatactagatttcgaaaacaagtcgtttccttgtttcattttattcccttttcttagaaagtcacctctcttcttttcccttattgaaattctatccatccttggagggagagctacaatgtcattttcctggaggcccatcccactattacacaagacaggttacctacctttgtaacattgaggtttttctgctaattagactcttagctcagatatatttaggttggtgagtcatttgtgcactttgttcttccagagaaaaacattgttgtctgcatgtctttatgtgtgcatagtgtgtgagagagccctttacaatcataaatgctcaatctaggttaatcgaaagaataaataaataacgaatgatttgtttggaaataaaacaaacactggctggggtagcagcgaagctgtaaaaggctaggctggggacctagtctggttgcctgttacatgcatggcttgggaaaataatttaacctctctgaactcagtttcttcatctgtaaaaacataagtgatcctgcctccgtcctttccctgtatacttatgggatagttgtgggaaccaaataaagaaatgcatgcagactgtaaatgctaacctgaggtattaagttccta

SEQ ID NO: 60602 - DNA, 600 bp, Homo sapiens
aaaatcatctgctgaaattgagaggaagagaagagaagccaaagagtgtggaaggtttgaaatggcaattatagagagtggtgggccagtcaattaaagaaacttggtaggatgcacgggcagcacggagtgcccagttgaggctggtgactatgaaactgtagtgacaatgggcacctgtgtgtgatagcgccccagcacttctcagctgcttgatgcaatcacagagatgacaaaatagctagattagccaacagagggtttggttaggatcagtggttatttaactgggatttgtgtcagaatcacactgggaattttttgggaacactcacacacatgcatggactatgtccctaagattccaggctccataaacctgatggttggccaggacatttgtgttctgaggaagtttcccagtaatgtgcagcagcagttaggaaccactcatcagttcaggtgcaactaaagaagactgacaagggagtgagcaagagtgatattggaacaatgggcagtaaaatctaagccaaattcaagagaaaggtaaagacacagcgtctcacaggtagggttaatgcagagatcaataggtag

SEQ ID NO: 60603 - DNA, 2034 bp, Homo sapiens
ggaagtctgctgcagggatgaacaaaagcatggctgcacgatagtattatctttgcagcagcagcaggcgccctgacggagggttgcggcgactgtctagtctatcacaccgcacttctggtagtgacaacctccgttattctgtcagctcagccgactaagtggttccccgcgttctgcctggtcaccttgtctccgttaaacgggaagcagaaaagagaaaggtgaattgagggggtacaaggagattcctccgccttgggaccggcgtcgccccatcctctggaagtgttgagcggggagaattcgaggaccgtatttaacccagaaaacagtaagccctctgaattagctgctacgcctggggaaggcagaaaagtcttaatcgtcccttcccagcagggaccaagaaagaccagttagagcgagcctggccggaccacgcgagccccggacctctccgatccttcagagcccgcgccgggcaaagtagaggtcaagtcaacacacacgaccgcagggcagccctcccactctcccgtgcggtccgcagctcggcttcggaacgaccaccgctaacactgcaaggctgtaaggctgggagggggcgggtcctgaagggggcgggaataagaggcggggcagaagggcggaggagtgtgtcgggagatgtagttccgcgagtcccgacagcaaagctgtcccggctccgctaatagattgggaccactactcccaggagtctgcgcgcccgaccggagcgtccatgcgcagtgggagccactttgtatcctatcaggcgaggagagggtgatgtcacctgcgagttagtaacctacgagcggctgtgaaggaaactgtttaaccggatcccattgtacccagagtgcagagccgcctttccagcatgcaggggctgctcaggtaagggggacgctcctccttgcccgccgcactcattcattaagtggcactgctcagtggtgcgggggtgggcgtgcttccgtgggctgggcgctgggttcgcggcgcgccctcctgctgcctccccggagctcccgggccagtaggtaaatattaaacccgtccttcaggttgggtctgggtgggaacgggaccgagacagctctcggctgcctagctgggggtgggaaaatggctgcagcgcaacgcaaaccgaggcagcagggaggaagacgcccccaaggactggggtccctccctttctttctaaggcgcccggctggccgaggagctggcggggtaacactcgccgccttgctgaaggctccccggggctggggccgcgggtactgcagcggcgtccgcgagctcccggcccggcggctccgagagggagaaccccgaggcaggcttggtggacacggcggtggcgacagggaaggagggactcgtgtacccgttcgcgtccgagcagagcccccagtgcccctggcaccctcacttccagccccattcgaaagggacggagcgcctgtaattcagactaagttggacctaaatgtttcaaaacagagagaagggaaatcgggcgttgcggagggagagcagggtgttggcggccggggaggctgcgccgcctgcggacccggttgtgaggcaccgcagagggcttttgccgcccgtccctctcgggagggcgcatctcagtctccacggtcccttggtgtagagcacctgggctggggcgaagcgcctgccctgaagccctgggccaggaggtggtagcgcgggggtggaggtgtcggataatctaatgattaggctcgctgtggggcaggagggctggataatcgggtttacccagctggttctgaaagccaactgcttgtgatcggcttgccctctgagtggagacgtgcaggaggcccagagctctcagtcctctggatgttctttgcctttcctagtaccttcatttgttcgtttactcattcatcaaaccctgctaaggtctcaagttgttcacggcctggctttgcggagctacctctcgccccataacatatttag

SEQ ID NO: 60604 - DNA, 750 bp, Homo sapiens
aatataaaggacccctgagttattaacaattccatgggaacatgtgcttggtgtatgcccagaatagttcctttcaaatgattctcttggtgcttctgcactgttcttcaccagagtgtaacataagagctgaatcaaggcttgttcagtcagtgtttggaaaagaagtggtggctggatgctggtcagctggcttgggctgttggcaagcttgccaccgaccatgctttctgcaggcggcagccgctgcaggcttgttaaaggcctgcaccaggccgaagtgtttgcatttgccctgtcggagctcaggataacaaggcctttcataatccaccacagtagtaagcaggcaagtccggtggctctggaaatgtcccagtacaccagccaaaggcaaaatcccagctcctttgccctgtgtgacagccgcggggagtaggctagggtgggggttgaggtagataaggaaggaaacaccaaggaatgtcatttttgttacataaattgataactccaagtgccttctcgctacaattgattgctttgggtcatatattgacagtaagcaatttgattatttgcctgctgaaatgacactatagcatgagaggtcagcctcttaggacagcctttctcacgttcctctcatttttattcttgctgagcgggaccatatgaatgacaggcttgtttgcgagggtagatttccattccattcatgcaccttgcagacccagtcactcttcttgt

SEQ ID NO: 60605 - DNA, 4701 bp, Homo sapiens
gttagttacaatggggacaccaaagtggttggcatgaaagttagcagattaaaaggataagggtgacaatgtttaagaaatattctttctctttaaaagtctctgtactgtatattacgtggtgaaataaatagctccaatgtgggaagacttattctgctagattgtcttttgacccaattaaagctttaaagtgtcagacaagcagccaaacaatcctcttgagggtgtgggaggggcctgggctggcaagagcagtgctggtgctatcgaaggaggtggccatgtgtggaacttggcttcatggttggttgcccacagggacttagggtacctttcttgtctgtcactttacagctggtgctgtatccccggagatgaagtacttccattcaattaggaaaacatgcttagaaattctctctttcaagaacaacaggcaatggggcctgtcagagggtgaagggtgggaggagggagaggatcagaaaaaataactgtgggtactaggtttaatagctgggtgatgaaatcatctgtacaacaaaccgtgtaatacaagtttacctatacaacaaacctgcacgtgtaccccgaacttaaaagttaaaaaaaaaatttatctagtaagacttgtcaactgaagttgtactagattataggtgtaaatactggaaatttgggtggatatttggagatgattctaacatgtttagaaaaaagcttattttagattaccggaaaactgttggtgatgcagactattaaaacttgaagtcactctaatgagtttctagtttaacggtaaaaaagctgaataaaaagcctatgtgtttagctgcagactttgtctagccaactgaatatagtctgcattgcttgctattaagagaaaaaaggaaatagtgtaaaaaacacttaaccattggtagtaagaaactagaaattatttctattagtcagcctttgcttgtggtgtttctcacttcttatttttatgtatcaaatgaaaacatgtctatcagacacagagaatattactgtgtaggtggtggtgagtcatattgtggtatttcatgtaatgactaagaatattggcagaaattttacaggctgaaaacctccaaggtttgttctctgtgtttaccaatcccttttagggcttaaagctctctcttgttttccatttatgtttttcctgactggttgggagcaggtaataattcactgaatgcacctctatggaaactgacaaaaatcttacctagctttcagatttctaaccaccatcatactaaaatattattctcagagtcattgcagttaaattttaagtgcttctttggcaattcatgattcccagatgagatggtcatttgctgtaatggggctggatgtttatatatttaatgaattatcatagcttaatagtacattttctccatgcattttataaaaatgttttctgtttatttgctgccaaagcatcacccttcaatctgccattagcttcttcctcttgatgttgtacttattatcaccatgtcatgtgtctttaggtcacagcttcttccccttgatgttgtactatcaccatgtcatgtgacttgaggtctgcttaggtgcctctccaggggcttaacttatttctggtagtgttgagttgtggggtgggaggagagggttaaactcagaaaaggcactgctaatgttgagtgtatccttgagatgaactgaaggcttgcagcctgctgggcttgtgggaaaccctttctgggtggagttaggataggtgaattggggctgtttattctggacaaatatctgaggtatctaatttgaaaaataaaagttagacttgtctgagtaagaaaatggttggtaattctgtgaactctgtacattgagtcagatggacaggtaccttatcaaggaccattaaaaagcaaaacaaaagaaaacaaaaaacaaaacccccaaacacaatcacatacaaatagcgagttgattggcaggctaacctcaagggcctgtcttagcttctttctctcgtttttcttagtcctcctgcccattcccccacctcaatcattatttgaatgtcctcagaccttatctaaatatatatttgtatgtatgtaaagagttagttaactcattagaaatagatatcctgaatttcttagtgacttctcttattagccaaaaacttgtattttatctcattgaaatctattgattaggtagattttcaaataataaatgctttagatattgctttagaggttttataaatgatcccatatttcagtttagctaaaatctctgaaaagagctttttcttccaaagtgttagtctttcaactcattcaagacccttattgtatattatttcaaaattccttcccttgctttatctagcaaatgaatccatttccttcgattgatttgtagcatgccaattgttttctgatttatgtaggtttctctacagaactgcctgcttattctacagtgtggaattggtaaggtttctttgtacagaatctcttagaagtggggcttaataatgcactttgttacggatgaagcctagaactttagttcccacagctgggcttccctcagaggtcctttcttcttaataataaaaaaaaatcttttctccaaaatattataaatatgtaaaatatataaatatataaaagtataattaatatcatctccaagaagaagagccttttaatctgttggttttagtttttgagaaactaaaactttctctggagaggcatgatgcttgatgcaaaggtttctccttttatctcttgcttaatcattttcctttgacttttaaaactctatccatagagaataacatgaaaaaaaaattctctgaccaatgaaaggagctcggccacccaagtctaagatgtagtaagatttagattctatactcaactagggtgcttcctggggtttgagtaattacatctgtttgtaatcatagtgaaaaacctggctgttaactcacagatgatctggtacagtagtcctcccttaccagcaggggatatggcccatctaaaaccctcccctcccctgtggatgcctgaaaccacagatagtactgaacgctatatatactatgtttttttcctatacatatatatctatgttaaactttataaattaggcatagtaagggattcacaacaataactaataataaaatagaacagttataacaataggttgtaataaatgttaatgtgaatgtggtctcctcctctcttaaaatatcttactgtactcacccttcttttggtgatgatgtgaaatgataaaatgcctgtgtgatcagatgaagtgaggtgaatgacataggcatcacgaggtagtgttagcctactattgaccttgagatgaaatgtcaggaggaagatcatctgctgcgggtgaacctggctcatggaaccatgaggatgctgatggttagatattcatgactaatgagcaaggaatgtatacagcctgaatatgctggacaaagggtgattcatggcctgcacaggactaagtgagatttcattgcaatacccagaatgacacacaattttaaacttaggaattttttatttctggaatttattcttttagaattcttaatttatacttttggaccacagttggctagaggtaactgaaatggcagaaagtgaattcagaattcagagaataagaggacactactatacttttctgtagagtcagtattagggggaaaaacaaactgaaaaggttcttaaggacttcttgttaatattaacatatcacttaattacaaagggaccttggggaaaacattgcctgttgcttggcctaaatggaatacacactaatataatttatgtaactttcaaagaaaggataagaatattttaaggaagtgatctttgatttcaaaggaatgctgtgtctgaaactgtaacatttcccagattgagctacttactttaaaggagtacacagttttctttcctccttcttcatacacttctttccaatcagtttctcttttaagccaactccttggtttatctaatgttcaaacagaattttcttttcttactatgtatatacaaagctgtattttttctactttgtctatatagaattttttgtttgttttcctggggctccaacaagcaggcttgattttttttgacagctttattgagggataatttatatgtcatagaattcacctcttgtaattgtacagtttgagttttaataaatgtttatagttgttaaccatcaccgccatagtttataacacttccagcatcccatctccccttgtgcccatttgcagtcatccctgcccttgcctctaggccccagacaatcatccgctttctggctctgtagatctactttttctaagaaattcatgttaagagatactattgagatacagtgatactaattgctttatttttcatgaatgcttcctttagaatttaattaccaaaatgaaaaatctcctgaaatgttaccttgaagtaatttgaagaatgattttcaaattgttttgtatccattattttttccttctcccatcaactttgctttcattgcccttcttgcccagcagcctatctaaatgaatatgcatagttagaagagacaatgcaa

SEQ ID NO: 60606 - DNA, 3588 bp, Homo sapiens
ctcctcctctcccctttccctctgttccctgtttcctattagcccttcagaatgcaaatataacctgtcaccttcccctcaccagacatttcctgcaggatgagttcttcttactgtctgtcccaagacagatttctctgcaagagttgacagtcgacttgcaaaccaaaacatacctgctatggaacgttcacctctagggaataacgttagatcttccaccctcggggggttgcctcaggactttcatctaccaggaggacatatcaaaagtatgccggcttggccacttttacaacttatttctgctcagaaaggcaccaactcaactgttcagtagataagacaccaggctagcagggggaccccttgcccttgctcactacccccttaccttataaagatgtctgttttctgctccaaaggtgaagtggcgtatttaaaggcaggacgctttgtgccccttccccaagctagctttggagtaaattcacttgccttgtatcagaccttactcttgttaattggacttcgcatgcagtgagcaattaacctgctttttggatacactagaaggtgctgctgttggaggaggaggaggaggaggaggaggaggggaggtgggaaggtcagcaaaagccatgtcatgaagggacctttacctgctaaggaatttggactttatcttggaaagaatgggaacctgtaaagctttctatcaccttgtcttcctaactagattataaattccttgaaatcaggatctgttattcatctttgtattctttataacgtctggccctggtcctggaatgggtaggacagtgagtaagtgttgattgatcttgtaaggctgtgatagtttcttagagtcctgcctgcttgattcagccatattatgaaatcaaaatgagtcagagcagagatacttttggaatggaggggtagggatcttattattattataccctggtcattgtgcctaggctctcccagttattatcgaatttaatctgtgtaactctcctcactcagaatccactaatccagattgctcataggataaagaattaagttcacagtggctttcaaggctgctgttcattgtctgcagtgctttctacctctttacttcttatgtacctctaagctctgtatatttcctggggaaagccttcactgtcccacctttccccataacaagtgggctctcagaactcaacttagtgtgtaacatgttccctcataatggaattttccgtaaaaaaccctcattgcttccctgattgttcattgtgttgatcattcttgagttagtgtgactatttgatttcccctccatctgcatgaggattgagctccatgatagctttttgaaccctgtgcctatcacaatgcctggaatttaatagatagatattcaacaacatttttttgatagatgactatcaggaatatatgactattctgtcttcagatgaagaaattgaagttcagaggctgagtcacttgtgcaaggttacgtaagccataaagccagatgtggaactcagggatatctgataacaaatcccactctttttgctaagagacactcagtagatggatgcattttgatgtttgtatcagtgtcgtgattttgcctacctgtgttgacagaatgaacagtgtggtggtgaagaacatgggctgtgtaaccagacagtctagactcgagttcttcctccactgtttaccagctttgttgccttgagcaagctacttaatcctctctgactcagttttctggaaaacagtataataatatgacctactttataggattgttgtaaggatacactatattcatcaatataaaacactactattaagaacatagaaagtgctcaataattgttagctattactattagcagtacccatttattcctttccattttcttactgtaatccaaaatcatatgcagagaccctacagtaatttttttttgctcagtgaaaattatcttcctgcatgaaatacctgcccctaattcctagttcatatgtgttctttcaattcagaattggtcatttctgcatctcagcagaagcagaagttatctacctgtgacagcaaaacatattaaaaccctttgctttgaatttctaggttttaggaatcacatgtttcttcacacctctgctcagttaacaaaaactgtgctgtagtgaagtaaaggatgcactcttaatagtacagttctctctcacacaaaccaaatgttacccccaaaactaagcaagttactattgaactgtttgaataattgacctgattgttgagaagtgatttatgtcaccattattttcccattcatcaatagttaagtgcaggtatgaataacaggaaattaaaaaggaagaaaaataattacttcacatatataatagctgtatgccaaaattctaacattttaaacatgttccctcataatggaattttctgtaaaaaatccctcattgcttctctggttgttcattgtgttgaaattcttaatagctagtttttgtggttagggagtaatactgtatgtgtgtgtttttgtgatgtaactgtttaccttgcccttgaaagtagcaattgatttgtgtttaaatgatgaaataacaacagtacagttgccacctctgtgtcaggcattactgcatgcttagttgatttgccaatcctcacaacagccttgcaagagaaatgatgtacctctcctggagatgaggatatagaggcttaaaaagatcatgaacttcccaaaggaactagcatattttaggccatgactaggcactggaggtgtgggtgttaacaagatactgtgtaaggtgataactagaagcaagcctggcaaactcagttgggattataaatggaagacatcaaagacaggccgatgagtggagaattaattttgcaggcaatgtggaactaataaagttttttgaactgggagctcaaaacagcacaggtgctccatttttaaggcagtggttctaaaatgtggtcttaggaccagcagcaacacctgggaacttactgaaaatgcagtgtcgtgtaccttttcctccctgttcaatcctaaatgctggatgataagtgatttaaggaaccttcctggtgattctgatgcttgctcatgtttgagaaccacttctttaggagaaatctggccatgttcagcagaattggaaagacaaagaggaacactgggaggctatagccagaagccaaggagaggttattaggacataagtgttcgtggtttcagtgagaatgaaagggaaaatcaaaggggaaaaaaatgaggtttttcagggaagaaataacaggacttgatgactaaatagaggtgggaatataagatgtgaagtcagtatcctaagcctacatgtccatgagtattatagaactgcagatatatgcaagagccattcagagggggacttttaaaatattccttggagatctaaatcttactgtgtttaatttacatattttattgaaatggctaaaatgtcagatgtagaatttcagaatctgatggcaaggaa

SEQ ID NO: 60607 - DNA, 1172 bp, Homo sapiens
ggaaggagaaaccaacctctaggagtgtgtgtgtttgactgagacaaccattcttttaccactttgacccaccattggttacagcagtgagagttgatgttgtgctttgatcccgtgatctagaaactggctcctttttcaacatttgagctgtgttcacatgcactgtacactttcctctttgatttctattttgtttctgtcccttttgccattgcttaaaaggtcaagtttggacgattgaccaaatctaatctttactaaacacaatttgtagagcctgttaggaaatctgtaaaaggcttgaacttttgaacaatgaagtcagtgcaggggaagactaaaataattgaggcttgtttagtctgagaaagagagagtaagatggaaactccaacactggctgatgttcagtggatatgctccagtgaaactgtattactggtcaaaatattaccaaatgccagttggtcaacaggagctgccccaagccctcccagtaaaaaccaccctgccaatctggcccttctcccaagggcccaccattcttcccccatgattctaggactgaagggctaactcctggcatggcacagccaggaactttgctgccctgttcccacattgcatcactggttcttattcatggatgcccttgttatactggttgaccaacattttgaacattgacctgcagatgtttaccaaagccatttggtaacgtgtgtccagagcttggaacattcctattccagaaagtgataagagatgcagaagaggaattatgtgcgagaatgtttttggcaatgttgtctctaaaagccaatgactgtaaacaacttagaggaggatagctacactatagccatagtcatactatgtatgcagacagcagagcattttgcagccagtgaaaagtcatgtttctaaagaaattttaatgacatgggaatctgctcagtatgtaatggcaagatttttaaaaagatacagtagtctcctcccctccctccgtggttttgctttccgtggtttcacttatctgcagtcaactgagatccaaaaataagtgactacaggacaataagatattttgacaaagagagagaccgcactcacataacttatattacagtctattgtcattattgttctcttttattattactgtt

SEQ ID NO: 60608 - DNA, 1442 bp, Homo sapiens
cccctgaaggaaaacaactttacaccacttaaattcttcttgatccacgcttcagaaaatgtccccttgttatacctaactcacacttcagcattctctgtggaaattgagctgggaagaccaccctagtcaagtaggcagtctgatcatttatagccaacatttaaaaataaatacgtcataccttcgtgtcttctaaaggcttgagtgggtcattgtctgggtgctctggaagtcggatgtgtttctaggtgctgtgtgtatatgttgggtggtatgtcactttttttcccccctttttaggaccaggaagaaaacaagggagctacaagttggcctgaattctacattgatcagctcaattccatggctgctgtaagtagacttttatgttctttgacacactgtttaaaatgcaagtgtagtacaaagtacacagttgcacaataaattcgattgagtatgacctaccaaatgtcagtacctttccaaactccatcctaaacattcaatgctggggaaaggaaagagggtaggagggatacttggcaaagtgatttttccagtatgttttaaataaaatcagcacacactgcaatataattgagtttaatgttgtaagtgaaaatgtagtttgaaatctggcttgtgttcaactttaacttgcaattgctcttaccagtcactcggagcttggttatggcagcactattttaaaagttaataccattttaaaataatatgattaagcgatttctttactatatccctcccattctctttcttactgagaacttggttatttcctggcatcatgattttgcaggggaccaagtactctttactcatataatagatcaggaattcataaagcaagtggtttaatgaaaaggcgtcataataatagtgctgagatgtcctcggaaaatctttagtacatggattgttggttcagtaattgcttaatatgtattctcaatgcctaaaatatgaattctaatcacatggatgtctgtgatgtcagcattgccagcagcttgagggacacctattcatcacagctaaaattcacagcagaaaataagtcatcaacctttgagccttagtagcttaaatcccatccctgttgataagaattagaggttgcccatagtagaatgcagtctttgtctcagtgggcacactcatggttttaagagtcaatctgttatattcatgtttataacatgcaagtagatgatagcttctagaatactttcttctacctccttcctgccttctctctttatggagaataaatttcttatcactcaaaacaagcattttaaatggtctcataacattttcctgctgctggaatagttaaaaactgattagaatatgtgagtcgttcacatgtttcctaaacttttagaggtcttgacttttagtaacttcctctt

SEQ ID NO: 60609 - DNA, 487 bp, Homo sapiens
cgtagagaagtaaattaaaggaaggaaaagcagcagttgttccaaatgatgctattcaagtctgagcatgtgggttgcatttattataaaggcaggtggttgaaagacctaagtttacaagactcataattaactggctttcagcagaaggtgcagaaggatactgccaaaatgctctgggacaaatatgtggacagttctcaagagctctgggagacaagattgcagaaagcctagcaattgggtaattgtctcctagcaaccaacactgtttaagtaatcagtatgcattccagtcaggagagtccagaacatttcagttatacttaacactaagtagaccagtaagtagaatcagttgtgaccatattttcaatagcacttcctggagaaacatttcagcatacctgatcagcttgagtaattcaagtaggttttctcttttggtgcaagaatttgaaatgagaattttttaactgtaaatata

SEQ ID NO: 60610 - DNA, 1091 bp, Homo sapiens
agcactttgggaggccgaggccggaagatcatgaggtcaggagatggagaccatcctggctaacgtggtgaaacctcgtctctactacaaatagaaaaagttatccaggcgtggtgtcatgcgcttgtagtcccagctactcaggaggctggagcaggagaatcgcttgaacccagaaggcagaggttgcagtgagcccagatcgcaccactgtactccagcctgggtgacagagcgagactccatctcaaaagagaaaaaaaaaaatgaaatggaaggatgcagctgaacatatgaaaaataagtggccaaaattgttggccactgttttgctttggtgggcaattgttttctaactattgagagactgtgagaaaaataaggatttaaggattgcattgtttctatgaaatgcaagggtaaagaaaattgtttgaaaactctgattcattttggttagaggtgagttggaatactggggtttagcattgtgaattagcaaactgcctaaattatggaaatgttttttaaaggaatgtatttttaccctcctaattctaacttcaacagataagtagttcttgatcctggttgcttgataaaatcaacagggagttttaaagaatgcccatgcctgactccacctcattccaattaaatgaatctctggggttagcccaggcatctggagtccaggtgattgtaatgcgtagcagtcagtgacaatgggatcagaccaacacagtgttgcctaatagatactgttatcctacttgctggccttttccatccaggtcagtcagagttcagccctgtcaccaccagagagggagctggcacaaccaactgttttaactactaagagttatgcagttaggagctgaagtgttgctaaattaggaagtggattcagggctgctaggatatcacatggtggcagttatggcccacttccaggttcagcccagagaaagggggctttctaactttctgaccaccctttgggtgaaaccttattaaaaactatcagtaggccagacacggtggctcacacctataatcccagcactttgggaggccgaggcgggtgg

SEQ ID NO: 60611 - DNA, 750 bp, Homo sapiens
aataagtaccttgagaagtggcttgaaagcagtagagacagtgagtatttttttgttgttgttctaattcctggtctcttcactatctctagtgctggtggttttcagcagatgggttgtgttggcatgtggtatgcccgggataaacatttattgattaaaaaataagaaccaccaccacaagaagcaaaggcaggttatgttcagcctggcaacttgattgcaggcagcaggggtcgtggataagtcactgcagcaggaactggaaactggacctagtgtgccaccaatttatctgtaaggcaggattcatcaggatgagtgggctgggctagatgatcttcagggacgctctcagtttccaagtgctgctaatatatggtgttcactttcggtagagcagtagaacttctctgtagaacttctcagttgtttttgacttggtcctttggggagtatttactaagcagacagtgtagtacatgctctagctgagggtcacgatgactcagaatccttgtcctccaggtgttgcaataatcggagcagccacttccctcagcctggccgcatccagataagcagagtgattacggaggtgccttaaggaagcagcgggttgagggtgctttggaggcatgaggaacaattggcccctattggaggaagcttctcttttggaaaagaagttgtttgagctatggcttaagagggtagggtaaacttaggtgcatagagggaggttatccc

SEQ ID NO: 60612 - DNA, 1086 bp, Homo sapiens
gagaaccagagtgaaaacaaagaagcaaggtctattgtgtataatctgctatcactgtgttgtcatttcctgagccacgttcttatcagcagtggctctgttgccaaatttcaattcaaaagagcgttacaaggtgaaaaaaaaatccaaatttttagtagtatttcctaggtagtaaacacaggatttcctgcatccgaaatgacttcaacaaattgcctgttccttcaaacgtgatctgttgacaaatttggactctgttcctttaggtacagataagcttactgatggaaaactcctccagctgagcaagggatttttgccagctatcctgctctaacaggcctgggagccacaggaatgagttttcatttcaaatggatttctatttggcgttaatattttgtgtgtttacatcttgtctccccatgtagaatatacaatccataagtgttggaatcactcttctcttctgagagctcaggcaggcagcatggtgatgaataaaaaggaaggtaggtggtaaataaatgcttttggttcattggtttaagaaataataagatggaagacttctgaaggattgactcaatttctgaatactggcatttgtttctggtagggaaagacagactttccaactcacaatctccacaggaaggatgctctgttgacaaaggggcaggaatctccccctctcagatataattctggtaacaccaggataatttgtaaatctgcattagaaacagctcttttccctatttcccattcttaataaagtgcttgtgatgaactgagtgaaattctctccccagacttcagtcactctttgttttaaaatcctccgttagtgcgttgcttgcggaagcatgtggtttcacaattcccagtacacatttttgccctgaaactcatttttactttagtcatcacaatgatgtaccagggagtcatagcaaccactccagtttgccaaaggacagagaatagacaggatataatcaaaattctacagaaatatactattcatgccattatatggaagtcaccaaggaggaaacctttccagaaaaagctagggta

SEQ ID NO: 60613 - DNA, 4325 bp, Homo sapiens
cagtttccttttctttaaaatggaccaaatttcctttaaagttactcttgtccaccaattatctgtgactatttcattttttaatcactaaattactaacattaaaaattaagatatttatttcacccatgagtacttcctatgtggcaggtctttacatacactagccccttaattcattacattagtgccttaattactacagccctgagaggtaggtactgttttacttactatctttacattattccctggtttacccactaaataagtggcagagcttggggtcaaacccaggaccaggtgactccaaagcccaaaccctttctactaaaatatacaacctctatccagaacacaatccaaaatctaagggtttttcttttcttctatacaagcatatcactgaaatttcaatttgatttactttgctcaagatttagtgagcacctactatgtgccgattactgtagaagatacgagaagtacaaggaataaaacataggcttttccccttcttggagtttagttggacaagacagattttaaaatgctttaaaatacactaagcactattctagaaaattgaaacatatctccttaaactacaaaaaattttaaggatgagagggaagcaatatgataggccagggttccaaccctagttctgccattagtgtggctttggtgtcttgtgcaaactgtaactgctatttctcctaaaagagttgttttgaaaattccacgtatggggagttcctggcacagattagggactcgaaagccaaaactttaatttccagtggcaataggtttctcaagaggaccagatgtttacatttgtcaatcagcatattcttctccaaatttcatttatttagttactcattcaacaaacattcattgactgactactcttctaggcacttagaatactgtgaacaagaaagagtttgcattttagcctggtggggtggagatgaactcagcaaccctctgaggtgggtactgttgtcatcctcattttgcagactgtgatactgaggcatggactctctagcacaaggtcactgagatggggagaggtggggcagtgaccttgaacactatgtctgccttgtatgcatttttcaaagtagagaatatagcatttcattttcttaactcagtgaccattaatgcccactaatcattgtactgtcatacagtgatgctctcaggaactactgagaggaactactgaggtcaagtggttgactgaccctgccctaactgacccagaaatgagatgtagtttgtgttcctgctgccagctgccatttcctacagaagtctagagtgtttctactctgctgctggagttgcctagggggaattctggtagccacgctagttaaactgttgaggttttaaaaatggaatcgtaaacataaattctgtctccctcaagtggcctcccagtctggaagtgacaccattctctgggaaaatggcatcaatttctccagaggcattcttcgttaactcgtggatttcagctgcctaaggttgctctaaaagtgcctgttctatcagttatcattcataatcaggctaatctgaaacctagttcttcagggggaatcaaggtccaactttctaacagatgatttgcatggcttgaagatttttaagaaaaggataactctattcctggtaaactggctcctggctcacttccagtcacaatgactaaagcattcttactgatagaattcagctcctgggaggtagtagtctgatgagaaaccagatgccagcttgccaggtcatccctcctgtaagggttatggttatagagatgccctgctttacatgataagctgtacaaggatctgtactagagaatccagcaaaaccttttaatggctcaataggcctagggaactttagcgatcatataaaccttgcaatctatctccaggaatacagtatcttgcatactctcatttaatcctaacaaaaaaactctatgagggaaaagaagaaacacaggcacagagagattaagtaatttgcctaaggttgcacagctttagggggttatcaggatttgaaaccaggcaatgtgtgttcctgttcttaaagaaaagcaacattcgtatcttaatgatttataaactgctttgttcattcattctcatttaattcttcaaagaagtgggggaggtgaggaaaggagaccaggtttagtaacttattaagtgtgattctgtgtctaccaagcatattctcagccagcctggaaccctggtacattggctgttcttcgctctttccttgaccccaccgtaccttgctttatccaccggtgaaatctctaggaatgcctcaccagtgcagagggaggcgctgagtcagggtaacacgcaattcctcgctcctcaagggtctcccaaaaccacaggcggatgggagtcagggaaaatcgaaattacacgcaccaaatacgcaaggctgctgacacacgttggcagtgatttacctttctattaattgcaaggtttcgcggagtaggttagttgccagagttccagcccagaaaaaccgttaatgtagttagtcgcgtcccggttgcagctctgccctgggctggaaaggtcccgcccattacctgtggccagcacgaaggccgggacgctgtggaagcgcaccggtccgtggctgcggccgtcctcgcatgccacgaaggcggtcaccagcccgcaggggcagtggatattgacgcgggcctcgcgggtgcccgcagggggcgccggcacaagcccgaagtccaaagcgaagcggcccagcgccagcactgcgtggccgcacatggagctgtagccctcgttgtgcaggaacaggacgcccagatgcgcgtccggcagctcgctcgggactaggaccgccccgtacatgtcccggtgccctcggggctcgaacatgagccgtcgccgcacgtggtcaaggtgctggcgcatgtagcgccgcttggccagcagggtgggcccagacacctccggacaccccgccagcacgatacgcaagggctcgccgcccgtgtgcatgtccaccaccgacagcaccggcgtccctggatcatgcgggggcagccggggcaccgccagcgcgctctccatggtctgcgtcgggggagacgagtacggtcccgcagctatggcttcaagcccgaccctcacccactgactccgcgggaggagggcgggacgctaaccagccacgtccggggggcggggtctcggagcctaaacccggaagcgagggaggaacttcggagctgtcgcccgggttaccgggaggcggagccgccgagctcgctgtggcccggatgttcggtgcagctgccagatccgctgatctagtgcttctcgaaaaaaaccttcaggcggcccatgggtgagtggtcgccaagatcccgggaagcgtttctggtagtcccgactactttcctacacggctggcctcgggctcggctctttgtaggcggccttcggttggcggcgcaggctcgccccttgaccccgcccgccctcgggccgggctccgcactcctgcggggttggggtggtctgtccgcaacgggctactaggggaggcgcgctgtctgcggcgaaatgccaggtctttgttgtttggtccgaaatgtctcttcagtcccttagtttaatgtcgagggaacacttgcttgagggttgacttcggaattgaaaacgcgggtgatagtgcagaaaaaacagtaaagcagaagcaagttgctgcataatttgtctactgcttcaacctcaaacgtagatttatagcgcccgtcacaaagggcaggaccgctgcaaaaaaatggaatcttaaaactttagccatcgttcgctaaaggaaatgaaaggagaaattcaacagtcgcttggagcctgggttttgcttagtaagtgataggctgtttatttcagttcagtttatcatactggttttcaggccttggattttgagaaactttagattattgatattcacgtgtatttattaagcatctactagatgtaaagcccatacagaagtttccaattccttaccttctgcattcttgaaaaacctgaaatattcattttcatgtattaatttagaacattgtgattacaattggttacaaaaaaaataagcgcccattaaagaggccagtgggtttaaaaagctaagtccgaaatttgttaaaagcgaaaatattaaactggaggaatattattcaatgctgtttctctttttctctcagcagcataaggagaaggaag

SEQ ID NO: 60614 - DNA, 1138 bp, Homo sapiens
cacacaaacacacacatgcactgaaacagaagtcttcaggaaatgaacacctacaatcaaggagacattctgacaacagcctcatccagtattcagtaggaagaaacaggacccaatcagtatgaaagatttgaaaagagattgctgtgttctactgaaactaaaaaaagatagggaattgctgcaagtaagccagatggggtagaatgccatgaaacttacagcagatggcactaaaatattaaactaacatttccttatgctccaagctgagctgtatgttaacgctgtttataggagccagtctatttaaaaacatacagatgaaaaatgaatccggtattgttaaatcattcgttaaaaacaactccaagcattagcacctaatgtgctttcccacaggaatatgttaatattattcaagcaaggttatatctaacaaaaccactcagaataggaggtggggggaagcccacagtctcaggaatctgttcaaaaacaagctcggtgtggtaaagcgtgaaagtctgcttctctgatttccatagcaacagcagcaaccctcagacagacatttttaaaaaccagatttgtttttctcctttccaaatacctttgcatgatattttcagataatgttgaaatacagctgacattgcataaggtgtaaacacacagcttgttccaattgcttcagtgttagacagcgtggctcatcattttctctcttaactcacacggtgattccactggcaacaggtcagcacctggctctctggggatgccccagtaaagtattgtcaactgaaagtcaggctcaataatatttatagactggcatgagctacccagttgagaagacactcccaaggtttgtaagccatgcaaagaaatgacatccatctgctttgcaaatattatttaaggcttccccctaaaaaggagccacggaatgcttatttactttctcactgaatctgaggggtagagactatcaagtcccagttactaagaagtcaggaagagaattaaaaatagaaccatggaaacagggatgcactgaagaattctatcaactattctatatgtttgaggaatttcataagaaaatattgggaaaaaagaaaatccatctgat

SEQ ID NO: 60615 - DNA, 1061 bp, Homo sapiens
ttgtatatatccttcggtaaattattttatgcatacattagcctaaatcgatttctatacctttttctttccctatacctgtatttaaactccttacactttattgataagggattgcactagatgggatctttcttacccttttccccaataaatacatctttgagctcttcacatttacaattattgatctgtctcattctctgtaatgattcgcaggtatttcattgtatgaatgtactttgattttttaaatggactgctgtcagtggaaatttaacttttttcccagaattttataacaatgctccaataaatgtccttgtacacataaattgatgtattttgcaagtttatcaagaaggcaaatttccagcaatggggctgctgaactgaacagtatgttgggttttttttcttttgagaattcctgccaaattttctttcagaaaaagaatgcactgatttgcactcctaccaacagcatgagagttcctgcttccgtttaccttggccaacactgagaattagcaaacactgcaaatgttgccatcagatatgcaaaaagcagcatctcattgttttggcattcctttgattaggaatgagataatcataatatttgtttttcatgtttgtttgccacttgtatttatttttccatgaagttcctgttcatatttttcatttagttctcgattttgaagggattttttctttctgtcagtcagttaaatacattggtcatgtatccgattgtttttaatactaatttgaaatgcttcatttttaaatacccaatgtttatatgaatttgcattcacaataatgtttattctttcaattgatctatttctttttcagctctaagctgtctgggttaccatagcttcctaatttattttcataccttgataggttatcattctattctccctgtaatcctctggctatttacatgggtttatttttccagatgaacttgtcaatttgtcaagttccaataaggatgcattgatttcagttggtatttatttagaggtcaatttaggaaaaattaa

SEQ ID NO: 60616 - DNA, 1596 bp, Homo sapiens
aattaatttttaaaatgttaacagaattcctttatcatcagatagttttaatcataactgtcaagaattgttttattttttaagttagcatgctagagttttaaaagaaattcaaagtgatataacatatgaaggtttttgctgattattcttataactcatataaataggagcaagaatttacactgtaattgatttaagattggccatatgagtcatacataaaagatccaaatcctgcttctaaaggctttgaatagtcattgattctgtgaactttgaaagtttttgaaaatgtgctatgatcccaatatggtattaagactattttatgtaaccaaagaaaaaaatacaccactaaattataaaactctggtgcttatatgcttggctgtctgcaaggaattatagagactattggagacacaacctctacctcaagggaatttctgcctagacaaggaaatcaaacattaattcacttgatacagtacgaagtccatgtacacaaatcgtcactgatgaaaggataggaaggactccaaatccttagctatctatttcaatagtccccacccccccgggaagaatatgtggtttactttcctgaaaatgcacatttgttaccagctataacttgaaccccaatatctcatccccctcatcaacttagcaggaagttgctggaagactccttttctatatgtagtttatggccttggttggaaacaatagaattatgcaaattagttgtcacccctacttagattaaccaaatcatagttcaataccctgctatatattcaataggccattagatcataaagctaatctaagaaggtatataaagtgtttatcacagtacctgcctgcctagcactaggtgctaaatacatgtcaacttctttctcttttatctatttcctctcttttccttaactactccctgttccccaaagtatagagtacattttcatatttgagcatggtaaaagaaaaaccaattaactccctgatattgctatctaaacactgcatttgcaaatctccaggctagtcatgcataagagaaaaagtatataaatacacccctatatctgagggaaaaccctcagctaaattcttctccatttagataaagttaatatgagtcttttggaaaatccccatactgaggaaggaacatttcagcccacaggcctgactcagcccactgattgatttcattcagctgggggtgagaaagctttgggtggccctgtacagaaccccaagaatggctcctactcctgagccccagtggcctgctggagtcaccccacttatagaagtttctcctggtttaaggatctaagcaatcataaacatgtgaattacaatttctaagggaagtaaagccaagaactcccactctcacttactccaggttctagaatttagccaagtcttcttaactacttctcttttcctcttcttcataaatccattcctttttttacttttgcttcctcaaagggcttccccctctctgtgtacttctctgttaactctctttcctgttttctgaattcctccacttcctcttcctttttgtct

SEQ ID NO: 60617 - DNA, 1399 bp, Homo sapiens
ctctgaaaagtctcccctttccccccttttaattctactctattttgtaaattactgttgtctcctgaaaattttggaatgcttaaaaggcactcaaaagcctgtccgagatcgactagaagaccctcggaaggtccctctcttctctggacctcactgggcgttcgtttgcccgcgccgtccttccattcggcttgccgggcgcgcagcggcttgcggctgtggtcagccaccttcccgggaggcggtggtcgctggccgcgggaaggatgccgcgctgggggtcggggttcgtcccggctgtcacgccaccttgtgacatcacagggccatgccctcggggctcaaggccagagaggctccgcgcttccaggacccgagagctaaagataatgaatgggagagagcgagactggaggaggtaacgaataagtccccaccaccttgcccataacgcgttgctttcagtcacgttccgcgaactggcgaaggtaagtgaaaagataagcgcaggtacagaaaaacctgccagcgagaagctcccgccgtttcccaggagccccaggtggggtcttccggttggacccctgcttccgctgattggttggaggtcgccaccacgtgatgcaaacccgggtcggcctccgcttcccccccacccttttatccccctccccgccccttttctcctcctccccacccggaggtcgccggaggcggagatcaggttacctaggcaaccgccacaggcagtctgtacacaccaggcctggggcgggagagggtttcctaccttctgctgcaagacagggattgggaaatcggagtggactcggacttgaatcggattgccccggaatccaccctctctctgtgataaggtcagaatccgtcacctggtggccttcgggcgtacatcaccgggagtctttgatcccctctttttccttccaagccataccaaggggaagacgccagtgaagcaaagttgaggtcaagggaactccgtaatggtgcaatggtgatgataatgatgaaagacagtgaggtggctttactgaggcagtcagggtaccagaacaaagttcaagagaaggaaagggagggtggcctacagccaactatgcagattttactgcaccaattaagattctgggctggaaaaaccaagtgctccctaaccaaacctgacactgctcatctagagagtgtagggggtttatttggaccatcagtggtaactgatggattctgatccttttatacccaaaggaggaaataatttgacccatacaggacttctactgggcagagaaaaaaaaagttttctcagaatgacatcctaaccaactctcacggcagacagaaaccatggtcctttttactctatcattatact

SEQ ID NO: 60618 - DNA, 626 bp, Homo sapiens
gcatctcaaagatagaaggtaaggtacttaagaactttgaagtctcaaaatatgggatgtctaaacaacaaagcaaaaaataaccctgggaacagagtttctgaagaggaagatctctaggaaagttccaagtttttgtggcagggtattctaaatacctgtgtgaggtaatgcaattattagttagctagattggaccattctacaatgtatatatatacttcaaaacatcatgttgtacaagataaatggatacaatattatctgtcaaattaaaaaataaaagataaataaaaaattaaaacgagttcatacctattagtggaattcgtgactattttactttatataatgagcccgagcaagctttcacctcctgtgccttctctcccctctcctctgtgctagtttataatctgttaccaaacattagcacataccaactagttagtcattaatgtctgtaaagttgagtaaacaaatgaatgaggtatgcttttgaaaaagataaagcagactagttctgttttgaaaatataaaattgaggttatatttggaaatttgaatactttaacaagaaatgaaaattatactcactagaggttgaaaataaaatatactatat

SEQ ID NO: 60619 - DNA, 2404 bp, Homo sapiens
tggacacaatatcttaaaaataaataaataaagctttggcttttaatatgaacacagtaattatttttctattacgacctgaaaacctaaatacttaaatacaaagtcagcatttccaagacagccaagagccaagaattaaaaaaaaaaaaaaattaaggccgcatttatagttttgaggaatggagatccaaacaaaacagtccacaagtcatcttggacgctgaagtgtgcagaactgctagggcatctacccaatcacatgggggaattgcgggtaccttgataccgacaagttagcttcaaagttcccttacccgagcctctaaatcagctgagaccaatcattgttaacgctctccggggccgtcttgaggactcccagttggcaatctggaacgtgtccagaacttggtggggcgggggggggatcatatttcgtggagaatgggggaggtgagccctgggtatagggataactttttaactagcgttaattggggtctttgcggccaggctgtaaagattcccgccacactaatatgaatcagccatggccttttaattggaacgccggaactctgccttgttttattaatatcttaataacacgtttctataatggacatgttggttccttgtattttaaaacgcagccacaaactgaggcgatagcgatcacgttatgcagtccccaatcgtccaagccgaataggctgcatgaagtatcactcaaaaacattcattaccgtcggtgtgttgagtggtaacgccagtgtgcgaattcattaatggaaatcacgggaccccgagcggttggagatctgccacacccctctgcctgcgttaagacagcctgacccgacctctggtaaattaatgcgcaaaatggcggttgcacgtctgtttccccaccccggcgcacaatcctgaggaaggacgtcacgtcaccagggcaacgacgctcttgcgtaaaggcccggcccaagggaacgttcagggcgtctcggctttccccgctgctgcttctgctaggcccagtgcgagaccagagcacgagcgactcccgtcgtccccggccaggcagatgttggcctagtcctggcgcgaacgaagcgcgctatttccctgcttcctctaggccaagcctgctttacggcagggcccgcctcgggagcgagcacagaccggggcagcgaggccagccaggcgccgacgaggtccccgaacgcgcacgcgctccgttcagctccgggtggcggccgccggagtagacgttagccatggaaaccgagagctggcccgggcggggccgcggtgagctcgttattcggccgccgcagcttttctgcctccgcattcgggcactaaccaacctcccggcgggagcgcccagcccgagtttacctgcaaaaatgcggtccctgggatgccttcgcgtcttctcttccctcgggtgacttgaggtacgttcgttgtccgacgtccacctcgggacttcttcggcatcttaatgtccaagcctgtgcggagagccaagttgttctaggggctttcattgccacaagaaacatatttttcgtttttcgttgcaaaacctttaagtgcaattattgcgcttaatgaactcagtcattagagatagtaattcagtgtgattttaactttcctttgaaagactactttagcctgttgaattgtagcattttgtttctaagagactcgtacgaaatggaatatggcacacccacccggagctgtgtccgttaggtagaactgtactctcgcaatatctccaactaaacctcttttgtccgaattgttcaactcatggccccctgaacgtgaagcgctccttccccactgatctcgacctctgtccccacaacctcttgtctctccaggaccagaatttactccagtgaatcggaagttgttttccatgccgctgaattggttatctgctctgtatccatcatttttcacttactcattttttactatttttaggtgtttgttttcttcattaaatcattcctgcagttagggcaaagactgcccttcatgttatttggtatccaccgccactcacgccaaatccccagacctttagcatagcatccagttcagatgttgccttttcacgaatttaactgtttgtagcatctgttggctgctcctaaatttcctacttaaagagctgccttctaattattaactgctgtggaaaataccaatcagggaagctttttcttttttaagagctttattgagatgtaatttacattcaatacaattcacccatttatagaattgtgcaacccttaccacagtcaagtttggaacattttcatcaccccaaaaagaaaccttttaccctcagcagtcaccacctccctccccc

SEQ ID NO: 60620 - DNA, 569 bp, Homo sapiens
agctggctagggcaggacacaggattcggtagggtctggacagtgcagagcaggatgagatgtcaaaaatcacttcccttgtcccccagaaggtagggtctatgagggcctggactgtggctgattcagtcactgcagtgtccccagtgccccagcacagaggccggcacatacaagcagctagtcaggagacatctgttgtttgcagttgttgcttcagacactgaggtctacaaatgcaacccaaggttgcctgatcttttctggcagccacttcacagttgactcctattgaggttactgttaacaaaaacctgagttttgctcacatgtgctgctgttgaaatttttcctcctctagacttgtgccatggatttttctggaccattttaatgtctaaaattagtcacccttaaatttcaccatatgtggctgggcttggcagttcacatctgttatcctagcactttgagaggccaaggtggaaggatcacttgaggccaggagttcaagaccagcctggaacatagtgagagcctgtttctacaaaaagtttaaaaatatccag

SEQ ID NO: 60621 - DNA, 2274 bp, Homo sapiens
ttaatatgagaaaataacttttaacttagtagcttagagatattcattcagatgttgtcaataattttgctttttagcacttgacataatttgatgggttgaatattttttgtaggattaaataataaaatataatctattttcgtttaattctccaagtccaagtgaacacaaaagcactaaagatcaaacacaaacaacgtctgcaaggcagccaatggcagccaataggcacacatattcccccgctgaggtggaacaatcgatcaagagaaagcccttggttaatgaagttgtgcagtatttgggattcctgctttaaaaggagaaagcccaatcacttgccatagttttgtagcactgctgtggcgtccatgttgtgtatttttcgtgaactcaatgtcagtgctgcacatgctatacccaagaaaacccaaccagaaaaatgaaatactaaggaataatattttctcgggtggggttaagctttggaggggcacaaaccactgtattaccagatttttttttttttttttttttgtccacaggaaccaattctcaccttgggatcaatatcacccccctcaacgcccaacccataacgccccccccaaacatagtctatctttcgagctactatctcttccaagcaaactttgtaacatgctttgagtatttttataccagaaacttggtccagggaaaccccatttccccaagtccttaaggatccaaagcctagctttcggtaggtcatttaatttctctgaacatcagtttccctatctggaaaataagattaataatgcctaccttgtaagagttgttgtaaaagttaaatgttatgtgtgtaaagcgctgagccaacatacagcaaatgtacacgatgtcaaatattaagcaagacacagataaagtgagataggcagtatgccaataatgatctcgctccagcaaactgccatttttagttctttctagtgtttgactagaatgagtaagtaggtgaaggacttcggattatctcagattttatttcaaaactgcaggagtgggaagtggaggacagactacttcaggtagtagaacgaccgggcttccggtacttacaaaggagtttcccttacaaacgcagggggacgctcactgtttctcaaagtatcgtcctctgagacaacaccagaatcccttgagtcctgcgtaagatgtcagagtcctcaggagcaccgccgactccagtgctctcttaacagtttggcactccctggagaggtttcctagcctgaatggcaagtccatgccatcttccgaccagtacagaagacaaaggggctttttagccctcgcctcttcctccccaacccgcagcccctgcgtaaggggcagccgggccttcgggaagctccacgcaacccacaaaggacccgggatcactgcagaacccccggagacccggacacgcctcggcagctccgagcccggcctcccactcgggagaggctttggccggtcctcacctgggcgtcgtccctgccactcggcccatagtagcgtcaggtcgccgtcagccctcaggaagcgcagcagctgcaccaagagcaggagcagcgcgcacagcaccagcagccacagcagcagctcccagttcattgcggccgcgcacgcccagctcggggggaagaagacggcccgcaccagagtcgcgtcgctgccctgcgggatcgcagcgccaccccttcggccagcccagagccgcactgccccggctccgcccagggagcaggccgggaggaggagcggctcgggcgcgccgggctcagcactcgcggccccactcgcggtccttgggcggcccgcgccctcatgcggcacacccggcggggccggcagattgcttgaattcaagtgtccgagaccagcctgggcaacatgaggaaaccctgtgtctaccaaaaataaataaataaaattccagtatttttaaagaagctgattcaaacataagctacatattatactacgttatttcctctctgtacagggacactatcaacggccaggagacagatagaatcattcttgcttggcccctcttctccattcctattcagaaagaacatccccttttcaagcttcagtatcttttcatgaggtcgagaaagtgctgaagaaagactgtggctatcactcaagaccccacaagccaaggcaatggtccctccatggggacaaggtccttttacaattagagaaaaaaagactgaagccatgtgc

SEQ ID NO: 60622 - DNA, 731 bp, Homo sapiens
cttaaaatttttctgatttaggattatgtttgctgaagttttttatagatagatagataggcagaatctttaggtgaagaatattctgtttcttttaccctccattttttactacaaaactttccaaatatacaaaagttaaaagaatagtacatgatcatccatatacccactaactattagcaatttgtcatatttgtttcatctataagaaatataaatggggctatgaaggctgtgggaaatcgtacagtgattgaaatcatatataaacatagcaatgtctttggggtctaaaaaattagtgctttctaaactttatgaaggagtttccaacaaacgacttattaatgttgatcagcacattggatcggaatgttggaatgctggcagcaggtttgtaggcagatgcttgttctttagcagacatagcaagagaagaagtttccaactttaaatctgactttggttataacactccactaaaacatcttgcaaacagagtggacatgtatgtacatgcatatacactctacagtgctgttagatcttttgccttcagtttcatgttagggtcttacagtatgaatgacagtgcacaattttccatgattgactcatcaggtgttttatatggttattgggcctgtgccactggcaaagccaggcaagctgtaaaacagaaatagaaaagcttcagatgaaagaaatgacctgctatgatactgtta

SEQ ID NO: 60623 - DNA, 3030 bp, Homo sapiens
acagaaccttccccaaagtcatgttgagaaaattagagatggctttttacaactttaaaagcagcagctaaatatttgctgaatgccagaaagaataaataggttgcttttgatctaagagttggggcaacaaaatggtttaggagatagaaagtagtagggtgcaaattgctatagtgagctcctcaagtaaaatagagaggccttcaacataaatttaccttttttactggccagaactcaatttggccagtaaaagaacctgccttctacaatgaagtctttggtttgtgtgtgcatcagaacatcttttaaaaatacggacttttcttctaacttcttttcctgcgaatgtggtgtaggtcaaattcgtgaactggttaagccgctgacaagagagggaagggcaccccagccaatgggaacccgtgctggtgatgtactgctcctaggctgcgattcattggctgcctagggtttgtcattctatccccggcgtctgcaagcagcgtgggtcgggttttccagctagctaaactggattttggccgctggcacgtgcagtttctattaactttagctcatctctacctcttaatagaagcagctgttatgtttctgattattctcctgattttgaaaaatcctgttcccttaacctacctcattggaggtcgttggaggtcccctgggacagaaccacgtgattatctaacatgtgcaaataaatacaatgtggaatcccctgaactatagagggaaaacctgccagaaactcagagcatgtgccccgtgcgtgaatcagttgcactcgcacattggtgggcggtggtagcgtgcttgtgtctctgccctttgggtcgcgaggtgtgtggccgtggcacctgcttgggcttcctggggtcactgggagaggaaggctctggaggagtgggactctggggtaggggggtctggcagctgcctgggacccaccatgggttcgaagggcagcggccagaccgcgacggcgcccaagaagggtggacagcttcgggtctgtgctcggggctgcgtgtacaccatcttcgcagggagtggggtttgtatctgcaggcaggtagaagagccagggctccgggcgcggacgccgtaggggtagcttccgagtccctacttggccaagggccggcacggaggggctgtcgatctactgggcacctaatagccgcacattctgtccagtccctggcgccggaacgtgaaggcccgggtcctggctgctatccgggatccggacgctcccttcggcttcggcctggtgctccaggccgtaaggcaaaggcggcggcagcagcagcggcagagaaagaagctgggtaaggcagtgacgtcatctgtggcggcccctcccccgcccgccagccctcaccgcagttcctgcccaacgacatccgggtctctgtagctgcgcgccgcgccgcagctgtagcggcggcggagccagcggggcggggcgagcggaggggtgggggaggggcgacgcggtcgtgagcgcgcctgcgcggggccgcgctagaggcggcggcggcggcggtggcggcgctagggacgggagcgcgcgcgggagctagagagcagtggtctcggcgctcgtccggcccgcagcttcgggtcctcaggcggctgttgctccggaacgggtggttggggaggggggggtggggggactctagacagctgaggcgcgaaagcgatgagtcctcggctcttcctcctccttctccgggacccgctctctgcctccctctccaacgcccggatgatctgagccgcgagggcgccgacagccgggggcccggacgcagcccggctcctcccctcctccgccccttccccagcctgacctggcccgccgctgcagcggtgacccctcccccggctgccgccgtcgccgccgcggtgaccccctccccggctgccgccgccgccgcctcggccgaccagggacctgcccgcctgcggctgctccgggtaagtgcggcgctcgggccgacggcgggctggcgggcggtgcgggcctgcgcggcggcggcggcgggcaggcctggggcctgtaaacaagccgggcgtctgcccgggcgctcccgggaggagacgcgacaactccaccccctggccggcctcctcccccgagccgggcggcggacggcgaggggttaacgctcggcgagggcggtggcggggaggcgggggcggggtgttagttgcggtggcgcggggagggggcgcgaccctctggccgtccgcggccgagatgggtgtttgtggcggcgaagcaggcgacggccgcaggccggcctggccggagagcggcctgcagaacttttcccgagcggggagggggcgtccccgcgcccccacccgctcgggcgcgccgccccggctgtcctgggcttcagcccctgggagggaggcggggagacttcctttgaaccgggcttagcctcgaaaaacctaattctgtagaaattgcttaaggttttacagggggcagggctgagagactccttcagaactcaagtcagtgagtgatgcctctagttcattcattattaaggcatcgaacaaatccattgaagtaaattccgatttcttatccttttaactacgtaaatcgggtaaaacttcttgatgttagagcttggttgaggtatggttctgttctgcttgtagattttaaataaacttggagccttttcttgaaagacagctggctgtggagagccttctaccaactgcagttttagatacgttttgaaaatttcatcacctgaggtatttttcttctctcctgaaacaccacatggtacaaatccacaaaagtcatgcttcagttgtccaagccatgggatctgtgtgctagccccacctccccgcaagtttcctgctcattggaataatgagctgaatgtgttttaagaagtggttggaagagtatgagagataggtatcattttctcaaaggaaatgattttgacattattgaga

SEQ ID NO: 60624 - DNA, 1116 bp, Homo sapiens
aagaggcacttctcccctaaataccaaccctgggctgtggctccaaagccaaaattctaggacaagatcacatatttgacatcaaagccatcacagccaacgggccccaatttcctacccttctgcaagatatacatatagcctccctatggtaaaaagccacccaccaactgcctatgtcaccaatgtataaaattcagtgagctcataatataaacagaggactatttactatactcttggcactggcaaacttataaacaatagctcagtggaatatttttgcattgagtttgtttcctgagtatgtttttcttataaatctgcatgcttatccaaagaccacataactcattaggcattacagctgtccttgtgacctaaaatcaaaggggtgttacttgggctctttcccgttgaaaactgtaaatgatttaccattcttggtttaaggttcaggaaagagtttctgtacattggccagcaggtggcactcacatccaaggctatgaggcgttttcctgctagccaaggaaatctttgttcacaaaatattggttcattacagttcagtaaatactaggtagatgactttttagtaaaagaccgtgaatttcactcctagtgtcttcttaaatgttggcattggaggccgggcacagtggctcacgcctgtaatcccagcactttgggaggccgaggcgggcggatcacaagatcaggagatccagactatcctggctaatacggtgaaaccccgtctctactaaaactacacaaaattagccgggcggggtggcgggcgcctgtagtcccagctactcgggaggctgaggcaggagaatggcgtgaatccgggaggcagagcttgcagtgagcccagattgggccactgcactccagcctgagcgacagtgtgagactccatctcaaaaaaaaaaaaaaaaaaaatgttgacattggatataagcaggcactctatttgtgtcattttttttttgcatgaagtaatgcgaatggagaaatttcatactgaaaatatgtgtttgtgagcaccattatttggcccaaggtacttctgtcgtccctttccttggcaatatttggaataggatt

SEQ ID NO: 60625 - DNA, 1372 bp, Homo sapiens
tgctgggaaggtgcccactcatccatgcccctctgcgcgtctcgcccactcgcttaggcttggactttgcaacaaggtttccaacaccgctgcagtgcttgacaaagccctcctggaagccagcagggtgaggctgccagcaagcaggcgggctgcgagggacgcttttaggactaggaagaaggccgtaagatctttccttacctctactcaagttcacccgccaccctcacccatcaaccctcgtgcaggcccgggtccacgtttcgcggactgatcctgagcctcagtataactcgctgtgccaggtgcgcgcgcgcagccaagtatccgcgcgcggacgccggggaggcttcaccgcccggtgtgctggcggccccgcccgctggctcgcagagcggggtctcgcagagctgggcctcacccgtcgccccgccgcctgcaccagaaactccctccccgggctgtgcgggagctcttgggcgccgcgtctgcgccggggccgactccgcccaggcttgtagccagaggtcgcgctatctcgccgggctggcccggcgctctctggggttgttccctcgggcggtgcatggggcccacaggcgtcggggcttgagggaagaggggccggggcctgaagggcggggaccacaacgaggcgcggggaggtcagtggagcggagagccggcgcaggccggcggcggcgcggccggaggagaaagagggcgctgtcttcctggcaaaggagttttcgcctggccggcaggaaccgaaacaacaacaacaacaaaaaaaaaagaaagaaagaaaatctgctccgccgagtccccggagtgaagagcgcgcggcgggaagggtctggggtagcggagcggattctcggcccaaagcctggggaccgctcagcccaccttggcttcgccagcgccacgtagccccggacggcactcgcgaggagggagttttctttggcttctttagctgtttccataatcgccttcttttagggccatccctccctcactttttccctccaaaaactggaggcgttgggataaggacggcgacgcttcgctggcgaatgaggtgcctcaatttgcccgaggcgagcggggaaatcgggatctcctttcatgaagccgagttggcttctcggtttcgtggaatctgcggccggaagccgcgaccccagccagtcattcgcgttgaagcgccgcagcaagtggcaatgcttttggccgcgcattgcccaggaacagcaaagagatggaagaccctctcatttaccatcaccaactggtcggggagcacacgcagagaccaataaggtcccaaagacaactactatcaaccattctccacccaaatcca

SEQ ID NO: 60626 - DNA, 494 bp, Homo sapiens
ctgagaattgtacattgcctcaaactttttaaggagatacaagatgatgataatttaaagatgatatttatcatcctgattcaaagagagatctatagacatctccaatgaaaaattggcatttcgtctttcatttatatgactacttgcattctgttatccagacgagagagctccataagcttcaaggaagtaggccaaatacagtggcaggttactcattgaccattgcccttgaccccagtgtctatggtccaaggcagattactcattgaccatcgccccccacgccagtgtctatggttcctttttcctttttggaatataatttccccaccttttagtaggggatatggctactcacctagagactacaattcccttggagctaggtgtggacatgtgactagccaatgatatgtaagaagtgatttaagcaatatcttgattatttcttaaagaaataatttctgctgggcatggtggctcatgcc

SEQ ID NO: 60627 - DNA, 365 bp, Homo sapiens
ggggccgagggaggaagcagcccttcagccctgctaccccggctgcgctgaaacccgatcctaaggagttcagaatcaggtttcaaaacatgacagagccgagctgcaccagcaccccacgttgccgcggccgctaagggaaccataggggcagggtgaatgattaactctgtcatatgaaacctcgacgttccgagaccccttctgcgccgccagtcccacaacactctcttcccttcaccagagcagccaccgcgacctccagcgcaggcccggggggcggctgaaccctggggatccgggagcgtgcgcgcgcgccaggcccggtgtgacctcgcggaggtgcagaccccggccggcgccgg

SEQ ID NO: 60628 - DNA, 1054 bp, Homo sapiens
tccaaaagaaagtaagtacaccgctcataaatctttgaaatcatgggaatgtttccagacagaacaagatggaatttatcttcctaattgtgacacagtaccttgaaaaatgcaactgggtgcgtggagataaggctttgtataatttgccattttaaaagttcccctgtcaaattcaaggtattaagttgctttatggaaggctaagaccaagccctagatgcaagaccgggggaactgactgccggaacgtttgtgttgcagcgcctcgccccttgccggtgctctttcgcgaagggaccgtctctgccaagcgcctgttggtaggaacctgcttggtcgcgtctgagggggcttgtaggtggctctggctgaaacaggcgcctgcgagagtctgtaggagggaaaccgccatggacgatcagggttgccctcggtgtaagaccaccaaatatcggaacccctccttgaagctgatggtgaatgtgtgcggacacactctgtgagttgggcggcagtggattccctgggggagagacgcgctgggtgggaggagaggaccgggagatgctaggcctcgtcttgggagcaaagggcgttgttagtttcaacactggggaggaaaatgggaaaagaaggcgttgtgactttaaatagactgtagccgctagccccgagcggctctggcctgctttgaactgcgggttctcagtgtggcatccagcagtttgtcaggttcccccttccatagccaatgagtatcccgactgtatttccaggctttgtgttgtttactgggctctggacatcgctgattaaaagcgtgggggattggagtgtttatttcatatgaaatgtttttattgaaaaagtgcgaaagtgctatgaaaacttaaaatttgcttgagtatatactgctgctatttattgtatgagttaattaaaaaaccctgtgtgtatgcccacttgtcctgatggagttcggttagactcccatcactaaaatgaagaaaacccggactgtaggtagttaattttgaagatataataatgg

SEQ ID NO: 60629 - DNA, 837 bp, Homo sapiens
tagccactctaaatatgtagcattcaaattcctaattatcttttaaaatagtctcattagagtagtataaaatgtggttagaaaagataaatgtttgaggtgatggatatctcaattaccctgttttggttattacatattgtatgcatacaggtatcaaaagtaccacaaaatatatgcaactactctgtatcaattaaaaactggttttaaaaaagttgtggcagcactacaaagtcatggttacggatttggactttgaatccaaacagacctgagttcaactctcaacaacccatttatccagctgcttgacatgaacaaattactttgcctttccaataagcctttttttcccatctgtggaacggtgatgataatactgatctcataaacgtgttgggaaataatgtgaacaaagtacacagtatagtacttggcttattgtaagctctcaataattgaggttagtttttattgataataacgagttgataacacaaatggctatactaattccctaaatctttacctagtttttatatacataaaattcatttttatacatagttttaaaattcaagatgatggaggttgcagaatctttgtttggcttttatcattatatgcctgcatttcaaagtcagtgttaatgacatgcaatattgaagtggtgggagtttactggtaaaagaccagtaaactcagtaattttcaagaataaagtctagtattcagatgacacaatgtagctacaagcctcaggaatgtatcccctattgtaaattgagcatgatgagtatgcaagaacgaatgcctcaaaacattatcaaagta

SEQ ID NO: 60630 - DNA, 2002 bp, Homo sapiens
tggtcatctgtaaatgaaatagtcattatacatgaccattactagtggtgatatttattaggatagtctcatgggtgcttattgtgtcagatactgcgctaaatgctttatgtacattatgaatcttgggaggtgtgcagtattgcaccctcattttgtaaataagtaaactaaagctcagacgtaaggtaacccacccaaagtctcccagctgataagtggctaaacatggattaaaacctagttttgactgacttcggtgcttgtgttcttaatatattgctctgttgtttgttttcgatgctttactgccacatgtcctgcctttaactagaggcttctgtattttgaggacgagagctttgctgattgttatatgcatagtatcagttattcactgtcttctaaaataccaaagaatttacttgtaaggggaaagggccctgtcccagaatcctgtaaagcaacgaagtctaacttcaccgtcagagatcaaattggttctagcagctgaccagctgggtgaccctggataaattactataagtctcggttttcccaccagtaaaatgtggcgaaaggcttttgaaacattccttactatccagaacctcgaaactaagctcagcacctaggcgggtgggtgacctcgcgatgtttctgtgcccaggcagcacatggcagagagcagccctgggcgggctggtacctcccctggaccattagcccctaacgcggccgccacctcaccaaagcaccattccaattccccacgtcgctctgcagctggatccgcgagccgacccctcacctcccgctccggtaccgatcggatgtgggtcgcgggtggatgggcgggtcttctatgacatcatcactgttcgccgcgaagagggcgcgcgtcatcagatcaagtcgactcgctcctctccttccaggccctggtgaagtacggaatgccggaagggccgggctcaaagctccgcctctggcgcgaccgacgactggagcgcagggcaggggtagaggctcgtagatggaactggtagtcagctggagagcagcatggaggcgtcctgggggagcttcaacgctgagcggggctggtatgtctctgtccagcagcctgaagaagcggaggccgaagagttgagtccgttgctaagcaacgtaagtgggctgtgttcgcttccccgcgctgacgccctccggcttccctcaagtgcctgccaaataagacccagaaaaggaggaccgcaccgggacaggggagatgctggagcctgaaccctgggggatggggtctgaaggcagccgccgagattcagatgagattggcgcagttatgaacgtgatagcagcctagcatactctagaaagaaaagatgaaaagcgtcgggtggaagagatgcagcgttgagtggaagctgcgaacatgatgggatgagcggccctaggattatgtactcactgctgttagttagtatttttgtcaccttattttctccaccagtctcgtgaggtctttgcaagagtcacaggattttcctcttccgacttagtcatggggggagggaaaataataaacattttaatacagaaattcttagcggtagaatggaagtggcttggtagtaagtgcatagcacgttcctgaccctaaagcctgtgcagtgggcactccgctttttaactcgagtcctagacactgttcccaggactttgttcccggtgctgtttgtggggagggggatgttttcagggatactgccagaacaacgtgaattgcttctgtttataatattgtcattgcaagatattcctgaccatccttccagtttggtagaactaattcattagatatataagtagagattagttgtgcagtcctagtaattgaggagaaacaactgcccacagcagtcccaggttgactcagcaattctttagtaatcacatgagctgaggccttatccctcctctctctccccactccattccc

SEQ ID NO: 60631 - DNA, 2906 bp, Homo sapiens
actgtggctcctgaccatttcctggatctcgctcaagagaatgtacacaagtatttatttatagctgctcaactccttttcagacacactctaaatttattattcctgaaatcgaatgagttgtaatcactgattatggaaacattgagcaatttcaaggcaggctggggaggaaacttttgtcatcagactctcctgcattacatcctgcctggcagtgacttaacaatttcattgtctgtattttcacacttgtgaaatggggaaataccacttgtattgcagaattattatgaagattggaaagaataaccaaacagtgcaggacacagagtaggccctcaagaaatagttttggttttcattgttaagacttgtttagggaagggaagtgagctcctttagcagttcaaggtttccctcccactctgggacagggtggtagaggtatgagagtagagactgctgagagaatatggtctctttcattgtgctctgttttctccttttggcctcatggggaggcatggacgggtgtcatcaaagggtgacttgaggaagtaggagagcaaatggcttctccctggttctcagaagtctaggtccctcacctggctcttatccacaatgcctgtgctgttggtaatagttcacgtgcacatgtctcctccagttaggttgaaaaaaatcctgctggctcgcactccaacatgggctgctttgtatgtctccctggcaaggcacacagcaaatattggttgttgcctttggaggccaggttagcacaaagcaaatagggcttgggtgggctcagggacaactaaaggggttggatgactaactcccttttctgtgaccatccctgcctcttgtttactccactgaaaaagggcgtagggaggtcagttgccgctgctgatctgcacaaaggtcaaaggcagagccaccgaaagtagtctgctcctgtttttgaagctttcttctgtgggtaatattgcactttgtaaacacttggtactcaataaattccagcacacatatggaagcaatggtgccaactagctggattgaaagtactcgatacccagtgtccagagcattggctaatggagaggaagaggttccctccacttctgactatgggtgtgcggcacaagcccctggcgggcctcacacaccctacttagcacctgtcaatctcctgtcctctgtgaaagagcctgcatttctccctgttgggcccgccacttctccaggattttttcagtgctgtctgtccaagtctttcttctgctggaagtgtgggaatgggaagtcagctctagccatggctacaaataattcacctttccagcagcctgcgggttttcttcttaccggtacaacagtgagtctcattctcagaatctctgaggcctggccagtgaggcccctattcttcttcccctggcagaggccagctctgatggtgtccccacccaaagggcagacacccatgtgatttcagtggttcggaggaataggaacggaatggaagggtgaggtcttttctgctgaagctcaaagcactgtggatacaggcccatatgcgtagcctgaatcaggggcactgagttcactctgctcagtttgcttatatgttagtttatggcagctgtggttgcaaataggatcaaattgtgcagtttttaattccgtgtaatgctgctgtgaagatggacttaactgcttttcagtacagtcattatgactctcttaacttcccttactcatgaaacctagcatgagtcatggctggagaatctcactccaccccacggcccccactgtcccgagaagcagaaaggctgggttcctggggtttttcttcctggcagtaaaccccctcctccctgcaggactgttataactgatccacagttagaacatcagggagcccataaccacgcagggcgggggtttctccttaccagcttgctccccatgcagcagggaagcgggtgtctgctgcaaatctccccgtgtggggggatgggaagaacaatgaggctgaacagacacaaagggagctgtcctgtgcccagacagccccagtgacatcttcaggcccagccaggatcctcccttcccaaaatggagcctgtttgctcccagtattagtagggctctttcgattgcaaaggacaaaaactcctcacttaggctgctatattcgtttgctagggctgtcttaacaaagtcccacagactggatggctcaaatatggattgtctcacagttctggagactggaaggccaagatcaagttgtctgcagggttgattccttctgaggcctctctcctcagcttgcagaagactgtcttctctgcaaatgcatgtggtcctccatctgcatatgtctatgtcttcctcttttaaaaggacacactcctgttggattaggctccaccctcgtgacctcatttaaccgtaattgcctctttaaagaccctatctccacttaaggtcacattctgagggactgggggttaggacttcaacatgccagttttctggtgggaggacaaaattacttggcttcccagagcaaaagcctgtttaaggatgttgatggcctggagctgagcaaggccaatgtggggcagccccagacagctttccacttctgtctccacagcctttccattccctctggttgaagtcaggtgtttctgttatatgcactcctaacacccctctgttttccacatggatttaccacctctgtatttaaataatgtgttgtgaagtcatttggttaatgtccatcttcctggttagatggaagcatcagggccgctagacgagtcaccgtcttctttgcagcaaccctagtacttggcccaggctgggcacataaaaga

SEQ ID NO: 60632 - DNA, 2642 bp, Homo sapiens
attggctaggtttgcacccatttagacatggccttttctaaagacagtgacccttcactgttcctgtcactgccattgcgatctgtgtcatcagccttgctcaccggcagagcagatgctctgggtgtagtggatcctcctctttcccctagtcctgtggtgtcccgactgctcccagtcaaacccagccgagtgacaggaagggattccaacattgggctcaagcatgactactcctgctgctgctcttcagtgagcacccctccgtgccctgggcctctgagaagcacttcacatattcattcattactttcactggtatttgttgagagcccatcatgtgccaggatgattcttttttgtgtggtttatttcatttacttcctacaattggaatgcccaaacagactggctccaagcccacgcgcctacccctgtgcctttctgcttctctcattcaaggttgctagacactcagtctgccccaatcattttcctacttactggagacctgaaaaacttgtcaatgaccttcccatgaccgggataacaatttctaaacttgtcactgcctgttatgtgtgggtacagatgtatttcccttccactttgatagcatatgcatgagtgtcacctttgtgcaggttttgatgagctttaggctcccttcctccccccgccccttcctgtctttctttctttcttattttcaaattcatgcactgggacctgctctacaaacttgagagaaaaagtgaaagaacaaagaaggcagagcaatctaaataccgaaagtgttttttttttttttaaacttcatgaatggggcctttgaactcgccagccatagctccttcctaacctgtacctttcatgtcctgtttccagctggcatggaaaatctgaggtgccctggtcctgagcctgtgctgaaacctggccgtgggttgtgtctctcattcctccatcagcagtggcagccacagttgctggagcggaggtgagccaggcacttcctgccaggcgctaaagtccattgcaacagtcacagaaccaagctgggaagggaaacaagcctgcatgagcctttgcccaatgtgcccaaggacagccacaacaaaaaaggacgaggagaaattcttgcatccagtgggcatggggctggggaggaagggggtgtttctgggtgctgggactttctgccatgactataacccaggttctcagcacaagggatgtgattcatggccaagaaattccccatggccttggatgacatttacattgattacttctgagtcacatttctgggagaatattttttttttctcaccaaaggcaaactgaagggaaaatggcatggatagtggtttggagacaacagaggaaatggggtcacttgtgttattagtagaagagttaaagacatgcaagaatggaaagaaaaacaaggccaaaaagaaaggacattaagaggtgggaatcatctccgagtggaatgaggagaattgaggtctcaggatttgtagtttcataactctggggatgaagggatgggggcagccgaaatggactctgcccttttgtctcttgtaacgacagaaatttagaatgtaagagttggggccatcactcacgcatttatttcacaagtatttgttgagcacctttggtcttccagattctaggcacgggagatgtagtgggggaacaatgtaaagtcctgccctggtggcatttatctcagtggaagagaaagacaacaaaggaatggccaatcaaatggtacattttaattcgacccttttgacttattaacagaaatgcaacagatccaggatggtgagaacatgcacactttgctgcaccaggggggaggacaaaggaatgtgactcgtcagtggcactggacttcagcagttcaaagggttgtcttggagtcctgactctcccctttcctggaagaataggcaggggtgtgggcctgcttggaaggggaaaaatagagggtgtccctgatccccctattatgtatgttctaagcctcatccaagtaaaagccttcttaatgcaaatgtagaagatgtcagttaaaccatgaactccagaagtgtgtctgaaaacaagaaagcaatgtcccaagtccagtaagattttaatttttttttttttcagacagggtctcactttgttgcccaggctggtctcaaactcctggcttcaagcgatcctcccaccttggcctcccaaagtgccaagattataagcatgagccactgtgtccagccttccagtaggatcttaaaccaccaacagaaaaacaaaacaaacagaaaacacttttcaccagattagcatgacttctgcttgacttggaataataaatctcaggctatgtcttacaaagcattatttgtggccaacaggcaggaatttgcaaagcaaaggaaagcaatattgaggagtacaatgcgccaagcatcagttatcaaagatctgggttcccatctgggcttgccactcactggcccccggagggagtcctataagctgggtagatggaaaacagaacatcaagagacccagggaaggactcaaccaggatgggaacaggcatggctagagagaaggtgggcacccga

SEQ ID NO: 60633 - DNA, 621 bp, Homo sapiens
ccgcctcgggctcccaaagtgctgagattacagtcgtgagccaccgcgccagcccgttgctgtatttgaacagaaaaaagcaatagtacataaaacaaaaggacagcactgggatcgaaagacgatctgctccttcggaagaaaacacagggtgcggcggtgactcgcagagctcccagcgccccagcgcccccgcgaggcccgggcagcgtccgcgctccctacagggggaagcccgccggtgtttgggaatcccagcggggtccccagcttgccgatctcccagccctgaccttactgagatttctcactaggtcactgtttgttaagaaaacagagtaacagaaacgaggcaaagtccataattttcttcttgcaaaattctcaagtttagggcaaaggcaaaggggggatggaagtgtgccccgactctgtaagatattccccttctcggagttgtctccagtgcagggcctttcccttgtctgcctgccttgagatgcttcctttattgctaacagactgcactgaaatgttatctctctctctctctctctccccttcctctctctcttgcttctgtttcttcctgagagtaggggaggcacattttcctctccc

SEQ ID NO: 60634 - DNA, 1030 bp, Homo sapiens
tggaataatttcagtaaatcacagttaactttattaatccatgtaatctgtaagaacaaaaggatgattttttttcttaaaaaaatgtttgaacatcaattagttaaaaggctggatgagagtgggagatgattattggggaaagaagcaaaataatagctttgtgagtaaaaccacaaatcctttaatctattgatttccacagaaataatgctaacctttgcggataatcacaaaacgtgaaatgaaagacatatcaaagaaatatcaaacattctggctgtacccaaacaacttctggtaggaagacaagatgtactttaagggacttccaagtatttcattttaatcacaaaccttgaggtgttaaaggggttcatgaggtctcaactcattgtcaactaattatctttaagttgttgtcagcacattctaattattatgctcctgtcagctccaccactgggggtgcacaatcctagagtaatcggttccaaaaacaataccaccaccaccaacaaaaaaaccaaacaaaccaacaaacccagggatgactcacctggctgctgcttggtttgctaaactaaactgttgccgtcaccaacgcacacacgcacatgcacatgcacatgcaaaaagcttttaggaactttcatctttttaaaagggcaagggaaaaaaatcaataaagtggtggcctggccagcagtagggaatagttgaagcagcatgggtggctgcgctgtatgagaaacagatgtaagctctctgggaattgggcaggcatttctctttacagccaaatcaaccagccaatggaaggcaattaatgtccctaccatcggtcacccacccattcccaaaaagattattcagtgtggctgctgaggccaagagcagaaagggacatccacccagctggagaacatatgatttgggctcacactttacccaagtcgtattcttaaatatgatttatttcgaggtctgaatcagcaggggaaggctctcttgctgttctgacttggca

SEQ ID NO: 60635 - DNA, 1386 bp, Homo sapiens
aaattcaaacagtatttgaggactatctagtttatatacatgttgaggttgataaagtattgaggactatctagtttatatacacgttgaggttgataaagttcaaattctgttttaggaagttaacaatgaattgagttcattttaactgaatgttactataaaagatggttttcttgctgcaatgtaaatctgctattaagaaattagcaaagtggctggtggtgtttgtgcctttaagatcatcgttcaaaagaattcagcaaactcgataacaaaggtaagacaaacataacctttattctctctcaaaaacccagagaacagggcctggaaccatattcgttaatttaaccagaatcagaatactttaactttcatagtctcatttaaaattttatagcaatatactgaccattctaaaaataacaaaatacatgttgctctcaactacatagttaaaaaaggtagtaaattctcttacccaaaatagaggaggggtgggctagtgagctgctcaaacatttgtaacaaataaaaatgtatctatatacatataatgatcatgttttcatagcctaaaatcaccatacaaaatctaataataaaattgtgtcgtgttcaggagttgggaagccaacacattaaattaacaaagtatttttggtatatgtaaataatgggatagaatctctcgaatcaggattgtcccagaagttctaaggcagatgtcaatgacatgcacattgtccatgttcagtaattttcaaagactagaataaactatgtaaactattcaatacaattcaatattacttaactgctaaaaagtacttcaagatcttgcactgccttgagtgagtataatcaagttagtaattggaaaatagctgtaatagcaggcactgaagaattctgacaaataccaaataactgtttgtttttaccaaataaactggtaagatgatatcacaaagggttttaagttattttgctatacaaggtttttaaaaataaactattgcttcttagaataactttaaacatactgattgatgttaatcaataaaatcaatggaatgattttagttgagtgtaaacttcatctcaaaggttcaaataatcttaagaatctagtttacatataagactatatatgctttaacattgattcaaatatgattactagaaatcaatagatttcatttgaaaagataaaaaaaattttttttccaggtccaagggaaaaggtatgaatgaagccctttctaatcacacacacacacacacacacacacacacacacacacaatgacaaagaacactgagctaggagacatagatgtgactttagggaacttactttccctcgaagatctcttccag

SEQ ID NO: 60636 - DNA, 1551 bp, Homo sapiens
agccgacgaccaggtaggcgatgcccaggaaggggttcttgccacccatccacgagatgctgctgaagatgaggagcttgtggccgccgaacgcgcgcaccgggtagttgtaggtgatgttgacgcggtaggcgccccgcggcagcccggccgagtagttgccctggcggatgcgcgcgtacagtttgcggaacgtgggcagcgccgccgtgcgcatccacaccacgaagtcctgattgatgaagccggtgttgttggggtcggggctgagctcgtagactggccggcgccagttgggcgggggcgccgtgccctggaaggccaacgccaggctgccgttgaccagcggcgggttgcggaacttgacgtggtagtcggtccaccaggcgatgccggagcggtcgagcggcacctcgacgtagggcccgccgggctggcgctggtgccaaagcgagaaggagtcgttgaagaggctgttggcgatggcgccgcagggcgcgatgggcaggccggccgcgctgcgctggtagggggcgcactcgttgacagggtggcgcagcgcgctggggagtccgctcagctgcgcgtcgtcgcgggacacgccgtagcgccggttgttctggtagaagttggtcagctcgtagtagaggtacactgggccctggaagagctcgggcagcgagaagtaccaggcgcacgagcaggggggcggcagcgcccggccctggccagccgcggcgcacaccgagcagttaccggtgcccgggtcgcctgtatagtcgtactccagctccttgatgccgttggaggagtagtagaggcccaggcccaggccgatgaaggccaggcccgcgcagaagaagagcggcagcgcgatgctggccgacagcagcggctgccaggcggggaggcgctgctgagtgaaggcggtgttgtcgggctggtgggcgccccgggccgtggcgctccaggtcatggcggccgcgcggggaccgacgcgcgggctgaccgagtgggggccccgccgcggggcgcctccctctccgcgccgcgcaagcccggggactgctcgcgggtcgggtttcccgccagctcaggtgggtttttgcccgggcccctcctctgcctccgtcacaggtgagtttagttccaggccctacgagcagtgcccacaccctcccagttccgcctccgcccaggtgcgctgcacccccgcgggtcaccgggagccgcacctcgcccgccccttccgaggtgagcaggtgggtgttttttacctcacctggtagactcagtctcgcgtttcctctcagtccaggtcatcggactccacctcctctcctaggtgagtggcggccccgggctgcctctgagtggctcctacctggctcaggtaccaccttctcttccgccttccaagtgactagagttcctgggccagtctcccgaaatcaaaaggcgctccggcctccagcagaaatttttgctgagggcttgcaccgtggtcctggaggcttgaagatttcagatccttaatcctctgttatttgc

SEQ ID NO: 60637 - DNA, 695 bp, Homo sapiens
gccataaactagggagagaggggtgacatcctttaggaaaactcaggtgcccaacaaagacatgcttagatgtctttccctatgtgatatcatcaatgagccaaatacacatactctgtttttttcatttcttcccccagaaccaccggaaaaaaaactaaatacaaattaaattttatttttttgtagaaagagagtctagctctgttgcccaggctggtcttgaactcctgaactcaagcgatcctcctgcctcagcctctcaaagtgctgggattacaggcatgagctgtggtgacaagcctcaataaacatactttcaattccattacctaggtcactgattcaaatgcaaaaataccttggcccagcaccctaggaacctatgtcatgtgtgctgatcaatactgacttgttaatattcaatctggagatcgtatacccatggagtgttgtaggggcccctgactttttctctgaatagtaactctgaattcgtaatggctgtgtttaaatttttagttttctttctgtaggaaaagttctgtgaggatggctgcattgtgtcaacttctaagccaaagtttgggaatcttaatgaaaccaagactgtagatgttaccaggaagttcactcagagcaggctctgatgtgatgataggagctctgggagccactcacctacttcagcttat

SEQ ID NO: 60638 - DNA, 734 bp, Homo sapiens
aaccctttcctttttggcctgcgcccggggtggcccctaacccgcagcgcacggccagacccagcgctacaaggagggcgcgcagggcggcgcaagcgggcactggcctcccgggggcttgcgcggggatccacccaccgcagggccgggccgcggaccgcgggccacgcccctggggtccggaaggcgcgggagcggacgcgggggttctgtgaacttggaacctggcggtgcgaggttctcgccggggatgcggcggcggcagctgcttcctggtttgaagctcgccgagtgggggagagcgtgagccttcggaggcgggggcaggaggagaagcaagaggaggcgggggaagagacgcttggggctggggctcaccggacgggtaggtccggctctccagggagaggagctgcccggccctggagaaggggcgagtcctgcgcgagtccccgggaggcgccgcgcgcttggaagggacggtcgggcttccccggcccgctgagggctcggcggcgggctcccctcctttccacctcgggagggagggaaggaggggagggaaaagtcccacggaggaggcagaatggccagtcgaggggcgcttaggcgctgcctttccccagggctgcctcgactcctgcacctgtcccgagggctggcctgagacgggactcccggttctcccgctgcgaagcagcgcggccccccggggccggggcagcggcgccggc

SEQ ID NO: 60639 - DNA, 490 bp, Homo sapiens
atgaaggaagcatgaactaccatcacagagaaagggtagagtcagcaggtaattctcaaagggatgtgcatctgcccctaacccaatctaaatgcctgactcaatgtcctcagaggacacgaaccctggaaaacaagtatgagatgatactactcaggtattgcgtgtgtgtgtgtgtatgtgtgtgtgtgtgtgtgtgtgtgtcagaggtcagccctgatgtaattgccaccgaggtcaccgtggatgaggtcattgtgggtgaggttacagtgcaagagctgtcttttggtgctgttctggtcttgtgatttccctattttcagcacccagtaggtaggtgctcaataaatgtttgttggaggaatgggtgctggggccagccccctaactctggcctctgttggacgttttgtgacctggaatcattctagaaggaaagagactgcccagagtggatttgtgtcctgcttgtgactttcttggtaac

SEQ ID NO: 60640 - DNA, 1193 bp, Homo sapiens
gctgctgggatataaaaccataaattcgagcagatagaacaaaagaccaaagaggatgatgtatttactgtttttgagttaaagttacaacagtttacagaatcacagcaaccgagaataggagttctcagagacatactcctcatccacagaagcctcacatgaccaacacaagtttcagtccagtgcaactttttgcaaatgaaaacttaccctggggttgtttggtgactcctagtcacatgtgctttctaaagttctcaaaacaagcatggggtgacagtccagttttatgaaatataattttagttcagaagagatgggattttagaatagttaatcttcattatatttgacataattactctgcaccctgtggatggggtggcttttcaaaacccacttctggtgaggcagaccagggctccaggccagcacccctctggagattggaatgtgaatttccgtgctgggacacagagccagcttcctatttatttagagccattgggcacctaaggagccaaacagaagttgtgatgcaagttttggctgcagagcatgttagggttgcctgacgtgtctaactaaaacatgatctgagagatttctcaaagccctggttgatttaagcaccatagtattcaatagggtttttttttagtccttttaactcagtcctaagtaaacaggaggcggtgcaaacaatgaggaagttccctctgcattccgatggtgaagtggggttggagtctgtaggcaagtgaagagcgtgtgggagagctgtttccttttgctcatggcagcagtctagaacatggtgacagtgaaagtcattggaagccatgggggcccattttctttatgtgaccaaatgtcttgcaaagtcccaggtgtgtgtgtaggtgcatgagtgtgtatgtttgttttctaaacgaagcacacgtgcaaaataatgtaaaagggcagagtgaagtttgtccatgtccctgtatgaaagtgcatgggaagtgcctggggcagaagtgaaagagacacggccccaggtcgtgagagaagacattgaggtgcactcccggcctgctgtgggaacagtgggttagcatgtcaccggtgcactcccaggctgctgtggcaacagtgggttagcatgtcacccggctttaggatttgggggagtttgctcaggctct

SEQ ID NO: 60641 - DNA, 1924 bp, Homo sapiens
gtattgcttggtcaaagggtatatgcatttcacattttgattgagttcaattgccccctcccccattgtggttaaagatagtgaacgttttattgtccatgtaccacacattgttctaagtgctttatgtctgttatttaatccttatagtaaccctctgaaataagttctgttattatcaccccatttcacagaggagaaaagttaggtacaaagaagcttagttcctaagtggcagagagcgtttgaagccaggtggtctgacggcagagtccaggcaggctcttcctatttgctgggctgcgtctctaaattcacactcccaaagcttgagtgagaaggtgcatttccccgccttcccatcatggcatgctctctgtcatttggatcatctcagagttagaaaaatggtatatttgaagttccaacttgcattcctctaactgtgagtgaagctgggcgttttcatacatttcagggtcactagtattcaaatctgtgttgggagggccacatgcagcctggagaatgggtggagcagagaagtctgggagcttggtgacaggacgcactgaaggagatacatggcttggactcccacgccaccccagcgttatcaagagaaaaaaaaatggggaggcagctaatggcttcgtgggcctcggctcccctgcgcgcctctcccttcccctctgctcctcattggtcctcagtggctcttgatggccctggagcccatgctgctcctgcccccatcctctgctttccctctgctggattggtccttggttcccctggagctccagttctccctgccccacactgctccctggagtagccttgaaacgacttccttggctgggcactttgccaacgtaaagcccctcccctgccctcacccccttgttgggctcttttcttggaatagaggagtggagttacagcttgaggcttgagagggatagctggtagctgatactggttgcccgccggggtttcaagcgccagcctcctgaacaccaccatgaacaccatgagtcaagccgcagagccaggtgacctctcagatcttcttcctagggcctgagccaaacatcacatggtttcctatgacatgaggttagatcatcttcaccaggtggtaacctttgagtcaagcagtcaactgatatttagtgagcttacctggtcttgcagcagcaatggttccaagttactactgctgaagcaaagaaagaagtatctcatacctaacaggggaatttgatctgtaaaaggaaattctggtgattataagcaaagatctcatcaacagatcatgttatggtagagtaaaatgaggaagtaacctggaacagattgggaacccaatcaatatagcatatgcaatcaaaatgttccaggaaaatgtataaattctacagtataccaaaattttagcggccacatgagattcccagtgtttagtgggtgaagcctttactagcattgaagtctatttttcctagtggaagttttatgtttgaccacaaggtggcagtcattaccgcaaagttacttttatttctccaccagagaaaccaaaggcatggaactgccattgcggtttaagatgtgtgtgttgtagtagatgtctccaaagcaaaggataaagggaatgtacccctgctttaggctaaatgataaagaagtagtgggaacccacttcaaagaagcaagtgaggctgggcgcaggcagcactttgggaggccgaggtggggcaatcacttgagcctaagtgtttgagaccagcctggccaacgtggtgaaaccccgtctactaaaaatacaaaaagtagcttggtgtggtggtgcatgcctgcaattccacctactccagaggctgagacaggaggatcgctggaacccgggaggcagaggttg

SEQ ID NO: 60642 - DNA, 2630 bp, Homo sapiens
ttttgcttttgttgcctgtgcttttacggtcatattttaaaaagccattgcctatgcctgtgtcacagatttcttcccctaagtcatcatttggtaattttacagttttaggtcttacatttaagtctttagtccatttttcagtgatttttttatgtgacgtgagatgagggtctgtttttattcttctgcatgtagatatccagttttttcaacaccatttattgaagggacagtcctttctttgttgtgtgtccttgggatctttgttgataattaattgattgtaaaggtgtggatttatttctgagctctgtattctgtcccattggtctatatatctgtttttatgccagtaccataatgttttgattactgtagctttgtagtagattttgaaatcaggtagtataatgcctccagctttgttctttttggtcaagattgctttgatgtcgtgcattatttatagtaggaaaatattagaaacaacttcagcatttagcaatgggggtacacttcaataatatactatttgatgagaattttcagccagtcaagagataattttatgttacgtagttaaattgtcaggtaccgtcgtaagcacctaacatgtattgtttattgcacgtgattcctataacagccttataagataggtgcaattattatcctcattatgtcaaatggaaaagtgagacactgagcagttaagtcatttgcctaaaatctatcacagaaaatggtaaaaataggaggttagaatccaggaaataatacagaggttatgatgatgaacagtctgtatccaagtcaggttctgcccaagatagtgaattggcagacccgttcccctccccagcctcaaaaaagactgccaggaaattatgccagtaagctatcagggactggattaaggtagtggaattatgaaggatttttttcctatttaccaaatttggtaataggattacatttcttcaacaatgggggtaggaggaataagccattattaagtcagggaccagacccctggtctctcagaacctgggatacggcctagtacatgctgtctccctgactcatttatggcgaaattcacatcacactccttttatctgaatcagtgagggttgtgtcagcagctgagtccctggcatggatgtgctggaatccaggcctcccatcccccatccccggctcgcaggggcctccccttcggttctcctcctggagagagaggaacaaagactagggggtgagggatggaggggggctatcacaggaagggggagcagcaaagtaaatattggtctgaggctttgttcggagacccagtttatggaagcaaaggtttccatttggaaaacagaagacacttgtggccagtgcccgaaacagcctctcactagcaggccctgggactgggtgagagggctgagcgaagtactcctcattgttttgggaatgccttaagtttgagtttaggatccaccgctttcaggtgggccacaggacgctccgatgccggtcgcttttgcctcctcccgctcctctgcctgctggggcgtctttacgatgtcagcctgcaaggatggagttcctggcaggaccatagctttccgtaagaaaccacttctcaaatggccaacaaagttgaaatcctggtttttgaaggtcagaatatcttggaatcttgtgaaataaatgccatcgctgcatacatgctggcacaaaatgatctcacgtgtgctcagtgtacctgcagcttgagtgcaaaggaacattctttcctttgtattactttctccattgttgttgtattaaatattagcgaagaagtgggagaggcagagagcagccaggcagcaaggtagtcatgtggccctggaattcatctttcagaattttcccaggcagggaactgcactgtgaccttcagcacaagagctctgagttctaattctggcttagctggcccacttgtctttaagaagttcccctgccttttattttgagataagcctctccacctaaatgtgtgttccttacttctggacctgttggccaacgtacctttagggagtgcccctccagctggcttcaacatgtggggtcgtagcggggctgcagcctgccctgtccagctctgatgcttcccagcgcctccagctcccctttcccttcctgaggcctcactgagcatttggctgagcccctgccagccgctggatgtggggaggagaaggcatgctcagaccctacagtggcattactgcttgtgctctgtgttgctgtgacacccagcgcaaggggaagaggccctgtgacagagggttagacaaggagaaggggaagtatagccgaaaggctgggagactttcccctttacaggcatgggaattctgaagaagcctctgttcatgccttggggtagttggttgattcctggggactgaatggtgcccactttgcaggaggggatgagcgaagaaggaaagggcagttcatgagaccctagcatatgtcctaggtgctcatattcattaccaatgtctatgaaactaaactgcacattggcattccgtaaatatccattgaacaaaatatctcatttaatacccaaa

SEQ ID NO: 60643 - DNA, 3245 bp, Homo sapiens
cagggagttcctgtttcctttctgtgggaggcttccaattcttagttatagcaaaagagcctgtattttttagctcactcctgcccacttctggtcttgaatgacttatggcttaggtgttacaaatgggagtcctggaactcttcccagaatctcttaattccattcttgtggtatatgacgttctaaacattaaaatgatgtaatatataactcccaaccaaaacaaaagaggagatccctgctagccaaattcttccctcctctccatacacgtttttccgtcgctgtgcagtgaatcctgggatgtgtttgtcagtcagcttccttgttcttctggctcctcactccccagggaccaccgagccacagactccacggttttctctgagggcatgcgaagtggaaactaacctatccctgcagccagcccagaccttctacaatcatatctaccagtggtgaaaggcagttcaagatgagttggacacaatcaagaaaaatagggaacaaatatgtcatagctcctctctgtctgctgtctatagaaggaggctaatagcagcagatctggtgagggccagtggcccatggacctgcctgccccaaggcagcaatcatgggagtggggtcaaggaaacactaaggaggtacacctgataggactttttaaagaggagtggccagggttctggccggtttgaagcctggagagaatggaatggcatgagttcagttttggggacattcagtggtaagactggtttctgttttctcttctggaagctcatagatacaggatctgctcattcacttgatttgtgcctcttatttgggcttcaggacacatctctggccaatcgcaattaaaacaccatgcccagttagccatcatcgccactcagagctgtctgctttaccgggctaaaaaaaatgatctttatcaccagttgtaagtgacttaaaaaaaaaaagtacccttccacattgctcagaactttgccgtcaccttcttgaccctcaccaacaggtcaggttgttttaataatctagtggctggtaagctttcatcctttacaattaaaaaaaaaatcactgatttgcataatgcagtgccatttgcctactttgttgggggtgggggctgtcctgttcattgtggatgtttagcagcatcccaaaataccagcagcacctctccagttataacaaccaaacatatcgccagacattggttcccaggggggaagaatctcccctggctcccttacatgactgtcaggtgattgtctttggtatgaaaagtcaaatgggttagacgatcacttttctttttatagaagccaaagccaaatgtgtcagaccttctttatgaaaatataagcgttattttttttctgagtttgtagaaaggcaaagttcctgttgggggctcattacagctgttggtgcctgcactgacagtggcattgttagggatggagcccctgagctcgggggagacagcggaagcgtgcagcgtctgtttaatgtgagtgagggctggcatgctgctggcagctctcaacagtgaagcctgctgctcgataaggcattattatcagagcctgggggcatccagggagcaaaagattagctgactgagcatatatctaaaatgggttatttttaaaaagcaagcagtacaaatactgcagcttgtcttgttttagcatttaataattacactttcactttaccagcaaggcattgagtcagtggcattttatgaaaagcatcctcccaaacctgaactttgtgagtcagattcccatcctgtgtgtggtacatgtggttggattgtacaaacagataatcagagttttgcaaaatgtttcccaaccagcatgggaaaacgtgctgatagcaatatgattgggctttgagggagagccacttgctggctttttttcttttgtttcccatacatggaaatgccatttcaacttgaaatgtggataccttaccagaggattgcttgagcccgggaggttgaggctgcattagcgaactgggactgcaccactgcattccagcctggatgacaaagtgagactcctgtctcaattttttaaaaacccacacacaaaaaaaacaacaaaacaaaaagtagaaccttaaatgctatcttaaggctgaatagtctctaaatattgaaagtagaccctagccaaaagagacattacctgtttctgtaatataatgaatggtattagtgtacttatcttgcattttaaattcaattctgtaaatgtttatggagcatgcattatgtgccagggatgaagacacaagaacaaaatgtggacctgccttttaattgcttacagtcaaaggtcatgataacaccatgtgatggagagaagaaagtcatgattgatcctcgtggaggttggaaggacttcccagaggaggggctgtgtgagctgtgttttgaagatgaatagggatcttatagtcacaagaggagggcatagactcccagacagaggtaacagcagtgcaaaggcacagaggcttaaaattgcaggatgtgcccaggaaaccccaaatgactagatgaggcagatttgtaagaagggaaatggtggtggttggcggcgggggtaggggggtggtgatgaagaagcaaagtcataatgggtctgatgtcctttgctgaggagcttagactaaactgtttaggtaaaaggagccagcaaaatctttaagtgagggagtaacataagatttgcatgttagaaggctctctctggctgctatgtacagagggaggctaatggcagcagatctggtgaggatgctgggcccgtgatctgggaacttgcctgccccaaggcagcaatcatgggagtggagtcaaggaaacactaaagaagtagacatgataggactttttaagtgggaatggccagggctctggccatttggaagcctaaagagaatggaatagcatgagttcggtttgggggaaattcagtggtaagatgcttgtttgtcagaaacacacttgagatgggagatcagtttggtgtcatccatgtcctcttggtaagtggaaactataatataaaatctttcaggccaggtgcagtggctcacacctgtaatcccagcactttgggaggccaaggtgagtggatcacctgaggtcaggagttcgagaccagcctggccaacatggcaaaaccctgtctctactaaaa

SEQ ID NO: 60644 - DNA, 3491 bp, Homo sapiens
tcatgaaaaatgatctaaataaatgaaatggtatttttactctttatcctacaagccctatacaaactaagtccataaatatcctatttgatgcttaaaccaaaagctttataaagagaatttcactatgtgaaataatgacttgaagaaatcctattgtggatgcttttgttaagttgctaaaccttttttaaaaagtagataatcatccaagatatcttctttgtgactcttaagttttagtgtatttcaaatgtggatagtttttgactaggaggtttgttcaaacgttcttctcgaccactagggggtgctctaaaggttagtgatgtctaaatgattgaccaatcaattaaaacaccgtgcccagttagcaatcatctccactgagagatgcctgctttaccaggctaaaaaaatgatctttatcatggcatagagactataaaagctgtgtccttttattttcattaacctaattagaagtcaagctaattgtaggacttcatagaactggcatcgggaatagcatgcaactgttaaaaaaatcatggtcttgatgactaattatatcaggaaataatatgcaatataaatgaaaagagaagtgtatgttttttactttttcctttctgtttttaaaacatgctataaaatgttaagtataattaggacacaaaggaaaaattaaatctagttaacattaccttgaaaacttcttatttgccctgaaatctccagttctttggaagctaaaagcttgagacttctatatctggttgtcaggattagggtgattttatttgaattttctttattttcttctcaattttctatctatttactttgtaattacatttgaactatggatatgtaattagttttataaatagaaaaatcaaagctttataaaggaaaatatagcatcagcagacctgattgtcctacttaactcttccacaaactgttttaactatgggcaaggtacttcacttctttgccctttgcttctgtaaaatggttgggtgaaacgaatcttggcagtttgttccagctcttctaaagttccattttaaattttaccaggagacaaaaatggttcctattatgttcactcttgaagcatttattaaccctcacaattggccaggcactgtgcttggtgctattaaagatatctcacttagtatctgggctctgccttcaagggtttccggtcccccatggaaaagaagaccaagtgcacagatccatcccagccctacacaatgatactggaaagctgtatgtggaccagaaatgccaaaggaggttccatcaggaagaggggacttgtgctctgactctgctgtacccctgatcatatgttaccacttatttatgctttaaagaacatcctggcctggatgtttcacagtgtgttaaactgcaaggtagatttcctctttgtttccctggtctactgtatatatgccagtaagccttgtcaggtttcattatgagagatggctataatgcatccagattactaggaaaacacttggtctttgaaaagagctgtgtgtccctctaggtttgaaatgcaaagtcctaaggctttgttatattcaggacatatttcaccttcccaaagactagtctcagctcagacaggatgtatcttgcctgtgggcttgacacaggggttgctgggtgattgaattaacctctgacatcttctgggctgtgcaaaatgataagttcaaaaaaaaaatgcagccattagactccttctcattgtttcttccttgaagcctttgtaatctttcttaatgtggttaaattcaagttatttccagttcagacatggtgcaatcagatttcctcatgcgggtgcttttccactgtgacctctttgacgtcagtaactgtttcctgtttatttgaactccctgctcaccctgtagatgactttgtctgagaaaaataataaagcaacggtacttaggagaagttcaacactgctatctgttacggagatttccttctcctttcccccagccgtcaatagcactctgcagcttttcatacagcatgagcttgttattcatgtagaaatactccaaggcagttcttagaacttgggtaagtaagaatagatgtggctcccagcttaacattgccttaaagcaatagctacatttttcataacttttacgtgttatgtctatctttgaattatttccaaaaggtaatctgcatcctcactataattctgagtatggtggctatttcctactgccttggtttctggaatgatacatcttcaaatgcagtctttaaatcatagagacaacagattttttctttaaatggagacaaatctttgcaatctggttctgagattgaatcaactttatagaaaggaagaataactgctataaaaagtctcgcttacagtaatatgtttttagtacataaggagggcatttgttttgcaataataattattataaagcccctaaaatagaaaatatgaattaccagtcagtgttagaaaacttatcagaactgaaacctttgttagtatgttttggttatcaaatctagttttgtaaccccttgcttagcaagcatttcccagaaagaaaagtccttacccggtcaaggccattaccatatagcatcgggaaacatccctgtgtcccaacagctgggctaggactccttccacctccttcgaccctctatacccttgtcccacactgagggttgggggagctgctgcagttgctgtttcggctgctgtttcattcctgtccacttgtgagtgtgtgtgtacctccgccagtcttggaggtctgtgaaggaggcctcgagacccagtgcatgcagctcactgccacgtgtgccacagccacagccaaggggccttcctatgcctcatgcatcaggccctttggagccctgggagcagacggccatggcggctgaagctgcagtggatgcactcatgatgatgaggataataatagttgctaacatttcttgagcatttcacttatggtatgccagacactattcaaagcccttagcttaaatcatttaatcctcacaaacctgtgagttgggttgtcttattatccccattttgcagaagtgagttttgtgagagagaagctaaatacagcacagcaggagttgctcttggacctcaagcatcctggcccagagcccaggtgtcgccactgccctgggcttcctcttagtcataccagggacttgggcactgggcacaaaatctcctctttatataatgtagtggtaccaatagcttctattgattgagattcttttctgggcttggcactgtatgaggcacttggcttctggtttaatctttacatgatcactgtagttatagatgttattatcccagatttataaataaataaggaaacttcttaccccttaaaaatgggtgtgtgtgccatgcatggttgctcacgcct

SEQ ID NO: 60645 - DNA, 1225 bp, Homo sapiens
aggaagggatcaccatgagctgagcagatgcctccaaagatgtttgccccagtgaccttacaggatcttgccctgcctggtccatgctcgctctccagtcactttccttagttagtatcatcttgtcactggtaccatcctggcatagcactttcatccacccggatgttatgtctcttgttcatacaaattgcccatcagctttaactcctatcgaacagcccttaatgagggggccttagggaatgcaccttacttatactgacagccattattcgggggatatttttagccccttgggcctggggaaggaatagttctgaactgatagccagggcagagagtggacccagactgcagcaggtcagtggcatcagagcaagtgacgacaggaattctattatcaccaggcagcagctcctctgcctcccacacctgtaactcacaccaggtgtgggacaaagggatttctgagttgctttcactcccaccggtgttcatcaccccatgttaatgacttgtacttgtggttggctgaatcagggacaaaagagaggagcagggacaaagggcttagccacttggctttagaagtgatgttaaaccggtctcctggccttgagatttcctaccacacaggtcagggcagacttcacctgacagaagccaaaagcctcaggtaaagctgtacagatgtgcaggctcagtttctaggaaaatggactttagaaaaaccaaaatggttctatgcacaggtttaaatacagaaacagtcatctttgccatctctgtctagagtgggatttgggaaacccctctctgccataggagtgactcactacaaccataatccatcttccagtacttccctaaatgcaggatttccaaaaaatgcttcacctagttgcttcacaattgaatttgtgaagcatgatttggtgtttgttgagtcatcagtgatactaattcttaaatagcacagactgagagtagagctgtaggtgagaggttatcttttgcctccttttagagcttcaaatacaggtctttgctttgtaaagggcattcactaaatatgagaagttttactcctttggaattaattttgctggagtgatttgcttttgtagctgatgttgttttattctatgtggcaagttccaacattactggagtctttttcaagccaagcaccatagctgcacctgttttaccccaggcactg

SEQ ID NO: 60646 - DNA, 3196 bp, Homo sapiens
caggcagcctcttttatcatacatgtcccagaacgccctttatcagagctaaaataatcccccagaagatgcctctgacctatccaaacagagctgttgtttgtctgtttggattctttgagggaggggagggagagaggtgtttattttccagcaggttacaaagatgataccatatgcaagtcactgttaaagaaagcttcagaaggtagtaccttaggctcctctgacacaaatttcttctttagctgcctgtgcctgtgcaagaggacatgggccagttacgtttgcacgcattccgtcttgtgttctgaccctgattctcagatgtattcacttgtattttgtggaggaacagaagcccagttcctaggagactcagcaagggaagggcctgcctctctgcctttggttggagggtctggaacctgccatggcccagaaaccaagaagagtaggctgggaaggaggcagtcatcaagtcagttctcccaaggggaaaaaaagaagactattcattcttttgtcctgggcttcttggccgattggaaggccagacagtgctcatgaataatttactcatggtgttgacttttttccggagtcaagccctacagaaaagtaagggaaacaaaggggcatgcatcccattgaccagacatctttcagcatgtttcatcaactgtattaaagggaaactcagctgtcattgacatttcaaccccaaactcctgaagccagccagcacacatttgattggctgtttttgacaaagtgtggaatactgtatctgaaatatgttgggtgaggaatagtttatagaagggcacagtttaaatttcacttcctcctcaccatgttacccctgggcacacagcactttccaacacatgcttttcgactcatgagtctgactgctttgtgccttatgcagctgttggcatgctgggtgcacggtaattagtgtttaccctgaaagctccaaatgcttcccgtggtatttcgccatcccattttgcagatgtggcccacagaggaagcttttgccccacagaggctcactgccaactctgacatgccgccttttactcccatgattacgtggcacatgaacttttcaactttgagctgctgatttctcctcagattgagagaaaaatgtctacttaatttgactcttttaaaaattcagaatttgggaagagtagcaatctcactcgcaagattaagccctgttaagctagtctctgaacatagttgggggatctgtgtgaatataccgatcaccaacatcatctagctcttgtttctcaagaatcatgagggtccacaggtgcctcgctgactccagataactcagctgggcatagccttgcttggcaagtggtctcctctgtgagcaccacttcctggtctaagaattcacaagtgatccgtttccaaatgaatttgtgtgttggggccaggcacagtggcctatgcctgtaatcccagcattttgtgaggccaaggtgggcagatctgttgagtctaggggttcaagaccagcgtaggcaacataaggagaccctgtctctataaaaaatacaaaaattaggtgggcatggtgtagtgcacacctgtgtagtcccagctactcgggaggctgagatgggaggatcacttgagcacgggaggtgtaggttgcagtgagccaaaattgcaccactgtactccaacctgggtgacagagtgagaccctgtctcaaaaaaacaaaaacaaacaaaaaaaaatggtgtcttgggccagtgatggattttacatgcctgagttactgtgcactctctctctctccctgcagttcttcccctctggaaaactgtggcaatctctctctgattcccacctcctaggacctctcttactcctcagtatttcttatcagcagactttgagtccccagatgtctttcatttgagcctggagttttgggctcttactgtcacctcacctctattggaattcagttctgtatttatattcattctactcattctagtgaggaaaatctttttagataaagatgaaagtaaaatttaacagctctcttttccctttgtcatctgctggcattattccttctgctgcaagaagtaggtctcttctctcttgatttgcgtactgcagagactactacaaattgtcatttgttgtttgtatagtccttgtttattcagtacatgccagccatgggaatgctcagtatattagtaactttcacatcagactttggctgtgagccctcacctgggactgatactggctctttgagctttttagtcatgtgcttgtctcttctcttacttagcttgtcatgccttgctgtgccatggtggcctcattcagtgactgctcttcaactctcaccagaaagtgaccaccattcctgacttccaagatccttcttcaaggatatgatggagagctcagagctttccagcttcttagagtagctcagcatttccctcaaatggggtcttcccttttcccgtagtgaaactcatcagccactgttctgcacccttgcatggcctctggagatcttttaacaagtatttgttgagcgtcacccttctgccaaggatatggatgtaatggtatgagcaaaaacaaaaatactcgccagtggagggtatgatccagtgagggagaaagatgtcaatcaaatgattataccaataaaaagtagcaaccatgactagtgctatgaagaggagaaatacaatgcagtgaatgagaacctagaatagggtgattctatccagttagggaaagatggaagatttttataaggaagtgactcttgggctgaggtcacggtaaagagggaaggaaggaacatttgagacagaagaaacagcaaacgcagatagatgcccagtaacaggaaggagtgtggcaaggtcaggggtttttagagcaggccagcctggctggagtctaggaagcgtatcttacttcacttggcattttattatcctacagtgttcagtcagctgatgacttcaagattttattaaacactccttgtaaataatttatttgaaggttaggtaaggccggtcatgttgccaatccctggaggagccatctattcacagtgagttctctgtgtccaggtctgtgcatttatactcaacaatgggtttataaaat

SEQ ID NO: 60647 - DNA, 1320 bp, Homo sapiens
tttctgacaatcgaatgtcttcgaggaactagcttcagtgctgatagggtctgtgttcctctagtaagaatagcactgtttccattagaggggaccaggatgggtagacaggctaagacgtctgattactctttgctctgtgtatttgtatgacagctcgggtgtctggcttaccttcctgaggatgagagccatagcattatccatttaataacagccacagtgacagtgctgataatggctagcatttacctagcactgtgtgccctagaacatttaatagtttcactctatgaactcgtttgttggtcttcatgccatgtgtccaacataaagctagcaggacccatctgtccttgcccatgcttattctgtgccacagccacccctggttgtgattaagatattaatgttaaagagggaattgagttctgatttctcctcattcaaaaccattctgtcatcttcatgcacatgccctgcaggcagccagccagtaaggggtccttcatacctatcctgttcctggctggtggctctcagaatctgccatggctctttgatcctgtttgtcctcctgcccttgagtgactggctatcagaaaaccttcatttccttgttggattctgcctccaggaagcaaagccgacccagtggtttctgtgggtcagctgcacttggctgtctgcactggggaagagacttggcttgttggctgttttatgccctttggactgtcaggtccaagtgtactgttggccgcagcatccagtctgtgctatcagagcaaggcgctatggtcaggagacccttagccaccaaaggtctgttgtctcctggtgtctttgcctgaagacttctggccttcttgtgtttcatcactaagtgcatctataagctgacccgctgccaggtatcatgtctgagcattttggcaaggagagtcggtgagagaagttttcttggcaaccataaaataaaagtactatcaggagctgctaaataaatttgcaccgcttcagccagggaatttcagctctcctgggtgggatagtgataggggatgtggaatgcaaaaaaaaaaaagaaaaagaaaaagaaaaaaaattatgaggctcagctgtcagtttgatggctcatttatttgatggtcctaaggagatgtatgattggtacactgaggatgtttatcaaactcatttcctcttgtatttgtccagagagtcagcgaatggggttttttgggtatttttttctaccgtgagacaaagtgaggggaaatctctgagtccctttgctcaacttaagttggtcctgtg

SEQ ID NO: 60648 - DNA, 4245 bp, Homo sapiens
agacagacccacagactcaccacccccaaatgagcaacagacaaatggcagtatgctgacaatcataaattgactgtgtattttatgataatgggtatcaaagttgtactctattaaagaattattatctttgagattcagatattaaaatgtgtatagatgaaatagctcatatcctggatttgtttcaaaataatctgataaaagatggatcagggagggagggagtcgatgtagcgagggagcatgtttggacgtgcattggcaggtgccgaggctgtgtgatcagtatgggagttgtgtcattctccctacttttgtctgttttgaaatttcccataataaaagttgaaaaatatgttaaaaatagttcatataaatagcctcctagattcattcttgttcaaggagccagctctcaactcgctttcctttatttcttttggaagagtaactgactctagtgatctaagcagtaagactcatgtcaatctgttttattactctcaggatagcttatggtggaaacaaaataaatccaatttctgaatctcctttgtcttcaatcacttgggaattctctctgaaactactgtgggcattttaagtaaccctgattacccagcaagaacaatgtagctttcagacaagcacagaggatagaataactctttctacccttctatgcttgcatgacaaaagctgtagctattaaataccggtgctcaatgagctaatgaatggcaagccggtaactgtggttttggcattttagtatttgagcctctgccctgtatgaacttgtaatcttcattgtgtagccttgttaagttcagctgctgagttacatgttggcataggaagctgaggtactcctaagccaaaaactgacctctgcatatttcaaactaaagtcaggaggcttagggtgacttcttttgctttaaaaaaaataaaggcatgatttccctttagagtggaagctgaccatgactgtaaatggctctataatctttggctttgtttgagtcaccctctccatgttctgctcttccgtttggatgcaagccaacatgaggataagtgttctgcttggtcctcgttgtttaataattgacccttcaaaaccactttctttctccagcttcatcaaagagaagaatttaaattttgatttcaggtttcttcttttccctcttgagtctatctttaaggggtaaaacatgtggctttttataagtttaagtactttggagcaaagtttatggagtgtccttccatcccctaaaaataagataggctctgagttggccagggcagtcccattggggtccatctgaaatgcttctgtttatccctttggtcagcacctcctgccaggaccatgctggagctgctaagaaggaagacaggtgcacagacagagccttctggaatacagtgcggggtatgctatcatagaagtataaactgggcaccctaggagcagagttgatattgctatgactgtctggggacatcaggacagacttcatagagcaggtatgagatacttgggctgagggcagcactggtagcctggaattacattatgctcttaattgaaccctcttgggatcccagtttgagcgatctgtcttattaaatagcacttggtatgagaacagccatggcgtttcctttacagctcatacagttctgagaatgcctaaaattagattgaaatcaggattaaggtgtctaacctgcctttgtggcctcgggcatcctgtgaccaggatgagtcacatccctgtcttgcccacttgcgtcttctgagagctgcgtcccaagacttccccatgcagagctgattgtaatagttgactgacaaaactgatggcccagcactttctctccctgcgcgattcctgctgcccatgacagcagctgagtaataagcagtcagacctcttacctgggacattagtcacaagctcttaagcaactgcgggtcaacgcttgagaccgttttggatttctgttagcacttgtttctgttgcccaagaagatcctttccaagacttcagcaggcatactggcttcgggaaaattcagaaactcagtgaccttgtttggaaatgtgagtgatagtgttctgggctcaggtccacacaggcctggcttgtcaggctaggacacagtgtcgataaagctgggctcatgggctttgtccccccggccgtgctctctcctggggctgcagactagtgtgtctaacctcagccaggcgcctctctactgtgtgcccgcagtcccagaggagccaggcacccaggccttatagtgcctcccaagtcagaaaacacttgtggaagaactgagagtggtggcctccttcactgggcaggaccacgatcatcctcacccctgctcccgtcctgcgctgctacgattgcaaccttttgtaggttaaactggctgtgctcatattgtatttatgtggtggggccaggggaggaagcagcttccacaaatcagcccactgaaaacagtcacttatatgggacatgggattctgcgtggagaagggctgatttggagccaggactgggtttgggttagagacacagaaagcttgcttcgctgaagtgggtgcacaggtactcagcatgcctttgccttatgcccctgacacccggggaggctgctactaagagcagagaagtctgttctatgttccattgatctgtgccatgaaagctttgctgctttaaccacacttattggggattcctggaataccagacttggtttccattcctgggcattttctagtggccattttctgtaagacctgtatggccaggctgtatcaactcacaggacagcgtgtggaaaccagtcatgccagttctgtcatcacctacctcctccaagccagcaacgtgatccaggctggacagagaccaaccttttgccttgggccatgcaggccaacagaccttgattctcacactgaggcaagaaaatagaacctcgagtgccctgacacaacccacagtgaatatggcactccagaaagagcagtcagctgcagccactgaggagacgccacagcgaggggggctccaggcggcccaaggccatggcagcctcccacaatggcagttaaccacaaagctccaggccacctagcatcccccccgtgacctgcagcctccttgtcactgatcagcctatgtgggttgcctctgagcatattgttcctttaaaaaccaaagtgtaaatgtctcacccaaaaggccaagctgttgctctgtccagtctagactgtgcctgtgaggctagcaatgccaccctccctctgtaacagtgccctggggtatgggtggcaacaggacaaccaggtgcttgtgctgggaagcgggtttttttaagagagcactgccttttatttacagacagctttatcagtacatggccatgttcctgccgaccttgaggactctttaccaaacaatcctgctgctgaatattcacttccttccacatgaatttgctcttagggattggaggaggggtggaaatgctttcaaccagtctccataatctaggcttcttgtgcacctggggtacccacaaacaaaccctgttctcactctggttttccttttcctgattaacatccccacaaacctactggatttaagacaaacccagaagtcatcatttctgctgcttctctctatccgtctatctctaagtgattatcaagccttattactgattttgctttcaccgaagccctgcttcctttcccctgactaactccttattttccattccattcatcactgtcctggttcaggtcttaacatctcttccctggacggtttcagcctcccccaactgatcttttcttgtccagccaggaatctgttactcccttaatgagggagcatcaatgagttccttttgcctaatatgtaaaaatcaaaattccttcgtgtgacattcaggacccttcatggtttgaaggacttaactttcctctgtagccctgagatttttcatggccccagcactcctctgtcctgtgctgcccgcccctcagcctcctccaccatacccagggttctctgagtccacctgcacagccatactgctgggcttgctgccgtgtccctgccccatccgcctgtccatggcggccttctcactccccttctctgcctgggagactctgactcatgctatcagac

SEQ ID NO: 60649 - DNA, 3562 bp, Homo sapiens
gactggagtatttgctgattaagtgacttctaggatttctttcaaattaatccaggagttgtggggagaaacagatgaaacaatattgggcatgtgtcagtaaccatcaaggctgagtgatgagtacatgagggtctgtgttactgtcgtctaaaatttccacatggaaaagttgttaaaaccaccatataaatgaatatcttttataaacaagctcagcgtgtgtgtatgaagaaacatttctagcctgtatagaaaaagtgatctccatcttcacaaatgaagggaaatggtttacaatacaaatatacagaaagagctaatgatgtgagccacatacaagctcccctgtggatcctggccacatctcttaaatccagtctcgggttcctggcctgggagtctatgtcaccctcatgattttttgccacagacaaaattaaccagtggttttagcacaactcatttcttcagcatacctgaagagtatctatgccttctcaagaagtgtccttcaacctccagggtagtaatgaagggtaccccaaagaagcatttttaacagaaaagagaccagagaaggagagaatcctcactgttggactttgccccatgctgcctccttgggaccctgggagatcctttcccggcctgctggatctgccctttccccctgagaggcaggaagagctgagatctccaagccagaccttcacagtgcctctctctacagtcttagtgtgggaggggcatctttccatggcttcctgagatggagatttatttaagaaggaaagcttgttgaattccctcttacctttttaaatgaaaggtattattattattctatatctggggaaactggtcagacacctgtttatgttacatgccatagagttacagatgttaaagacctcagggcttcatctggcgtgatgtcagcgagggcctacattcagggttggggagggtgtgtactgtccagcattcctctaaaagtgtgtgactggcaaggcaggctccagcatcttctgaccactaatctaatattactgtccccacaggccctccctgtcatcacctttaccactgccctctccacccgcaacacccccgaggttgtggacttgtgagttctttgtgtatagctgttcaaacatttcctatagacgtgggtagtggacaaaggacttgcttgtgagaacttttcccatggagtgcagaatcagtgggtgcgggggtagcttgagcacacttagtttttagcccaggatttctacttgaaaagaattccccaaatcattaaccagtaatcgcacatctaaaagtaactttatatgcacccaaataggcacactgggaagactatttttcttgcttccccttctgtctttctcatctttgcttcaaatgtttctgctcaatacttaacgtgtgcttgcctcaaaagcagcctgacctgcgactcgcagagaatggagtattcacactggcaggatcctcagaaattaacacaaaaaaggcatatgacgatgacacacacatttgtgtaaagaaaaaataaaaggcattccagctgttatttcttaattttttttaacttggtttgggaatatatactacctgttttctggtgtcaacatgccatcaggtttcttaggctgactaaatcatcccaaaatgctgataatgatgagacaaaagaaagtctatcatttttttagggcttctgaggttccactgagttttgccctcatctaggtccagaagggcttagggaagtcccaggcgagtcagcagagctcaggaagctgaagccttgtctcagaggttagtgctcctttgctgaatcatctccagcaagaaatcacgtgactcagggtctactcaggtgaagtcggcacccttgtctttgagctcacacaggtggctgagctaaataagtgctgaaaggagctgggtgcactctcctgagtcacctttgttgactctggaagcactgtaaacttggcatcagaaggagattataaagtgcttttgttcctaagctttataaagtgtgtgtgtatgcatgtgggtttctctgtcatccagcctctcagatttcatcatccgagcattgtctgcaggaatcctgtttgcctgtacgcacaaaggagggagaaccacagttaattcggggatcctcttttagccctgagtgtgtcccacatctgtcaccaggcagtgaattccaggagcattgactgtcttcctgttcatttccctactcccctcctgggagaggctggaatgttcaaggaagccagcaaaggtggtcagccaggagaaggctggggaagaggagggaaaaatgggacccgagtaacgcagaggatccaaccccagatcattagggctggtttttcaaacactgttaggggaaatccaaagaaagttatcaaaagatccttgagtaagaggagtggttaacatgcaacctggcagactgttgccaggactggaatacctgtctgaggaaaggaaggtgccccacaggcctcttaccaaaacccctagtgaggttaacacccttcagaaaaggaaccgtttgctcacagatcaaggccagtgtctgcagaaaacagaaaaacactgctcttcccagagattttgtatttgggtctttttaagtcatataattttactaaagttcttgatctctacttctttttccctcattaaattgtaagtttcctaaggttggaagtccttacattttgatagcagtgtaaaggattttttaaaatgtatttttaatagagtactcatgctgcatgtctcatttatctccatccctgccaggaagataaagatgtcaaagcttttgtaaaatgaccacggaaacttttcctgtgtggagatttgctaaccggtgtctgtgggtcagaaaagctttttgtttcgagttagaaaaactcttgtcaacaaaagtatttgactttgttgttttttgtttgtttgtccttgccaactatcaaaggtcagtaatttggggcagttgatcattagatttggtttggatgccaaagataatgcgcatccaggataaagaagggtactggccttgatttcatcagaggaggataaaggacattgtatagtccccactagagaatctttgttcagcactcacttctcttcagtagctacatttggggaatcatacctggaaaaaagtagttcgtatagcttgggcatgtagggtagcagcagctttttcttaacacttggaagtcattggagagcattgaaatccgccccatcagtcagagctgcttgagactggtttgtcaggaatagaagcatgttgtctaacaacgggcattggcacaactgcatgaccttgggtttccatctccgagacttgcctctaacctttacctacggttaatcaacattgtcccatgaccagaaagaagatacaaggaagcaataatgattataaaacccaggaaaggcagggtgttgggagccttggaaaggaattgagtatgtgcttatgaagggctgctggattcca

SEQ ID NO: 60650 - DNA, 1015 bp, Homo sapiens
gctcagagaagttaagaaatttgtccacagtcacacagtaactcagtggtgaaagaatgatacaaacacaagcagtgacactgcagagcctgaccagccctccatgtcagagaagctgttagttctttcagccttccctggcttgcaggaggcctcccaggacattcctatacaaacttggcccaaatcctttacatgtccccttagaactagcgtcaggagggagcatgcctgcttgctttcccctgcagccacacctcctctgtagtctgggaaaaaaactgttaagtgtctcattctcggggccaggtgtgcctctgattccttgagtatcctctagttcagttccactgtaatgagggccacagcaggaaggggaacataaaatgagtccctgagttcttgacccttctctttcccctgctctccagtcagtttgagacttacacttggggtagaatccagattttccaccctggtcccctcactcactctgtgcagcttataaagtgcttttcttggccctagaaaacattctgcttcctttagtaaatgtgtgcagaatatttcatgaagtcacattattttcctctttggccgactttccctcttggatcacagtcagggagaaagtcagctgaggtgaggcaacttttcagtgtgaccttaaatgtggatgaaagtgatggccccgaggagcacaattgttaacttactggcatttgggtcccattagggacataagcaaataatgaaagttttctgcaaaaggattatgctgtcaccattcacagcagtaggaacagagagtttagggaaaggcctgtgcccagcctaggatggcaagctatccacctccaactccacaccatctgcaccaacgtgaactgtgaaagatttcaggcctgggactaatgttaaatgttcccttaactcctcatctccacatcactggacgggggtagtggtagaagggccaccccaccaccaccacaacacacaaagcttctacccc

SEQ ID NO: 60651 - DNA, 5076 bp, Homo sapiens
caaagtctccagagcaaggaagagacatggagggggcgccggctgcctgcctgcctctcctaggagggacacacctcacctcttctcacaatgactggctaaaacatggcttccctctaactacagacgggataggggaattatagagcagctgaggagtagctggctagtactgacagtctcttctctgtcataggttcttttttttgcattccaatgcgaacacttacttttgaatgaatagagtagctaggaacttccctttccatttgtgtagcacttaccactcatagtcatcactctcacccacatcatgccactagatcttcatgacgtgcccactattcccactgatgatagtgtgagtactgcagtacatactacaaatggcaagagaggctcagagaagttgagttcattggtttcccaaagggttcaggcttggtaaagagtagatccagctctagggtctaaatctttgatgctgtagtctgggaaagggaaggatcattctgactttgggacttttttggccttcatagctcctccactttgggtcttctattgctctgtgggattgattaactttttgttatggttcactccactctggtaaacaaccacgaaaaataaagcatgcctcctgtttcattcacaaaactcattatcatagccacgcagagccaaaacactgtctttggtaagtctgtgatcactcagcagcttccttcttcacaattgcttctcaagcccactacctgggttccccagtttgggttgagtccattcttttgaggctatttattccatgcctatcaggttattcaatagctaatgtttatatctgagaagagagaagatacacaggatatttacctaaagctcaaatgagtcttcaattcctggttacaattctacttcacatctttcttcagttctgctagacctggcatccccttccaagggatcacaaggctgtcttgcccacacttcctgaagaaggctggcacagagcaggtagcgagccattcaggcaactgggccagagtccactggggctgctgggttccctcagcacagtgggcagcatggaggtcaagacgaggtcacattgggacctttcactccctcaggtccatcttaagacatcgtcaggccttatcatcccactgtccttcccagccagtcctcatcccacacccatttgctcctgctctcccaagctattccacggtgacctaactgaattagacacatggccttgagtgtttgaaaggacaataacttcaagcctttgctttgggatgtgggtcagcctttgactgccaaagttgctttcacttaatggctaacatgttgcatgtttattacatgtgaagccctgttctaaatactttaagtgtatttacttattcaataccccccatgaggtgggtactctcagtttcattgtacagatgggggaaagtgaagtacaagagattaagtcacttgtctaaattcacacaactaaagcagtggggttaggatttggatcaagcagtttaactccagagtccctacttttagctcagttcagtgaggttcttctatgaaagcgaattctatttttccacctttgtggggttggcaggaagcaccaagataaactgccagctgggcaggacagtattagccctcccctgggtagaacaatttatcagcagtgggactgcatgatttgcatatcaaggggctggagctgctaaccccagttcttggaactggggcaggccagggtgatgcaatcaggacttcaacctccctgaataggggaagaggaagtagtctggttctctctgaatcccgtgagccccatctgaacccctggggtaacttctgagccttggtggagtttccagccctttctcccctcgtagaggagccacttcatgttttagtaactcttcatcacccaccccgccagctcatgcagcagcgtcaggaagaaggtgcgcagcctggaacctaccttggcagctgcatgtttacagctatgaagctgagctggtgtaacatgttagcaaagaaaagagcaaaaatagaccaggcacggtggctcacgcctgtaatctcagtactttgggaggccgaggtaggtggataacttgagatcaggagctcaagaccagcctggccaacatggtgaaaccccgtctctactaaaaaattacaaaagttagccgggcgtggtggtgggcgcctgtaatcccagctactcaggaggctgaggcaggagaatagtttcaaccctggaggtggaggctgcaatgagctgagatcacgccactgcactccagcctgggcgacagagggagaccctgtctcaaaacaaaacaaaaaaaagcaaagcaaaaataaaagcatcccatttgtcatttattgatcttaattgaatcctgacctcagatgatctgcccgcctcggcctcccaaagtgctggaattacaggcatgagccaccacaccccggatcttaattgggtacacattgccttgaaaatattccagccacggatttgaccatttcacatgccaacatgataaagctgttcattattcccaggtttggtcatcctggttgcttaatctagcaatgttgacttaaaatgactagacagcccacagtgattgcccccggctcagggtcacactgggccctgtaacttctcattttacatcatccaaggataagactccagtacaactgtagtagatgtttgtgatgaaaatgagccctttgctgagatgttcctctgaattgagttgcaagttggccaaagctggccagagtgcagctgtaaagggagctttgtagtctccttttgttcctttgttgaattgtaaccaaagctaagggagctaccctgggctttatcccgtccccacctcttcacctccactgccctgccaactgttctttccctcctcctgcttcctggctctttactcccctaccgagtacgtcggttctgcactctctctccctgcaccacttgattcttagagccaaactgttatatagccagttttccaaccatcaagatggcataaaattttgatttgcatatttattttataggctcttttagagcccagaaatggcagtcacctttcccatgtgtttctgcgtctttggcatcaccctgtgtcagcagcactgagtgcctaggtgagccaccctaccctatgctgcccgtgcagtctagggggcaagatgtcacatgggtaagagccctggctggtaagagtagtgggcagccctgggggctgaatccacacttactgaatgttcttgagaaaagctagttctttctccaatttcaactttctcatttgtgaaatgggagtgagcatagcgcctgcctgccttctgttaatactgcagggattaactgtgatacattgtcaagcgtttgccacagggctgggacacagaaatgctcaatcgatgttggctattattatcgtcagctctcccacagagggctaagggaaggttgcttgtgatgtccatctgaaaatggacagagagggacactcgtgctctccatgatgcccatccctttggatgccgatgccatgccactccaatttggagggatttcacttttctaactggctgcagaacctcctcaggagaccttattcttttcctaggatgttttgagtccatcctgccccaactgacatacaggttcagccttaagtttgatattctgctgctctcctttgaggccaagaaatatccacaattttcccaaatggcttttcttaccagtctcaggaattattttgtccttccagatctaacacaaaggtacattttattcacttctgactgaataacacagggaccacacccagcatcagtacctgccgggcacccccagttactcaccatgcctgtgcgccagttcagagaagaaaggacatgtgtcaagatgttcagtagggtctggcatgcctaagaatttgaagccaatagtagaaccaagaaccaaaggcattttcttcctaatttaaggtatctgtgaagaagtttctagtaaaacaagagtctccatagtcctgtgtattcttaatggaaaaggcctcagcactcctatccccttgcaacagcccttccagatcacccaggtctgcctttcttatgccacgaaggcagttcttaccccacagaggcatcattcttccaaggccttaggccacagttagaagaatttaggctagacaaagtgaagattgtgtaggcaccgagtgtggtcagacatgcaagtggattgcagagggtgagacaggaatcttctttggatacatttcaaattagaaaccaggatagtctagtagtcatttgacctgaaagagccagaaataacttagatgacctctcgagttcttgtagccttgtactcatggctaaaagtgaacagagggatatggtcagttggtctcccctgatagacgccaacccacactactcccaccatatagaaaacctctgtcactcgaattttctccctgtccatctctgtacaacctgcatgccctagcacacctatgtgccttctctgcatgctctctcaatcccaggattcccttcaggctcacatagatcacttgtccctcaagtcacatacttgacaatatcttatacctgattgcctttcatagttctcatgctcattcatacgtggaaaacaggaaaactttacaaagttaaaatcagcacaagaagttcacaagaaatataagcccccttctgacaatagagcatttgtggatgaaagagaaagcaggattcctcaactctgttctttttttttttctcaaggagaatgatttttgagatgaaacaagtacaatactcactgataaaaatgaatcgtagcccaaagtaaataaagggattatacgaagcattcaatgagaataggcagaattgcagaacaattattgaagcagtaatttatgagcactggaagtggtgttgatcattagggctgtgcaggggtttataaagaacaggtcttctaag

SEQ ID NO: 60652 - DNA, 5832 bp, Homo sapiens
cagggagaaaaacaaaacacccctgaattgcagcttttttgcttttagctgtggaaaacattcccagaagcttcgcagcctcgcatcctcgtaccccattggccagtttagcgtcacatgaccatccctaacaccaatcacttggcaagggaaaaatgacagccaagccacagctcctgagggagccctggagcccctgttggcgttagtgggatttttaacgccccctagatggttccaatgcgcagtcagaataccgaaccaatggctgagagtctaagtctcggacaaaaccttagcccccgggggctggagagaggttcattctctcctgaaggacaaggatagagaaccaagtcagggttccgggagtgtgggatcggggaggaggaaggatcgctgtttatcaggtaatcaaaagtgcagactcactctccattcccagctactggacaatcgtggggcaaagagctcagtgggaaaaatcaaaggcattaaaaatggttattcttagagataaggtgtataactattggaaaacagaaataaagtcttgaattaagctttgagaaatggttctataatagtaggtgggagggagagagttaaaaaagcatttgcaacttatctgagagggtaagacatggccagtgatacttaactgaagaggactgtttgccctgtcagttctgaagctcctgttacagcactgagttaagccctgtgaacacaacatgtgtttatttattgtagacaaaccctgccacaaagccacaggcacagcacacttctctgttaggtctgtatctcttagaatattaggaccctaactgggattctagcaacttacttcctgaggctcagagctgcctcctggattcagagagcctgtcaacagcgtctgctgagtatataacgtggactgtgagaaatatggacttggaatcaggagacatggatttgaaacttgacgcattcatcctgggccggctgttaaacgctcccaatccttgttctcttcctctattaaatgacaatactaataacgatacccacctcataagattgtgatgaagataaaaaaggataagttggctgggtgcattggctcacactcctaatctcagcactttgggaggcccagggagaaaatcacgttaggccaagaatttgacatcagtctagtcaacagagcgaaacctcatctcttcagaaaacagaaaaattggtcagttatggtagtgtgtgcctgtagtactagctgctcaggaggctgaggtgggagaatcacttaagcccaggattttgaggctgcagtgagctatgatagcaccacagcactccagcctgggtgacagggcaaggctgtttctttaaaaaaaaaaaaagagagagagacagagaataacttgtgaactcttaattcttaatacaaattacatttggttgagagatcagtatatccgtatttccccatctaaagttcccatagccatcagtcaagggagggaggagaagaagcactttccagttcatcctggagggggtggagttcagacactgcttctaagagcagtcccccatctcttcactcaccctgctttattccccagccaccctcaccctcatttgattccatttgcccggaagggatgaggaaagtggaaccaaggatttttattgtttgtgtttcccaccactgtctgtctcagaggcagaacctgagaagtctggaatttctccctggtcctctctgcacagcccccagtgccacccgtaaagatgtccattccaagtgaaagccactgcacttcaaaagcagcagaggtgggttctccttcatgttccctgtatgtgagggagagaaccaaacaccagggtcaaacagaggcacttccaaacctgtgccttatttctggggaaaaaaaaaaaaaaagtgagactgattcagtctgggacatggtagctttctgtctcagaaagctgggcaggaccagagaaagtggctttgtgaaacgcagggacaaagctagctcagggctctgctctttctcagcagaccattaggggaatcagggcaggccttcccctcccagctgacttggagccacacagtggcttccatgtgactccatggccagtgcgacaaatgcatggccttggctgaggaagcacaggggctgtggggatgactggatcccaggtcccaggagagatagcgagacatgttggaaacactgtgtctggaatcttgtgcttgactgctcaggaatgcgtggtctgggtaactttctggtttgacttacaggaaggtctgatgggggcagagcgggaatgttgtaacagccctagatcaccttggaaaaatactgtttgcctgccagcccggaactgccattccaggaagcagctgctggtgaatcagcagcctcctctttccttgtggctccaggaagcacatgaagggcctcccccacctcctctccagggagggaaatgcccactagccatatacaggctcttctggaagggacagaggtggggactccatggcagactctccattccgccccaccccccaccccgcaacacacaaagggagttggaaaagggatgagagacccctaagcctcagactcaggcttttgatgtagaaaatcatacatggtttctaagtctcttgtctggagttcacaacaataaagctaggtagaaatctctacacactgcttggcatgggttacatttgcctcaacataatgtctgtctcttacctgcagatccagcctggggctgagaaactcacaggaggttgtcggttggctctggtcaagcggctgtttgggcatgagtgccatttgtactcaaggtcaaggggcagccttagtaggtcagctggaagagtcttgggaaaaggtagggggaccgtaatgccagctgtccattccctccacgggccctgtggtgcctccacctgggtggagagtccctgctttctgcctttccattggccaatctctggcctcctcctgaggttgctgctgtccctggaacagctttgggctagtggacacagcagttatgcctcaatttccctatagctacatggagccaattaaacagtggacggatttggagaggtggatcatttcagattcgctcctggattttcacccccacttaagagagagctaagtctccttctttcttctctctctcttttgctctttttctccttgtgtgtgtctgactcacctctgtgcggttacatttaaacaccagtttagatctcaatgacccacattcagccttagtgactatgaaagcaaggccatgctcactgatgactcaggagaactggggccttgaaagatgagctgagtcaatgaatgtgagctgtggagtttttaccactccccctctcccaatccttttgtaatgtacccactcccttagctttctgagtgtcagtgtccttggccttccagggcttgtgtgagtacatggaggaatcaagggagaggtgggtgagatggccacaaccaccctccgcgactcttcatccttgagcctttaggacaggtgcccccaggctccatgggaggcaggcagctgtgccggctgcagcgatgtgaacggggaagccgagaggagggtgttgggacaggagccagctctaagtaacctcctacaggtgatggttttggcttcacctgttggccagagccctccagcagagagggggaatttatatgctactgtgaaacttctagatacacccgaagtcagggtagatgaaggtagagggaagagaaggacctcccaaggaccagcccctggagttcatttcctgcccttagaaacaatgtcaccctcatttctctcctttctctacctgcctttgctcggtttccattcactgcctctgttacttttggttgtttatggttaagtccagtggttcttatcagccatacttggaaacttgttagaagtacaaattctcagaccccatcccaggcctactgaatcagcaacctggggtggggccagcagatctgtgttttaactagcccaccagctgattctaacatctgctcaagtctgagaacccctggtctcacctctctctccagttaggctacagcctcctagaaagtactgacttgagagggcttagtgtagtcctgggcacccaaggactcagctctgcacagaaactgtaccgggaaagtagaaagaagattcaaggaggcagtctggtcatgatcagagtttgaacccaaaggttaggccctgggttccagttgggtgaccttggccaagtcacttacttttcagactctctggttcctcctcagtaaagtagatggaagaactgggtctctggggtttgggtagttctcatgtctagaaatctggatctggccagggcctggctcatgattcccctcctgcatgtgctgactctgcccagccccagtggaagagtcagcatgcaggggaggaataacgaggcaggccctgtgcttctcctggtcctcaggcagttattgtttgtgaatgtgtgatatggagaggtagagagagatctgaatctagaaatgaattagaaacatattaggagaagccagagccttcaacagaaatgaagcccgtcctttgagtgcctgtccctggcaagttgaaggtggagtccctctgtcaggagctcagttgaactgggagagggagcgctgagctgccaggtgtcacaatagtcaattaaggcaacaagcccaaaacaaaagagtcaagctttcagtcatgtcctgcaatggtataagcaagtatctgaaaccagagaaagcgtggactctccctgttccatttcccccatggaacacacaggggcccagggtcaagtagatcagcaggaatgtcgggttggggtggtctcactgctgacagagccctgaacaaaaggctctggaagttttatggactctggggccgagagcaagggagggggaaggctaggagtggaagtactagattctgagtcattgtggggaaaagcggcttcaagatttctctcccttccctgccccacccaaagaaggcctcagcagaggcgcctaaagaacacctctccccaaggcttctgataaacccaggaatgaaggctcaggggctaggaatgcaaatatgtgatgactacgaccagccagagagacctgagaccttgagagctccctccagagactgccacgcatgggctgtgccccaagtctggggtaggggtcagctttccccaagtttgtggtcaggcctgaaaaatcacacacaagtttttcaccaggaggcccagggagatactatgtggcctcttctcccacctacctcttctgagccacgctttccagctgtcaggcaagtatcagggcacctacctctgcacagaagggcagtgactttctccaggtggaaatcgcttttcatccaaatgtctaggctcaaatctcttggttcctgcattttaagttatgggtatctctgggaaataattgagaggactaagtacaaacacccatcaagccttcacattattggcatgtataagattctgttaggtcaagtggcatcctccttaccctttttctgaggatgaccatgtgttaattgctacagaccagaactgtcttcctgaaagttgtccagggctgtgggaaaaaagttgaatatttcagtgcaagttctattgacactaaagctaacactgaatcactcacttatcccagcctatgctatttttttttttttttttttgacagggtcttaccctgtcaccca

SEQ ID NO: 60653 - DNA, 1749 bp, Homo sapiens
gaacaaaaacatcattactcaggtctcatccaactcttccattgtatattctaataaaccacccaagttctgctttcagagctctgagccaaagtgagttatacctccccaggcccactgaaaatcccagagagcttactgaatggcgtgggggccctggtaaaactcaccgttcaggcatttgaatctgggccactctattactatcagcattttgcctccactcccaaggaagaaatccttaaaattataacctttgggtccccatgcccaggcaggctgacttctcttggatcacaataatcatggttttgactatgaattgccgatcccaagttaaatgattaacccaaggtcaatgagctagtcagctgccaaaccaaggacagattttcagttccctgaactcaaggcagatgcacttctcaggaatgctgtcagaggcttagaaaaagaaagtgttccatgttcccaaaatatgtaaacttattctttgatattcatgtttattctatgactcagaagttcccacgatcattttctggggtgatcagaaactctctttgagggggaaatgattccttacttgaaaagcgtttttagccaagttgcttctttcgtagcggtgagcatcctttgaggatgatgctggctttcttgtgggctgctccaccttgctatttcctgaagctactggagcagttgaaacaggcatatgaataacccctgggttgccaaaaagacacctcaatccttaacaggttttgatctgaaaaggagaggtttgttcacttgatttgctttacgaattttgcaacattggcaggttgtgcctgggcctttcccagccctctctgcagaaatgagaaccaggattactcatccttctgtattttaaaggaattccaggagtgctcagacaagctgctgaaaaaaaactggtgttatttgacagcttctgagcatggatgtttcaggccccgctaatgccatgaaaatagaaatggcccttgtgccagaggtagcattctacttccatcaggtgaggtggcaaggcacacagggtttttggggtggctccccagaagagaggcagctggaaaaatcggacctacatgcccagctttgtccttgcaggcagagctcctccttcaacccacttctcattctatgagctgatctgtcctgacagctgccaaattagtcctctcattcctggagctcgctttggcactctcacgaatgtttctttcaaagtccactcttcatttaaaacgttgctcagccttacgtcaggggtgaaataaacggccttaaaatttttcataaaaaagcgcagtttcaaccagcaaataggttccagagattgtgtaaattatggtgctagaacttacccaccaaattcaaatctgtatttggatataaatgttctataaacagttctgaagaacacacacgtcagaagcaattccgtgatacctgttaccatctttctgtaatttttcaaatttttttatcttaaaatgacaaataatcattgtatatatttatagcatacaatgtgatgtttggatccatgtatatattatgaaatgatcatatcaggctcttaacatatccatcacctcacatacttatcagttccttgtggtgaaaacattcaaatccattcttttagcaattttgaagtatacattattattaattatagtcaccttgctgtgcaatttcctttctggcccatgcacc

SEQ ID NO: 60654 - DNA, 4602 bp, Homo sapiens
aaaacatatttttcttttagaagactgacaggcttgaagtttatgcctccaaagacaaaagtgattatgttttgtttagtagcttgcaaagttgccaaaggccattttttctactctttccctgaaattggtttatatgcttattaaagtcatttatacctatttgcaaatgcttaacatagtttcagattttaagatttccctgcaactttatttcccttgaagtttacagcaacaggagttcatttttatttttaattgcatttattcagtaagtaaactccgccacagaaaaacttagtagacaaggtgagttcccctgtgctccgtggcaaagagtgcggtgggtgacattgacccatggttaggtaatctggtaaggaaagaccccgttgtaacacatctgagcaacgagaccaaaggaagggcttgctgccacgaggcgaagtctgcttttttgaacagagagcccagcagagttgggcggcaatcgtgcccagcactgaggccgaggagaaagagagcaggagcattacattactgcaccaagagtaggaaaatatgatgcatgtttgggaccaggcaaccgaaatcccttctcagcagcgcctcccaaagccgggcaccgccttccttcggagaaggcgcagagtccccagactcgggctgagccgcacccccatctcctttctctttcctccgccgctaaacacagacgagcacgtgagcgtcgcagcccgtcccagctgtgcctcagctgaccgcctcctgattggctgagagcggcgtgggctggggtggggacttgccgcctgcgtcgctcgccattggatctcgaggaacccgcctccacctcaggtgaggcgggcttgcgggagcgcgcgccggcctgggcaggcgagcgggcgcgctcccgccccctctcccctccccgcgcgcccgagcgcgcctccgcccttgcccgccccctgacgctgcctcagctcctcagtgcacagtgctgcctcgtctgaggggacaggaggatcaccctcttcgtcgcttcggccagtgtgtcgggctgggccctgacaagccacctgaggagaggctcggagccgggcccggaccccggcgattgccgcccgcttctctctagtctcacgaggggtttcccgcctcgcacccccacctctggacttgcctttccttctcttctccgcgtgtggagggagccagcgcttaggccggagcgagcctgggggccgcccgccgtgaagacatcgcggggaccgattcaccatggagggcgccggcggcgcgaacgacaagaaaaagtaagcccattccctcggcccgccgccttctcccccggcgaccccgcccgcctgcccgccctgggctcctgggccggcctcggcgttaatgggattggggggggcagcctttttgtttctgctgctgctcccctcccctctcttcccccaacctcgccggccgggctcccccgctgtccacgtcgccatcttgtcgtggggggtgggagacgcctcgaaagtgctttcaggggccggggtctgagccctgcttgccctccccgccggccgtgggggcctcgcgccgcccacctacccgcctcaaaaacccagcctgctctgtggccccatccggaggggactttacccagcctgaaaaccccgggaagagaaatgagctgcagctcggtagccgcggtttgcacccggagcttccgctccttcccgcccccatcctctccagttccattgaaaactcggccctggggcggaccctgcacgctggtcctggctttccagtggacttggggccttgagttcccgactgagggactcgcgtggtcggatgcgatcttgtcctgtagttgtccagccgtcgcgggtgtctttgcctttgtgcattagggatttgccgcgatggccttaagatgcgaactttttagtttgcacgtgcaggttttgtttcgttttaatcgccttgaaaaacttgcctagactgagagtcagagtaatgggaatttagggaaatggcaacattttaaagagaacttcagaattggatacttgagttcatatcacctgtcacgagaacgcagatattataaatgaatatatgcctcattcattcttcaaataatgaaaatgtaggggctggttaaatttaggcagttttaatgatactgaaaaaagtatatgatgagtgaatgaaatgcggcactaaaatgttgcaaaaattttcgaactctgtctcattttcctgaaattgaagtatattaaaggaaaaccgtcaacatatatctaaagtaagtaatcactcggttagaacttaatgcaagttttataaatcaccttgaagtttgagtctaaggggtacattagagattaagaattgtgagttggaccagtggtgttaagagcggactcccccatcccccaacacacacacaattttgcccactttggcattttaacttttaaggaaatcacttaaggaattgaagatttagagtaagagttttggttagtagactggctttgctgttaaatccttccactcttctggcagagagattaatttccctaatcagtatcagcagaagataaacttgtttatattcctgctgttttgtagatcccttctcctggtccttcttcaatagaatattaaattcttagtttgtatacagcagagaaggtcacttataaaattcaaaaagtgagcaaacaggtctagattaattccaagagttaccaggaattaattgcagtttattttgcggaggtgattacagtgcttttgatgaaatgataaagctgctatattgtaaacctaaggcagattacctctgtgtagtgccagttttctatccttattatatattgaatcatacttaatacaatgcattaaattatgtaccactttttttatatacagtatcgaactcattgttttgccattcatccgttcagaatatcagaagcagttttgaaacgaattaataaattagctactgttcatcagccccaattctaaataagctcttagattttcctcagcccatctgttactttcaaaattttctcatttgaaaacttggcaaccttggattggatggattcatatttcttagtatagaagttcttgatataactgaaaaattaagttaaacacttaataagtggtggttactcagcacttttagatgctgtttataatagatgaccttttctaactaatttacagttttttgaaagataactgagaggttgagggacggagattttcttcaagcaattttttttttcattttaaatgagctcccaatgtcggagtttggaaaacaaatttgtctttttaaaagaaggtctaggaaactcaaaacctgaagaattggaagaaatcagaatagaaaatgggtatggttatgatactgtagatttaacgcaggacatttcatgttgttcctagttataggggctgaacttatttaatagcacgtgcattttgatttttagatttttaagggaatgtcaagagagtaatgattctgtttcaggcttcaggccagactccttcagagttttccaaaacaaataattactgaatcattaaagtaaaatttctgagaatagatattccttaatttccttcattaactttggccattaaaagtcaagaagctctctcatttattagcaaacttttctccttatgattctattttgattgtccttttgtttgaggaagcagcatatggtggttaagagcataggatctagaggcagatacctctgagttaagggtcccagcccttcacttgtgagcttgagcaagttactgaatgcctctgagcctctttcctccttttgaaatgatgataagaatagcagccatctgagcagttattgtaaaggttaaatgagataatgcttgtgaagcacttagcccattgcaggagtcttgatgacactgtgtacttgaaaatagatgttacctgttaaaattcttgtttaaacttccacaactcttaaaactcttttttgctagtccttccagctgtttcctttagtttcttttctgtgtcttcatgcatcttttctatctcctgaaagtgaaaagactaacattggatccagagcttgaaaagcgtttttttcctgttacaatgggcaaaagagtacatccttgggttatattggcacctagtatcagttatttttcttgagcatctgatctgctctctactctagtggaggcctcctgcttcacaattgctcacccctgtgttttctccccaaatagaatactgagtttactctggactctagagtcaaacatacacagtattctagtcttactgttcatttaagcaagatatgtgcaagacactgcattcttagtactggcagtaagttaaaacatttttcgtcttgatgccaaagtttagacaattttataaaaattaacctttgtaaaagataatgagttgataaaatattctcagtaaagcagctacgtggtagaaaaactgtcctttgcttatgagtttctccagagttaagaccattgggttccatctgaaggcaa

SEQ ID NO: 60655 - DNA, 3435 bp, Homo sapiens
aaccattttctagctcttccagggagatccattcaatcaatgagtagtgttgagtgagtacaagatattattctaagacctctaggtgatataaatattctagaatatggtgcctgctatcaagggtgcagttaattcccattctgtgaggtattcacaaattcaactgtacttgtgcaaacacagttgaaatctaaatagagtttttattggccctttgagatgttccaagccaccgttacctttccttttcatggactgtctccagcttgataatcaccgtctccagcccagggtgctccccgcaggcgccccaaatttggcatgtcaaaaattaactccttatttgtcttccaaatggcttctcctcttgcatctcctgctcaaggaatggcaccattcagtctgaaaccagaaccctagaggtcacttgtcactactcccttatctaccatatatagtctgacacagtcctttgcttttcttaaattataattatggaaacttgaacatgtacaaaagtaaagagactataatgatgccaaagtgtctttgcaatttgtgttctctgggaagtagactctgagatggagatttcaggtgatttattggggagtgcttttcaacacatgtggaagagaaagaacagaagtaggcagagggagaaacagctgaggagcagtcccaacaaagcctttagcagccacatggggagctctggaactgcaatagcccttgagacttgtcccaagttacagggagtatggaggcctttacacccctacactgatcagtcccttgatgtgggctgcccccaggagacatgacctttagtaaggcaggtttcttcacctgagacaatccccagaaagggctgacagctgaagaccatcttctgctgcacttccagcagcttggagagtaagtggttcattcctgagacatctgtgtgtcatcacaatatcacccacagtgcaagctttaacaggggtcaactcatggatgatctttttttcagctgtacctctacatacacgcacacacacacaagtgtacccattattttggtttttgggtttttgtgggtttttttgaaattgagtctcactgtgtcgcccaggatggagtactgtggcacgatctcggctcactgcaccctctgtctcctgtgttcaagcgattctcctgcctcaaatttttgtatttttagtagagatggggtttcactatgttggccaggctggtctcaaactcctgacctctgctgagccacctgccttggcctcccaaagtgctgggattataggcgagagtgagccactgtgcccggccaatagctactaaattttaaaattacttttttcctgttaacaaaagtaatcatattccttgtaaaatgttataaagatacagaaatgaattatgtaagaagtaaagtcctttggcactccacctccaaggacaactactgttttacattcattatactgttcccattgagaacatttgaaatatagaaataacataatcatagtgagagagaaagggcaggtctttaattttcctttaccaccttggaatgtaaataaatggttccaagtgagagaagtctctagatctcttccgaattttcttctttaagattgatatctagttatcctttactcaaacggttcaggagcactgagaaatccagggagaaaaatcttccaactcaaggcattccaggccttgagacctcttgcctatttgtccaaattctgctaacttctttcccttgcgtcctgtgtcccagtgatgtaaccttctaacacgctctctgacctctttgtcctttgtagttgctttctctctgtgtctgcaacacccttcttatttcatcttcatctccttaatttcctgcatttttcacaactcatttctactttagaaagcctatcctctcagggactggattaggagattctcctcagtgttcccattttgtgtggtgtttaactcttgcacggtattaatcacactaaaattgtacttatgtacttgaagtgaattgttctgtactaaatgatgagcaacctgaagataggagttatgcctttaaatgcatacctagcagaatggcagcttaaagagctctgtggcctcactccccatgaaacaactgtaactggtgaagcactttaaaaacaaccatttaaagtttattgaaactgcccaaaggttatacagcaaatgaagaactgtttattcaagaaaatctactacatcttggtaagaacagcaatagttagtcagaggtactctcaagtaccatgcctcacatgccactcctcacatgccactcatgcctcacatgccactcatgcctcacatgccactcatgcctcacatgccactcatgcctcacatgccactcatgcctcacatgccactcatgcctcacatgccactcatgcctcacatgccactcatgcctcacatgccactcatgcctcacatgccactcatgcctcacatgacttgctgcttctaccaccttgcccaccttgaggaaagttccacacaggtgggtatggccaagaagatggggctccttcttctcccaaatcccagtagaggactatgagcattttggtcacaaccatttaaccagtctttaggaaattccaaactttccctcatcttcctgtcttctgagcccttcaaactcttccagcctctgctcattactcctgtgctcattactctatgaaaggaaaataaatctcagaaccacaaaatcactaaaccaagggaaaagtcaagctgagaacaatgtcttatttaggaataaaacttctaaatgaagttgtcctgcctaatcggaccaaaccaatgtatatcttacacatattgattgatgtttcatgtctccttaaaatgtacaaaagcaacccaatcaccttcagcacatgtcttcaggacctcctgaggctgtgtcaccagtgtgtccttaaccttggcaaaataaactttctaaattgattgagatttgttctagataccttttggtttacagtttgaaagccacttccacatctttgtagcaatgcctcaatcctggtaccaattttctgtgttagtccactcgtgtgttgctataaagaaggacctgaggcttggtaatttataaagaaaagaggtttaattggctcatggttctgcagcctgtataggaagcatggcaccagcatctgcttggcttctagtgaggcctcaggagcttccaattatggcagaaggtgaagggggagccagcacatctcatggtgagagagggagcaagagagagaaagaggacgtcccagactcttttaaacaaccagatcttgtgtgaactaactgaacaagaactcacttagcaccaaaaggatggtgctaaaccattcgtgaggg

SEQ ID NO: 60656 - DNA, 2021 bp, Homo sapiens
ctttaaaacttaaacacacatctaccaaaggtcccagtaattttactcctacatatccgcccatggcaaatgaaaacatatacctacacaggcattatttataaagcaaaaaaaaaaaattagaaataatctaaatgtctatcaattggtaactagacaaagtggggtataactgtgtattgaaatactcagcaataaaaatgaactgctgacacattcaacaacatggatttacttccaaagcatggtttaagagaaagaagtttggcaccaaagcctgtgtattgtatgattctatttaagtgaaaggtctgttaatggcaaatctaaggaaagagaaagcacaagaggactgcctgaggcttgggagggtagcgaggactgacaatgggcatgagggaccagcttggggtaacagaaacattctagaactggatcatggtgatggttgcacacctatatgaatttactaaacccatagtattatagatttatagtgaataaatgtatgctagttaaactataataaagttattaattaagaagcaataaagtttcacaatgaaacttctccaatagatctcactggtgccaatgtacaaataccagacataattcatttgtaaacaaagtgtggctcactgtcaggactaagggaagcaagattcctagagtctagaaatatcacctaattctcaaagaaataagagtggtggctatcaagttaagatgattacttgcctcataagcttatttcatttacatgaatgaggtgtatgtgtgtgtaattatgtagaagccatcacattcagtcagatctgcaataatagtggtaatggaaacataaacctaagcaggattctcaatgagtttttgcactgacgtgcacaggcaagcccatatctctgcctctaagcacatactctctttccaaaggttgtgtaatgagtgagtcagagctgtgtacacataagaaaggaaagagggcaaggcagggcaggaattcagctcaatgaagccgcggagcctccatttaaaaatgatactaatgagcccacagaagacatttttaccaacatttgttagatcccctacaatttaagctataataaactggatagtatcaaaactaggctcatttataacttgacagacagttaaaagagttatttgattgttgagcagattcttcttccaaaataaaaactaatccattttttaaattacaaatttcacatgaaagaagctagtatctgtgtatgaatacttaaatatcaaatgaaaaagacacaaatgttctgtaaagtctattctgaactgaaagttatagcattggactgggaatttttgctttgtcatggcagaatatggttctgctctattcagacaggcacaaagggactgtgggatgtagagattatatacagactgaaaggatgagcatggatctgccgtgccctaacccccagcctctactgtggtgctttgcactatttctaggaatgttctcatgagttactttctgaataagccaacttctgactgtggctgaattgtgggtcaaatcattcacataatggtttgtgtaatttgaaaagagcaagcagcatgccgtgtggtctaaatcagggaatctcaacctcagcactttgggcatttgggatgggataataccttcattatgagagttattctattcattgtaggatgtttagcagcatcacttgtccctatcaactagatgccagaagcactgtcgccctaattagacaacccaaaacactcccacaaattgccaactatcccctaagagcaacactggccccagttgagaactactgatctacacgatcatttcaaactctttggagtagtgaaaagattgtatagaaactttgaaaaagtatcatttccttcactgttgaactgtccagataactgtaaagctattgataccttgaaaatgcaaagtatcttgaaaagtgaagacatttgcaaaaagcaaagtgtcattatttcac

SEQ ID NO: 60657 - DNA, 1050 bp, Homo sapiens
caagctttgtatagcccattatatttttcaaagcattttcactgctattatctcatttaatctggtcccaacctattataggctatacaaggaacaacgctagcagaggaaaggaagagaagagaggctcctggtaactgcactagcacagaaatttcttatttgctgctgatgtcctgaaaggcaaaacccctccctgccctccttccactcagcctcttcctttcagggcattcaatggcaattgttggaaatcttgctttcatccttccttttctcctcgggcaggcagggggccacagagccatcagcttaaggttgcctgcagagtgttccttctcctctccctgcttatagcagaatggaaaactacagggaaggaaaaacagtgtgtgaatgcagcagtgaaagcgccagacctctgaaaatctgcaacctgctctccttacctgagttgtaaaaatttaggggaagggtgttaagaatggagaatatggaaatttaaagaaagcgtgagagggctgaaattctcccgtctctaaaagcaggtattattcttcctgacactcctgccagtgagtggattccatagttcaaaggtcattaacatgaagaatttcaacagaatcttgctgtttgtctttgaacaggatattcacagttgtggaagaaaactctaagatccactatgcagctgaatttggtcagtgtggagtgcctagagcagtattatacattggaggaacgtttgttgataggtcgaaggactacaggtgacaagttgctagcacttgtccatcagccactggtggtattgaacgctgttatttataaactgtgaacacagatacatattttttcttttcatgggaatagtcctagagaattttaagaaccaaggaagatgtcatccccaaacacacacacctacacccacacccacgcccacacacgcacacttcaagacttaagctaagcttgggtgccagaggacagtagaatcagatgagatggaaagctgtgtttgatgcacccatatgcacccacagg

SEQ ID NO: 60658 - DNA, 905 bp, Homo sapiens
tctctccaccttactgcccacaaattctgaccatgaaccctccgcttccattcggctcctatttcaagatcaaactttgctcaaaataggaggcaactttttacctgctgaaatggtgacagcaatgttaaaataattatctctagagtctgttatcctcacacaaaaccatcacagggaaatgatatttcacacagagatgactgtattgtactcgctccaaaattggaaatgtagcagtgagtccaaaagtgaacattgttgatattaaatcttagaatccaaaaatagacgtgtaaacattgcaatagtcatagtgcttactgtgtataaatcagtgcaggccctcgtaccgcctgggttggcctcaagcactcccgccccacacaggctaaccatgtgataccaaggctttgctgcatttcaccatctggggactgtgggtcctaagtcctagaaggttactaaaactgaattgagtgttttctgtaaaagccacagtgcacaagttgataaaacaataccaacataaggcttttttgagaacacaaattctaaacatctgctatgaggacttcatggttccaaatcagctaatgctcaaacaaaaattaagcctcttgaattgcgaatttttaaaaaagcatacacaaaacatttgaggctcctgatgtgtgtttctgactactaggtatgtgttattaattgaaatcacaaaaaataaacaagaaacacagccaaaactaactgtcactgtctcttatactctgtgtctatgtgcacgtctctgtgtgtgtctgtgacctttcattagcaaaacaaagccctgagctagttggtgagtaattaaaacacacctgacctacatataaccataaccatataaccatatttagcacatataa

SEQ ID NO: 60659 - DNA, 755 bp, Homo sapiens
cactcctgaccctcctcaccatgaccccaccagctgtccctctccactacttggccaaccctcacctctctctactcatcacagaaatggcatttctactctatagtctagtgtctttgcaccatttttcagaggcaacttgctcctgagaagtcactgaatagcatatttcttcttgttttcctacagatcaagtttggctttaaatactggtcagcagccaactgcctcctggaaatgacctgctcattgtctgcttgccagattcttgcctcaggcactcctgtctctgtgaattccacattgaggacactcattttctcagctttttcctgctcatcatgcaccactgtggtgtaaccagcttcctccaaacaatcagccaataaatccctctctttcatttctgtgtctcctcagtagagagacagccaaatcatacaaactaacaccaagagctgggattatccaagacccacttgcacatgccacaagcaagatttcacactttgtcatccatgtgcttaatagatttcccagaagcattgcttatacctttaaaccacattttcagcttcaaggttaaattaaaaggtgggagaaaagagaaaccaaaacttgaatgcagtactgtaacttatcctgcaaaattctgctgccagccactggggggaggggtagagacagggggagtatactcattacagtgagatattattggatatatcagtgctagacaagtcacagctgtcaaa

SEQ ID NO: 60660 - DNA, 614 bp, Homo sapiens
tagtatcttttacaaaatgagcctaaaaacagtagctttgtcacagtgatagcacgagcgtttaagacacagaatgtttactgaatattttccatattctaggcattgtgtgaaacacaatgccagtcttttttttcaaaaatgaacaatataaattgttgatacatatagatctcccctccctttttggtatgtctggttgtgtaagcatatttgaagaaaataatattgaccttgacctactaatataatacccagtgaaataacttcaaaataaagttgtaacttgattagaggaaaggtaagatgctgactcaataggtgagatgagtcagctatcagtacatgcatcagcaacgtgtcaaactcctgaagggtgaagagagttagcatttggatggaagaatgaatgacaaacagagcatctgggacagagaagctagaatttatgaagactgcaacaatctggatgagcactgccaaaacaaggataccacttgggtctcacacatcaaggcttcttctgatataatcaggtttatgcaaaatgtgcaaaggaaataaataaacaagcaatgttcgacagctttgtccttggagccaaaattttaaat

SEQ ID NO: 60661 - DNA, 1312 bp, Homo sapiens
tacaaaggtgaccaagcaatagcttctgagccattttttaccccaccctgaagtccaaagcaagcatagcatgcagatgacaacatttctttgaaaaaagccaagtggggcaagttcaagagagaccactctgaatgacattcatctagattccagaaactctcatattacataaatctgcaaaaacacgcaccaggctctctttgagaatggagagtacacataaaaatgcgtaagtttcaaatttctgataaaaccagatgtcttatgtatagattgttcatagacccagatgggccagaagaacctcattcatacaactctcacaagttttcagaatctatcctctattgaaaatatcatgatctcctacagacaatacactctttcaggatcttgactataagcaatgtcaaaatacacttgttaattaatgaatgaataacccaaaataaacaagagtcactgaagacaggtcaggtattagaaaaagatacgcattctaaagagccatttcctgtttcacaataaatagtttctgaaaatcttgaatgagtcatcccttcccagtcatatcatgtatacataataatagtaaaaacttagtaagcacttactctgtggcagtcactattataaggagtttacatgtattaactcctttaatcctttctacaatgctgtgaggtaggtattaccaaccttatttttacatataaaaattggcccaaagatatttagcaacttgcccaccatcacacagctggaaagggggccctgctgagcttcagacctccacaatctggcacctgtacactatcccacctctgctaaagactaatgagagctggcttatcactactgatcatttttgttttcatctaatatctacaacgtacactggagggaccatctggaagggttaatcttcctaatcttcctaacagactctttaacatagattgaggaagacaagcattctgtcatctatctcctctttgtaccaagcaaaatgcaactaccaagggttagaaagattctccagctggcctgttatttctgttaatatttaaaagcccccttaggctgggcacagtgactcatgcctgtcatcccagcactgttggaggccaaggcaggtggatcacctgagtcagatgttcaaggccaacctggccaacatggcaaaaccccatctctaccaaaaatacaaaaattaatcgggcatggtgacaggcgcctgtaatcccagctactcaggaggctgaggcaggagaatcggctgaacccaggaggcggaggttgaaatgag

SEQ ID NO: 60662 - DNA, 2445 bp, Homo sapiens
cagtaaatcctcttcctccatcactcttttcgtctcttctttattccttatctctcatctctacagacgatatataggtagcttttaaaaaaatcatttaccccttatgcccgaggcccagaataaacgtcaaggatcgcaaccctgaagcactgcaaaactgaacgtaaggtaacagcgggtccgtgcaaagcccagggaaacaggtttcgccctgggccagggctcccgaagctttatcatcctctaatcagcaggcatggggcatttccatggctcaggataatccaaagggggtaaggggaagtagggaaagacagggaaggggtttgtctgtggggatgcttacatactccctttgctcctaacccacaccccaagccctggagacgataagctgctagagaatcctcctcacaccaaacccctctttattccccgcccccgccagtggataaaggggggcaagaaaacgcctccaatcccagaaggtggagaaaaaggggggagggggcagagtgaatgagaggtatcatcagaagcatttgtaggtaaatcagacaagtgggacgggcgctcccgctcccgcaccccaccccaccgcacccctcgcctgcccggccaggccttcccaaggccggtgccccataggttccccaggaggaccgggaggaagaagggaagcgggcgagccgcggtgctggagggactaagttaccttgaagcttctggggaagaatccaaagatgatctgtggcttggaggggcgggagacgggcgaggtggccgcagcgggggcgggcggcgggaccgggacgtgcagggggaggtccgggcagctgcggggagcctggggcgacggctgtccggtacggggtccctccggttccgcggcggcggagcctctaggcctcacggccggacccgaacctcagcgttccggtggcggcggcggcctcacgatcctcccccgcgggcccgtcccatcaaatcggcaccgaccccgttgcggctccgccggtggctcctcgctcacattcctggcgggcggcgcctcagctcgttgccccggacccggcggcggcggcgacgacgtggggagggggggaagggagggaggaagactggatctgcagcggcagcaagagaaggggacagaataaggaggaggagccgcaggagctggagccgccgctgccagagccacctttcgctacccgcggtgggtcccagtcaatgcccctttctctctcctattgtcaatatcaccgggcggctgagtccatggcacacgcgcaaccgaaccttctggccagcagcgcccgcctccggcgcccgcccactggagacttcaaacgggaagcgaggcctcattggccagtatccgccttcactcccctgacagcatgttcggctgagacctgatcagggattggcggcaggagggcggagaaacgggagggtgggaagagagaaggtcgaggattgggccgaagcttgaggaacccggatgcagccgcgatctcgggcggtgcagccgccgcttccgcccggcagtggggcaagctgaagtgagaagccgctgggcctgagaggagctctttaattccgggaggtgtgcgactagcggatcagcgggctggctttccgtgctgtgcggagcctttgggcggcggtcgtcttggaccggaggattccaagggctcgggtcgtctaagggtcggggagccccggagacttgatcccgccctgcagctagtgtggcccctcagggtttggggagtcccactctggacgggaccctgtgatgcgtaggcaggaataagatcccccgcccgtgccggtgtgccactgcttgtgtaaatgggccccttgaaacccccagcagtcgctctccgctgaaccttcttcgaattttctctcacctcatctccttttccttaaacgtctgttttgaatatcagacccctgtagcgttgaagccagcgctcgtttaattaatgcaggtgggaacgctgtcgccacagtttgcagtctattcattcagaataacccgccagtcagccgactgctcagagctcggaaagacccagctccaaactaggagtttcgagattttaattggcaagttggacccgaaagagttaatggagaagactacttaaatctatctagaacaagtgatgagatatttggagatgtgtttgcatgcttggtgaatgcagacggccaaatggtacatttccagataatattcttggattaatgtatttgaatgcaccctacgtacattttttgagaggaaaaaaggaagaaagaaattattaatgctaactacaaacgtcagagtaccagttgttcaaaacttagaaattggggggggggacaaaaaaattaacattcttattttctcaactcagagataaccacttacagtatttgcat

SEQ ID NO: 60663 - DNA, 1865 bp, Homo sapiens
ggcgagtggatcacctgaagtcaggagttcgagaccggcctgaccagtatggtgaaatcccgtctctactaaaaatacaaaaattagccgggcgtggtgccaggcgcctataatcccggctactcgggaggctgaggctggagaatcgcttgaacccggggggcggaggttgcagtaagccgagatcgccccactgcactccagcctgcgcgacagcctgagactccatctcaaaaaaaaaaaaaaaaaagaaaaagaaaaagaaaaacaaaaaagaaaacaggagcaacattttacaaattataccatcttttaattttacatccatggaagctgaatgccacaatttgtcagagacaagctaaagaaaacacaagaatgagtaatgtctaacactgcttcgcgtgaaaatgagaacactcacagtacctacctctttagatagccatgtggtttaaatgatataatagaccagttgctggtatcataccacatcccatactacgggtcgtctcttcccaagtgaaaatctgctttctggcctacaaaaggattatactaaacccttttagtggtggggagagtatccgtggagaggaaagagcaggaggaaacaggtctttccctgaaaatgagcaagggcgtttggcttttattgaaaaacgccccagaggaagtactgggaactgcaccggcaacagcagcctgacccgcagaagtttctttggccagggccagcacaggtttgacctggtggctccgacggcggagcgagactgccaacacgtgcacactccgtccagacctcccacttccctccgcgctcccgcgatagctgtccagcaactctagctttctagactcaaccacggcgtcgccgctcgtcgagagggctgcccatcccggggacccgcccagcctggcccagcaaaatgtaccttagtagcctcaacctgtaccggagaaaacgcaggctgcgcggcggcttagagcggtcaagtggaaccccgcctcgacctctctgattgggtaatgcgcacaagaaaatcaagaggattggtcggctgcagagaggcggcccgtaacgcgacgcgaaagaagtggggcatagcggcccggggaattcttgctagcttccgattggacgaaagcagaacgcctgccccttcgtagacccagcgtacgtacaacgctcacaccaccacgccgtacgctgcgttagcggaagtttaatggccccattggtgggatgcgtggccaataaagggcaagaataaggcggattccgccttcctcgtggctgactggatgcatccgctggtactgatttacgtgagtttcagcatttagacgttccgagtttccaccgagccagagttgggtagagagttattaagatgactaggagactaatgcggggagaaataatttagtagttagactcaggccctgaaactaccactcgtgttcagaaagtctacgtaataccttattgttttcacgcgaagaaaccagcccttcaggccgggctgaatgtggtttagggattctctggctgtcattgggtgaaaaagcgatcagtttgaaggtagctccgcctgggctctagggaactctgggatttgtagtccggaactttcgagtcctgtagctttaaatgtggttgttgctactgagttctttcatgttgttaataacacccattgacatttattgtggtttgttggactttttatcctttcgtttatcagcagcattaaagacaacatttaagaaatgtgtaaacactgcatgtatgttcgtaaacaataaatgttagtgtttccaacaatttactgctgtgcctagctgtatactatatgttc

SEQ ID NO: 60664 - DNA, 2493 bp, Homo sapiens
ccaaaagaagtaagcaaaataaaaacgattaccattaaaaactcttcccttggcagttttcagagagggttaaaaaaaaaaaaaattttcctgattgtcaggctgaccctgctgtcatatttgccatttttataaacccactagtttgatcaagagccctatctttaagaataacttttaaaccatgcatttttagagttaatgaggcaataacactatagtattacagttgtagctcaacaactgttagatactacagattagtgatccagaagataatcaaactttatcagcaaagtagcaaccacaccccttaaaaacagaactcaccctgtgctccattaacttccataaagggaacttcgatgaaaatcgattacttcattgcttggaactagcatgtttgttttggaattacactaacgttttgtaaacactgtctcacggtaaagctaatgactttacctctttctgaaacagttttagggaagaaggcaccatatattacggtgaaactgggtcttagtttacatagcgattatttaaaaaattcacttccactgtgcattacaagaattaaagccgtttaaaaaactcaaccaaagcccaatgacaatgtattactctaggaaaagtgtgtcctttgggttctaaggcattaaattggaatttaatattaaaatagaattcaacggctaagtatccagtttcccccaatcacttaatttttcaaaacccagaaagggcctgtttgcgagtattgtgaaaacctgtggaaagagaggctttggaggggaacggtcgaattaaaataaatgcagagagcaaagagaactccgagttctttgaactcccccaggctgaacaggacgagaaggaaccctacctgccagcggccataggtgaggaggaccatagaaatggggatggcggtgccggacatggcatgggtggagggcatgctgtactcagagttgtagaagacctccaacttgaccacgggcggcgaggcgggcctcggccagcggatgatgtccttggtgcactggcccaggtacatgaccagcacccagatgaccacgagcctccggcccaccagagggtccaggttccagatccagaaggggaagaacaggatgtagaagagttcgttgcccagctccgtgccgaagcagaacaggcagtagagcggccagttgctcacgcgggccagctggccctcctcgcccgtcagcgagttgcggcgcagagcgcccgcgcgccgcggcgaggccgggcccagctcggccgccagcccgttccgcacgccgttgggggcgccgccgccgtccggcttggccgggcactgattgcggtcgctcccgggaggctgggggcctccaggcgcccctggctgccgccctcgcagtcgagggtctccggcgagaggcgcctccgctttctcatcctccctccggtctgctgagcggcgcggcggcgcttccaccccgcacagccgctggaaacgggccactttctgcgggtcctgcagacggccaaccagctgggccaggcgctgcctcagcgacatgataacggaacccccgggaaggcgggccggcctccggcgcagccccgaactgtccccgcgctcctggccagcggcagcggaaccggcacagcgctctaccctccggagtctgccgggtgacggcgccacaggccgcgcgcccccgccccgcgcgcgccgcgccccgccccgcccagccccgcccccacccgggctccctgaggggccgggccgcgcgggtccgccctgagcgcatccggccgtggcttggcgctgaggatcggcgggcggccgctttgaggtcccgggtaatatccaccagcaggcgtcgcggcgtacgtctggtgggacgcggcgtgtccccctgctccaccttcagcccttcttctccgcgggctagtgtcgccggattccctcagccagaagttgacttaaagaggccacgatcccggtgccagcttgcgcaatgcctgtgaccaagcagccgggcatcctgctggcacagaaccaaatggtgaatgatcaatgaaggcgaagcaactaccatgagttcggaatcattcgactcaagtaattaacaagtaattacagagctgtcccaggcgactgatgttcggaaaaccatgtgccaattgaccagtggtgacaagactacatgtagatcccaagacagggccaggtgatattaacaggtgtggtctgcaaaagaaaagccagccacctacaaattcaaaatactgtgtcatttatcaaatattttggtatatgttaagggagcacaggtgttcttaagtgtaaaatttccttttcctagattctaatacctagagggcttgcacagaataaatgtagagaatgaatgcagtgtatagatttttgagtttggtaacgttaatttagacgcttaacttccgtgtctcacaagttaccaacttgacttctag

SEQ ID NO: 60665 - DNA, 1986 bp, Homo sapiens
gaggtaagtgggtgtcaagtggcatcatcctgggtccaaagggactgattatgggctggaaaatcaaactggcacctgcaagacgcagttccaaggatgcagttcgcagtgagttttcagacctggatgatgtatgtcaggtcggacgactgagacagctctccacttcccctcatccaaggggaaggaggaacccagttatctgcattaacaaacgcctccccttctctccaggtgaccccaagatccggaccacactacgaaatacggatccagattttaaaggccttcgaatccaaagtcctcgttttacaaagagcccgcggggtgaaatgacttgctcatggtctggtagctaatcgcagatctgctctctaactcctacttccaagacccaggaatctacgggtgttggagaagacccctcctgaaatcctccagaagagctttttgagggagcttgtggctcctgttcacccagccccgggtaagaaaagggtcgcgaacctgcattgcgaggtggtctctccctcacaccacctctgatgtcccaaaagacggggagaaagttgcccgccccgggctgcggcggggcctgctgctccgccccggcgctggcgggcgcgctctacactggccgccgaggggcgagcgcgggacccggaggcgggcggcgggcggggaaggcgcggggcgtggtttgccgctttccgagcgccaaggagcggagcgcgctcagctgcgcccagagccttcggccggacctgaaaaagcgagagggagagcgagcaaaaggcgcgatccagagagccaggcaagcggggcgccgacctcgggcggccccggcccgcgcccttgcccctcggccgggcggacggtgggtgagcgcggccgcggggccccagcaccccggtgcgccccggagagagtgggagggaggggaaggggcgggggcgagagagggaaaggtctctgagccgggggcgggggcggcgggagacgggaaccgacccgatgccggggtccgagccgggccacaggaaactttgctcgggtggggagagcggggtgcgcggagggcgccgtaaacttgtcagcgggcggggcgctccggggattggagcgagcgccagcgggtggcgtttgtctctctgggttctttgtgtcacctccgggccccagcccgccggtccgcccggctcgggcaggcgctgcgcgggaggctgtgcccgggtgccccggccgccccctcccgggcccaggccccggccctcgggggccgctgattgttttcattcctcgcgtcacgcctgggcgggaaagattttgaacgccgcgtgagctggaaggcggacagccgcggcgcagagattgcaggatcgtgagcggtgcggtgctcgccccggggacccgggaacccgcgggtcggggcgcaccggggctggagagggcgcggggacgggcggcccgggcactggaggggcggcggcgggtgcggcagcctagcgcctccgcgggggcgggggggcgctccgacggccgggattataattccattttgattgcttggggtctttgttgtctgaaattgcctttagggtctgacggtggcaccttctcctccttaggttatttttcttctgttgaaaagggcggggcgggggctgtgtatggaatcagtgctgctgggaacattagcgccttatttgattgaggctgagaagtcctgtgtagcattcgcgtttgtggaagcctgctgtttccgaaagttatttccccctccctccgtgaaagggagcgtctgagctggacgccgcaggcacggttgtgtacaagcaccagcaagtcggagccaacccgtgagggttctttcaagccgctccacacttggcatcacttttttttttttttttgagtttgttttatttgaagcaacttttgtgtgcttttctagaagtccgaaggcttcgttgcagatactatttg

SEQ ID NO: 60666 - DNA, 683 bp, Homo sapiens
gcttgctcttgttagaatatcctttgtagtcactcatttgatgatgttgagtaagaatctttcctctgttaatacgtctttgtttaaaagaaaataagttacctttgtagtctttgtacatttttctttgcagaaagtttcccctctgctggataataattaattttataaaagtgtttaatccagtactgattatattcccttgtgagctggatgaaaagaaacttctgaatgtttgtaaccacagattgatgatttggttacaaagactctctgttggtgatggtttctgagaactggaaggtaagcttgttccttgggtgagtcatcatgttgtcttgcagtcggtcatgtgttttcttagcaactgctgttgatttcaggtttgagcagggtgagcatgttttgaagtgatccaacagattcttttaggttatatatggctgctaaatcttatacacttactgttactattatgtgtcttacaaggagtgaaagattgaattctttttttatctctaccttccaaatcatttcttttctaatttgtttttcaggggtagtgaggactgggagtgggggtaaaaaaggagaaaaataaatgaatctgggatatcatgagtctgcctgtttatgcccctggactagagcagaaccaaaaggacctccatgtgctgataggg

SEQ ID NO: 60667 - DNA, 528 bp, Homo sapiens
aagggtctaacgagctaggcgatgggagtcaaggctccagccagcttggctgggatgcagggctgagattattcctggagtagggagcagagatgagtgatctgttagttactcagttacttctttggggaaaaaggccagttcacctcgagccaagttacccaatgacagactgacctaattatttgtttcttttcagttctattttaaaagtttaaacagtttgtataagataagatggttttaacagctttttgaagatgcatgtgatgtttaagatggactttttctttttaatgtgctggcattttatggattttttttttttttttgagacagggcattgttcctgtgcccaggctggaatgcagtggatgtgatcataggatcatagctcactgcagccctaattaagctcctgggctcaaactgtcctcctgcctcagcgtcttgagcagctaggactataggcatgctccaccatgccctgctaattaaaaacaatttttttttctagaaatggcattt

SEQ ID NO: 60668 - DNA, 621 bp, Homo sapiens
ggactgctgccccagtagaaagtgttcaggctcacataccttgatttttcaaaagaaaagtgttcagttttatgtggtagttaaaaggtagcaaggagtaacaaatatgtgttaaaataaatgtagtcatttctttatttcttcattccgtagatatttattgagcaacttagatgaatcagaagagtgtgagaaggaggagagacaaatagcacccaacttctagacttttatcagtattgtgggcttattttcatgtgctaaaaatacaagacttgcttacgcagagagccgggagctatgttccagtgagggtggaaacaaaagcctcagtataagactgtcaggtgtttacacaagggtgtggtttgctcatgtggcaacacgaggttgctggactccacatgctgaggctcaaagtagaaatcactgatcttatgtcacatattttcccaacaaactaagtacttaaatctgtatgttgattgaggaaaaataacaaactcctgctccctccttccctagccatttaatcattaattcaataaatgttttctaaattcctatagcatgaaagctctggggtaggtgctgcaggcaaaatgaggagcaaactcagac

SEQ ID NO: 60669 - DNA, 1374 bp, Homo sapiens
cagcccaaacagcagggcagcttataccacagcccaaccctgctgcggtgctttttccccaggcccctctcgacattggcagcattctgataaatgcatctgagcagtaatcccaaggatagcatatactgcctcctagaccccaaaaggtccgttcagtgctgtgtctcttttttagtggtagagttgtaagattgaacaacttgacctttatcttagaggagaagtcctggcatgccccaggccactagacccctgatactggggctcctgaattttcacaggctttgtttctcagcctctggcatgtctgactggacattcaggtcctcaccatttcagttagcatgatatcataaacatagatgactggagtgatatcctgtaatgtcatgactgcaagatccatgaatgagtttgaacgtggagcaggagagttaaccatcactgaggcaggatttgataaatgagtactgcagccgaggggtgggccaggggattcgaggggaggcgtaagaatgacctgattcaggggcctttgagacttttttctacatcttagttgagttcagggctggtggaactcccagtttctagatatgtgatgtaataggttatgtatttctgagttctgtgtacaccactattgataaatacttcactggtttggtaattctggctgctttacctttgttgtgtgtcagggtaatgagaacctgctggccttacttttttagcatacagggattggaagtgaaagaaaagagaccagcagaaaaattttccatatccaatagttgcccaacctcttatacttagtgaaagcagtttggtggagctcatgtgcttatctcaggagaaatgttgctttatccatctgaaatctgaaggagaaatacattatttatgaagatattcaacagcatttccttcagcccaccacagcagtactccatttcagtcacacatctacatgagcaatagctgggcattatgggattctgatagtagaggattaatattcccagctataggaaaacagactaggatatggcactaggaaccctttgaagagagagcatacaaaaattatgtctacttcaggtcctgaaatgtaattgtatattttacttattttagttctttttgttttttgaattagattgaacgagaggcaattattttagataatcttcaggaagaactccctgaaatttccaaaacaaaagaggcagccaccacagaggaactctctgagctgctagactgtttatgccaatatggagagaacgtggagaagcaacagctgttactgactctacttcttcagcgcatcagaagtatccagaatgttcctgaaagctcaggggctgt

SEQ ID NO: 60670 - DNA, 949 bp, Homo sapiens
ggattcaaacccagatctttctgactctgagtttaaaacctgagctttgaactattaggctccagtgactctcttttgaactaatttatgtatgtgtgtatttgtattttcttcttaactcagaacttttgctggggaggaattcttggagcaggaaaaatagatgttaccctttactacaggaggaatttgtccacttctgattattcagggacacctttactggctccaagttccatacctcttggtgactgtcttcctgccttttagtgatttctgtctcattggcacagcacatcactaatgagaaggaaagtggggactttgcagaaaccaggcagccaatgtcatcagccttctatcagcctcaacaaaccttttgtttcagaggttaagtgtattgaccaaatgataattgcataatttttagtaaaattctgagtcattcttgacccgtattacaaccaaggataaatatttagtatggaaaaatgtgaaaatgtgaaatcaagctaggcatgacctcagagtaaaccaccaccatgccattctaggggcatgcttttcatttattcatgtgcagttaggtactgtactttaggtatgcagttttacatttcataagcagtgggggagatatgcaggtataagcagtgggggagatatgcaggtatttgtagaattgactgaaatattaaggagaaaatgtaaaggtttgctattttggcatgaaatgtagcaatagccagaaaatcaacttgcattttaactgcagttttttttactgattactgattacttcactgattacttagatcagtgttgtgttgatgcagaagtgaagcaatgtgattcaccaactgaaaagttaacttggatactaaaaggttggtgaaattatatcaagaatgtggacttgtagattccaaagtgtagtgaaagcaggaat

SEQ ID NO: 60671 - DNA, 1853 bp, Homo sapiens
ttccaggttaccccactgaagttcattacttgactcaagctgtttttattagggaaaaatttagataagtaataccatgtatgtttttaaaaagctaaaatttttataatctaactatttgagaagatgtcaagttaaaattatgtggtatattttattgtatccctgctgggaggtaaagatcgtgttctgttttgttttgtttttctgttggaatagagtgtgcagcaatgtaagcattgcttaatcatgtgtcacgtaacgctaaacactggccaattcccttaaatgtttcggacacacacacaccctgtcactcacattctcacctgtctcctggggctcaccgggtagtgaactgtgagcctgtttgcgtcctctgtgcccgggaatactgtacctgcttactcgcagatcggctgcttggaaacctgtggcaccaggtcacgtgattgttgctatgagtgtggaggtgcatttctcttttctttcttccttcttctgtcctgattttgtttcttttaactggggaaatgttgcaggttcccaggtctttgcaggcccaagtctgaaaactttggactccctggcttatctttggatttctcttagggcaccacacctcctattgaggctgacactctggactcttctgacgcgcaaggaggtttggagcccagggtggagaaaactaggccggagcccacagaagtcctgcatgcctgcaagacccaggtggccgagctggagctgtggctgcaacaagccaacgtggcagttgagccggaaacattaaacgcagacatgcagcaggtgctggaacagcagctggtagggtgccaggtaagactgagaagtcagagttcatggtttgcctctccaccaatcatctgccaagattgggtgaatttctcttaaagcaacactgtttttctttctgttactctgacccttacatttatcttggcctcagcttttagttctcagggtaattctttgaaatgctttatggaactatcttatttgaggggacagtagtgttcagaatctaggagtctaaatccagctctgtcacattagctgtgaacttcgggaagtgaacttctcagcctcattttccttatatagtaggttatcttataggatttttgtcaggattaaataaggtatttaaagtagtgtcgcaggatttaaataaggtatttaaagcagtgtcataggatataaagttatctcataggatttttgtcaggattaaataggtatataaagtatataacaagtgctcagtaaatgctattattttattcaattttagtaagtaattagaatattcattcatcataaatgaaaccaaaagtattaatttgcaaaattgaagatacagcataaaagggctttgcaaccattttactaggaatgccctgggttttgcttgggaggggcagggatataaacttccttgccgctagtcgctctgagtaaagcttgccggctcagcccgaaggttggggtttctaatccctccagggagaggctagaatgatgacattgcaacagcataatcgagtgtcacaagagcaggggcacgcgagctgcttgcaaaggcctctctcccagctgcacttaggagaccagacttgtctttatcatatgggcttgtctgccaggatgaagacatcctcttgtctcagagttcgcatatcactagccctgccacagggagcgtttcctgctgtagcctgttatgttgttgtgggaagcctgcctttgatccacagttgtgcattctccccttctatgtaagcccatagtcttaacaacatccaggaaccagacagacaggccagcct

SEQ ID NO: 60672 - DNA, 2537 bp, Homo sapiens
acattttgtttatagccactgtacagtctatgggtacatattgtttaaacttagaagaatctatagaggacataagtagagtagtcccacctttgtctgtgggggttgtgttacaagacccccaatggatgcctgaaaccgtggatagtaccaaactctgtgtgtattatgttttttcgatctgacaactgagatggctacagagtgagtatcccttatccccaaatgcttggaactagaagtattttgcatttggttttttgggagggattttggaatatttgcaaatacataatgagatatcttagagagaggacccaagtctaaacactaaattaattaattaatttctttatttatattagagttaacagggtcttgctctgttacccaggctggagtgcagtagcatgatcatggctcactgcagccttgacctgacgggctcaggcaatcctcctgccccagtctccggaatagctgggactacaggcgtacaccaccatgcctggctaattttattttttgtagactcagggtctcactgtgttgcccaggctggtctcaaactcctggcctcaagtgagcctcctgcctcagcctcccgaagtgctgggattacaggtatgagccaccatgctaggcctcaatttatgttttatctatacctcatatacatatcctgaaggttattttatataataactttaataattttatacatgaaacagagttcaactgtgacccatcacatgaggttgggtgtggaattttccacttctggcatggtgcataaaaagtttcaggttttggagcattttgggattttggattttcagattaggtatactcaacctctactaagtaactaatgagccgagtgctggagtatgaatatgctggacaaagggatgattcacatcctgggcgggatggagcaggatggtgtgcaattttatcacgctactcaggtggtgcaaaatttaaaatgtatgaattatttatttctggaattttccatttaatatttttgagccctgattgactgcaggtaactgaaaccacagaaagtaaaagcatagataaaggggcctgttacagcttgcttggatgaaggagttataggataaattatttgcaattttgttttaagaatagagttcgtccttaaggaaaatttttaattccttaaattcgctcaatgaatggaacttgttcttagtcacgcaccgagttttagtacaaatgatcatggtgctggaatgtgagtttgtctgttgctgctgacgtgagtgcccagccagctggcatgaccgagcaggctgctgagccccaggagagggcaaacttgatctgttgagcaggaatacaatgaccgagacttactgggaaacttacttcatccagctgatatatttttagatttgtgtgaattggccggttgtatcaataactaaatatttcaggttccaaattatttcttctatggtgttgtgagagtttggaggcttatttgtcttgagaaagagaaggaaaagagcaagggaaataattttcaaacagttacgtggaattcttttttaaattcctactccacacttggattgcaacataaaagattaggaaggtaggcgaggcatggtggttcatgcctgtaatcccagcactttgggaggcctaggtgggcagatcacgaggtcaggagtttgagaccagcctggccaaaatggcgaaacgccatctctactaaaaatacaaaaattagctgggcgtggtggcgcactcttgtaatcccagctactcgggaggctgaggcaggagaattacttgaacctgggaggtggaggttgcagtgagccgagatcacaccactgcactctatcctgggcaacagagtgagactccgtctcagaaaaaaaaaaaaaaaaagattaggaaggtagggggaaaataagaatatctgcactttttaagcacagatgtatcaagcactggccaaagtacatggatttaattcattcactcctgataatgaccttaggaggtgagttcggttattatcttcattttacagactactagaggcacactcctctaaagtaaggtgcctgtgtttacacatctactaagtggtaggactgggatctgaaaccagatagtctagttccaagatctgtgttcttaaccactatcctctgctggatacattctgctatgttttgtaaggcgactatagagtcatttacttaaattattttacagagtgacatgtgtaattgggattggtttggttgcatccctactgaaaagtacaagaattctgtggaagtttttgtttttccagggtttcttccatcctgtgtttctgggacttcttgtatacacttaagtaaaaagagtaagtcttaacttgtttgcaggcacaatacttcttcaagaacaacattatgaataattaaatgcttttatttcctaggctatgctaacagagattgagcacaaggttgcctttctgttagagacttgcaaagatcagg

SEQ ID NO: 60673 - DNA, 1144 bp, Homo sapiens
cagcactttgggaggctgaggcaggtggatcacctgaggtcaggagttcaagaccagcctcaacatggagaaaccctgtctctactaaaaatacaaaattagctggccgtggtggtgcatgcctgtaatcccagctactcaggaggctgaggcaggagaattgcttgaacctgggaggcggaggttatggtgagctgagatcgcgccattgcactccagccagggcaacgagagtgaaactgcgtctcaaaaaaaaaaaaaacactttaaaaactatacagcgctacaatgagtgtcattcattcatcagaaaattctttggaatctaccatgtgccaacgcctgtgccgatggcactggccaatcggtgttccctgtgattggccctccttatcactgccgtcacaggctctatcaggctggcttgctgtgtcagtcactactgtctctctccagacagggagcaggtgagcaaaacagccccactgcgcacaaggcaggcttctgccttccaccacatactcacattgcctgggcaaaggttacccgtgatttcccaatttcccagtctgataggacttctcagctgtcctctttcccgctaaggaccttatttgaccaattaaagttcaatcaaactcatcagttggcccttaaccttggtttctccatattacactgtaacgtgtacataggtctcttgcaaacaggagaactccactcattattagttctttccccaagcagagtcatctaccacctcaccctgtttcattttatttgtcagctttccagtttgagaaaggagctaattctgaatcattcacccttctgaaatcacagctcattttcagtacttatttagcttttcaataacaaatcaagatgcaaacccatcccttagaagagacttgaattctattctaatagttggctgtgtcaaaagtaaactggtaaataagcagctagccctgtagcgtgaatgttgttattactaaactgaaagattaatgatttcacacacacacacacacaccaccttttttttttttttttaagagacagggtctcagctaggtgcagtggctcacgcctataatcccagcacttcaggagcctgaggcgtgtggatcacctgaggtca

SEQ ID NO: 60674 - DNA, 1473 bp, Homo sapiens
aactcaaggggccagtcctctccagcatcccagctgccgccgccctgtcaggcttcccaggcaatcgcccatcttattccttctccagtgtggacgcctacgaggagggagcgtcccctctcgacagttaactggcatctagcttatgaagcccgcgtggattctccaaccccagacctgctggggggtggggacgtgcgggtgacaaaatccagactacgaccctccctgagccctggcaaccccggggtgaccccaacacagagggggccacgcgcgctccagctctgacactccttccagctcggcagggcctgaaacagggggctgcgcttcacccactgctgagcgtcagattcagctgaggagattctaaaagcgcggtgctgggcccagacccaggcactccagagcagaacgcggaggggcccgaccccagtctggcggcgcaggtgtgtgacaaagtcggaaggcgcgccaagctctccagttccacatctgctgtagagtccagcgcccgccacgctcccgcgcagggacccgcccattactgcctggaagccgggcgccctcacacttctgcaccgcgtccccagagctgaggagcatccgggagactcgccgcccgaacccgcgaaactgtcctccctcccgcgaggccgccccgtccccctccccgcagaccgccccccctccccgcagaccgccccgtccaccccccgcgaggccgccccgtccgcccccccacccggctcctctccctgattggctcgaatcgggcgggttccggcgtgggtttcagcccctcttcaggcgggtttctagccacatgcaaaggtgctttctggcccggctcttttcacccgccaatcatccccttcagccagtcatcaccgacttcctccacgttttccttgtcctctccggccggcagtgtagcagcagcaactccctacgttgaagtcgtctccctccgtccccgcccttacttccttttcccttaaggacctcgcgcgcgcttccatattcagaggggcgcaggcgcggtagcgcggcctcccgagctgttgtaagcaccaggttgcggtggaacgtgcaccttcagttgggctgcacggaaaagtggtctccgcataaacagttgcacttgcccctagggaatgttggaccacaggaggggacctgaagtacgatgtacaggccctaatggtccctctgtatggaagcgaacacttgcaggggaggggcccagcgggataggccgggaacaaggaggcagatctcagcctgccacacctgaagacaagtaccttgcagctgaggaatggggccccaagcagaattttactgttggctgtgcccctggctcctgttctggggcaacagactcctttatttgaccagaaaacatttctgccagcctacttgtggctgcctgaaaccccataattcagaaatccaggccacgatttc

SEQ ID NO: 60675 - DNA, 2442 bp, Homo sapiens
aaaagttttagatgagctctgccagtagtaaacggcttgtaaaagaaacccggtatctggtcaagtcctaagtgacctgaaccacgcatcttcaggactctactgggatgactgtaacctgaacgcggttcctagagcagagcaagcatattccttggactcagtaacacaaggggccagtcctctccagcatcccagctgccaccgccctgtcaggctccccaggcaattgtccatcttactccttctccagcgtggacgcttaaggggagggagcatccctcctcgagggtcaactggcatgtagcttacgaagaccgcgtgagttctccaaccccagacttgctgcggggcggggacgtgggggtgacaaaatccagactacgaccctccatgagccctggcaaccccggggtgaccccaacaccgatgaggccacgcgcgctccagctctgacactccttccagatcggcggggcctgaaacagcgggctaagcttcacctacggctgagcgtcagattcagctgaggagattctaaaagcgctatgctgggcccagacccaggccctccagagcagaacgcggaggggcccgaccccagtctggtggcgtaggtgtgtgacaaagtatgagggcgcgccaagctctccagttccacatctgctgtcgagtccagcgcctgccacgctcccgtgcggggacccgcccaaaactccctggaagccaggcgattcagaccccgccaccgcgtccccagagactgggcggaaaccggagactcgcctcccgaacccgcgaaactatctcccgcgagactgccccgccccaaccccgccccgcaactctactccctgattggctggaattacggccggattccggagtcctttccagctccctcttcggccgggtttcccgccgaatacaaaggcgcactgtgaactggctctttctttccgccaatcatttccgccagccattcatcaccgattttcttcatcttcccctccctcttccgtcccgcagtccccgacctgttagctctcggttagttaagggactcgggtccttccgaactgcgcatgcgccaccgcgtctgcagggggagaagcgggcaggggcgcaggcgcagtagtgtgatcccctggccagtccctaagcacgtgggttgggttgtcctgcttggctgcggagggagtggaacctcgatattggtggtgtccatcgtgggcagcggactaataaaggccatggcgccagcagaaatcctgaacgggaaggagatctccgcgtaagcacctgacattgttgttgagtgtggggctgtggacgagggctctgagggtgtgcaggtcccccggacccattttttgcgggagggacacttgtagcggaagagttaggcccataacacctgaagacctgcagccaaagaaagagaacccgggcacaacctgcgtttgcaagtggactgcctagtggctgtagccgctggctcctgtgcttcggggaaaagtcctgtgccgactatgctcccaaacgcgcagctgctggtgactttctgccgggagagtgggtagttgcggcttcctggagcccccctagtcagaactcagaaatccaatctacttaattcccgttaatttggaggtgagtagatggagactagtgaggtgacaaggcttgacaagactacaaggctgataatgacagagggtccttccagctcatagcttttcccactataccatagtcttatcatacgctaagtgaaatctaatacatttttcctttctcttcaatctcgtgcttctctctaacagccatctctctgccctggtcctagagttacttgaaacgtaatttggctcctgagtcctgagaatattctgcattccacttgacctctgcctgttctacccttgcgggacatctgaatgcttaattagtgggtatcgttgccagctttactcccaggaagtaacactggctgctttttgtctgggaggtgactggtgaggaaaaatgagagtagaaggaagagggaaaaatatattccctctagtagatgaaggagggaaagatatattctgtgtgaccttactgagtttgctcttgggacctttcacatcacccgttatgtaagtaactgttgccagccacagcagttactaaattgtaattgtcctgtaactcctaactttgtaataggtttttgagtgaattacaaagtcatcggtggtgaaaagtccgggcccagtggctcatgcctgtaatcccagcactttgggaggccgaggtgggtggatcacctgaggtctggagttcaagaccagcctatccaaaatggtgaaaccccatctctactaaaaatacaaaaaattagccgagtgtggtggcaggcatctgtaatcccagctacttgggaggctgaggcag

SEQ ID NO: 60676 - DNA, 717 bp, Homo sapiens
gtgttaataaacaaacaaacaaataaaagagaaatacatctaataatctgcatcacttatttgtgcttgaaacattcagtgttaaccccaccctttcctttttctctaggcaaataagggcgagactgaaaaatcaagtcactcagttgaaggagcaagtacctggtttcacaccacgcctggcaatattacaggtattatgatagtgtattttcattaatgttgtctttgcttgatttctcagtatcatttcagacctctccctctactttcctcctttttttttggctgttgtgtaatctcatgccttttcagtctctcttggcaggctcccccctttggctcagcttctaaatgttggcatatcctggccctctgctcttctctgtggataccctttctctaggccagtgtctcttaacctttggtcttagtagggcccctttacaatcttttttttctttaatttaatgtatttatttatttatttacttttgagagacaaggtcttactctgttgccaggctggaatgtagtagtgcaatcatagctcactgtagcgttgaactcctggcttcaagcagtcctcctgcctctgcctgccaaagcatgggtattacaggcgtgagccactgtacctggccccgtttacactcttaaagatgtaagacctcaagaagctattgtttatacagatttatccattaatgtttacta

SEQ ID NO: 60677 - DNA, 644 bp, Homo sapiens
cttttttaaaaagaaaatttagtgaaaagaggggcattattttatatttgtgcacacctctttcctgtatggcttagtagaagagagctggagtcctatctgcctctgcattcagtcttttgctgtgtgctggtttgattgaaatatatggagaaaatttggcttcatacagatgtgtagctataaaagggaagaatttttttaacagtccttccaggtaattgtgggtatttttctttgatgttgtaccaggactcagtaagtaaattttaaaagattagttgcaatgtagaatctgaaactctatcagtgaactttgatactttgttacatcttctcagacttgcacactttgttacatcaaaatgttacatttggaatgaatatttaccccatgcatggttttgtaacatcctttgttcctcatttggaaaataatagttcccggaattatgcagatcttccaaatgttaacatttcattatgcaatatgaaagaattggaatcattaacatcaccaacaagctcatcagagaagttttcaagtattgagaagctgtcaagctcacaggggtggataaaaaattttaattttcacccaaaaactcacattttatcattggcaacaaatacaattaattgtt

SEQ ID NO: 60678 - DNA, 732 bp, Homo sapiens
taaatattcccctctcctcctctgctgtttgtctaagagggcttagctgagaagaaaagcacagaaggcctgtcactctctgcctggcatgttctctgctgtggtggattttcccttttttgcaaattactaagaatcaaaagtatatattgtgggtgtatactggtacatttggtggctggttatttcttggcttatttttgcaaattgtttgttgtagaaagagtaaatgtcataggcaagaagtataccctttttaaagcaacattgggggtgttttttttcctccattttaaaaactgacttccaaccttgttttttaaatttattgattacaaatgtttttattacataaacactgttctacagctcgtctcctacgtccttgctgataaaacagtggtagaatcttttaattttgtactttagcaccagagtcaacagctttctgtgatacaaggtttatataatatgttgtaatcacatctccctgcctcagacctctagtctttttcgctgtggtgctggcaccaccatcttcccacattccctgagctagaagcctgaggccgtctccttaggagctctcttcctcactccctgcatccagttaggggctattgtcctattgattgtgcctctcatcaactcttggaatctgttgcctccccttgattcctatttctcccaaccctggggccactatagttacctgcttaatgatttggggtt

SEQ ID NO: 60679 - DNA, 930 bp, Homo sapiens
acaataaaattttacaaataaatggttataatgataaactataaatatgttcatggtcaaagaaacagagggaacatagtgagacactgcatggtggttcaaaggatttagcctctgcactacaagtttctccctgtctctctcttttttttttaagagacaaggtctctctctgttgcccaggctgcccaggcatagtaccatgactcactgtgcactggtgcaatcatggaaaaactcttgacctcaagtaatcctcccaccttggcctcctgagtgctgggactacaggcaggcaccactatgcctggctaattttttgtaaagatgggggggggggtctcactatgttgcccaggctggtctcgaactcctgggctcaaacgatcctcctcccttggcctcccaaagtgcagggattatagacctgagttgctgcacccggcctcctctctgtgttggggccagcagattgccctttgtcttgcctggctgtttattctgtgtaaactagagggaggtccttccaccctcctttctattgtctgtgtggcggggccagggagctttccattgcccctgcgggtgggggagagggtgtggaatgtgccctctgggtgctcctgcctctcaggcatttttcttgcctgatgacagtttctcagccctccatactctgtttttctggtatggcagcagaaatcccacatgtttctagtaggcctgcagcatccttgcttagtttccagtgcagatgcagatatcctctactttctgtttggggtttggcagtgggaaccaggtgggccttgtttaggggaggggctgtaacaccatctgtgttcacataatccctcctgcccccacagcctccctatactcctgtaaaagttctctgcaacaagagtcgcatgattaaacatttctttt

SEQ ID NO: 60680 - DNA, 604 bp, Homo sapiens
aggtgatctgcccaccttggccccccaaagtgctgggatttacaggcgtgagccactgtgcccggcctgttcaagagttttatacacccctaacaccttacccagaggttggtgggtgggactgaaagttccagccctctaatcatttggtctttttggtgaccattcctttcctgaggctgtctaggagacctaccataagtaacttattaccataaactcaggtgtgatcaaaaggagtttgtaatgaataacaagacactcctatcacccttggaattccaagagctctgtgagccttttgtcaggaacccatgacaaaggtcaaatatatttcctattacactacacataccaaaagccagaactgagggtacactaaaatgttaacagtagttagtcctgggaggtcgttagttggttagttgcttggtctttgccatgttttttgtggttatataattggatagatattctgtcatcagaataaaaattctctctgctaagtgtgctatgtttcctaaatttccagaccaggcctggcacccagcgtgtttcaaaagatatttgcacttgccctgatttgatggctcctgcatttctt

SEQ ID NO: 60681 - DNA, 1331 bp, Homo sapiens
ggtgtggtggcaggcgcctgtaatcccagctactcgggaggctgaagccagagaatcgcttgaatgcaggaggcggaggctgcagtgagctgaaattacaccactgcactccagcctgggtgacagaggtagactctgtctcaaaaaacaaacaaacaaaaaaaaccccagaagtataaaaaaatttaatcaataatcctgaaactgatgtttgttacaaacactttcttcttcctcctctatccctaagcaggttcaagtagcaatatctttcctttttagggagaatactattctggttattttcaaaacctattattataataaatactatatgcgaggccttgtgctaagtgctctatatacactatctcttaaaatcgtcactgtgatgactaatgtattattttcatttccattttacaaatgaggaaaaatcctaagcttaggacacacaatcagcaaatggtataaagtggagataaaaagccaggtctgtctccatagcctgtgctaataaactggagcaatattttcttagctttctcttcttaaaagactgaagttcacatgctatttggaataaatacacagaaaaggggcacaggaagtggtgcagaaagaagcactttataacttatcaagataagagcacctgcactgcttttttaaaacaaggaaaaaccctgcaataatataaaacccccaactcttttctggccctgttattgctaaaatggacaagttggtcaggcaccacctacggaccatagcaaataaatcactttggttcagtggtggggaggacattatgcaacacttcccagcacagccctggccaggatattttacggccaaggcacctcctccccagctagacagcctggctccttcacattcccctcaggagatagggtggaagctcacagctccactttgtaaggcatagagggcagctgaaagtcctgcttggcctctctgggcaaccacaggcgccaataaatcagccacaggcgattctctcattcccttcccggctgaaacaggagcaagatataatgcaaaacagcactgattggacttgagagataagcgatctaggcttaaattctactgcgaatgactgtattaccacagcccaggtaatgagcctgtttcctcaggcttgtaacatgaagacagtaccatctcctttttggtaaagacacaaagttcatctacgaaagcagctagtatgatacttggcccactgcaagtactcagtaaacagcggccaacttgagcagaatccatctctactacatgcaaataagacattcaaggtaggactg

SEQ ID NO: 60682 - DNA, 3515 bp, Homo sapiens
tggctggggggtgtaggcttttagttccaaaaatacaccataggcggcctacctcacctagaaataccatcaaacccacacagtggccatgcctgacttctccataacctgaatcaagccaagtatatataatgacctccgccggatacattctctacaggtgagtggggtaaactggcactgcggtcctggcatggtggagagtgcaatcaccaaggtgtctggagccttggagtcttagctatcaagaggtgtagctagctccagctacatcacgctcttcaggcctggtgtcttctctgtaaaacgagagggatgaaacagattttctataaggcacctctcggctctaaaatttaagattccaaagtgtactttacatacatgacagaatcttgtgagaggatcaacagctctgccaggacttgagtctcaagagaaagaatgccaaatttaatcccttggggtgatgcgggcgctaactgttgaaacatgctaggtgccgtcaggttccaggtactacgttgtgctatgcgctgcctccgcaactggtaacaactgattactccaaatactgagtgccagagaagacggtgataagatgggtcaagcttcaaaaagaaaaaccggatatgcttagaacaagataaacataatttgaagatagaaaagggggggatgtcttcttgccctagaaacgaggtaatcacaagctgggagtggaaacagtagccgcagcgtcctcccagcatctggaaagtcgcccgctcgtaagaggggtcggcgctacccgagggaggccgcaggcctactggggtttcctgctgggggtcgcacccggacccgcggccgggacggctctgcaccttcgcggcaccccgtgtgccaccctgaatcaggccccggcagccgctcctacgagcagcaaagggtggttctgggtattgtcggcccagcgctcactcgcggatgtattttcctcctgtgccctgcctgacatctcaatcggaccaaaaacacccctctccccagctacttgcatctgtcccgcgactggtgcagctgcaggccgccgccctgggtggctcgcggcaggagggactgagcccggggcagcccacaggggcaggaccgcgtcgcttacccagatgccgccgcggcggcaggccgactcctccgtgcaggaggggcgggctcccaagccgcgcactgcaagcagtggcgccggctcacgcacccctcggccgcctctcgcgcggcttcccgcgccggcagcccgcgatggccccacgtgaccgcgtgtctggtagcaggggaaagaggggcgccagggccggggtgtgcgtgcgtgcgtgcgtgcgtacgtgcgcgccctcccgcccgcccgcctcagtggccgggcgggggtcggcccgcgctctgagtgccgccgccacagttcgcagttgtgactctgtaggcggaagcatagggacaagcctgagcgtcacaggctccccacaaacaaccgcgtgacccggggactttccccagggtgtgcaaaagcacaggcaccccctcagttctggggtgaaggtgggggtggggaaggatgcgcccgcgtgttcgctggggaagggatgagggcgcggggccagggaggccgagccgcgggagcctgggtggagaggcggactgggcgaggtggggcatggcgggggaagtgactcagggccagaggcagcaggcccacggaaggtggggtcgggggggcgcggggactgggcgaccctgaaccgacggggcagggcgaggttgccggagcactcgaggcggaccgcgagtgacggcccagctgctgggcccaacgggcaggggtctgacatctggacggagtgggaaagcagcctcgcatcctgccctggggagtcgggaggagcccagttccatccagctgtgcaaacaggaggaggaggaggtcccaagcctacccttgagaggggcaagaggggtggtcaagccgccgccgccgcgacggcccccgcggtgcgggttgcgccagcctcctcggagctcgacgcagaaacttgttgcaacaaacaggcgaccgcgggtgcccctagcagccagcggcagagtgggtgggcgggcgagagggaggggaaggctggcggacgccgcagcgaactggtgggcagacccggagtcgccgcgtaagcggggccggctcagtgcggtgcggcaggcgcggctgtgcggcagcggaagtcctttgttgcagcacagtccctggcagagccagagcctctccgcgcagcccagcccgagcgccgagcgccgcgcgccgccgccactgcagctcgcggccccttcgccttcgcccgcctttcccgcggctgatttgccttaaactccctaaaatctccgcagctctggttcctgttgcggccggtaagtatttgccagttgtggggctatttgcgcaactttggcccaggccggagggcgacgggccgcgggcctggcggagtgcggggccggaggggcgccgatccgtgcggggagccggagcgcggcggacgcgctgcgaggacccggtgacgggcggctgccaggccgcctgcttgttgccggcgcgtcaggtcccgggcgtgcggcctccctgagtcggaggcgaagcccctacggagactagttcccaaattagttaccttcttttctttctttctctgcctttatttttttcgaggggggaggggaggtgtagacgggaggcgggagaacccggttgattgacgtgcctagagcccgcttctctcaacttacagctgcggctcggcggcgggtgggaggggaagtgtcccggagcccgaggctgcagacttgggcgcgctccgagggaggaggcgtaagatccgtgcaaattcttgttacgctgtttcccaccccctctcgccggcacacacgctttttgttcagtaaaaagtggaaggtctgagtttgggaattttaagtggaaaagatctgtttcttgggaagggagtgctttcgcttgcagcggtgggcgcttactagaagttcggtaaatgtgttggatgcagatcgggagtcgttactactaaagtatgtaggcagggtctgagctcagccaccccacccagtctccctttctacctaagcaacgcgtgtacatgatctgaagggttgacatgacattttctaaattgggcgaatcaggaagaggttgatgaaaatccttgacgttttctggggataggacatttgtgtgtgataacgttcttaagtcgaatttcagtgtggcagtgcacgcagattcttcattggtgttagtgtatttccatacggtatgtatcagtacaagaaatagtgttccctttgacactcgaacccaaggagtggtccgaggctttttgaggcaacgtaggatcaatgtctctgaagcagatttggtgaaggatgcaggtctcataatttacagagcaatcacagccttctttgaaacggagaaattagat

SEQ ID NO: 60683 - DNA, 2301 bp, Homo sapiens
atttatatgggagcctgcttctaaagattattacctggtgccagggtattttccagacctgtcctcacattcctgttaaacaggaggaagtgaatcgcgctccttttcatctaccttctcggagggtttatgcctccaatattaacctcagcacagccaaagaaaatcattccattccattgagcggagtcagaaacatgactaggtcacgatcacaaccccgtgtgtgccagggtgaccgagactgggtgactttatggtgtttcaacgtgtgggttttgactgattatattatgggttttccagtcaaaaactcaaagcagtggataaagcacttgcgacctaaaataagcaatggaatgaacaggaaggcgaaaccagagtttaaagcggcaggacaaacaggaaaaaggaagagtgaggcaggaagggtttaaatgcaggctcctcggaggacaagtcgccgccacacccctgtctgccgtcccgccagccgccctcacgcggcgcgggaaaacggtcggcctcgccctgggctcaggttctctccgcccgccaggcagtggggtttttttttgttttttttgagacggagtctcgctcagtcgcccaggctggagtgtagtggcgtgatctcggctcactgcaacctccacctcccgggttcaagcgattctcctgcctcagcctcccgagtagctgagactacaggcacgcgccaccacgcccagctaatttttgtatctttagtagagacgggctttcaccatgttggccaggatggtctcgatgtcttaacgtcgtgatccggccgcctcggcctcccaagtgctgggattacaggcgttagccactgcgcccggccccagccaggcagttttaatcgagcgctcacaaccactgagacgcagtgaagcacccaccataaaatcccaggaggccgaccgccggttcagactttttcttttctttaatccccgtccaagggatccgccctcaccccccaccccagccaccccaattccctattccctccccttggacggcgccggggaaaacaagctgctcgagctttatttcttcggtgcaaccaactcagaatgaattcctccgcccctgcgtgctcagtgagtcggcaccctagcagtgaactgcatttaaaacctcaggaattgagcgaactctcccagtggctctcctcaccgggatccccttccacgcctcctccccgtgccgcgcctcagtccgcactgctcattggccgcgtgccctgccaatccgatgcacgtcggctagggcaaagaccgcgaaaaagcgcgtacacctggctctgggagcgcgcgcctaacgccagccagcagcaggaggcgcgcgaggcaccacggcctggcggccgagagtcagggaggaacctcatttacataacggccgcccctctgtctcctggcgggggccggagtcccgcccctcgtccaacttgaaatctgttgggtcacgggccagtcactccgacctaggcaagcctgtggtggagctggaagagtttgtgagggcggtcccgggagcggattgggtctgggagttcccagaggcggctataagaaccgggaactgggcgcggggagctgagttgctggtagtgcccgtggtgcttggttcgaggtggccgttagttgactccgcggagttcatctccctggttttcccgtcctaacgtcgctcgcctttcagtcaggatgtctgcccgtggcccggctatcggcatcgacctgggcaccacctattcgtgcgtcggggtcttccaacatggcaaggtggagatcatcgccaacgaccagggcaatcgcaccacccccagctacgtggccttcacggacaccgagcgcctcatcggcgacgccgccaagaaccaggtggccatgaaccccaccaacaccatcttcgacgccaagaggctgattggacggaaattcgaggatgccacagtgcagtcggatatgaaacactggccgttccgggtggtgagcgagggaggcaagcccaaagtgcaagtagagtacaagggggagaccaagaccttcttcccagaggagatatcctccatggtcctcacgaagatgaaggagatcgcggaagcctacctggggggcaaggtgcacagcgcggtcataacggtcccggcctatttcaacgactcgcagcgccaggccaccaaggacgcaggcaccatcacggggctcaatgtgctgcgcatcatcaacgagcccacggcggcggccatcgcctacggcctggacaaga

SEQ ID NO: 60684 - DNA, 967 bp, Homo sapiens
ctgtctttacttttctaggagacaacatctaaaataaatagtacaataacctgtgtttaaagacttccagtacttcagtttatagttgccctggcttgctaccagattgtaattttttcactgctaggcagtaattaaaaggaacagcagcctaggagcagacttggggtagggccctctcagtaggttccagatatccaggccaaactttttgcttccaaagaacattgctgtccctcctgtatttagggtaaattcagctttggttgtcctccaggaactgaagccaaacagcagcatttcttcagacttggaaatgagttttgattgtttcttcataaaacggcataaagctcagataaccaactgcagttcttggaaataattaaaatgtgtactcagctcatcactcccatggtatctggaagccaggaaagtatatttatgggaaaagatgtttatataaatagcttcctcagtgacccacatgatagaattgagaaaaagcatcttgtgtttgatgaatgataccaaattaggtggagttgctaacatcccagacagtgagaactaaactcaatatgtccctttcagattggccttggcaaactaaaaaaacaaaacaggaaaagaaaaaagatccataccacaaattcaagatgaaaaatgacttataagagctactgtttaaaaaaatattatggagttttcaaagttagcagttgtatcacaagtacaaaatgactcagcaatagagaatcactaggaatgctggaatgttaatgaggaaaagataagccaacctcctgaatcctcttcccatgtatggcattggtcaggccctaactggagaacacccccatgccattttgaactttatcatttagaaagtctacccccgaaaataaagtgtatcccaaaaactataggtgacttaagagatggggtgagaggatctcttggagaa

SEQ ID NO: 60685 - DNA, 560 bp, Homo sapiens
tggctatcttggttttggtgtgttttggccagcttttttactgcaacctgttttatcagcaaagtctctatgacctgtattttgtgccgcccttttaccttatcctgtcatttagaatgtcttaaccgtctgggaatgcagcccagtaggtttcagcctcattttacccagctcctgttcagagttgctctggttcacaggcctctgacaggaccacaataggaaactcacttagctaaacatctgccaagacagtgagagagaaaagaggaggggagggagagggaaggtaagagaaagtgagaacaaggttctgtagagccaggaaaccaccccctgagcagctccctttctctgcaagacttgcagtggagggcatgaagcataaccagatgcagctcctctgtgaggagactcagggcctaggactgttccttggcgttcaaactgttgcaggattgtacctgagcctcagcccttgatagttttcatcagataccctcctggcctgatgtgaaaccaggcagcactccattcatacacaagtttcccctttgttc

SEQ ID NO: 60686 - DNA, 2139 bp, Homo sapiens
gccaacacggcaaaaccccgtctctactaaacaaaatacaaaaattagctgggcatgtttgtgggcacctgtaatctcagttactcagaaggctgaggcaggagaatcgtttgaacctgggaggtggaggttgcagtgagccaagatcctgccactgcactccagcctgggcgacagagtgagactctgtctcgaaaaaaaaaaaaaaaaaaaaaaaaaaaaaaaaaaaaagaagaggaggtagcgatgacccttgatggaaattcccttgaactggagagaatgattaactcaactctgcaccaaacaaacaagccaacaagcactgagactggtcagtgcttatcttggaatggtttgtcacgtttttgggaaaagcggtgaacacatctgtcgctcctctggctggtgagaagactgaactccatagtgatccccaaccatacagtcacctcgcactgcagcatcacaatggctcagcacaggggcctccactggcagaagaaagaatcccacaagagacctcctgctgtagccaaggaggggctaaggaaccctggaccaggggatatggaaaagtcagttgcctggaaagaggaaaacttggagtacagaagagaagttaaaagagaaagacagaaagcagcctacagccccaccaccttattttgaaggcccaggattgcagttcttatgggttgaattgtgtttcttccacagaggataggctggaatcctcaccaccagcacttcatgatgtgaccctatctggagacagggtctttttgtattgtttgtttttggagatagggttaaacaagttaaaatgagatcattagtgtgaactctaattgactatgactggtgtccttctaagaaggggaaattggccgggtgtggtggctcacacctataatcccagcactttgggaggctgaggtgggcggatcacttgaggtcaggagttcaagaccagactgaccaatatggtcaaactctctctttagtaaaaatacaaaaattagctgggcatggtggtgggcacctgtaatcccagctactcaggaggctgaggcaggagaatcacttgaacccgggaggcagaggttgcagtgagcccagattgtgccattgcactccagcctgggcgacaagagtgaaactttgtatcaaaaaaaaaaaagggtagggtggtgggggaatttgcacacagacatgtccacaggagaacaccacgtgcagatgggagtgatgttgccacacaccaaggaactagagccaaggaagagaggcttggaacagatccctcccgagcaccttccgagtgagtgagcatggccccgctgggaccttgagtgtggacttcctgtctctagaactgtgagacagtaaatgtctgttgtaagccacccagtttgtggtactttgttattgcagccctgggcagcttgtgcagcaactctctccccttatgttgcttttgaggcgatgacagcgttgtgtagttgaaactcctgctcctcccacggcaccggatcttcgaagaaccacctggccatccacaaaggatggctgacatcacctcagccccctggggaggatagcaaggcaggttcacagagaaaaccccgtcaggcatcctaaagggacactggtgaaatgtcacagcccctgtgtcatcgggggtggtggcagcacaggactgatagtttgcggtcagcagagaagatgtccctggtcaggaaagagcaattctctgctcacctcaaagggacaagggatgaggtgggaagggggaggctgccacacctgcgttacgtgaactgataacacctgggctccagagcgccccgacctaaaatgaccacagctgattgagaaagctgaggactgggctggagattatgcatctgcgcatgcttttttagttcattctgtgggagcaacttttggagaattggaacagatcgggggcgaatcaggggaaggcaactctgaggggaacgttcaggggaatttagaagaaggatgataatgtaggtgcagaagtcattgcagcccgccccttgaactcgtctcaggaaggtgtgcactggacgagtcaaacaaggtgctgcacttgagcctgagtctgggtgc

SEQ ID NO: 60687 - DNA, 1666 bp, Homo sapiens
tggctaatttgtaaattttttgtagggacagggtcttgcttgttgcccaggctggtctcaaacacctgggttcaaccaatccttccacctcgacctctcaaagtgttgggattacaggcgtaagtcaccgtgcctggactgtatattttgtgtgtgtgtgtgttctctgaacaagcttcttgaaagcaggatctgtgttttattcacccttatatccccaaagcctggcaatgcctgacttggagtaggcaggaattttgtcagtaatgtactgagcattcacaacatgtgtcagacactcttccagggctgatacgcatagtaactcttaattctcataatcacctaatgcggttggttatattatcatttccattttttagattacaaaatggggcatgaagaggttgagtaacttgctggaggttatgaagtaagagctgagatttagaccagggctgttttgttctagagcccacgaccatcctctaccacatctgcagtgtttgtagaactgaattaaagatgagtgagtagatctgtcaaacttgtgccagggaaagcccataagcttacaccagacacagctagaaagacattgaggaagtcctggaaaccaccagtgtgtttttaggtgactcatggaggcaagagagcaagttgcaatgtctccgagggtagttggtttaggaaaggatgaaatatgtcagaaaaatctatgtacataaataaaaccaagcagctgtgttcacattaagatccaaacggaaacccagctgaagtaggagccgttggatctgtcccaccaacctgttgtgagcatgagctaggtaaatatttggctgatacaaggtccatcacaggttaatagctctggtcattaccaagcctggttatgctggaattgcatgtagtctcaactggacactcatgtttaagcacaatttaaaaaatcaccaagggaaaccaggaagcaacacttctatttgggaagtcaactaatggaaagttttctaaaataagtaacacagcttcagcttcagcaatgggatttgtgacatccctcccgtgtcacagttaatgtctaccttgtttaataccacataatagtacttttagccttcagaaccttgaaactgcataactactggaacagtttaaaaagaatgagaacataatgatttcatacagcccatacgtttcccaaataagtaaagggaagctgacttacggcaatgagaggcggtgtggtaacccggagaaactaggctgtcggtgggacacatgggtgtgaatcagctctgctacttacatgctctgtgtgtctccgcaggacacttaacctctttgagccttactttcgtcatctggaaatcaagagggttgccctagataattctaaggaccggcccagctgaaggtttgtgagtgcatgagaagcctgcggtgggtaaggttatggtgtcagcttccacgtggtctgcgtatacagtgaagcccacgtgccctgctccatttggagaggcagcttggccaaggtgtagaattggaatcatctgcattggaagctgccttttgaaagtgctagcagtgtgccccaagcgcttgttttctgatggagctgatctgccctgcccaagcactaactgggaagctcttaccctta

SEQ ID NO: 60688 - DNA, 745 bp, Homo sapiens
aaaaatacaaaaaattaggcagacgtagtggcgtctgcttgtagaaaaaaaaatagaatagaggttaccatgggctggaggaagggccaaaagagaagttattatttaatgggtacagaatttttgttaaaaataatgaaaaaggttttggtatacatagtggtgatggttatacaacattgtgaatgtatttaatgccattgaattgtgaaggttaaaatgataaatattatgtatgttaccacaataaaacatttaagtaggctgttttttgtgcttctgtcgaaagcttttgtgtgtgtgtgtaaattggctctctgtaatgtgaaagagaaaggtgagaaaatgagcaaggaaatagttgcttaataacgaaatctgactggaaatcatgaagggctgaattgcacgtgtttgcatctgtgtgtcagcagttgggcgagtttgggaagactccaggaggctttggatttatgaaagaggcagagacagccagaaaggcaagagggaaccaaataccaaatgcagggagtaacttttcccctaacagattttctatctccaggctcctgaaattaatcagaaactcagtttgctcctgagaggctgtggctctatgtttttgtgtggttttttttttttttgagacagagtctcactctgtcgcccaggctggagtacagtggcgccatcttggctcctccgctagcgccccccgcccccgcacccctcaactcccgccccc

SEQ ID NO: 60689 - DNA, 6259 bp, Homo sapiens
tgttttgttttaaatgatacctctagaaatcgtttgctgtacacctggataacaaatataccccgtggttctaatatcagcgtcctattcctcctcccaaggaactagtgatagcgcctaaccagtgggcgttgttcctcttccggagccccactctgggcttccctcctccgggcttgttgttcttcaggatctttactgatgaattattatgggtttttggatttatgctcttgctcaaaatgtattgaatgtctctgtcccccatcctcaccccttgccccccagtttccaggtgtgtacctttccatgcatacacggtcatatacagagacataaagacaaacggttctctttgttttataaaaacgggtcctctatcatccaggtttctgtgttttatttttcctatttaacagttccttgtggagttgccttcacgttgtctcctttatctctttcccgtcagcttctcagaggtctgcatttaccactgtaaagcgtcacagggaccgagttatggtgaggaattcaagacatgcctttctgacttggaaaagcggacacggccggctctggtaggattaggatccccagatcgatcccggctggtcactcacttgggaaagccctcagcccccttcgcagggcccggtgttccctgtccatacaaggggtacgttctggcagtccatgctgtctcgggaggcggtgatagcaggtctgtgacaccagggtgaccccaccacgtgcgtcttggtatcctagagcatctaggctgcccgggggtgcgcgctcatcaccctgcgggcgttaatcgttaaccgcgcccaggcctcgccgccgccgcagccttaccccggctctggctcgccgcgccgcgaaggttgccccggcccccgcagagccgccaattgctggactgcagccgcgagctggagtctccacccacaggaaaaattcctggcccgcccctccctcgctccctcgctccctcgctccctcgctccctcgctccctcgctccctcgctccctcctgccctcccgctgcagctccggctccgctcgacttcctgccgggcgctggcaagccgcgcgctgcctggggtctccgggggccgcgcttgcagctggccgagtccgggccagctgaggggctggcggtgggcgggagcggtcggcggcctcagccccttcagagagcgactttcaaactcgcgcccgcgtcgcggcagcacctgggcagccccgcacgccgtgcgcgtcccgagcccgcggggcagctaccgctcggtgagtgtcccctgattctcctctctcccctcttatctccctgcattaggctgagcggcggtgccggcagtcacgctggggccccagtcccttcgcggcccccgtgccagccccctgcggggtgaggaccggggcgaccgaggagggcctggaactgtgttggctgcttcccgggccaccctgccgcagagtgcgcgagcgcaggagggtcgtatggggagactttttctgtctttttttccctccactccggaaacaaaaggggcaaatgcgccgggcggctccagagaggctcagtttgaaatccaggaagcccgcgaggccgcgcgcgcccgagggctggtgtttggctggagctgtgggcctggcgggtggacccttctgcgcgaggacccgagcctcggctcctgccagccccggaggcgcctgcagcctgttccgggttggcgccgcacggtgctcgctgttgggaatctcggctacctgtccggcagggaggagagtgggggccagaagcggggagcggaaagcccggccaccagctgcctcgacctcgtccactcctgaagtcggtttggttcttcgcacccctacacccagccctttggtttggaaagccagtataaggcgtgcaagcttaaatttttaaggcgttaaatagctactttgactcttcggggcgcctttggaacacaaaaggaagaacggaggggagaatggaatggttggaggctggagaggtgtggcttttggggagggtgttgttagaggccgcgaaagagtttgatcctcgaggtcactcgctaatctgttggcatatgtaggtgcctgtcccctgctctgggggccccagcaggagacccacactgcgttcaccttacggggaaccctggagtgggggttcccagagtctccccagccgtgcctctgcacgcagcccagtcacatggcccttgctcaagaaataataagcagggagggcaatgacagtccggagcgggggagggcctccccgttgagcacatcggccacctcgccttcagcagtgtggttttccgggccatcctttgttggacaaggatgggatcctgagtgattaaaccccagctgttccccaggaggaaactagggagtgagaaccaaaagtgtacatttatctctctgttatacatctctcccctgtggttccgggctggccccctggatgcaatggcctcacttctcctttcgacacctgctgtcctccactcccttcctggaagataggacaacccattagctccctgggtaacttgccctggggatggggcaggaagttgggggaagaggtacccagaggccaagtcctagctgctgagggagtgatttgttgaagagctgctttgggggcttttctactgccttttattagaagtggcatggcaggggaagtggaaagagcactggcctgatagtccagcacgggtttatgcctgagttttagacctggctcttctgcatagcatggaagattggtagagttgaagagtgcgagtcacttgggctggggggccccttggattagcctacttcatttactcgtgaaggcagcagagcccagaggggtgaggtgatttcagccttagaccctattggccaagtagaaaccagaggtcagatgtcctcattgtctgatctgtgttttctccaacatgatctggccaattcacttatcttttctgactcagtttccacataaataaagtgggattacttgcctgctcttcctcataggagctgtggtgaggatcaaaggaagcctcatttgtggaaagtgctccataaactcctgttaaaactaaagggctcacagtggctcgggagggagtctcccaagggttttacaatttgctggctatgtcccacgtgtgtgccacaaggagacgttagataccaggagccattgttggatgtttaaaacaccctggtcttaatatctcagccccagagtaaacatttgccttaccaaatccgcagctatcccacggtcactgtttacgctggaagaggccaaaggccacggcctgcgggatgaccagggctggagggggaaggctcctctgttgcagaggtatgccttgcccgttctcttctcccagctcccagaaccttgtgaaggctccagctgtaagccaggggtgctgccacaagcccaggccgccctggccttggagggttaaaagtgaagccctctggctattctctgttgtgttgggggttgcagggactctgggagggtgttgcttttgcagctgcactgagggctgtcttcagctcctcatctgtgccccctcccccatctcaggccgcccctctggcccaggccactgctctgtcccgcctctctggccagctgcaagtccacaggcctttgttccgtggctgcaaacccgccctactccatcctccctcctcagcagaagccctccagcgggggccctggcagctggaaatcacaactgccaggaggaaggggctactggagcccccagcggacctggcagatcctcatttcctcttgtcaagctcatctgggccccacaactcacctctggccagattcccacaccgtcttttctcatctctcctttcttctgctgaatggacggatcaccttttcctcccagtactcatgccccttagttctattttaaagtactctattcattcatttaatagttaaggagttagcacctactatgtatgaatgccagatgcagaagacacagcagtgaagaaaatatacaataattattgacccagtggagctgactttagcagaagtgacaataaacaagattgaaatagcaagtgtgttagtgataaacagaaataaaaaatatgatagggaaggtaggtgtgaattgtcatggaaggggtgaggtgacagtttagatagggtggccagggaggcttccaggaggaaggtacttttgaggtgatgcctgaaggcggtatttttcttcatcgctgccttttctaacttgaagcccagttcatcccactgtggcatcgaggaacagagtttggagttggacacaccttggtttcaaatccctggcttgacagctcactagccctgtggactttgatgtggtgctaaattcctttgagctgtgtttcttacccaacgtggagttagtcatcatacttaccacatgcggcatcatggcaatgtacagtgagataacgtatgttgaatgcttagcaaagactatagagaggttcgataaactatttctccaaccaaattctgcaggggtagcatgagatatttaatgtcattgctaaggactgtaggtgcaaagcttttcattttagatattgggcaggagtggggaattagagggaggggaaaatagaaaaccttggcaaaaactttctggttagggaggctttcctgccctaccctagattgcagatggctgaggacgtgggactcccaggtatgtcctatgcccacccccatcctacagataggatgacaggggcagccctgaccacccccctcttgctctggaattccccctgcttccagccagactcaatgaatcacaccttctccctgacctcccgactctgcctcacagctgggaaggctgtccacccctcccccagcctccggcaggtaaattatgcctggaggtcggaagcggagtggggcggggacaaggggtagggaaagtgagggagggggcagatggtgggtggagctgtcctaggaaagcccagaagggtggcaggaggattctggtggaggcttcgagatggctcggaagactttgaataagggttcgccagggaccagaatttaaagtaacagagtgacagacacaatgagaactcagggtcggctgcctaactcctagccgcttctacccagctgatctgctgagtctccgaccctctctgctggaaccacgggcctacaaagggaggggtttaatctaaagtaccgctgtcaaagtttgtggtgagtggcttcctggagaccctgccctagttcaggaagtgagagatgggcagtggaggatgaggcctagggaagtggtcatggccagttccacccccccgccccaccccccaagtatgtcgctgcacactcggcagccaggcaggccctgtgatgaaggaacttcctgggactgccagttggtgcctggagacgggtaaaagctagatgatctgatattagaggaagttgcaaagagggccctgaacagccccaagcatgttagtgttgggtgacctgaagtcaggagaaagaaaactggacaacgtggactaaactgatcagcagggggcccatctagagctgctggtagcccctctgtctgtcagctgcctggggataaaggttggccatgctaactgggttgctatctggggacaggaatggtgctggactcatctttgtgcccagacagcattgagaatggtacaaagtgtgatcaacagggagtgatgggcttcagccgtggtcccacccttagagtaatctgggcttgtggtctcatttgctacagcttttgttccatgggattagggagaagaaggtagtgttagggtcgagtccagccctaggtgggctgttgccatctgggaatgcaagcactagggagaagagggctttatacagttctggcggctggcctttggggagggagccctacgtaagctcaaggaatggatttttaaggacttgcactctctttcatgctgagcagacttgggctgaacacaacccaaatagggttctcgtgggcacagtggtagctgtgcatgcagccttttgtgaaacacagtttgagggtcctagaagttgatctgattattgccagaatcggagctgggactggaagggaaagatgcaggaggaatgaagtcgattttaccttgggaacagggtcccaaaaggagagatgg

SEQ ID NO: 60690 - DNA, 837 bp, Homo sapiens
agcctgggcgacaagagcagaactctgtctcaaaagaaattaaaaaaataaaatgaaagaggataaagaaacaagcatagagggggaaaaatgactacagtgcagagttggcagtgagagcagactgagataaaaactccaggaaaagcaagtgctagcagaagtgccggggatctttttttttttggagggagggggtgtggagggaatgacttggcacaccttgggtgtctggggatcatcagtttgataatttatgctttgctggtaattgtgacccagagtcatcaagaaaaggttaaattatgttcccttgactctgtttaggaaggcagggaagtgtgtaacggatttttaaaagattcccagtcaggttggctaaaattttaagtgttgatacttaggtaataatatcactaatcctttaaataagaccaagtaggtggtttacccacttcacccaccccagatgaggaaaccaagtccccacgagttgggtaacttgctcaggatcgctcagctaatacttggcagggatggggtttgaacttttggagcccgctcttagccctaccccacactgttttgaaactctgcatgctcttgcaaatgctgctttttggatgccctctctctacagaggttccagctggccaaagtttgactgtgttacagtagagcctggatgagtccaatcttaattcggctccacccaagcagattgccagttatcccaaagggtgtttgcctcagttgaaacaagaatgctttttttttgtttttttttttttgagacggagtctcactctgttgcccaggctggagtgcagtggcatg

SEQ ID NO: 60691 - DNA, 4970 bp, Homo sapiens
agccttgcctccaagccaccattctgatgggcttgggaagggaaagtgagaactgggggaaggaaaaaacccttgggtagtaagatgcacacaaactcctcccccagcccagttgagagctgctggcctgaaattcctctgagagatttcttccatttaagaactggcatctcagttttctagggtaggtgttctcttcctgctcctagaggcagttaatttaaatgtagtttcatctcttgacgttcatattgggtctcatttcttccccctttgcaagggttggaatgggtctcattctttctagctaatgttccctcgatctctcgctcctcctcgaagctgtctctgaatagccagcaccttcctgggcttctgcattcttcttgaacactccctggctctagggacacctgcagccacagcccatatcatggtttggacctttttagggcacattctgacacctcgtctcatggagccccatttccacgtgtcttggtagttgttcttccagacctggcttggatctgtcctttcccacaaagccacgtggattccttccatctgtccttggcctgccttgcagcctggcctcttgttgccagttgcccggggcgtgggggtggtctgggtcctctcgggactcagctgctctcttggcagcaaatgcactcagatctcttcacctggcaaagcttactcgtcatttatgactcagctaagatgtcaccttctcctagaaagcttcctggtcccctaagtagcactagctactccttctgttagcacagtttatttattcatgcttttgtactaggactcaaggcattgttttgtgaatactctgtttatatggccatttttccttctgaagttcaagttcttcaaagacagggacaatgtctttttcatgtcatatccccaggccctggcattcatgttcaggagtgttgaatgaattcccaaactggaggcagtcttgaactcccatactgctcatgcctggattctctccctccttttcttacagatgccttgtcttgttttgccttatagcatataagctctgaagagtggagtctgtgtgtgacttgtcctaactgcagggctgccatgatgtctttgtgcacagtaggtgcttggtaaacagcttaggttggaagattactagggttatcttcaaatcagagagagattgaggcacaaagagcccgctgacttgctcctgatcatacagtggctaggcagagccagggtagtttggaggagtgctggctgtagtccctgggctctttcatacacattcttctgcttttcctttttttgatattcctcgtgacttaggaatgggtccgcactagagcctttcccagtaccttgctgttttgtcttatgccctggccctcccagatgtctaccctgcagatgggtttaaaacccacggaccagtgtcaaggatggtttttgttaatcacttgtgcttttgctctctcaagttgccttaacttctgctcttgctcaggcctgcggtgccccctggccctgtttctctccagctcccagtagtacatgccgtctctccgtgtggatcccagaggaatgcgcctctgggatctgctatagctgcgggattcggactcacttaatacttcatttcttggcttgacctcctgttgggtatgggtgtcagactacttttcctttccagctgaactgctgtgtgtctgcccttagaagatcatggtctatatggatgttgagatcatagaagatggataaacacacgggtggtgggggaaggttaggtcatgctggttcaccaagtttaacttgtatcattattattaatttgagatgtgggtcaaacatggtaggtacaaggcagaaaaatctcattgtcttgatgcttgcagaacaaataagtgatttatccgttatcatcatcaccaccaccaccattctcggtgggcttactgtgtgtcagatgtacgggttacttacttgtgtcatctcaaccttggagacaacccagtcaggttggcagtattactgtgcctattttcctcatgaggaacttgatgcttggtgaggtgaagtgacttgcccaaggccacatacagccaggaaaagtggagggcctggaagtcaaatggggtctgcctgactccacagcctgtggatgagtttactgcatttgacctctgtgggctctactgcatctgtgcatattctcttttctgccgaggaagcagagggacccagtgggggcccctccacacccacttggttcccaccgagattctccagtgcctttgaacctgaggcagtagtaaaatgcagcttcctcctacccacccaccccgctccagcctagaggcctcaaaacaagcagcccctgaaatggggatgaggccggaaagatggcgaatttgcagggctgggttcttgaactttgctggtaagtagcagcggtcctgtgaacctttttgacctcaagatgagagaggtggggcctctgggaactttggatctgtctgtgatttccagggggtaatttctagtaacaccttttagggctttctttggctcttccggttttggggcacattgcatagtgacaagttgtgctggcagccaagttacctctacactggctgtgaacaagagcaatttataataaacaatacttgcccccatttggctttagcatatgtttacatgaaacttcctggcagattgcttttcctgggacatttgcagggagaccagatcatcacagccccttttctaaacttggctactttccccttcctcccagtctcttgtggctggtcacctagtatgtagcccagcggggcagctatgccgtgctctagctccctgtctggggccaagtaggatgggactaccggggtgaatgagcagtcatcaatcctggcgcttcttggttgatcggaaacttgctggcagtgactaatgtggagactcattaggctaggaggaactggctttggtcttgacctcacccactgtttacctttctcttgactgtgtgagtggtgagctcatcccggcgccatctcagagtccttccagcaggcatttattgaacacctaatgtgccttgctctctggggctgaagggaaggtatgggaaagaaggcccagcccactgggttttactgtattgtccagaagagatgcatgtacatatcaagccccaagaccaatgctttaagtgatagggtgtttcgagttcagaggagtatattacttccctattgccactgtaacaaattctgcaatcttagtggcttaaatcaacacacatttgttgtcttaaagttctggaggtaagaagtcagactgggtttgcatggctgggttccttctgcaggatccagggcagaatttgtttccttgctcttcctagcttcccaggctgcctgtatccttggcttgtggccccttcctccatcttcaaagccagcagtgtagcatcttccagttcccttctctctgtccctctgcttttattgtcaaacttctgtctgactctgactcctgccggattcctcttacgaggagccttatgatcacatcaggcccaccgggctaatccaggataatcttccatcttaaaatccttgatttgatcacatctgccttctatgtgtcccttttgccatataaggtgacattcataggttgagggtcaggctgtagatatccttgggtgggggcattattcagcttacactagtgtgtatgttgggaaatggttgaggaggcctttctctgaaggagatgattgctaaatgtgtataggcagagggtctggggacacattccaggtttgggagacaacatgggcacatgttgggtaggtggggacaggggggtgtagatgaacagccctccctctgagctaggtgcctggctttcctttccttccaaggtcaggccgagggaactttctggacttcagttgcaggcccaggctttctcctggagtccatgtgggagggctcccctggcaacacaatccttttccttcctggcagctgtggtcctgctgcaagggacccagccagactacatgggccctgctgctcttaggtggtgggaaaatgcattcctgagggaaaatgaatttgaaccagctgggctgggtttgggtggcccagaaaccttggtcacactgttggcacagcctctgcaggcagtcacgttgctcacatgcacacaaagtcactccccggggagccttctctcgcgctttattacggtgctcagggctgctgaatctccaggagggatgggaggggtcagagtgaggaaactgctgggaaagggggcaagggtcccctaggagggggtcctcccctcccccaggagagcccctagggtgcagggagcagtgggaacacacaggcaagagctgggcctctggggacagtttgggagccgggtggcccagagtggtgccgagctgtgggtaagagcacagccgagggatttcaccatcttagttgagatcttagttgagagagatctctctctggaagttcacattgctcccacactgttttttctggaaaagttatagcttttctctattgcttccttctggcaccctttttgaagggattccgaaagtgccgtcttggggattgtttgggggaaggacaaaagccgctgggccaccctggctttgagagcccttggaatgtttagcagatgatgtagttgagggatgaaggccacacaggagggctgcgccatcgccgttcctgagtgaggactttctttcttcctttctttttttgtttttgagatggagtttcgctctcattgcctaggctggagtgcagtggtgcgatctcagctcactgcaacctcctgggttcaagcaattctcctgcctcagcctcgcgagtagctgggattacaggtgcatgccacca

SEQ ID NO: 60692 - DNA, 3829 bp, Homo sapiens
ctcctgacctcaagtgatctgcccccctctgcctcccacagtgctgggattacaggcgtgagccatcatgcctggccgagaaagcgagttttctagaagactgattcactgattgatgactgactggattgattcatgttgcaagatggaagaggtcatggctggggcatacttaagagaactggagacccgtatgtggtaggatggggtaggcgtgggtacctggtttgagggtttggttgctgcctgcctcatcacctccttctctggcctcctacttccctagcagacagggtcttccgagatgtgtttgaagacctgagttctcatcctggcttgggggaatcttatagtatggagtggtgctcttcaggtaggaaggaaaggctgaccccgcccggggagcaccaggggaggcactttaactgtctctgtgggagtctgagctacacacacataatggttccaatccggtgtcttagggccagaatgcactccagctgagtgcagtgcactcagaatgcactctgagagcgatgcctcttatccgtcaccatcaaacggtgcctcctgacagtctgcactagtgtcctgctttgtactcagtgcctcatttgttcttcagccctccctttcttgggctcttggctcttttccagcaagtcctcctgcccaagagagagagagccttgtgatcgtgggtctcctggtcactacagggcttctctcgtcatccaagaagtttatagtccaatcctggtgacctcatactttctccctcttcctttctgcttacccatgacctgtgatcctttgaccgggaatctgtattttaccatattgttccagccagagaatgaatggccaaaggtcacatagtagcaggcccaaaaactgccctaaggaatcttgactcagtccttccgagtgtcatgtcataagccccaatccttcaggtcttcatatgtcccctgcagcttatgctgaagcaaagccatggcagccagggctgtgaccaatcctttgcttgtggccctgtctggtgtgtagtccattagggaggcagtgggcaggagagcatgaactctggagcctcagtgcctgagttcaagtccaggctctaccacttactacttctgtggcctcagtacctgcatgtataaaatgagggtagtaatagaacctaccttctggagttgttgcaaggggttaggcactttaatatatacagagcgctcagagcatttcagcagttggctgttatgctttgttttagccttaggagataggagcttagtttgcagacaggtagcctatgatcaatcagagagaaaacttctgtaagtagaaaagacatattagtttctgggtttgaagtgtgcttatgttgctatcctcttacagtgggatccccagagagggaccctcaaaaggtcccttttagagacaaatctccctaatggtgtgtgtgttggggtaggggtggggctgtgagtaatcttttgctttaagactgtgaactggctggctgtgaaatccatttgggagtggggccgtttccatttagcttccccagagaagctgactgaccccagatgtgatctgggaaaggtcttaggctgtaaatccctgcccctttgttccctgctgggatggtggtggtgggtgggtggggtgcctaactgcagtgcactttgaaggacatcagagtgccacagggctgggggttaagggctggggtggagcttgggtttttatctgtcagtgctggaatgacatggtgttgccctgcctgctggttctgtaaaaggcatagctgattaattgtaaaggcccttttgaggagggaggaaaaagcaacagccctacaattcccagggggctctcttctgagcagctcaaagagctttaccaaaatgatcctgctaattagccctctgggcattgcactgggctgcggaggggagcactgggctgccactgagtccccatctgcaagttgagaggctcatacagagctccttggaggtgaccccctccagtgagacacagtgacaaagtgctgtgctccagagcatcccggccaggttagcggcaggtggtaagtaggtcttgaggcgcttgatctgtacctcagtaaaagcatcagtttgttcaccattgttgttcatttgttaaattggcccttaagacccctgctttttagtaactaatggtgtagggcagagggtctcaaactagtcacactgtctcaggccagtgctacagtaggagaaacctgggaggtagtaagagaacacagaaagagttccccaggtttgggggatattggaaggttcctggagggggcgatgtctaattggagacctaaagattggatgtaaattacataggttgggggatggtactgtatggggtggatggggacgagataacgccaaggcagagagaacatttgcaaaagccggagacccaggggtgttggtttccaggttgaggcataggcacagaaaaccaggggtcagtgtcaagggttcccagagtaatggcagcttctagattcttctccttgtagctcaagtctctgccctttagtcatgtctggggtctagtcacttctgagccctagagctaggggtagaagactcgggtcagtaggggtgagagggatgcccaggaacttactgttttcctgtgaaatagcaatgaaatgtgtactctgcaaagtggcattggtgagctctaaggggtgggcatgggtgttgcatgggtgtccctgtccttcccaaaggctgcagcctgaagtagtctggccactccacccttccatcccccggctgctccaggtgggcctgcctgtgagccacaccatctgctttgggaataaagtccacctgaggctctgtttgcctcacctgggtgcagtttactgctttctctgctgcccccgcccagctgtgccaaggggagcttacagagactcactgatggcttagccctggggaatttcctggggcctgggatgagtcagaggcagcctgtaccaggtgctggggtggggctgcggagtcgggggataatgctggctcagccagtcagtatccagaaagtttcaggtttgtggtgaagccgccggtgcccctgaggttttgcagtcttagggagaatattacccctgttatgtgtcttgtcttaacattgtaagaaccagatctttgcccatccctgtacagtgaccccagcacaggccacagacaggggggcacttgggaagttcttcttcacaactgccattattatcaccatattgatggtgtatggagcacgtaccctatgccaggcatcatgctcagagctttacgaacagcaggtggcttcatctgggaggacacagccatggggtaggctgtatccatcctcattttacaggtgaggagctgaggctctgagggactaagtactgtgccccagcagtggggctgggctgtgaattccttagagggtacctggaccactgtgctggcaggtggacttgggcaccctcatcagtgctcatagagtctgagaacagggcccttcttgggattcagttttgttttgttaattgtgttaaatgtaaatacacataacataaaatttaccatcttcaccattttaagtgtacagttcagtgacagtaggtacattcatatcattgtgcaatgtcatcactgtctatccacagaaccttttcatcttctaaaactgaactctggatgcactaaataataccttcccaccccacctgcccccacccctggcaaccgtccctctgttctgtttctgtggg

SEQ ID NO: 60693 - DNA, 1264 bp, Homo sapiens
gtgagaacttcgctcagcccaagatccctttcccttcccgtcacatctgttagcgcacaagatttcttcgtctgtctccaaaggtttctgaagccccaccctttgcccacgcacggtgccaaggagactgtgccctgccttgacaacagttgctaaggggcggagacttcggctcggttcccgagacggaatacccaggagtcgagtacttgggcgcatgcggcaaccgtatctcagttctcgcgaggtttcgtcttcccggaagcgttggaggacattccctgttgactgcgtcgcgatgtgtggcgactgtgtggagaaggaatatcccaaccgggtgagcgactgggcgctcccttggcccgcgggcggcccccgaggtgtctcatatccaaggctggccttcccagagaggccgtacgtggggcggactcggccgcactgccggtcccggtgacccagtagcggtatttaggcacaccagggatggcctgtggcggtctgcacctctggtacccgccctggcggctgacctcagttgtagtggccgttctcttgagctccaaggagcaacagaggaaccccaccaccaccacaacccccgtcgacaaccgagggactcccccacccccacttccggtctcatcctcaagctcgatttgatgaagtacaattttcttaccgaattctagcgctggaggggacctctgtggtcatctgttctaacacttttgcagatgaagaaaccgatgcccagagaggggaaatcacttgcccaagttcacattctagttgcatggatgagagccaggactagaatttaggtttcctgcctgttaccgccttctgaatctcagttactttcaggttcaggagtttgcaaagcttgtctattctcattcattcaaggcatccttgttgaacatttatatatgtgtagttagattactttgctaggccagaaagggattatttctcctctctttgagacagggtgctgctgttgcccaggctggtctcaaattcctgggatcaagtgatcctcccgccttggcctccgaaagtgctgggattactggcatgagccaccacgtccagctggattatttgtttcagagaagaaattaaaaggcacctttggtgctgcctaacagcttacagttttggggagtatgtgactaacaaaaaatgagtagctcagttcagaaatgctattcaagtttagggaaaggggagggcaataggggatagtgctgttctcccc

SEQ ID NO: 60694 - DNA, 2227 bp, Homo sapiens
tgtttccaacacccgagatagctggctctgttactggatgtaacaacaggctatggtactgtcaaggtgatgactagcatccaagaagaattctctattttgtcaggaaagcaatttgtctgcagttactgctctaaaatcagtacatggtcctgccccataataattcataccccagctgttgactttaagagcaggaatctgaaaggcttgaggtttcaagagtgaaggtaagggtagccttaagttagcagaaggccctgcagaaaggtgtcaggggattcccactgtaatactcaggttacccttttgaaataaagcactgttgttgacaggtttagttgaaggtcagaaagtggggatcctaaacatctattccacattcactctcatatgatgcaagtgcttagaaaatggttagggtaagcagaacaattaaaggaaaaacattttcccttcagcattgggcttctcaagcagtgtgtccagtttggaaaactgtcccttcagggtttcagtgaatagaagtgaaaatattccatctagtggtcaaagaagggaagatgaaatgagaagtttccaggatgaggtctgtggggcaaggtgacaggcagtggcctctcagcaggtatcttttccagaacatgatagaacctgaccttggcggtggtgatatgttttgattatgtctgcactggatgaggaattggggacaccatccttgcaaggcctctgagcaaaactgtcctcacagtgaggaataatgatgttgcaaatggcagattataaacagcctgactctgaagggaggctctctcccatccccaaccccttccttcttacagaggaagaaatgagtccagtcattcctgcctctatttgtctggagcctgaatttgtgaatatgtgattttgagaagaatgagggtgtaatgtgaactttatttatttattttgagacggagtctcactctgtcgcccaggctggagtgtagtggcgccgccatcttggctcactgcagcctccacctcccgggttcaaatgagtctctcacctcagcctcctgagtagctgggattacaggcgtgcgccaccacacctggctaattttttgtatttttagtacagacagagtttcatcatgttggccaggctggtctcgaactcctgacctcaagtgatccgcctgtctcggcctctcaaagtgctgggattataggtgtgagccaccacacccgggccatgaactttaaaaaggagggagaatcagtctagcaaaggatcaaacacccgagatgtttgatgatcaggaaaaagataaagtgctgtttgtgttctcagtaactacaccctctatgcccttgctattggtaaacattaactaagctgactgcccaggaatttcccaaggcacaagtcagatctagttggcccagtacccacagtgctattgatgcttcctgactgtaatcctcctaacagcctcccaatatccccaaccaaagggctcattgtcttttcctcctctacctcccattatcactttctctttttccccagttctgaagaagagctgtaaaggaataatataattcacatttcccgtaactgcacctgccactgcagaccttggccagcgcttgctttcctgtcagtaattagggcatcccttgatccgtcagatcctcccctcccaaagctttgtgtgctagcagctcctctatcccacctgcagtttgtagcttccctccgccctctgtcaaagaacacacacacaggctggccgtttccacacctgccctttattggtctcttctagcagagtggctccaggcccttcacgcctctcagacaccacccatgagggtttaggaaggtgccatcattctgtgaaggcccagagcttacccaagtcttggagcccaagttgaatcaccaaccagagggttgggagaggaaaaggaaacaggcagaggggaaaggcaaggctctgcagtgaaggggactgatatcaagggaatgctgaggtccagcagtgtctcctgaaggcatgctgcatcctaaggctcctcaggactggatggagtaggagatctgtgtgttgagcagttcacatctatatggcaactttaaggaggcgcttgatgtcaggctcaatgttgatggttgggaaggtgcggctgtagcgtcggaagggctctccctccggccctatgaggaacttct

SEQ ID NO: 60695 - DNA, 1182 bp, Homo sapiens
cctatgagctaagtggtattatccccaatttacagatgaggaaactaaaccgaaaaatgaagcgccctttccgagggcacagagccattaaatagcaaaaccaagtccagctagagctaaggtctcttgagtctgtccaattcttgtttgattcctggcctctactttctccactcatttattcaacaaatatttaatgagtgctttctgtgccctaggcactgaggacacagtggagagaaacacagacctggaaccagccctcatggagtaatatagtagaaagacagtaaactataaaaatcacacagcctcagtgtttaatcttaaaaaatatataccttctcttggtatgtcacatgcacctaaagacctagcttaacaaaacataccccattattccagacactccaaaacatggtcattcagcctctccttttatcccacctgagctacaccaacccaacacttttggtgcattacaaggagggacccctcacctgatgtccaaattggttgcaagggaagccaaggaccaccaggcgcctgggaaagcggcattgcagctcgttgagctgggtgaagtcccgggtggttgtgcctcagagcgaagccacattctcaatcagcacggccctgccccggaacgtattgaaatctaccttctccccatccaggctgatggcactgaggtcatagaaggacttggcaatgaaagccatggtgaagcgcagagtgagccccgcagagaggcctgagcccacttatgagcctattagaggggtggggaggaaggaggagccaggaaggaggacagaaaggatctaacaatggagctttgagcatccccaggatgacttagcaaaaacaggtccccacctgtaagtgctgtttgaacaaggaggttgctcctcctattaacagactgaacaaggccgcctccccgccccaccctgctgcaacctgggaagggccaatttgatatctatgagcagaggtaaataattcactgcttacaggaaaccagagccctaaaggtcgaatggagaggaaaaaaagggagggagggatgcaggattgactcctacttgccccatcaagttgttctcatttgacacagacgtttattgaatgcctgctgagtgtcaatctctgaattgtacagtgagagggcagggtctg

SEQ ID NO: 60696 - DNA, 846 bp, Homo sapiens
cgggatggtgagacagtgcttgcggcacatcgtgggggtcgtagcaggcctgtggctggggaaacaggctgaagaagaccactccagggtggacgggctggggacaggggctgcttgagatgacagcagagccgctctcagggccaggcagggggagtagtggctactgatactcaatagggtcatcacacgagaggacagcagcagggcaaagccccggctcccctgtctgcccacgggcctcctgagggaagaggggtgtcgtgtggggtgccccacacaggactcagcaccagcaggttttcgaagagttcgctgggccctcgggtttgccctcctcctcctccagctctgccagtgccaactcattgctggcacgcatccggaggccttccagctccttcctatgggcctgcagcaccagctctgtcagacgcgtgaatgactggaaaccaaagggcacaggttagtccagtgtctcctcctctcccctggcaaccctgcagcggcctgagggataaggtccatcttatggctcctcctcccacctctgctggactcagcccgagagagcgggcgcctggtcaccagggctctcacctctttaatgttgaggttggtgcaggcacttgtttcatagaagtccatgccatactccttcgccagctgcaagagaaggacatttctgaaagagagtcagtaaggcaggggaggggcccatacaaccaggcacaggcttctgccactgcactcacaaccatgctgtgttgtgacgatttctcagagtagataatttctcagatgggactgggagctccaagagagggtagcagagaatgggggaag

SEQ ID NO: 60697 - DNA, 1757 bp, Homo sapiens
gtcctgcctgccttctgaccccttggtctgggcaggtattcctgacactcctccatcctctttagcctccctcagaacagatgtctcctcttcccaggcgcaggggctcctcaccctatctgtgtcctcccccaggtgtcccaccttgcggcttaccttcccaactctgccctggaaactcgatccctgtggcccctccgtacgtcctctcttccccccctcgccccccgccggctccaccttgggtcaccacagaaccaagggcgcctcagtgactccggtctccaccctgacccccttttccgtagcagaagctttacttcccctccccctgggggtgtggggatgttattccagcggctacgattcttgctaccccagctcggggtacccaggcctacaccagctcccctcacccccggtttctcggtttgatgggacggaaggcttcccggcaagaggcgggagaccccacccctggtccggacggcaggcagcagggacaccctcacctgccaaaacctatgctcaccccgagatttatcccggactccggcctccggcgccaccgcctccagccggaggggctggcaattcctccccagctggggacgggggcggcggggaaaggggccgcgggcggggagggaggggcgccccgggccaccgccccttaccgatggtggagatgtgcgaggagtggaactcgttgtcggtgaagcggcacagcaggcaggtcttgcccaccccggagtccccgatcagcagcagccggaacagcacatcgtactgcttcgccatgactggggccagcggggccgggaactgcgggcgggcagcgggctcagccctgctccgccgctgccatcgcggcccgcgcccgcccggggacgctgcgggcggcgaggaggacgccgggcccggcccccgcggctgcctcgcccgcccgcctgcccactcgctcgctgggtgccgggaagcgcggctgcggcgggagcccggcgcggcgcccgctcggctcggctcggctcggctgggctggcgcgaggcggtgggaggagaaaccggcggcggcccctgcccgccccttcccctgcgccgccgccgccgccccggagagagggggcggggagcgcgcgcaggagagcgggaccccatcgagcaggcgacgctggggcggggcgccagccccccctcccaaccccttcctgcccggggcgggggaacgttttcgtttttccgcggacgctccgaatgggggagttgaggtgagcccccacccagcccacttctaccgtgctccgctttccgggctcaccacttctccccatatcccaccccaagtctggcgccggtaattccgcccgccgtggcaccctgcatctgcaggatctggccgggctccccagtggctggtacctcagctgggctcacccgaggtaggaaggccttgagcaggatctggattcgaacacccgtctccatgagtccccgagagtgtgggtggaattccccctccctgccatctggctgccccttacctgtgtgactgtgtcacggccctcccccgtccccattttttctttaaatggggaaaatgcctattcacggcctccaccagggtgaaaagatagatggccataagaacatctccaagtgcaaaatcctttagaggtgtgcgggcaagtctccgttttccctctaaggtgcttaggataggtgcccaggtgaccaatgtattgtttcagacccctaaa

SEQ ID NO: 60698 - DNA, 1508 bp, Homo sapiens
ttaacattcattgggttcttgggcacctgaaattgcaaacaattgcattacaattaagtgagaattagcagaatgttacagttctttaacaatttgcgtaacaaaccgaggcgtcctacgccatctcgctgaaatgaaattcggatgtagacacccttgcgcttcaggactctacgctcttgcagcagctcctctgcccaatggggggcggcagcatctcagtaactcactcgaaagacgggtaggcgggaggagacattcgcgttcaaaatctttttgcctctatccgctcgccgtagcgctttagcccgctcgagtttcaatgcgcgttgttgcttaacgaagcagagtcctacacactgtctgctgctctcctgatcatggcttctccgagttctttcacctactattgccctccatcttcctcccccgtctggtcagagccgctgtacagtctgaggcccgagcacgcgcgagagcggttgcaggacgactcggtggaaacagtcacgtccatagaacaggtgaggtggcaggactgggcgaggcgcccgcgcgatgtgttctgggagcgcgagtcccgttcgtagggccgcccgggtgcggaactcaccggggaactacgactcccacagcgcaccgcggtgcctttcctctgggaagctccgggcgcccaggcttgggcttcgtcgtggagcgtttgcgcggccagcttggggaagggtcgtttcaaggttgggcttggaggagagggcagtagccgagtcccctctgccctaaagaacgagaagaatcgtgttctatgcctggaggacagaggcagcccgtgcgggtcggacagcccactctgttctgccagtacttcgggaggttctggggtgcatagtgcacttttcccaacctgccctcagcttctggaggcagagagcagggccaggctgctgtcatgccgtttcacgatctgtttaatttttgacctacagtgccaggtttgggggcccgcctcgtgggtgggcattttggtagtcattcagccatttgagcaccagctacgtgtcggacacaatattaaacgatggaagtacaaggaaataaaacagctcctgaccaggagcctggttgggggacaggcaggaaaacagtttggaaagtgatctaatagaaagaatggattttggactactaatcattccctaaggcctagaagtaggatcgaacctatcattttgaaaagtgtttggcgaatgagtatatattcatatgcccaaaaccatagttttgtttttcttcttattccctaattggaattgttcccaaggttgctatgtggaactgtttatccatctgtccctaggagaagtggttaggataattcttaacactaataaatgaacattctgctgcttactgaaataagatctcttagtgagatcagtctccaggctttaccttggagagacctgttttgtatttcctactttaagttggaagcctgtactttggcaaaa

SEQ ID NO: 60699 - DNA, 674 bp, Homo sapiens
caaaaggggttgatgttttcagtttagcaggcagtcaacttggtcagactcaagctacaaactgtcactcatgcagcagctcagagctcagttcttgcttagaagttgctttgtttccccagcacgtatgtggaaacttgaactgagtttaaatgcagaatttgggatttttcttctttgactttcctgtttctggattcgtcctcagtttctggcagcctgcatcttcctgccagaaggatggttggcttcccattagagtgttggctgcccgccctgacccctgacccctggcctgctgctgccgccctgggctatggctgccatcctgagggcaaaccagagagaaaaagttgtgggggaagggagggactaactgcatgctgttctctgttccaagtttcaaactccaccaaaatctgcctgccctttttcagtcagctgaaccctcaggaagctgtttttttgtattttgttcagtgtacagctgtcatttgcaggggggttgactggttaggcacagactagatacggaactcagacagcctgggtttgaatcccagttttgccctttctttcctcttctcttccttctttcttcctctgtctttcaattctctctttctttttttgagaccgagtcttgctctgttgcacgagctggagtgtagtgg

SEQ ID NO: 60700 - DNA, 2485 bp, Homo sapiens
agaatctagaataatgggatttgcaacccccccaccctccagaaccaggccccacctcaccttagtggttaacattagagtttactacaatattaaaagtaatagtacgatctctttttctctctgaccccaaaaaggaatagaactgaacggaaataaaaatgaaatggagagtaggagacgtaccgcagattgaaacctcggttgctcttcctggaataagagagaaaaaaaaaaatagaaaatatagaagttatttttacacttaacattcaataataagaaagaaaatgccggcggcagaggaagcggagggtggggagtcagcccgacaccccttcctccctccccaccccttgcccccacccttccaccctcggcgggatccggtagcagggtagaggggtcccgagcgccgcccctccttccgggatccgacctgggccagaggggtcccgagcactgtctcctccctgcagacccagctcgggcatctaggcacccccaacccctctccgcccttccccggcccccaggatccgcgggtcacgggaggagaggatcgcagtccgaaggggcaggtcctgaacgccgtccccttcccctggatccggacaatgggatcccgggcgccccccatccttgtcccccggatcctgagccggggaaggtgggagcgggaggccgcagcaccctcccgcaagggaggaggtgggggtcccagaagccgcgtgtcttcccccaacctccagtcccaggaggccgctccggccaggagccggaggggagcgaaccgggaacgcgacggaggcactcctggccccgaggggaaggggaaggaggcggcggcagcccggccccctcccgccgtcgccccgctaagagccccggccgctgtccccgcctgacaacccgcacgggaaggaagaagccccaggactcacgtcgctctccacctcgatgtcatcgttatcgctcatttcctacggcccagggagcggccactgcagcggcggcggggaggggaaggggtgaaggggagggggaagtcaccgacaacaacaagccgagtcccccccacacacacactcactcactcactcactcgctctctcactcacacacacacacaacacgggcaagaaccacctcctcactgcagcaccggatcaacggcggcacgcacgcccggtcggcccccgccacgtgaccaggctcgcagcgctggggcagccgagacttgtagttcttgtccctctaacagacggcccgggtagctccagaaaaactacaaatcccggaagaaaccgcatccaggcgacgccagcccggcttgttgacggagcccaaggcgcctgcgcgtcccggggaggggggggggggcgggggggggcggggagagccgcggcgcggcgcctcctgggagtcgtagtccgcagaccgcgagttgtcaggagattttcctcccgaggcggcagaggaggctgctgggaagacaggacacgtggagggagctggaactcctggagccgggcaccgtctgcgcgctggacgccgggcccaggggactgggtggagtctctgggggagtagccggctgtctaaataatgctgcctctctttggtgtgactggttatactttgtcttcttcatacggagtggttccgttttgcgcctaggggcgtaacccgcccgggagggaatctggctgcggcggaccagggggcgcggctcgggatgcctgcgcgaaccctcgggggctggtggggaggtgtcagtggcaggtgtttcgtggtgctaccggacaggcagaatgaccgacctcgccgggcgaccgctcccagccgcgagaatcctgtattcgtttatctgggagtgaccatcctcgctactcagctactcacgtgaggctccagcgttcacacaacgcgaaccctcaaccactatggacgtggaagtaaaagccccttcagagtttgttgtagcccagacagtttaggcaatatcccagctcagagtaccataattaagattgcaaaaaggatcaatatgggaaacttttgcagttccctgtccagttaaaatcatatttatatactgtggcatgaagtgtaatcacatgcattccaccgatatttattgaacacctaacttgccacaaggggatgccataacggataagaccaaaaccatccctgccttcatgcagctcacagctgtgcaagcaagcgtgccggtcctgccgccattgtaagagtgtgcaacaagtcccatgggaaggaagaaaaccataacagacactttccaccctgagacaaagtacccatactactcctttacatctggtctccaaagtgaatgacatcttgagcttttcccatgagttactgattcccggatgaataccatattatccctgacttttgaatgtggaaatttggggatatgtcacacacaattcttgtgacacacattcctcaacgt

SEQ ID NO: 60701 - DNA, 1242 bp, Homo sapiens
gagaagaatatggggactctgcatgctcttatttgagtttcctgaaataagcatgtcataacatgcttttgtaatatgaaatggtgagaaaagtgctatttaggaggtagaagtagtgatggaatggaggaagtcttctccagggaaggggaatgaggctgaagcgctgtgactcagagagaaacacctgtggtgtccggagttccccatttgctatttgccctcctgtgcacggaatctgtgacaggcagcctgccaacgacatgacctctgttaatgacagctgaagtctgggctcgtgtagattcttaagcagaataggaatcagagtcagaactgtggttattagatgagtggccttgtcagaactttatcaccaagtagtatttattaagcactctcttgctttaatgagtcaggaaatagggttctcgttccctttatcattcacagttgtgtttctcagcaagtgcagggctcccttcctaaaatggcccaggaccctttctcctgaagccatattactaggcagaatgttccagggatgcaaagtgttgagtcaactacagagtattaactgaatgtctcattgctctctgggactttttattctggctctcacttcttctccctacctcctaccagaaaatacaatagtcaaatctgtgtacagtgaaaatctgttgtccagtatctccttttcccttccgttggaaacatcactttgctttccttttggggaaccacctctcctcgttctgttcatgtggttacagctggaatgagctggaatgattcatcacctggctccagacagtgggcatgtgactcaggcttggccaactggcatattccaatctcctggccttgggagaaagggccacagacaggcacatgacccaagtcaggccatggagactcatttctgggactcttgctggagctgtcgagagaatggtggactgtttctatctggattgctaaactggtagtttgcaagcccagagctgcttgtggccatctttgccacttcataggttaagcctgcttcataggttaaagtctgagcaggcttaacctatgacatggcaaagatgggggcagggaagcacaaagagatgccttctaaggatttggtgtcttcagaaggacacaaaggaaatacaaaggaaagcagagctgagagaaagagagaatcagatttttaaatgtcttttttttttttttgagccggagtctccc

SEQ ID NO: 60702 - DNA, 2184 bp, Homo sapiens
ctgcttgaggacaagggattttcttttgaatcagcagtaccttatttgtgtatctgtgatagagttcctggtacataagaaggtctcaataaatatgtgaatttatgaatattaggcagattgcaaccttgacaggccactgcctcttaaatctcctttctgtgatcttttaatatttaacatctaaaaggccgccgctacttgctttgggataagtatccccggtatgtactttaaaatgcccaagcctagagaaatgattcttgtcttaagggcaccatttcgctctcccaccgtaaagcgccccaggcttgggatctgggtcccaaggctacagggaagagtttggaacgggaagctcatcttccggccctctgattggccggctcgcactccactcacgcggcgcgcagctctgattggcctcggcggcacccctcgtcccgcgactactttgtgtgctggggcggcgcgctccggtcctcccgctcagctggcggtctgggctgctctggggcagcccttcggtccactgctctgcatcgcgggcgccgggaattttccgagtccgagcgggtaggacgcatcctagggcaaagcctctcccctctccccgtgctgttctctttcccgtactaaataaacttccgcctcagaggggctgtcgcagccgcgggtcgggagaggccgggcatcgaactcaggccctcgtggggggggtctttctcttcgagtgaatgtggaaacagctcttacaagataaagtagggcttcgctgagtctcctgggggagcgatgccattgtaggatcgcgctggaagcagcagtcaagcggccaaatgcgggctgcaggggctgagcagcagcagcgcgcacccctaaaagtagcaaggagccagcttcaaaacctctagtgcgggtgccccctagggccgccgactgagctggcacgggccggtccattcccggcgctgtagggagcacagcattctctggaggcgagtctcctcccgggatccaggatccgctcgcgccccgctcagcctccggccttcaggcggtagagggcggcctacgcctgtgtgcgagccggagccggcgtgcgcagccgctgccctgctggaactgtgccgtcccgctgtggcccgcggctctgctaggcggtggatgctgctgctacgctctccaccggcgcagcgaggaagggggcggggagaatccctggcacatgccagggtcgccgtaggtggcagcggccggcgcatgcgcgccctctcccagaagccaggaacgccgaggggcgcgctcccccattcgcgcgcgcacgccggcgctggccgaggcttccccgcctgcgctcgttgtcagagccgctccggcgcgtgcgcgcgttatctccggccgacccgagcagccggttccctcctctccaggccccctccccatcccacccccgccgcctggccccagccgacccgtcccttcgtctccccgcggaatggggccggcactgctcagggtcgcgcgccctggacccagctcgctctcggtctcgcgctgtcagcgactgcccggctcgcgccgcctcgcgctctgcctcagtcagtggcgccgaaggctccgttaagcggcggcggcggttcctgtttccgtttcttcctctccgttcggtcgggagtagcatcctccactcagccacccttcccactcccccatcgtggggcagctgcggctgagggctgtggctttggcagctgcgacggggagcggcggagaccgcctctgctcccgcctggggtaagggggcgttttgggagccgggccccgcgcgcctcggggtcttgggctgggctgcgcgcgggatctgaggaggctccgcggctgtccctgctcgttcacccgggcctgttgctgcaactgctgccggttaaccagcggctctcggaaaagtggggagggagcccccgggacgctctggcggatgccttggcgcagccccgggggcgcgggcagagggtgaggggcgcccgcctctccagccgggacgcggagctgcgccgctgctgccctcggcgtcgcgcatccttgcctagggcaggggccaaagcctagggaaggagaagggttgggggcgggggtgggaggtgtccgtcgtttcccctccacacctaccttcccttcgtc

SEQ ID NO: 60703 - DNA, 1316 bp, Homo sapiens
taggttgggtgacaatgtcttccagaaggtaccatgaagtcacaccctcactttcaccccccaactctgcatgtccctcttgcaaagggggccaagcaagaatccacctctgattagatcatcaccttctgtgaaaggactccatttcctaacatagagtagacttatctctaaactgtgaaaacccttctcagaccacaacaaagtttccattattggttgtcttagaaaacaaacttgtcaaggcctaagcatatggcaataagaaaatggatatgtatttttctattaacaggagtcagaatgcagttgtatataggaattggaatgtgttagctgctaggagagagaagccattgattcctgcagcagtgtgactaattaggttttcttttgtgaaggaattagtttgtattgattcatttatgtctgatgtaactcagcagttctccccctgccagggaagcctgcccagactggtaagtgataagaagctggcagagcagctcagccggttcagtggggctatgcgaacttcttggctgagtaagtgtgcagggccaggatgaccacatcaccctgactggtctcctttccctgatcaaacataggccaaccatatgaaccatctctgctggctggatacagaaagggcttcatcatcccagtgaccaccaccctacccttggggcagttatgatttcacataagtaaggatccatattgattaagattctatggttgcaaacaacagactctgtctctagctaatttgaacaataaaaagtacattttgggaaggacacagggcagttcacaaatattaaagaaaagttgaactttagaccttccagcagccagaaataagggcagcttgggcagtctcaatagcagaactactggacagtcagttcaggttactcctccaaacactctccatccttgggtcaatctgcttgagatttaaattcctgaagagagtatctgattgcccttggggggtgtgtttgtgtgtgtgtgtgtgcacgtgcacacgtgcacgtgtgtatgcatcaagaaaggacataataattcaataggaagtctcaccaagagttgcttgcaatgtgggaagagtagttgttactagcaggagggaaggattcaaggcagacaaaaacagtagacattcactatagagtcccaaaccaagagttctacaacaggagtaggagggcagagcgtgttcctttccaggagctacacctgggaagttcctgggttctggaggctattcaacactggaagagaatccatgtgagcaaatgagtactcag

SEQ ID NO: 60704 - DNA, 869 bp, Homo sapiens
tgactagcttgttataaggcctattttaagagaccacatgaatttcagtgaatattatgctgtgataggaagcaacagatagaaagtttactgcagaaaaaaattatagaattgttcctataatttatctaaacaggatgagtttccacaagttatttcataagcactatgttacttgaccataacctttgttcttctacccccacaccccacaatatcagaccctggtctgttttcccctctcttagcaacccccttccttttcttccctgcttagcttgaacactatcatcaaccttttgatggatactctcaccagcactctcagtgctcccttgaacttctgcttatctattctgccaagtcccagctcagagtcaaacaaccatctcgttctctctactattgcttctagtttgccaagtactgctggagaaaattgtgtaactgctgattcatgccatgccaaatctgcaatttccaaattcaccttgaccctttgcactacttggcaatccttttacttttgcctggttggcttccttttccagtgctcaggtgctcttccaaatctcatgtaattactcttctgaggtttcctgccacacctcctcaatcaagagatgacctaattttctacatcagaaaaaatttgtgttcaatttcccttcctcccacctctaatggtcatctacatcttaatgtgcccttccccctgttccaggggatcattatcatgctatcccctcttaatactgttcattggtttctaagctatttactaaaaactctatatacattattacaaggcaaatattctccttggaattaatattgcaagttaacaaatgggcattggaaagacaaga

SEQ ID NO: 60705 - DNA, 2121 bp, Homo sapiens
tttcaggttttaaaaatacaaacaacattaacatggagcatgctgagaacttaataccttgtgcaaccctcacagtgactctatgaaaggtattatagaacaagaaacaagctcagagaagccaggcttcttggctccatattcaatccttattccctagactatgctacaaaatggatgtgtaaaagcatgtgacttttcatgcctcttctagatctaaacgctataatttgaatccaaatttattatctgtttaacgtataatcttctcagtgaagaagcatactcctaaggttaatttgttcagtaagaaaatgttaactctgcatttagcccagtaggtggcaccaaccacatccaggcttcaagtccacagagtggtaattcaggaaccatgaaatgctgtgggagagatcggtcttctattactctcaggacaaaaggtgccacattcatgtatcaaatgaaaaaagaaaaaaatttcttgatgttttatcacatgctcttttggcaccaaggtgtattactggcagccttgattagaccatgttaaactcagtgttctgttgcataatttttacctagtattttactccctgtactacagttatctccatttcaaaaaacagtcactgcccacttcctccacaatccttgtagaatagtgttcccttccaccacagataaatcaggcgattggggcactaaaagaaaaaatgagcactaaacaaaaaataaaagatggtgcttatttgaagtttgtatacttaacagtgttacaggacagcgtttctttttctctagtttcaaaagaattgaattgcacaaacctgtcttagagaaagggtggaatataattttggacacacctctcagtaaatcagggtacaggcttttctgttctaagcatttccaagtagatgaagagtttacctcagtactcttagccaagaattcctcctcccactgtccgatgtgctggttggctgagttgcagtggtatgatctgtgtagctggcaaaatacaatcctgtgttaatattactgattttgttacacttcaacaaatccctacttgtgaattcccttgatgcccaggatgtggcattaccgtcatccatgttatctctttggcatgctgcctcacttagtctgtttatacctacgatgaagtctttacttttgatctttccggagacaggtgacatttgaaaggatttacttttccaccagtgtaaaattataatttgattcagggtgtattgtaggccctccctaacttctatagagtccagaaggcaagtttgtggactttggcagtcacctatcttagagagcacaggtgctaagcaatctctaaattcaactgaatttcccatcatatctgctggtgtttaaagaagaggtttatcttcagcaataatataacttgtgttaagacatttgattctgatagctttgcttttctctcctcccctcaatccccaccaactcttagcatttccttgagctcttctgagaaaaacctgaacgttggatgtgagtattatgctacacttataaattcagatgaaagcccagcgaaatgggaaatgaatactctttgagaccttatttattctctaactccttctgttctgaaagcaagtcattcttcctggctttaacctttacttcactttagtattattcttcctgatggctgaactacacttcagcaggtgctgctgaagggaaaatagtagtgttaagctaaaatgctgaagggcaggggcggaaaaccacagctagctcaaatccgggtccttgataagcagtactgttgctttcaagtacaggctttttaaagctttgaggcaacctgaaccttttgaatgtcaaagttaggtttatggtattaataggttataaagttaatttctaaactaagtcattcttttacttctttaatacttcacagaaattcagggggagaataaaattcttttcttcctaaatataaattttgaagcttgacaaaataaactgtacccttattaatattattttaatgggtgacaacagattccataatttgtgggcatcacacactcaggagtgcagcagtatgtctaggaaaat

SEQ ID NO: 60706 - DNA, 1420 bp, Homo sapiens
ttgttaactaaggcatggaataaagtagtttacttggtagctgaggttgtaacttcttaaaaagtgaattatttgccattgccaaagtatttacattttatgttcattaccagtcaggcttaacatctttccttcaaatgttccaaacctttcaattttttcaaaacacaaaactgggatagcctgttatcctactttgtctttaggactttatattggactctgactttcataagggcagtataaagttatcagttagattgggtgactcctcatgagtgtctgcatttcagtgaatccaggaaatggatctcagttttgtgagtacagacaaatttatatggtcaacttattcaaaaggtcagagacttattcaagctactcaaactcccaagagattaactgatacacccaatattaaattacagagagggctattaccttacaatttggtgggaatatgtctatatttagggtattcctatctccaaatcaagttatagtaaactgaactagtaatcaaaaagtacttgggattgaaacatcattattatagttttatttgtgctcataatattctgattatattcctctgagaataaaatctctgataaccttaaccacatatgggcaatacttttcaatttcaaggtcaattgaggaaaaacctgtcccaccagcaatacatttacaaatcgtaactttgggtagactatttttgtaacttatctcatttattttatcttgactttctagccatgcagaggatatcagctaacattctatcccaaaaagttgcctttttgcattgccagaaagtgattagtaatgtctgtcacacttcctaaatgaaataaggccaacaacagcctgatactttcatctttagtctagaattgcaataatcaaagaggggaagcgacaacacataacattttgccttacactcgtagatccaggcagaaaatctagttttagtgttgtttatgtgaacagtggccaccttaggtggtgtctctccttttattggtagaggcttctgtaacctgttgcacgccaagtaaaatctctattggtccctctggcaccttggaaggagcctgcattgctaccaattcaaagtccctgttgattcatatgttctgtatttagtcaacaaatattaggaaatgggaagagaacaaggtcccgtgctggaaagggaggcttggtctgcaaccagtcaatttcacggcaggagatgcacaggcagatacatatgaaatataattattacatggcaaaagtgagaatttttcaggacaactaaaaatccatcttctctacttctttcacaaattcacttatgattcctaacatgaaaacttaagtttcattttaagtataaaacatgatataaacattcctagaaactatattt

SEQ ID NO: 60707 - DNA, 2919 bp, Homo sapiens
ccgtctctactaataatacaaaaattagctgggtgtcgtggcacgcgcctgtagttccagctactcgggaggctgacgcaggagaatcgcttgaacctgggaggcagaggttgcaagtgagccgagatcgcgccactgcactggagcctggcgacagagcgagactccggatcaaaaaaaaccaaaaccaaaaccaaaaaaaaacctatcaaagtgactttgaaatttgtgtataaacactgatatacatcttttaatactttgcttttcacttttatgcctccaggttactacagctaagaagagaaaacatatacatatgagtgtgtgtacacacacacacacgcatataactttttaaaattcagaagttgaaaggtccagaacgatagtaagaaactaacgtagaatagccacaggtgattaataacacgtttcatgaaaggcacatggaaataaatggcaacaaaagctactttcatggtaatctcacatcccacgaatactgaaatgaaaatcgccgcggcaatggactgtggttcaggtggaacacgttctcgttcgctaaggagattgatgcttttcatctaaaagcagcgctcatggcgaagaggcttaaggccacaaaaccgtgggacagcaggaggaagagaagccaggtatctccactccagctgccctgcctcagactcctcagtttcgcacgtgaggatcgtcttgcaggcactgactggagatggaatcctaaagcataggtgaagcggaaatcctccttcagggagagcccactgaggaagccagcggctagcacgaggcaggacaggatacctccctcttcgcccacggcggcctctctgtcatagtagccaccgttctgccactcatgcagctttctaagacacctctcggttccccagcgctttcagtggggcggccggccattcccgagggttgcaagaggaggcccggggtgctgagccagcctcgctgcccccgcgtagaaagccggcccgccggcgagagccagcctaaggcgcggacaaccaacgaggtgtcaggctcggcaggggattgcttctgtctggggcccggccgaggttgcgttcgtgcctcgcgcgcacacgctccgcgttcactcagccaatccggtgctactcgcgcgcccaggagcgatccgcggtcctactcaggctgggccggctccttcccgctcccaatactcagcacccgagctctcactcctcccctcactctccacgagttccacgcctaggggtgtagctccgcccttgtccccgagtccgcccccgcaacctccagagcgtgtgctatcctttcctctcagtcctgccatctagctgccttgggtctcgcgctccgcagagcgttccgacactctccggcctcgttctgccgcctccgcgcgctctccccgtgcggccaccgcgccccccaagcttgcctccttcttgccggacttggggccgcgcgccctgactccttcccctcccgcggacccgcgcactcccggcgcggcctctcccccacgcaggccaccgtgcactctgtggcctccccctccttccccgctctcctcgcgcttctctggctccctagctgtcgcgctctcctcggcgagcgcgctcccggcccgcgcgctccgggctccggtttctcccggctcctgtcagtgcggtgactgcgctgggaaacatggcgaccgagggaatgatccttactaaccacgaccatcaaatccgtgtcggagtccttacaggtaaccgggggaggaggtctgggacctatgaggctgctgtccctgcattgccttaggcttttcgcctgtggtggcccttctctgcggcctcgggaggagggaaggctgaagaagggaaccgcgggggtgcattttacaaccgctgagaaccgccggagattgggggtgttcccgcgggtcccctcccccaggccccaggagccggggtcgaccccgtgggatgttaggccccagcgccttcggaagcaaagtcctgggcccccggggaccgaggggccggtgcggagggcgctgcggggctccgcgctgtcggtgcaggcggcgggatcccggctccgcagtctgaagcatgccgctctcggctggcctgggcgcatcctccgctagtgctcttcagagagaggggggaatcccatctccacccccttcctctccttcccttccccccacctgggcggccccacgccagtatctgtgcttgcctggacgagactcaggtgttaatcagatgaaactgctcctcctcgggttgtccctcgcgggccgggcgtcccctcagccacccatggggcacccttcgcctccctcgggggatgggggatcggcttgcgtccggacctcggaaagtgtctgccttctgcctttccgcgcaaaaggccctctgtctgcctcgtcgtttccttagcgaggacgggctgcagcctgctgccggggatccagctttttacttgagagggcaggattcccctactcgggctcctctccccctcctttctgggaacccccaccccggtagagcgtcccgaggctggtgaggagcgcacttttcccgggtcgcgtttccctccctcgcgaaagccgtgtgtgttctgcatgtctgattccgttgcgctgaatttggttaatatccgtcacttcggcgatcggcagttgctgcagggcatgacttccaagatgaacagcaagcggatttgtaggggtttctgctgtggttctgtaattggcaaggtttatgtgtaattgagtggcgagacgggggttaaagaactatatttggaatctgagggcttagtttggagtgaaggaaatccaagactcagtgatgtgatttcggaaaaagaagcagtgtggacgggaatcct

SEQ ID NO: 60708 - DNA, 623 bp, Homo sapiens
tgtctgaataaactttatctaaaatgtattttctccttaaggcacaccacagccttcttgcactcaggaatactacacagcacttcagtattcttcatggcaccattctacacaacaaaatcaccaacaaaatgcatcacaacttgaaaaacatggcaaaaaatagatcatgaaaaggacgcttgtttacagtatgattgccaaaacaagagagagtattggtatgttccacatcagctgagaatgtacctgtctgctgactcaaatttttgctgctccgtacacatctacaaattattgtgaaagagcttcaagtattgattttggggttactaacaaattttagttaggaggtgaattcacaaatgtgcaatctgtgaataatgaagattgtatatgttcttatttttcttggatagatattagtattcacaaatgtgcaatctgtgaataatgaagattgtatatgttcttatttttcttggataaatattagtataattgatgggttaaatagcatccatactttataagatactgccaagcctttttctaattgtagttgcaccattttaaattcttattattaatgcataagcattccagttgtttcatatattcat

SEQ ID NO: 60709 - DNA, 750 bp, Homo sapiens
ccaggaagaattaggcaggcatgtggacactgtacagtgagtggaatagaatttattaagtgaaaggaaaaattctcagccaagaggggatgtggtggggaggggtgtttcccccacccaaaggtgggaaaattccccgtgtagctggtcctgggccttttatggacttagaatggggagtatgtgctgattggtttgtgattatgcaaaaaaggttaaagtgaagacaccactcaaaggtgggcacgacagtgtagaaaaccaattaggaaagggtaggtatatataaagtaggtgaaggtggggatcagtcagaggaaaggctgccacacaggaagacaagttatcgatccagtccaaaggttaaacttgtagcttggctttcaggctttaaactgtctttggcttgaaagtgggatttcacaggggacccaccccctatctgcctaggcatttggctgcctcctatcactctaattttccccctctgaaaaggtacctctaactgccattagaataggaatgaagacgatcttaactgctttctgctgatagagggcactgtttggggaaaatagcagtcaaatctccctcagaggcttgtctaaggatccccagtaaaagggagccatcgtttgaagctacagttgcgtgaccattttgagtttgatggcctgaaggcgagaagagagaaactgggttattagaagacatgtatcaaaatgaaaaaagggggtaaggacagcttag

SEQ ID NO: 60710 - DNA, 458 bp, Homo sapiens
cctttgtcctttaggaaaaaaaaaaaaaagacagataaccctgtgttgacccttgactcctcttttgtccaaattctcaatgtgtatgtaatccatcattaattcctgttaattctaacctctagaatatatcttgaaattatttactttctccatctccactgctaccattctgggagaagccacagttaaccataggtgggccacagtcccatctgattacttagatagcaggccctgcttttaatctttgacctcgtggtaggcagaattttggactcatgactttcacctgcttttgttactcctgtgaataagttaggttatatagcaaaagtgacattgcagatgaccttaaaatagggaggttatcccgcattatttggttgagcccaatataatcacatgagccttaaaagcagagagaagggcaaaagaggaagtcagagagattggaa

SEQ ID NO: 60711 - DNA, 2932 bp, Homo sapiens
gtctttatttctccttcatgtttgaaggacattttcacaggatataattttgtaggataaaagtttttttccttcagcagtttaaaatttgccattctctcccagcctgtaaggtttccactgagaaatctgctgccagacatattggacctcctttatatgttatctgttatttttctcttgatgcttttaggatcctttctttatccttgatctttgggagcttgattattaagtgtcttgaggtggtcttctttggggtaaatctgcttagtgttctgtagccttcgtgtacttgaatattgatatctttctctatgttttgaaagatctttgttaatatctctttgaataacctttctaccctgatctcagtctctctctctctctctaccttttctttaaggccaatacctcttactgccctttgaggctattttctagatcctataggtgtgcttcattattttttattcttttttcttttgactattctgactgtattttcaaatagcctgtcttcaagcttactaatttttttctgcttaatcagttatgctgttgaaagactctggtatattcttcagtttgtcaattcagttttcagctccagaatttctgcttgattgattttaattatttcagtctcttagttaaatttatctgatatgattctgagttcattctctgtgttatctttcattttgttgagcttcctcaaaacaactatttctaattctctgtctaaaaggtcacatatctctgttactacagacttggtcactggtgccttatttagttcatttagcaaagccatgcttttgtggatggtcttcatgcttgtggctgttcatcagtatctgaatatttattctaatctttgaagtctaggcttgtttgtacccatccttcttgggaaggctttccaaatactcaaagggaattaaatgttgtgatctaagtctggtcactgaggccatatgtgcattagggggcaccccaactctagtaatgctgtgagtcttgcagaggtactctgactcttatagaggtactgccgtggtggtcttaaataagatccaggagaattccctagattaccaggcagagtcttgttcttttcccttacttttccccaaacaaacttaatctccctcttcatgctgaactgcctggagttggggaagggttaatggaagcactcttgtggccaccaccactggtactgtgttgggtcactcctaaaaccagcccagtactgggtcttgcccaaggcctgtggcaactattttctggctgctgcttgtgtttactgaaagaccaagggatctttagtcagcaggtggggaatcctgccaagaccaggttttttttttttttttttttttttttttttttttttcagtgcagcaggtccccttctggcccaaggtgggtttagaaatgccgtccaagagctagggcctgggatgggaggctttaggaatcttcttggtgtttattttaccaggttgcaagacaaagtcctctttacttttccttctcctttcctcaagcagaagtctctccctatggccattatcactctaggctcagggcagctaccgcttggctgccactgatgtttattcaaggcccaagggctttttagtcaccactggtgagtcctgcgaggcctgtatctctcccttcaggacagtgaatgcctttctggcccaaggcaagtctagacatgccctccaggagctaaggttaagattagtacatcaaaaattatttgagtgacccatttttcagttctcccaaggattgtacacaactaataccattctagatgcataggagataagttaattattagggtttaattctttggaggaactagttgagaatgattgtaaaactgttctaactggatgttctcatatagcatcagtgaagactttctcattgattaactatttattagctggtatttaacagtcctttgtaaatagtaattggtcttttgacagatgttcagttttataagtagactcacatgtttatgtttcctgtgacaaatgacagttaacaacatatcaaagagtataatgttgttcttcagactgggcatctatctatacagtagaatgaaaaggaagaaataggtaacagaaaataatgaaaagaaggccttgatgcttctgaagaagttatgttaactttgaatgcttctctagcactaactttattaatgagtcccactggttctgaatgacctggtgtgttgtcagtgtgtcagaagacctctatgtgagaacagtcatttggaatatctatatatactatttggcttacttttacaagttttacctatgtaaaattaatattgaaagggagcacctgattacctattagaaagaaaaattacaatttccctcagctggtcacaatctgaggcatgtgaagcaatgtggaataatgttaaaatcttgtatttagagacggaaaacctggatataagcccttacctcaccacttaataattcggacaagttacttaaaatttaagcttcagttctcatctataaaatggaaataataattatcctgtatctcacaacagattattatttttagtacaggagatgacatatatgaggaaatttttataaactttgtaaattaagaattaagtatttgcagaattctttcaaggtaccaaacactatcctcactgctcagaatacaaatataaacaggttgttccagcccataaaaagttcacagtctagggcctgggtgcagtttctcatgcctgtaataccagcactttgggaggctgaggtgggcagatgtcttaaacccaggagtttgagaccaacccgggcaacatggcaaaaccccatctctactgaaaaataaaaaattagccagacgttgtggcaca

SEQ ID NO: 60712 - DNA, 3392 bp, Homo sapiens
ctcaaacaaaaacaaaaacaaaagaacttagaaaaggaagtaagtcacacacagtaaccgttttttcttttggggtatggctagtagtttctaggaatcctggagactttatctggatttcagttaggcatttcaccagttctcatggcatctttatggaggaatatgggccaagaagacagttcggttgtgtcgtccacctgtattcgaagcctactgagaaatttttgatggcaggagcattaaggtctttagtggcatgcagcagagttctgtcctccgctctgtcttattaaacacttggacagaatgctgatcagatttgagaaggataacaaatctgggaagggtaggcatccccaaagatcttcaccaccaggaacaacggtttgcttcgttcaggccatcacagtgtccttagtgagggacaccacaacccataggctgtccagaggagcgtaatggggaagaatgtgaaagagcttgaaaatcaggacctgaggacattgcgagatggaaaaacaccgtgggacaaaatgaggaaaaccgagagaaatggaaatggcatatacgaaggctttgagggaggactgtgcccctgggggaaactgtgcccccgggctggagtcacaggcatagtttggcctcatagaaggagaggtcgattaacaaaccttgcaagtgttcaaatgtggaatgggcttgctcggaaggtactgtcaagacagagaccatccgagggcttttattgcaagtgtcgagacacattgctggtgtttctccttagaacgtcctccaatctgctctgacttccgcccgcacccgcctgagtcctgccccattccaagggtggcacatccaggtcccgagggcgccagccatgcccggagcacgggctgatctgcgtaactctgtcccttcgggagacttctgggaaatagttctagtccttgctatccttgctttctggttttcagaaatcagtgcagctgctggctttatgcagtcttctgcgggacactgcacacatccaggtgtttatgtcattttttaaaaaaaacaaatgttagattgggtgactaacttgacaggacatgaggaatctcttcaagaggaatcagattttcttcaggatacgtcatccagagacaagagccaagggatgtagaaacccagggaagcctcgcgtccccacaaagcccgccggccaaatcccgaaggggctctaccgggccagctagcccggagcagtccgcgttttagacttagaggcgcgcgactgcgcgcacccggctggagctgcggagaggaccaatgagcgggcgctctctccgctccggctcgggattgggcaagccgcgccagcctctcacgggcggggtgggactcggatccgcgcgcccactgcgccagagtcccgggggcgcgtgcgcggtctcgcggcggccgcaggggccggtctcgcgcggtctagaagtggagttgctggcggctgcggcggtgacggcggcgacggaggaggcaggcggtggggcgggggcggggactaaggattctgaggtggggagtcgggagtttctggattctttatccggaatttcaagggccgccggagggctgtcgcttctgcagtgcgtaggagcggccggggcgggaggctccgcggagccgaggcgtggaggtaagaggcggatcggcggcggctgggctgtagagatcttaatcaacaggtccctgggagcgcggcgggggaggggcgggcggccgggctccccttcccccacacgctgcgcaaactccggccagcgggagacccctggcagccaggcgggcttcctcaggcgcgcgagctgcggccgtggagggtgtgagcccaacctttgtccctcggagcaacgctgcctgcgcggtgcccgctccttctgcttggctgggcatgcaccttggcgcgggccacagccagccgagcccgaggtgcagggggcgcggcggggagtcgtctgccccctgcgccctctctccgaggtcgcgacgcgcgggactctcccggccgggtctgggaaatcggcgagggaacgctttcctttagaagtcagaatgtagtcagcgttcctctgcctgactcagctgctggtattctgctgctcattgcgttcttaaacacgcaaacagttcctgcttccttgtgaccactttaaaagaaaagcctagttttgttcatggtttctgatactttaaggttgcacgttgaactttgaagcatgtaaattgttataacctacgtttaatgaagtttgctttaaacgatctttgtagtaaattatgtaactttctaatgatcataactcaccttctgttgattgacatacagtaatgtgtacggaatgtaggtttcggtcaaaaggtttttcttggcagtttatgctaaaattaaaatctgatggctaggaagtttttagatgtagtatggagtgtgtgttttgtctccatactcgtttagaatagtaagaatttagatttggaaagtcagttgaacaaaaattttgaaattttgatttgactgacgcagtgaaaggtgttaatatttctgattttttaaaaaagcaatatcatgttttaatgatagtttactaattatgcttttggattataccagaagttaataacctgttaaattatgcaataggaacaaatgacgtgttggttattggtgtctttgaagtattggtggtaatgaaacttattaaataagcttccttgaattaagaactacgattttttttttttactagatccctgtggacatagctattgtggataggttttataggctttctatttgcggcaggatgagctattaaattataatgtaagagatttatagataaaacaggcaaaaataggaaaagcaattcattattttatctttaaaaatctggtaaattttaccatgtacctgaattagttttggcaagacggacttgaacttgacaaattaaggtggattgattaacattaatttgttttagaatgttaaaacgggagagaatatataagttctacttgagggtgacccaagtcagtacagtgggtttagcttttacatgatcttgaattatgattttgattaaaaatctcatcacaggggcacgtgttttcaggatctcctgagggctgtgtcatggaaaaaataaaatttatcacccattccaagaaatttgatcaattttatatattatttactgaaatgccctatttctctgatattttctgatttcagagtgtctagaaaaaaatagtatcttgacatatgtgcttatatagaatataattgtcttttctttttttttttgtgagacatagtctcgctcttgcccaggctggagtgtagt

SEQ ID NO: 60713 - DNA, 839 bp, Homo sapiens
attttgtgtttattaggagcaaatagggaattttctgttgatgaaaaatgaaacactttttacttcaggaaatgttatgtgtaatatatagggaccctaatttgtctaattgaaaagaatcatgatgctctcttgtcctcctcccacccctttatattgcagggtaaacagggatattcagatttgtaaaggaaaatggtgaagtatgcagtccccttgtgccctgggagtacttaaggtcagagctcaactttagggataaaaaaacaagaagagactattaggtatttgaatatgcaaatgtacttcatagaatttcattgtttaaaagagaatctctatgaacaagtgaaggaaatcttaggaaggtacccttcgaaacactgaactaagaattaatctttaaagattttccctctcttctcttagtataggataagactaaagaaaaataatggcaacagttaaatgcttctgttctgatgtcatacagacttggtgtgtgttttggctctaccacttagatttctgacctcgaaaaacaacttaacctctccctacttgtttttctcatttgtaaactgatgataactttgaggagttggaaggattaagtgagaagatatataggaaactgttggcactgtgcctagcaagtagtgttgctgcttttacttctactgtgacctcctccatcactgcttactcaaccatttaaataattgttctgctcttgtcctctgtaaaataggggtagtaattctttctatttttttagaggtggggtctcactgtattgccccaggctggtgtatgctattcacaggcatgatgatagc

SEQ ID NO: 60714 - DNA, 2964 bp, Homo sapiens
cccagcctgggagaccctgtctcttattaaaacaaacaaacaacaaactaaataaaaataaacaggatgaggaggagaaagggagcaagttgttaggcacatttgagaaaacgtcaaaattttccttacaaactagccaaacacctacagtgatatgccattttcctgacaaagaattcaggccccaaaagaaaggcagcccacaactgagcgtattcccaagcatgagttctttcaagaaatatttttttgtggaccttctatggattaagacactctttcatcctggagagagcccacagtctagtgggagagaaagacacataaacaaatatctactttacagcgtgatgaccggtattaacacaggtctgaacaaggtgcagcggtgagagagcaaaagcagtgcctcagaaacacagggatatcctctcacagcaggtgacatttggcgggatcttggaaaatgagtaaggggatccaagatcgaatccgagggctatgctagggcgattcgattccatccccactttggcttagggacctcttctatatcctcagtaaacttcccttctcagagcatttattaaaacctccttggcctttccagacgaatgtctggctacgtaaactgtgagctctgtagggcagaggtggcgacggttcagttatataaatccagtgcccggctcaataagggtatgtggaatggatgaatccattaatgaataaagacagcagacctccacaaaagcccgccggccgggcgccttttcctaccggctgggatcgcttcgtccagcctgattcactcaggaggaatgcgcgaagaggccgtcaggaagcctcgccctagactcaagaaaagaacctgggaaaagctcaggatcctcccaggaaacaaggaccctcactgtggcccagggtctgaagggaccgcgctccgggttcctaaacctgtgaaagcggcttatcccattcctttacttacattcgcgagggaaagatttcaattcggtctttgcccgacattctgacgataacttttcggctcgggtccccggccgggcaaccgaggctgcaatagctccagaactggcctccacagtgtcttcctctacgggagtcagctggttgtgtcacttgacccctcttgttgctaagaggcagcagggacacccattttcacttccgcttccggttgtcacaggcgacgaagggggaggacagaacagaggcgttgcccggatgtcgaggcgcgcgcaccgcggaaccacccctcaattccggttcgcctcccaacccctccccatccagcttccctgcggctgcgcaatacgcggcacgcgccaggccaaagactaggagcgaagcgtgcacgccttgtctttctccacctttcgtctttggtcacagcgccatctcatggttagctgaaactttgaaagaggattcattcttcagaggcaaggaatcggagtcctatgtctttctcgcgccttgaaggttacttagctaaagctaagatagcgagaaacagtacttttcaggtccttccatgatctacattcgtccttgttctcggaggacccagactctatggttaatgatgaagaggggcctctattcgttcagcgcttgcgcatgcgaggaggttccgcatgcgcggtggagtgagcgaagcgcacgctgaggaggatcggcggccggtgagggggaagcaagtctggtctctgtgattgaagaagtcggctctgggctccagtgcgggaatcacacacatacctcaggtgactaatcccaagctcggtttctccaggaactcactttggtttgtgtccagtgacatgggtgttcgagagcgggtaggccccgggctaatacctccctttcccgtccctgcgcgggaagtggctggacagcaccgccaccacccgcgctgtcgtgggcctcctcgccggctccgtgtaggtcatcctgtgttccagaggcatcgttgttcgagcagaggaatctcgtgaaggaaagtgggccgagtggattgtacagcctctacaatatgccgaaagtgagaatgccatgacgatggggcggtctcaggagaacgctgtgacaccgtaactcttaaccccggctcaggacgctgagcactttgctttttccaggcttgagaattccatcttttcttccgccccaacagctctaccaaaaatttcccctgcgtctcagtggaaaccaaactggcctcttacctgagaaacctgtgggacgggcaccgtgttggaaagagcggggtccgagtagtttttcatctgataattgaatgagtcaccccttgaaccaaaactaaatgagacttgagtttattactgttactatcagtttgtcgtattttggcgacaatgagaatagaactgtgttaagcatatgttaggttaactatgttagttaagcataactaaaacctaagataaggatatattttcgggttaaatacacagtcatgctgaggtctctttatcctcaaaacttaggctttttaaatttttattaagcaaaaaacatggtttcttcgagaaaaagtatagcagagaagtctttatttcccctcaattgagttgttattcaaggaacaatctctgtcaatagtttgggggtgacttgtacagaactttgctacctattcttagttcatctggtgccaaaagatgtagttgtctcatgcacagtaatgtttgtagagattcggtgataactttctttttcaactataatgatgaaataaaagctttacttatgtagcactcctataccaagaactagcattcagagagcattcctaatacgtgttagatccaaattagaattatcacgagagttgtccccatcacataatatattttggaaaggaatgtgaacttctatatccattatagcagtttgaccatgcactgttttgagaaa

SEQ ID NO: 60715 - DNA, 1371 bp, Homo sapiens
gtcagtacccaccgtgtatggcactggggaggcagtaaaggtttgggtcaacctgagtgggtctgatcccgatcctggctccaccacccactgccttcaccgccccgagcaagttccctaactcctctgggcttcgttttcccccttgatgaaagcagggctgctgggaggatgacatgagacaatatccagggctggccaacagtaagtgcttaagacacatagtagcattcctccttcacaggttgtaaattacagagcacgcctatattatcttagtaaatattatttaaatatcataccattcataatattttaacaagttttaattaagacacacgcttcagtacccctgccccgactccatactgcgctaaccaagtgggattctcctccttgcctgtgcgctgagccaccgcttaccccgcgtcccctcggacatgcagctctgcccatcagggccacaggcggcccggtcccaccatgggggttggggatgggaaccagagcatgcccgttccggggcgcgcgtctggccccgctctagggagccgcgtcggcggggccccacccgggcaatgtcccgaagctcgacgcgcactcaccctcttgaccaggaagccctccttgagcacgccgtcctccatgtcgccgcccgcacgccagggccaccccaggtgcgccttccccgcgcctcgcgctcctcggcacccgcgcagcccgcgcagtccgcgcccacggcgcccaggaagcagctccgacgcggcagggcgacgcctccctggcgcgtgtccagagcctgaggccccggggcaggaagtcagaccaagtcgggatttctgacgtgacgtttccacccaaaggtgctccagggtcggtggttggtcctccaggtacagagcggccaaccccgccccatccaggtgcgccccgcgcccctcactgttccagtctctctgctcagcgtccttcgccaggtgcttcccgggcacttagcgcattgccctcgaggaacgcttatcgaattgaacataaccgacaggactccaggatttggagccattcctgagctcattgcaagtaggagatgggacagtgggtgagccgaaactggtatgggaattttatcctggcctctgatgggggcagagaagacctctcagtaacaggaaggtcacagttttaaggcggcaggcacagtttgcagggccccctgtccgcaggatataccccgctccctcaaaaaagatgaagccgaaaattccatcattaaggacaaaatttaagggggcaccaaggagtccagtaacctagacaaattatatatagagagagatgattggttttttggggttttttgtttgttttttg

SEQ ID NO: 60716 - DNA, 827 bp, Homo sapiens
gcacttttccaagtgcttgtacatatttaatcttcactacacagtaggggagaactcttaccattgcattaccttgtttcacaaaggaggaatttgaggcccagaaaagttaagtactttgtccaagtcacacagctggtacgtggaagagccaagattccaactcaggccatctgactcatcggccaggtttctcaccagcacacacactgcctctgcagagagcgggtgaaactgcattgtcagtctgtcctcaccagctattccctcaccagaactcaaggccagaccctcaccctactcaacgctgccccttccttccaacctcaggcttgagggcctggcctccttcctttagtattagttatcatctgccggctgctcctgaagctctccccactgctgccctgggctgtagggggcctgctggagagagaagcaggcgttggtttggaggagccaggtgaactttgtgcagcctctcttatcacgctctgtaagcagtcagccacctcatctgattagctggtgttggtctcctttaaagatggaattttcccattagagtcaaatgagagcaggatcacagagttagaaggaatgtgaaggctcaagacccgtattctcttgttttatacaaaataagagcccacagagattaaataacttgctcaagttcacaaagctcagctgggctgaagccatgactaaaatgggatcattgtgttaataacaataacaatgatgaggcccagtgtggtggctcatgcctgtaatcccagcactttgggaggctgaggcaagtggacaatttttttttttttttt

SEQ ID NO: 60717 - DNA, 1432 bp, Homo sapiens
tccaacccctctgggtatgagattgctttgggcgatctgagatctgcaaatgtctgagaacgaggagcacatgggcacgctgatgactgccctgcaaactgcctggcagccagggtcctcctgggccctcctttaaaataacatatacataagccggcctggaggcccaggcgggaagatcacttgagctccggagttcgagtccagcctgggcaacatagcgagaccagaaaataagcaagtaagttactctctgggctgtcgtaacttattttttctttttctcctgcaaattgcaactcagaacatttggtctgccagactgaaatatggacttctgttccaaatatccagacgttacagttcccacaggtggccaggagaatgctggaacctttggcggagacggtctggtcttgtcccgcagcccgcgagggtcccccgctatttggggtcaagcagatccccggggcgctctggccaccccttgcggcagctggtgcggcctcctcggagagctccgggccggcgcccgggacaccccgccgccctccctgccgccccagggacgagcccagcggtgcggagaagtgggaggctggagcctgctgaggtcatttcctgtgcctctccgcgagctgcctggagagctgagcccagcgctctgcctttaaggagcgggcggggagccgaggggaggagggcgcccggcggagcgttgaatggggcgcagcaaggctcggccgggctttgtgcagcgagcccgcgggcacccctcccgctccagcctcgccccgccccgcagcccacgacccctgctgccggggaggggagaaccggcggcagcccgggactccggcgagagcgacgcaaggtcggctgcggcggcggcccgagggcgcccgtgtgcccagtgcgcggcggggacggccgcgagctcgctggaggtgagcgacccgcgctcccgccgctgtggtgggctggggctgcgccgcggcggagggcgtcaggctgcgcgcgggggacggcccctcgggcccagaggacgatccggagcaggtgcctccctacctggaagcgagctcccagcggcggggagcgctggagcgcgggtctggcttgggaagccgggcgccccaggggactcgcgccgcgaggccaggaggagcctcccccgggagtacctggacttggggatcggtcagatccagccgctcctgggaagggccctcggagcggacgtgcaggctgccaccttgctatcggtgctcgctccctttcaccccttcccgcacccctccccatctcacctcaggttatttcttctgtgatttctgagtgttgtctttgggaccctatggctcaggctcgactcctaggagcaggtcattcaagcagaaaagaaaacaggttgggcgccgaatgacacaga

SEQ ID NO: 60718 - DNA, 1446 bp, Homo sapiens
ctttagaaagtacttgaaattggggaagggtttgggaggagggagggttaaaaaactcccttgaaaaacagagattaggaagaactataacactctatctatacacacagataaacacacacacttgtggaggcaaagacagtttgtggaagtctacgtaaagtattgttagcagtactactttgaggagcagaagggatggacgaggaagacccacttagtagttccttgaactcttggaattaaattactgcgcgcctatactacatagaacacatggcagttaaagttttaggccgtcgcgcaagaactagatgtatgctgagtgaacccacggagcagagcacagccacggaaggggaatgtactatccaggagcacacatttcactaaacgtcatttaaagagctgtccagcagcggaatatcgtccccagaacccgtgagttcccgccctcctgtcctatcactgtaggaggggccgaccagaggtccgggctcgaccaaagaccccaaagaccctcccaaagccgaaccccctccttcgagcgcggggaggggccgacttgccattacctcgcagagggtgaagagtccgtaggccgccagccacaccgtgcaggtgacagcggtgagcgaacgcagcgagagccgagggcagctgaggcagaattcccggcaggacggggagtagtagcggcgctgcagcgccaggcggccgccgcagatatccgaaaagctccgctcatcctccatgacgcccccactcggccgcccgcaccgcgcggcgctgcactgcgctcgccggccctggccgtctcgcccgctccagacccgcttccggcagccgcgtcaccacgccccgccctaagcctgcgcagcctcagttgcgcgccgagagctctgctgggggctgatggttgtgcgttcttccgggccggccttgactgtcttcgaaaaaacctcgtcggggcaatagttaagtggaaagattaaaatcgtttttagaccgggcgcgttgactcaggcctgtagtccagcactgggaggccaaggcgggaggatcgcttgagcctgggaggtcgaggttgcagtgagcggagatcatgcccctgctctctagcctgtgcgagagagcaagaccctgtctcaaaacaaacccacagtttgtttttgttttgagacggaatggcgcgacgtcggctcactgcaacctgcttcccccgggttcaagcgattctcctgcctaagcctcctgagtagctgggattacaggcgcgcgccaccacgccctgctgatttttgtatttttagtagagacaggtttcaccatgttggccaggttggtctcaaactcctgacctcaggtgattcgcccgcctcggcctcccgaagtgctgggattacaggcgtgagccaccgcacccagcccaaacccacagtttta

SEQ ID NO: 60719 - DNA, 695 bp, Homo sapiens
tttataaacgtgcccggctcagagagctctcatctatattatatctccgaatccaaatttcactgatgcccagtctaagagtgtttcctgggctttgagctttgagatagaacgaagcaggtggatcctggctttgactaggcagggccagaccaggcccgacccagccagcccatccgtagagtcagcatcagccgggcgtgaagattggtgtcggctcctgcgttccgccaagttcaggaacctggcatgggccggccgcctcccgcgaagggacacacctgttggtcaccgcgctcttactggccagacccggatattggccttctggcgtcagcggcaggggcatgtccctggccggagagcacaggccagagtggggtgacgtcatcgaaggcacgtcccagccttgcagagcggtgggcggggcctgcgaagaaggtgtgccgggggctggttggaggcgcgggcggcggggccaatgtggcggtgacgtcacggggcgggcggacgctggcgcgggtaggtaagagcagcggcgggcggtggcgctcactcccggcttccaaccgcgcggagcctctgccttggagattctcagtgctgcggatcatgtccctaaggggcagcctctcgcgtctcctccagacgcgagtgcattccatcctgaagaaatccgtccactccgtggctgt

SEQ ID NO: 60720 - DNA, 2241 bp, Homo sapiens
atctttttcactgtaatttgcaatattcaccagcacctagaacggtgcctcacaattcaccagcacctagcacacagcagcctcacaataaatatatattaaatacatgaatttcattctcaccagtcattcaattcctatgaccttgagtaattcgttgagcaaacacccaagctctgactcttaaataaaagcaataaaacaaagttttgtccttgccatcaaattctatatatccggaggccaagaactatagcagcttttcctatggatttagggccggaaaactctagctcctccagacagaacttgtagcaacctgaatcatgaaattaaggggtagtaaacagtctcagctgtaaaaacgttcaaaacaagaccacatctaaatgccacaatcaggttttaaaggccagctctctaccctccaataactggtatttaccaacacccccaaattatgactcctttgggtttttaaccctttttctgtgctacggatcctctgtcagtctggtgaaaactagacctgtcttgagactagtgcttttaaatgcataaaacaaacaaaaacagctatgaaagaaacccactctacattacaggaccgcagatgcaaaagcccctctgctctatttgccacagtgaaaaaagatgagaaaatgtggaaggccatagaaggatcccagggaactgaatcccgaggtccaatttactctcagtggcagcagggagacctggggctgggacaagccagccctagggggcgtgtctgaggacgcggagggaggagacgcgggcccgggtctgggaggaaggtgggagaatcttccttccaaagcgcgcagggctgcgctccccacggcgtggcccacccccgcctcaccggtccccgccgtccccagcagccgctcgggcaccccttgtaggtcttcatggaggccgcggaagatctcgtgcagcttctcgaaatgctccgaggaggcggcggaggaggccatggcgcaggccgcgctggagcagcggccaccgagattcggggccctgggccctttcctagcccggcggtcagccgcccagcccagtggccataacggcgaccgccgcaccaccgccgcccaggacgaggctcttccggagccgcggcagggtcctctcgagccggaacgcccaccttctccagccagtgattgctggagcgccggcgcgaaagcctgacgagaagtcgggagactgcgcggcctaggcgactcctgagggagcggtgccgcgccggggcgatcggcagtcgcggaacccgagaagtgccgggtccgggttggggaaaggccgcagcgaaaggggcctaggggacctgcgggactggcagcgcggccgccttcctcccgggccccgccggccggcgaggggcgggcgctgcagtgcacgccgggggatgtagtttggctcggacgagagcgtctcgtcccggggtcgcgcgttgctccgggtgccaggttcagcccgcgcggcgacagcgggcttcggcccgatttgatgtatgtttgcgtctagacgtcgtcctcactgtcatcgcgctttgctttgccaccctgacccgaattcctcgtttcgcgtcttgactgttagctttcggccctggaaagatagccgggccaggggctctgcctgccgtcgggaggtggagcacttttcttggaaggcccagcggctccccaagctttcagaagtggaacccggccgggcgagtggctcgcgcctgtaatcccagtactttgggaggccgaggtgggaggattgcttgaacccagtagttcgagaccagcctgggcacaatagcgagagctctaccagaaacccaaaataagaaccgggcatggtggcgcgcacttttggccccagctacccccggaggctgaggtcccaccactgcactccagctttgggagaccttgctcccaagtggagcgagatcttgtctccaaaaaaacaaaaaacccaaaaaccaaaaattcaaaagtggaacccagttaggatgacctcgaaatactctagctgctaggcccgagtaattctcctcgtggagactaattctcctcctaggctgcctcgtgcacttgttgacaacaggtgtttgtcaagcgtaggcattgcgagggatctgggcatgttggtgaataaaacatttaatctctgctccaggggaatttataatctggtgtggaaggtgggcctggcttc

SEQ ID NO: 60721 - DNA, 1261 bp, Homo sapiens
ccagagaaggaagagaaaataaaaataaaagaaggaaagtaggtgactgtggtaagaaatgactgtgatctggcctggcttcaagttctattgggactaagaccgcccacctggggaaggagtgtgtctgtctattcagtcactggtccgtcaccactggtgatttacttagaaccaataagcaggctgccggttttacagcccgctgctgattcactggggcacttggccagccttgggctgattgatctatcacctggtcaataccttcccaccattctcccagccctcaccgccccagtaccctagctcctaactcagatcccccgtgctcctgctcgcaaggcaggatagagctcataaccaaacactcttccttttcacttttctcctttacaacatccgcccacagaacaagcgattgtaacagcaacgagagagcaaggatggggccgcagatgttacgattgctatcagtttcagagggcgaaatgtggaatcgctcctttgtacctcgaaggctggtttaaggcgtggggaataaggggaaaacagcgtcgggccatatcccattgaagagtccgaaactcaagcgtttgaggtagccttaccctcgggattccctggagccagaatcagggggtgcttagacaaaagaaaaacaggccagggaaaagcagtgtgccccggactgccgccctttctcaccgcctggggtctcgggtgtcctcctggcacccaggacagctggacctcgcctccaacccaccgaactctgggctccgccatcttggagcccccccaggggagttttccaagaaagctttggtggggattctatgtttccctcccgccccgcaacaagaattctcaagagaaggcaatacatttgcacagacctgatttggggcgcagccatatacagaaggaagggcagaaggaggagcaacagcgggaacatgagctcaaccatctctgccggctgcagcggcaccagagcgggatgctccagcgttgctcgccgactatggcttctctttctagacacgccccaattcaaattgcgacagcccggggagcagaccttctgggaaatgtagtccagagcttgacagcctcaggctggctacgtgggagcgctgccgccaacgctggcagaagttgaattatacatcgctaatccccaaccatctagggcttagggcctgtgggatcattcacccagctctcagttattttttctgccttctgaatactcagt

SEQ ID NO: 60722 - DNA, 957 bp, Homo sapiens
ggcaaatgcagctcaaaataaagtcctacccaccaccttccaatcagatcgctacccctaaactcctcctttagaaatgataaagataccactgtcaatgattgatactactcactacatgttgtcatgtttattagtagtactaaagccacagtataaaaacgacattgaaatagaaggacctcgaaccaggcactccttttggaacatagaaggctgagaaggctatagatctttctgaaagatcaattcattcctgttcaaattccgcctggccaggagtggtacctgctgaatcctggggttatgtttcctgagtccctccttctcacttgtgtattttgctgcaggagataagctgttttcctgggctcagagtgtgtccctgatctaattgtgccctctttgtcccaggcaccggggtcaccacctacgcagtgcacccaggcgtcgtccgctctgagctggtccggcactcctccctgctctgcctgctctggcggctcttctccccctttgtcaagacggcacgggagggggcgcagaccagcctgcactgcgccctggctgagggcctggagcccctgagtggcaagtacttcaggtgtgtgaaggcaatgcggttctctccaccacctgtgtgcatgggaggtgccggactcgctgggctgttcatcctgagaagctgagtttgtgcctgatgatgcaatccaggtttgggttgggcctgcaaacagaatgccgttgctttgttaaggaaacttacagtacaaacttatgtgttgggaagagttgcttttctggctttattttatactcgtgtgccgcttttccatgaaaactttgcagctttctgaaagcttttaaagaagactgtcgctgttggttatgccatggagatctggatcgtttttctccttctttaagcttttggctcacttgattcatgaattttta

SEQ ID NO: 60723 - DNA, 1630 bp, Homo sapiens
taccagcaattcagcttcttaatatctgcagtaacattagcctatgtatgtaaagaggaggcattgttcatattagcaaaaaaatggaaatagcctaaaagtccatcagttggcgaaaaactaatctgtggtatgattatacaatctgacatgattatataataattatatactaatatacttatatatactaatatacttataaatatatacttataaaatatatacttatagaaatatacttatatacttataaataattatatactaatctctgtatgattatatgatgaaataattattttggagtagttattccaaaaatcattatattaaaaaaataattatacacgtatatacttggataaatcatactgaatttcagaatgatgtgttctgtgtagtaagacttatattttgaaattacacacatgtaatatatattttctatgagtacatatataggtatgtaaaagcacagaaaaagatataaaacaatataatgaatgtgtaagagaggttatcctggggaaggattaatgggaaatgatttttcaattttttaaaagcagaatattcttatatcttacttgaaaattaaacattaataacttcagcagacactgttagctgtcacccagtagtcattccctactctgactttgttccagtgtctacctctgctttctgtgaatgattaactgatcgcagttgttctcaactctggctgtgtatttttaaatatttaagatgccaaagtccaggcctccccacagagatccatattcaattgttctcgccttgggaaaatgtttttgaaagcaacccaggtgattctgatgggctgccagggctgtgaaccactggcccaaggcaaccgtgcggatcacatttttttgcaagtgacggtgatggaaaagtcacgtggctcaatcatggccggtgggatgtggaaggagcctctttggtagcttctaggaaaggcttcctcattggttaaaacatgaggcacaggaagaaattttctgtcttgtgttggatgctgtcatggctaaacatgacacctgaatctgccacaatcatcttgagaccatgagtgaagctggctggcccaaaaactagcgcacacgccgagggtggtgaaaggaaagatagagagaatctgggttgctgatgacgtggtggtgagtcactgaattaaccaagactggagctgtgctcccttgggacttcttgttacacaacataataaattgaccttattaagtctgtgtcctactgatgctatcgtattatgttgaaccctataaagttgctgacattctaccatttttaacctactttttaatttttttttttacttttttttcttaccattactgctagtccaaggcagatatcttcctgacctacttttatcaccctcaatttcctcatctgccaagtgaatatttgacaactttttcattacatttttctccacccccaagttctgtcatcttccattgatttctgaatatgacagatatccatggagaaaactgacctaatatcctagcacagagaatcctaatagtcctggcacacccttacaggtgttcacccaagttttaatctatatgtacaatct

SEQ ID NO: 60724 - DNA, 1810 bp, Homo sapiens
cttcagagggtagttgagtgggggcacattgaccaatgcccaaatattgaaccacatgtctctcaccctgggaccgtctggtaggaaaagagatcccttacctcagcagatttggacacaccaccaatgcctgaagtatgtcttctaccctctttgggatatccccttgtccctcctgtagctgaggtacacatgcctgtgccagctcccattctcccctccgcaggcattcgcagaaaaatccaaaaagctgcttctgcgaagcagcttcctcttttccaaatggatgattcattttcccagcacagagtgcagggagatacaaagaaatgagttatgccgaacacattctcaatgttctcattcgcggagtacctcctagaaacaacacaacgccagtgagaagaaacagaaggcactgtattaagacaaagcagcaactactggtccgcctgggaaaggcgggacttgcttgcctaagtatcgttttcagtttaatttcccacgttactttttgaaaacactttcttcaaggggtggatcccatctcttcacgcggattcctatatttaataatattaatagtcatatttgctccgggcgcagacccataactctacgtccgtattccctactgaacgttatgcccagtcttgactccaaatccccaggtggtcgcctcctcaagaatgagaaattcagcaggaacctccctagtttgagccctctgttaaggcagaggattgacgaccaggagacgaatctgtgtcataagtggaaagcagtgtgggggtgggccgcagggacgctctctgcgggggtcgtggagaggggcccctccctctcaggggtgtcttacactcacctgctcccggcgcccaaagcaatagagctctcagcgcagccatgtttgagccgagtcaggtgacagaacccactccgaacagcggtggtgggggtggtgacaaagactgaaagccccactcctattggctcaaggcagggaagatgaaaattaagtgccatatttgtttgagtcacgtgacgccacctctccgggagtagggaaagctagaaagctcggaaagaggaaatcagctacctggctgcggaccatctccctcaattgtgacagctccggcgctcaatactttcagttctgcattcggccgagcaggtggcaggaagaactgtgaccctggatttttttttttcttccactctcttatctccttaacatgtgaagtcaacatttattgaacgccaaccagtgatggtgttttgccaggcgcgggggatacccggagctaggagaactgggttctcctccattattattctatctactgggctcttttgttccggaactctgcggtctgaatttccatattcttctgcttcactccattcatttatttgcacatttaccctacaactgttaattgaacggtgtgctaggctttattttatttttttagagacagagtctctctgtcgctggagtgcggtggtgtgatctcggctcatggcagcctcgaacttcctggatcaagtaatccttaagcctcagccttcctgtagtagctgggactagaggcgcgcgccactacaccgggcttaggccctattctctaagttgagtaaatggaggtccttcttctcaagggagatgcaggccaaaaattaggagacggtgggctaaattataagacagaagtatgcataagagatcagagagcaaagaatgagcaaaggctttttcgcaaacacaataatctgaaaccaagtcttttgttttgagacagagtct

SEQ ID NO: 60725 - DNA, 621 bp, Homo sapiens
aataaataaagtcaatatacacctgactacaaagcttcgtagactatcaacatcagttacttctgacagcttggttgtagatgtgaaaggaaatgggttcattgtatctgatgctgccgttagaccaagctggcaccacagaagacctggaatttgttaatactgcttaactttcatgtttcctggtacaatcaggatgaagggaactgtaaccactaggtggcatcttttaattagaaaactgtgaatactccattgctcactaggatccttgtggcctacttagcaaagcaattgcctgtgagagcagctggtggcagtctttaagatgcagatttcaaataggagagaaaggaagagataaagataaaaagagaggaaagaagtgggagggcaagagaagagaaaaggagaaagtaaacaggcgtactgtgaaggaagtagtaaaatgccatcagtaattagctcaggaaagtggtatttatggcatttgttgcttaccattgtttcatttctttatttatttgacacgtatttaatgggaattaggaattctggctgaggatacgagatgctgtttctaccctcagagagttgatagctaaagggagtttaaaatat

SEQ ID NO: 60726 - DNA, 5203 bp, Homo sapiens
ccaaaagtgctgggattacaggcgtgagccaccgcacccagccttcccagtctgaatttcttaaaagcttttgcttaggttaagttgtgggagaaaaactgaactcacccagctagccaaactatctctctgttgtctttccactttatccatctattttttactttttttggaaacacaataacaatagtgtagaagtcttttcacattgcctgactctcctgtttgtgtcccataaggttccatgtactctgtccagaactcagcttattatgtcaaaggattctgtctggactggtcagtcagagatataagttctcattacctcagtgtgtgtgtttgtatctgtatttaatgatgtttgtgcttggcttaggctggggattttgaaatctttgcagagtttcccaatttgttgggcagttttagaaatgatagtatcagtaggaaaaaaaaaacacagaaaaatacaatttcttctttcatctatgtcccatattatacaaatgttcgctgaaagcaccaattttctgggaaaggttttgactcagacttttttcaccctttacctctactctccaattcatgtttccttcttacaacgtggtcatatgcttgcccaggcctggcttatgaaccgtgcagaatatttgtggggtttgttttttaagccctaaactgtgcacatgatgcagtatttaatttggaatgagctcttagtttagtcacatgtgcttcttgtggtgtttatcttggaatccacaagtaggagggaagtatttttgcattttatacatctggacattgttcatggtccttctgtaacttgggaattctgtgtgaggcaaaatccaaaaaaacagcattaaaaataacacggagttatgatgacatctgagtcaaaacccttgagaatacccttctgatcccagcagagtttgtttttgaggtggtgaactttttcaattgtgtgtggttcactgctggcctgaggagaatgctgggattataaggttacctgacacccttgcatgtagactaatgggtttccagacattctgaaagtctattgcagatttggcatagggggaagattttgctttttggcttagggggaggattttgctctaattttgcatggggtaaaataggtaaagtgaattctgctcactgttgctatgcctctgccacaagcattctaagagacctgtgagactgtccctatttctctcttaaacttgcctaattacagccagcttagagctaaagttgactctgagaatgcctcgggctctgtgtcaggactgggggtttagtaaccttatccttcccctgatttcacatgagaagttgttttaaacaggattggacatagagatatagcacagtacctcctccttttggctaggggtctgctaaagtggaaaaagtgggaaaggatgtacagaaactcctgctctttgagtgagtttgcatatggacagtattgctttttggccccagcctagttttctttcattcccatgtctcatcttttatgcagctgcagagagcaggctgggaaagcagaatgaaagcttcaaacagatttgcacttgaataaaagaaagagtgatttctcttgttcagagtacagaccagtttgggtagaaaactgtttgcttttttactttctgggtaaggactgtttgcttttctctctttaaatgtagtaaagagaggaaaagctaataaagtagttggacctgctggttataattcatagagaattttcaagtgtgtttaataaagtctctcatataattataacagaaataagtaattggaggggaaaggttaaaatcctgtagaggtttaagaatcagttaaatatgaggcagtgtgcttggatgagacaactaactaggagctgcttctctttgctgatttctctgaactttccttttgagattttttcctctttactttcgtaatgcattttgcaactttcattaaaaaaatccatcaatgtttaaacttctaacaaataaacatatcctagtcctattatggaaatcacaatgtagcagagaatagcttgacttcagctagagagaggttaatgataggaaccctaaggattgataccaagatcatgcttgtttagtgttttaatgactccagaaggaaatggtgaaatctgctgatgacaccaaattgtttttgctgatccaaacaaggatttctgggaagcttcttcagagtatttggaatagtagaagaattgagaaatatggtggcagacacactgaacttaaagtgaaggtttacgtgaagtagcaggagtaacgtcaatacgttgaagttacaaagcctgccaaatcttccaaaaggaagattacggagtctatagtttcatgaaaggaagacttaagacaaagaacatttatacatatagcaaatgaaaactattatgggaatagttgcaattataaagttcagtgacttaaaaatatgatgtctgaatttctttttaaatgtcagcagtagtatatctaaataggtgttgtttctctcgaaatggtcatagaagattatatacccattttatgcatgctcctttcttggtacgttcttttgtcagttttctgtggtggcaggtctttattttgcaggctgttttgaattttgaaacagtcaactgtcacttaaagccaagtgtgataaataagatgggtggtcaaactaagtaatagatttaaatatattaaatatattaaatgaaatataaagtagtaaaacttattttcttttattgctttcaaaagtgattctaaaggacattaccaatgagaaattgcaaaaatgtttgtgtactaatagtgttagattaagttcttggttgatagatttcacaaacatcacttatttagatatgtaagttacagggcttgtactaatacacattttattatattggagacaaaccatgtttataagtgacctttttaaaatgttttctttatgctccctaaatatacacttagggaggaagaaggaggttttgaattaactggagatttccctaatgtgttgaatttttctgactaaagcctacatttttgtaaagaaaaagaccctgtgggataaaaaatacgataggcactatcacaggagctgtgggctggccatctatatccatccatctatctattattccacccatccctccatccatccatccatttatttaattaagttatttttaacggttggctctggagttgacattcatttattttaaaagaacagtgaatcatagctcttttcctcaagatgcttgcttttatttgcatggtggcatattgattaagtactcagaacactatttgacatatggtaagccctcaataaaagtttgttattattatgactgtacttctcccctctaatgtatagaggtaaacattttggttcctattgtgacacgtgggttataatgagttagggcctacttaagaagaaagtggaaagaaagcgggtaaaattgttgctcagatactagcatgtgggtggagatatagatatagatataggtatagatatagatagtgtaggtatttacatctaagtatattgtataaagtgacggattctgaatttgctacatttctcatttcttcagcactctgggataaaaccagcaaaaatgatgtgatctgaacagacacagtagatggcgctgtaggacttagtttttaaagaaaacagtacagccagggggagtgggggcatggagtgggaagaaaactaaagcacattttaatgggctcttttgtaccaccaagacaatttcatcttagagtacgtgcctctaagaagtaaagatttttttttttttttttttttgacagagctggagaataattttaggaaaactaaatctccctgttgctatgtttgtgccagctttgtcacttggaaagtattagttgttttaagccacaaatatataaggaagttattttctttcaaaacattgccttatttatgagggttttgtttgtttgttttagctgtctttgtctctgtattttaatatttttgctcctagcttttttggccctttgttgtttcataaaaacgtggttgtaaagttaatttgaaccatatcaatatgactataatgtcatattttaaaattcagctatattttaataggccttaaaaatacaggtttacattaaagagtaacatagtgtttttgatactaccgtagtgtgtttatgtacttgatcttatttaatcttagtactaattgtatgaattttattattcacttttctaggtaaataaactatatcagagatacttagtaacttgccaagctcacatacctagtggttgaactagtagttgctgcaagagtttcgccagcatattaaagttgtattttttgagcacttactgtgtgccaggcaagctaaccactggaaatactatagtgtccaaagctgacctggaccctgcccttatggaccttacagttattagataccccacagacattttttgaaatctgctggattgagagtgggtcatgaagatgaatttgaatcattgtgattgttggataagccagagagccctttcaccaaaaagaaagtaagaatcatacctaccttgaatatattactgtattaaaatatttgttttagttgtactccctgtagccaagggaaaggcaagacctcctttggctacaatgagtaactaaactgtcttctagataagaatcaggaagagtaaggaaaatctggctatactataatgtcaaaattttccactgattaaatggtattaaaatatctaaagcaagaaggtgttagttagcagtggaagtctgagagattaatgtggtttgtgtacagcctaagaccatgttaacttctaattggcttctctagtgccatttggtgagatcttttagagtacagccagcttagtgataccccaaattgccaagtacccctttcatcttgggacattaattgtcaaaaatctttgaattgatttttcttcagaaagcttcactttattattttcacacaataccaagttctcatgatatttatgggtatgtgattggtgagaaaacagaccaagagttgttttttgtttgtttgttttttgtgacgaagtgttgctttgtcgcccagactgg

SEQ ID NO: 60727 - DNA, 733 bp, Homo sapiens
tgagggagggcaaacaactgcttctacgtgttttgttttgttttaagaactcaaaaaagcatggtaggttctttgagcaaggccttagttgtcaaaagtttctgaagccctcaaaccaataaatagtattattactaattaaaagagcagataaactgagaaacaaagcacttagacctagggtgacatggtgagaccaaaactgaattctgtgtcttaaaattcagttatctaatctccccacttcattgcatattctactagcagtcattcagtaaagtacctttcatcactgcaggagtctctctgaacacagtggctttggaatagggttatctccagacattgttgacatcatgtctctgctcacataccaattgagtgaatattggcccacatgattcttgtaagtggattacaagaaatccacgatagacttcattcacttttgatgaaaccaagaactttccctcttgagctacctaatgagatactgttatttgtttattatgcagggtacaggttggggcttgttagctctctgaattcttaagcactcaactgaggaaatcaaatgcatgattttactatgcctgcacaggagttggagaaattcataaagtttatactttactagttttcttaagaatacagatgtaaataggctgttaagtctgcccaggcagaactgttgtttcagatgaaacttaatgaccacaccctcccaccccaa

SEQ ID NO: 60728 - DNA, 5293 bp, Homo sapiens
caaaaattggcctggcgtgatggcacacgcttataatcccagctagtcgggaggctgaggcaggagaatcacatgaacccgggaggcggaggttgcagtgagccgagaccacgccactgcactcctgatagaaggaaaactggacctaaggatttgagttttgacattactagtacaagctgtgtgtaactttggggaaggctgctacattagtttcagtttcctattgctatggtaagaaattactacagatttaagttacataaaacaacccaaatttattattttatagttcttgagaattttaaaatcaaagtgttctttaatgactacaaaagctaatacactgttaacctctttccaattctattaataccatcattatctttaatagttgcatggaatccacatggaatgcaccataaatgaatcgaaatcttatgttgaacatttgtttactgtcttttgccattataaacaatattatgatgaacatccctaaatatatgcctttgaatacttgttcaattttattcattggggcaaaaaggtatgcacattttaaagaactacagtccacaggtgttcatgcaattgctgagggttttctgagaaggtgaacaagagcagtctatttcaaaactactgaagccctttttgcatgactgactggcattccctaactgggccttcttcgttgccctgacactgcctgttgctgctcctctgagaaggaatgtgtattcacagatgaggcgctccattagtcatggtgcatttcctgggccctggagacatgggcatgacatcaccaagggccaatgagaaaggattctctgtagcaagctctcaaaactctttagaggattgtagactgtgtgttctgttcctagccctcagggtgtgatttgagcttgccttgctcatccagccatagtctgggcacaaaagtctagcttacagacccaagaagccaggacaagcttgaaaatctgcagagctgcaggcagattcccatttagtattttttttttccagggctcaggttgttattcccagagttttccactcctaatgatgttgttacttcatgtggtaatgggtgggtggtgaaagatgaagtctgcattaaataaaagacatttggcagttaaaatttctgggtaagtataggttggtagcataacaaaatcagaagtacattttaccgttttgttacattgcttttgtgtgtagtttcacataataaaacaacatcttttaacagcaaaggctcctagcaaaatgagtgtggcttaaaatagggcaattaccaaagaactttactgaggggattagtaactcattaaatcttttctcttcaaggagaaaagaaacttaaaaaaaaattctcttttcttgggttttaagcattttggataaaaacttttctgtctttctctgtatctgtctctctctctgctccctaatttatgtatttatttatgaaaatgatttgtggaatttagtcagggataactttgttaattctgcacaccaggaagtctattgaaagacttatttcctaattggcccaatcttttgctaacaaggtataattgtaaaattatctttttaaaaaatagtcaaggaaattaaggctcaaaactcaatgtgagcttacactgaacagacttttatagcttaactcagtagttgaacctaagagctgtgcttttctatcttcattcaatctatgattgaatgagaatggttcttttagtattttttcatgtttaattcctttttgatgaagtcaaagagaaattgggaaaagtagccatctttattagtgtgttatctgtggatgccatatactatggaagaacctgcctctaccacttttaaaaaaatgtttctgcaagataaagatgatttttttttgtaattatagcagcttttatttttaaaaatcacttgaaaccgcatgaatttatccttatttcctaacatatataccagtaattaaaggactttcctctagaactataacatactataagacagggcacttttcaacacttcagagatcctccttcaaagatctctgtgcaattcaaaacatttattactaaaatttcaaaacatctctggagatattctaaatggttttttttttttggcttgtatagatgagaaagttgaggtacagaaagattgaaccttgtactttgtgtcagtcatagaagcagatactgcatacataaatcattcttttatcaaaactcttaagaggacagttctttgtgtctttgtataaaattgttcttgttttcctttgacagcttcaggctttgccttattaacagcagtgcttatttttcaaaaccctttgattgagacaaaaaaaaaagcaggttcatctagcctaggcagaactggaagaagccctgaaagggataaattacctaaggggtggcagtgtggggcatgggagcactcccactgcctcactcttagcagagtacttgattcttctcaatcccatcccacaatttctcccacctgaaccaatatttgccagttttctactcgagggttgccatgactcctgatgagttaatattggtaaaacactttaagcctttggaaaaaggtctcataaaagtgtacaattggcactggccctgatagtagtcacaggctttttgagtgggcactaggcaccctcagataaggttaaccagatccctgtttttggcgaggacaggctctagaatgaggtctgctgctgccatcttgagagaacacatctggtttgaaacgttgaaagccaggtgacccttgaagcagccacacagtaatgtctcctcactgcttctgcttcctgctaatttggggagcagcaggtgcctccctgagaaaccctgccagagggttggcatgccatgctgatcgtctcattaagccctaaactttttctacagaagaaaactctcaaaaggcgattccagaatatgacagagagaggtcatgacagataatcagatcagtttataaaaagttaaggatgagtcatgtcactcctaaaggagttggcatcaatttattacacaagaccaaacactgaaggaagaaaagcctttagtctcattaaggagcccagacaaaaatcccacttaatccatcttgcttttccttttcctgcaactcagctggtgtgcaggtgtagggcagcttggcagaagatttgaacgtttggaaaagggagtcattactgaaagtcactgacacacacttcccttggaatgctgctgatgtcatggaaaaccaggaccttagcaataacccctaacaaccacagctacagtaaacagtaaatgttacctccaccaaggcattggtttttaaagagttttaacaggccagggcttgccagccacaactcataaaaatgttcttataattttaccctactctctaaaagtgctggataactgctgaggtttctctgccacttgggatgcaaagccaaattcacgtcactttcaaggttcactaatcagaatttacagcatttcttttgcagtcctcttcataccccctgccatgctcacagagttaggtctggtagatttcatactttttcaaagaagtctcttgtcttactgagttgtctcaatttctggtgatggtgtgaattaatgtgccaggttttgactagtgttttattagtctagaggttaggcaaatctggttaattgatagcactcaatctataggttatattccaatcaatttgaaacaaccgggcaaagtggcattctatagttcaaactctgaactgggtattgtcaaggtgaccatataatttatcatcaaaactaggatatttttgaaagtaaaggggctctattaataattactctgagataacagcaataaaccgggactgtcgaagcaagttgagcatagggtcacccttgttactgtgccaagagtcaccatctagctgtcatttattaagtcagacattgaagaaacttgcaggaatgcagaacagtgccactcttctcatgaacattttttgttttagaaaatctagtcattctcataaaaatgttatttatgataagatgttatgagtttattagtgttagttttaaatgaattaaataaatgctttaaaattcatctattttaatttctaatatggtaaatataatcctcccaagtaaaagctctataggtcttcaataatttttatattcttaaagggaacccaagactaaaagttttgagaattgctgctttttctctgcatgggaaagaatatactactaaagcaaaatgataaattccctggcaagagagaccagcttaatcatgattgcatctgctacagcactagcaaaatgtcctgcatatagttagtattctgtaatacataaatatgagtagacaaatctcgtgtgacaacgctgaaaagttgctgtgttttctgacgtttgggtattacattaacattattatttggtttaagtctttgttttttgatattcagtatgtttggtactctttgttaatcttatttcgacacaacaatgatgatgtcatttttccttcgaaagttttatgggatagatcaaatttcctatgaaatgagtatgttagataagaaaacataaagcataataaaagtaggactcctttcttttaacctgcctaactcatgtttatcctttatctcaggtgtcatcttcttcatttggccttcctagaccttcccaggctggtctgcagcccctcccatgtgctttcaaagtaccttttatcacaagacttatgactcagggtcattccattcatatgttggtttccccagttaattttgagtgcttttatgtcagaagcatcctttaatttccttattcccagaattaaatgatgcttggtaaagctattaaagactatctgttacactgaaatgaatataaagaaggaaaaactagttaatttaacttttactagttaatgaagtgttttttttttaaatgtcatatgacatgatttctatagtactggaagaaaaaattttttagagtaaaggaaaccacagtttgaggaaagaagatagattgctttgttatgaccttacatgcagattgatttacatctacctacccctccactctcaaactccttttcagagttagactcttttaagccctttaagggttacgtatttctgagtatgtgatttctgtcaatatcagaaattatttccattggcaaaaaaagttatgaaatgatt

SEQ ID NO: 60729 - DNA, 2402 bp, Homo sapiens
gaaaaagttgaaaaaatactgtaataaatggtgctgggttaattaatatattattaatatggtcctatttttcttgagaagaaatgttcttgaagatttgaaatttcttatctgtttacaaacattttcctggtgccatcagcagtttattcctctttactgctttgtgatagggcttggtattcccaattttacagagcagagatgacaggtcacttgactaaacaagtgacttatttagaatttcacaggaaagtaattacagagcccttaaatttcctgtctcttacttctatgatataaaacaatttactttgcattccttatttatataaatgccttagagcatttcctttcctttaataaaatcatgaagactatcacctggtaatgaaattgttaggatggaagagaaatgaactaggcacagtgtacgtgaatttgattattgccttttcaactgtctaataatgggagctgtgggctcataggctctccttttgaattgtgaaaactatacttattttatactacattggtgaagttccctgaagtccttaaaaaacaaacaagatttaaagtgcaaaatgttattgttaagttaaaatgacccttgtgtgtttgcaaagctccgcgggctttctggggctagtgatccccttggtgagcattgtggagtgtggtgggaaccagccatgttttggtgatttcttttagatttctaaaactgtttttctgttgggttgaagtgggaaaacagctttggaactgcttttggtgttgctctgagtgtgtttgggagtgcattccaatagtttgtgaggggatgttagctgttcaggaaaaataacccttaccaaaggtaatggttcccactagcattttcagtaacatgtaccagatgtgggtagttaattattctcagatctgataaatacctgccagccaagcctaattttattttcagtaaacagtggccaaaggtcctagctgttcatttgataggatgggcctgtttgcacttatctattaataaaagcacaacactcctttagttttcctttcccagggccagataaaacattttagacactcacgtatttgtcttagtaaatcagacaaagtaaacaaatctggtagattaacttggtaaatagagtgtggttaagtgttacctttggagttgaactcagtgccatataaatagcattaatcgcatggtattttcaataatctttatggagtaaaacggagggttgtttttttctttcaaccaacagggacttaagtatatttcttaagtactttcagatgttcttctgtatggagattttaaaatcactttaaaatgaaatttattcttttgtcccattagtaacttgttgggaactttgtactagttaacattatgtttaaaaacctggaaacctctatagttcatctcagaagaaaaataggactacatagtggcatgcaagctttgccagacagagataatggccatctagaggttactgatttgggtggaacagtgaaaatggggccgcttttatggggaagacagtggctggtaggcagaaattcactttattcatatgcattttttttcctcttgggtaaagagttttattagggtcagaagtactatttatttttgtgaggtaaattcttgtcttgtgagaactggcatgaaacagactcattatttcacactagccaacaaaacagtattttatcaaagtaacttctagtcagtccaagactggactggatttgtactggtaacctggtggtgcagggctctaagtctcatgccagctcttgtctccctcattaaacttccttttttagtaatgattaaaaacaactctctttactacaatatattttctcattggctttatactcgaagttgcaagtactttataaaattatttttagttttgcatgctgtataataatccatctaatttggtaagcatagtacataaaagaaatagctgaaaggctttagagaaagttccctactcatacctccccctttacaatgatctcggcattaatatcttatgctgtaagagggtggcctggcacagtaccatgaatattgtgcccgatacccagtggtaacctaccaatgattgttatgaaaatgatggtgatgatagtataggggagagagtgtaaaccaaaagttgagatctgtattctgttttcagcttcattttaatggcctactggaagaccaggtacattatttctgctcttttttttttttttttttagtttctccagctatacatgaagaaaaaagtcctagtccactagccaacctgacaggcatgttgtgaaaactaatgaaagtataaagttctcatagtccgaagcataaaaggtgctgt

SEQ ID NO: 60730 - DNA, 4971 bp, Homo sapiens
gctgtggtggaaagaaccattgaaactctctcagcctttagttcttcattaggaagatgcctttcttactgagggttgtaatgattgtgaagtccagttttctgacttctccattagggaataagagaactctttggttttaaattgaaagatggagtgattcactctccagtgtaggagggaacctactctacttgaatttgctatatttctttatttcctaggaaaatgttggtggttttccctcccaagcattctctctagagtttagcagcatcctttccttgaaagcaaaggcctcatttcctatttctttcatatcctttaatttgcctagtacagggtccatttcatagtaagcactcattaaaaacattttagttaattaactacaaaatgtctggctcaggtttaggagagaatgaaagattgggcaggggaagtactggcacacaggagaattaaaatcagaggatatcctttttattactaattctttttccaataataaaagtactctattttccttatttaagaaagctatcatttaaaaaattagtgttctaaaaccacaccctgaaatgactactgttaacattttgtcatatttcttactagtcttattttatacacatttaaaatttttacatagtttagcttatattttatggtttttatatagtattttttacttattttatcatctcatcctattaaaaacttttttgtcaaaggaattttaatggcagcagaattgtttatttcacaactgtaatatgaattctataaccattctagatgttggacatttaggctgaatctattttttcatgattataattagcaagttgccttttggaaaggctatacaactttttattctcatttctgaacataaaatgttgatgaaaaaaatgtattgggaatgataacttcactgagttttagaccagggtttccagaagtaaaatgttcctgtcttggttttggcctttgggtagaaaaaagtaagtttttaccaggagtccctgaaagggaaggccctgctggccaggggtttcaggctcctcctccataacccatcaagtggccaaagtcttgattttctgtgtaaacgggtagacaggttctcagcctgatcgagtcatgtatttatagaagaggttctctttttcttgaagaatttctgacttacttgatctgtcatcattgtctcatatttgtaactttagagcctgacagaacaaaaaagaaataagccatttctgtagcagaatcttatttggagaaaaggattcaagactacagcgtcctatttttttttgtttgtttgtttttgttttgagatggagtttcactcctgttgcccagtctggagtgcaatggcagcaatctcagctcactgcaacctctgcctcccgggttcaagtgattctcctgcctcagcctcccaagtagctgggattacaggcgcccaccaccacacccagctaattttttgtatttttagtagagacagtgtttcaccatgttggcccggctcgtctcaaactcctgacctcaggtgatccacccacctcggcctcccaaagtgctgggattacaggcataagaaccgcacccagcctacagtgtcttttactaggaattgtaattttattagtttctaaagaaaatattaaatgcagtgttttgtaggcagtgattacctttcatcttgtttgtcatatttctcattctttttttgtgtgtgtgacggagtctcgctctgtcgcccaggctggagtgcaatggggcgatctcggttcactttaacctctgcctccggggttcaagagattctcctgcctcagcctcccaagtaactgggattgcagatgcccaccaccaagccctgctaatttttgtatttttagtagatacaaggtttcaccatgttggccagcctggtttcgaactcctgacctcaagtgatccacccacctcagcctcccaaagtgctgggattacaggtgtgagccaccacacccagccatatttctcattcttattttaggctgatgaaaatactaaatatttcaacacctctgtatcatagccatgtttaaatgtgcatatccaccagtcaattttaatacattcctttctagtaaattctgttaggtcttcagttcaactgtacctccctcagtgtcactttttaccttccctcctcccttaaatcgcctagttctcattttgaaaaggtagagaaatcctttgtcagtagttaggaggttgtagatcctgtatgattttctgtcattacattcttaatctattacatgtgtatttgtcccgtccttactgacttaacctctgaccacattgcaaaatgtaaacagagccagataccgacaggtttgtcccttcattagccagggcccaattcataatttctattttctaatttggagaataagaaggttagctagattaagaggctttcctaagtcacataaccgtttgcaagtagctaagaacaggattgtgaactcttgccaaactcctccataaaattccataagcttgtgggagctcatttatacaatatttaagaggttatataggcaaggagaataattgaatttctatatatttagattgactgatatttcccaaacttcaagtggaaaaaaaaagcccttaaagaaagagcttaagagaattaaaatgatgtgacccgaaccatggttcctttctcattcaattattttcttttaaccactgatggctttttgtgcttggctgggtaactttctagctagtcaagcctatgttatgaaagagaaataagacacttaatcctgtgaatgattaactagtattggcctcccttcccagtagtttgcccttcctgtattgtagtctgtgtactcatttctgagccaaatctccaaggtctcttattattgagtgtagggacacctggattacagggagttaggcctttgttttagtctgaagatgatgtggctaattatacagctccaggcatttgcattttttcaaggcattttaaagtttattgcttgtgaaaacctagtttgtaaagtatcatttttaaattttacaggtgaagaagtagaactcagagaagttttacttgccaaaagttctgcagcaagtcagtggcaaattcaaataagtgtacactcatgtatacttagctcagtgtttaactcatggaggtattgttttgtttcttatttataatataaagccaagtagggctggctagagccatttgtagttaatacattttggtctttgatctttttccacataaggtcagacttcaagatagaaaaatattctttatattctttgcaaagagctgattgccatctttctatactgcctgtgggaacactctggccttagaatccaagattttattatccaagacagcagccagtaagtacagtgagacctaagtggggaattaacttttgggctgtagattttgaatgagaagtcctactcaggatctgagaggtgacaagaacgagtgactattcattgatttggattcctgggtcttggcaccttctgtgggataagaatcacatgcaatatgagtaattttgtggaaaggtcttggtcctggttcatagactgtctcagttcctcagtagagagaacttagaggagaaatgactcccttgttgtcatattgaagcagcagcagactattagggagtacccatgttcctggcttctttccttgggctggaaccattcaactgcacagataaatgtttactcaaggaagaatgcatagctttgaaacagtcttaagatgagtaaaagtcttaagatcagtaaaatatacaaactactcctatgtaggtcattatattaacatctgtggccacatattggtccatgaaagggatacttctagccactgaaatcttaaccactagaaacttactctgcagggcatctttgtaattatggcactgagtagcccaagtcttagattatttcattgtgatgtttccagtgtaccatcaactgtataggtgattagcatttgcctattaattccttcttcctctcttatcttcttaatgactcttatacattttgttatcttttcttactctccatgtagtagttcttactctgcatgttcagactctagtggaggtgctaggaagttccactttctggtagattatttagagtacaggatagtcaagggaataaggatggtgctaaggcaggctgtggtggtttaagcctatagtgccagctactcaggtgggaggatccctggagcccaggagttccagggtgtagtggagctatgattgtatcactgcactctagcttgggcaaaaaaagtgagaccctgtctccaaaaaaaaaagaaaaaaaaagtggttataagaaccataggaaagagaacaacatcattttgactaagacaaaggcataaccttgacagatctcagtgtctccaggctaagagaagagcaacttagatatagtaccttgagcctttcaatgattgctgtttaaaaagtatatgactgtaggataggatacattggaaatactgaacaatgctggaggaaagccaacagcatgtggataagaccatccaatggggccaagatgagggggcactggattggatcaacgttaatgactaaaattctctgcttctaatatacacatgactaactcccttactcacttcaagcctttgctgaaatgttatcttctcaacgggtctgcaaacctattctgacctacctatttaaacttggaattaattgaatgaattaatggaagcctcatgttgattaatcctcttttcaaggactgaactgcattacataagaaaatttaattctattaatggtgagctcagtggcacaatccacatctaagtttttagctttatcctccttgcaaata

SEQ ID NO: 60731 - DNA, 1526 bp, Homo sapiens
cagcaaacaaaatgaaactccccttgagataaaggtaatcaagatgaaggtgtatttacaaagatgagcagtgggatttatccagtgactctggaaggtaatccccagatttagtgctccatgaataccttgccatgttcctaagctggtaaattactctgagttttatgagagcggattgtgggaagcatctagatgaaattcagcctgtttcacctcgagtccagggctcactaatgcaccccaggtgtgcagactgcccaggctttctgccttggaagcctcaaggaactttcatcccaaagggaagctttgaagaataccaaggacctttctatctgtccttgattttttgtcatttttctgcccacatttggtaattggagatatttgtggtgttaaagccggacttgttccttctcagcctgccccctccagtagtgaaattttaagcctgtggctttgattatgcaaagcagtgatttctctgcagtgtccctcagatgtaaaaggagaatgactgaaatactagaaaggaagttacgggaaatcaccaaacaaccattttccatgtctacagatcctttcatctgagggcaaaagaagctggagagggtgcctccaaaggtgggggtttggaggagcacaatttaaaattctctgggttgtaggctaaggatcaaagggttatgtcctcagaattacacggtgagtcactggaaaaactctgagtaaaagtcaggcatcctgttttccaatcttatatgcctaataatttcaactggctttaagacagtacatttatgtatatttttcatttagatccattgccacctaaagaatataatgatgtatgcattatatagattatggtttccatgccctagagcatcatgaggtgttttgccatgagaatacagtgggttaggtgaagaggtgcttgagaagccttggtgtctaatgtgtggtctcagtactctgtggaatctcctcctcccttacaaaccactgcctctattcaagccatcttgtgcttcaatttagaagttctcctttaagagagagttttccaaagctaaattaacagctatgcagtgtactgagtaactctgtgatttactttttccaattttgactgctgtaagcatttcagtttgtttcccactagtttggatcaacatgttggttttaactttatctccaaatgtaatgattttacatattatagacaaatgtgtttgcacagttaagggcagcaggatttgcttgaacagagaatatgtgagttctgtaacttttaatattcaattcaatttaaattctttttcatatgtcctttttatatattccagtttctgattatgggtaacctgacttgaaggtcagaccatctgaagtgaagatggttaaattgtatgtgtttgcacatgcatacacgtgtgtgtgtgtgtgcatgcatccacatacacatgggtgttcatgtggtaaaggagagccagagagatgtttaatttcctcaccacatt

SEQ ID NO: 60732 - DNA, 533 bp, Homo sapiens
gtccctcctcccccctcctcctttctccccttctctccttgtttttccctcctcccccttccctttctcccatctttcttctttctcctcttctttcttcttcttttaggtaagaaagagttttttggaatgatctttcagaagcagttgctataggcaacaatattaggtttgtctatggctctacttttgtattagccaatccattacttgtgattgttgtgttgataatgggaatcgtgaattgattacttcatcaaagcaattttttccacactgacattctttctagcaatgaacttgtgaaatcaaatggaatttagaggtgatgctcctctgttttggaaaggtggaatgagttatccacctagaaacaaatctgatctagtcactctcctatttagagacttcttttgacttcttctctaaagaatagaatccaaatttattctcttagtttgtaagattttcttgggtcacctctctagccatgtatgtgcttcagacacactgatttcttgctgttcctcatc

SEQ ID NO: 60733 - DNA, 5454 bp, Homo sapiens
ctcggagtaatttgattcaacaaaagagtttagtagtttccttgaaagataatcctgaaatcaatacctttaatttacattaggcactcaaagaaaataaacacatttccctacttaaaaggctggtccaggtactttttttgtgctagaaaatcaaggctgaaatatctttactttgtattgattcagattttaaattgttctttgaaaagtatatatggaaacagatttttaaaaatgtataaatagataaacatgtataagcagagttttaaatgtatagaaaaacagatttaaaaaacatgtccaccaaatggacatcttttcctactatattcagtaacctaaatgaccctatcccttctcagcttatcttaattttagtatacagttgcccttcttccattaattaatcaataagctcattcattcacataatcagtcattgttgatgcctgttatatccaaggcactctatattctatatgctttatattctatgtactctatattctggagacatcaagatgaaaagttcagattaaaattttcctgactccatttttaaaaagttagtttttacttttatggttaattgtcttaatttaacaagtgtccatttaggatgtaatctgtgctcagtactgttgtacatcatgatctatattctctctagaagctagcattttatcccattgatttaaataatgtctaatgaattttaagttcttcatgtggttagtgttttacattttatgagtaataatgaaatggaagattcaagcaaactccattttcctgagaaatatgcatctctttatttcccaatgttaattatctaaatgctgttagttaatgctatattactacaagcttttttttaaaaaaagagacaatatcctttcttaaaagaatgttataaatataaaaaagtacttgtgttaaataaatgttattgttcatttttagagaaatcgagtgttttcttggcagagatgggagaagaaatgtaattgcttaaataattaagtattcatgcttggaaacccaacttctgttgcagggttaacatatgaactggtgattaactgacaaaaattaagcatatgtgtttggatcatggtttctgtggaggccatagatttgctttatggaaacttgagcttctgtataacagagtttgaaaccattacatgatcaggtcatttagtaggacaacccaataaaaggtaacttgaggccccatgataagaaagtgtctaagaactaagtgatatggttacttaccaattaaaatgagaaaagtcatactcttttagttttcatctgttatggtcatggggaaaatatttctttgaattcggtcctgaacccatctgagacttggggaacattagcagcttctcagtgcatactttctagggaaggagataatggaagaccctttcttcctgtcttctgtggtctctcttgggagcccaggtcttactcagaataggttctcatacttagaggaaactcagattgctttggtcttagcctgtaaatcaaagggtgaagactttttctgttttccttaagagagttctgccctcagtagagggcagagaaagaatatgtgtcattaatcacttgagaattgtttacaactataatctagagagcacttacttgcccatggcaggcagtaaagttaccttggttgtgtaagaataacctgagtggtttactcagactgttcacaaatgtttggacatcattcaagggctgtccaagtctgactagttagctttatgatatactcagatacactcagattcacctttataccatccaatcacatttaaaggagggtgtttcctgaaattgcaacattactgacttcccagccatgtgacatagcttttcagactctaagttaaattttaacccagacatctctcttcaattcaggtcacctacaggccagacaaagccaaggtcatgtattgagtgaatataaggagttttgttggttctaataactgtaatgttattcactggttgaaatactataccatggttaatcataagttgcagctgttgtgtccttttatttatgagcccttaatcaagaggacacagcaagagccactgtttgaaaggagcctttcatgaggtcttctctttgggtgctccttcttgtttcattgtgaaaagaagagaagtttatattgccttgcaaaagttattaaatagtatatgttggcttctctgaaaacagatttttctattccaaatttgaaagatcaaattataatctttatatttcagctgatgataatagaaacactaagcctgtgctctccaaacaatgtcttttaattggtgccaagtttgattgaatctcaatatcagccatcagaagttatatgttggctctctgaaaacagactttcctatccagaattcaggttttctatttgtgacaatatgtctctgctgatgttaaggtaaacagaccagagctctttgtgcagccctttttactggtcctgaacctgatgaatgagattttaaatgtaagtcaatctctctctccttttttaactttttggttttaaatcctcccttattttatgagaattcatcttatgagttacccttgttaaaatattggcatatccaggagtttgaatagggtcattttctgaatggattttggaataattacgtaaattgatttttctgatcaaggaatttagtgataggttatattttcaaatgtgttgattgtcagcttcatcctaaattgcaatgtaacacaaaagctggtacacagctcttttctttgagacactcaaaatgtttccaaactttaaattcatactttttactgataacatttttgtggatctcattcaggtaaacttttcttcttcacttgttgatcccgcgtgacccctccagccacacaggtttcatgtgcttccctgaatacagcatgcacttagcaccctttatagcctggatagtgttgttaccccagactagaattctttcctcatctccattacaatacttgacatccttcaagacaacactcaaatgctacttatatcattaaatttcctccctgatttctacttggacttaaatgttgctctttgtaccactttatttgacctgttgctgaagcacttagttcactgtaccttgtattttaattgattttgtacatgttttttccctcaacaagaagcaaacttattgaggtctgggaccatatcttcaagcagcctccagataattggcttggcacaaaattgcatgcatctcttgttttctcataactggatggaaacaatgatatttagatttatcagaactgctacagagggctaaagggatgcaaaaacacttggtaaaattcaaaattctctttaaagtagtcagtattgttctcaaaacaattacatcaaacttttagtgactgaagtgttgtaataatttgtgattttcaaagatactcaaaatttaaggtgaacagtgagccagaacacaagatgatatacctaatctcattcaccagtctgttttgaccaagtcaagttgaggcaagaatgctgggaacaagcttttctgattgaatgtgttaatttagcccgccttcaaacttcttaaccaatggcttccactctaccacctttcaacgcttttttttctgtaagatggcatgttatctgttagaaataatggggatcacattcattataccagcagtagtctctctgtgatcacactcattagactgtttactaccacgaattctgggagaaatggcctgggacattaaaagaaacaaacaagctaagagggctgtctaggaccaatgacagttattggatttgttttaagaattaagcttatgagttacacttttttcctttgcagcatagatgaaaatcatcacttgaggaacatttcaacatcatagttgcaagtataacttacacaatggaaaatgtttttcattttgagaagaggcaattgctattttgtaatggaacgcaaggactactggagataaaacttgcatgcaagaccagtacagcttgatgaagggagcagagtctagtttaacctctaaattaggagatgtttgttttaattttactgctattccaggcaagaaatattaagtgtctgctgtgttcaggactgctaaacattatggacaatacagtaatagtagaagacatggtgtctgcccttgagggagtgaaaattgaatagacaactcttaactatcaggatcaacaaaaaaatggtgttagttagggagtaataaaagtgccacacggctaactacaaaccagaaggccagggacggattactgtgaactcagctgctgtgtagctttgagtttcttgaatattgtccatgacccatttattttgttttaaatagagaattatatctgccctctaccaaatacacaggaataatctgagtaatgtttataactgtgatctgagaactttttgagtcttttgcaaatctgtaaacacagagtgagaatgagatatgacagtgtggtaaaagaggacttttgagatttattaatatttagaagtacaagggggaagaatacttttatagtatgattataatgttaaagatattcttcctttagttttataaaatgtggcttttgatcagtaagtggcaacttagaagaaaagtctatcctaagttgatttgctattccttgaccttaagaactatagaacactttattttctcctaagaccacttttttgtttttattttactccattcattaattcattcagcacataataacgaagtatgtacttggtggcaagcactgtggtaggacctggggatatgaagttgaagaagacctgggccatatctctaaaaaccttgtgaggggaaaccaagggggaaaaagtttctactattttaaataattagaatagattttattttatagttaaatttgaagaaaactacaattttagttagatttactatgccatctttactcatttgttcactcccattcgttcatttttcaagttaatgggtgctggaaacctgagtcatccttgacatgtccctttcatttgccctccaaatgcaaacaaccacctgttgtttcagtcctttcaaatgcctgcctccagaatgagcattaaatctgtcaacatatttaccatctcagcttctccagtcacctcctaactgctctcccagtttccactcttacttacctctaattaacagctttcagacttttttgaggatgacctacaattaaaaaatacatccatgatactcccagtacacatacttgtgttgctatgtatctataagtaaatccaaaatcaaagattaacagaataatacgtatcttttctcagtatcatgcattttgatatttttaa

SEQ ID NO: 60734 - DNA, 2249 bp, Homo sapiens
ctacacctttttctagaagctttattgtttcatctcttatgtttatgatcaatcctgaattaatctctatgtgtgtcatgaggtagctatcaaggttcatttttttcccatatatttttccagcgttctctagctatcttttgaagggttttctctttttattaaattatcttggagcctttgtaaaaattatcaatttactgcatatgctttactctaactggactctccatttcgttccacagcaggatttgctatctttacaccactcctatgttgcttaggctctgaggctttatactaagtcttaatatcaggtagtgcgagttctctgactttgtgagttttttaaaaaatcaatttttttggtataaatattttgcacttcatataaattttagattcagcctgaaaattttgagaaaaaactattaagttttcactgggattgtaatgaatctgtgttgaactcagggtgaattgacatctttaataatatggaattttccatgaccatgatcatgttttctctcccaattgattaggtctcctttaatttcactcagaaatatcttatggttctcagtgcagaggattgtgatggtattttgaatgactatgaataaatttttggctgatatattaagtcaataatagatacctttgatttttattattatttctatattattatgcagttctcagccttgaagtttgaaagactttaataagacattgacaccagtctcccacttaatgctggaatgctcaattacaaatccctggcaaatgttcattagactttgaactcttccaatgctggagaaataactgttacacaaaacaccctattccatttggggacagtttgaattgttggaaacgttctttttatattgagctagttttctgcctgttgtctgccctttggagtcatggagatgagtttgccctctctcctacagagtaccctccagctattcgtagatagctaatctgcccaatgaattcttttttcttgttgaaacaattctagtttctctacttattcctcgcatgacatgatttttgtatcttttctctttctctgactcttttgacatgctccagttttctgtattttctttaacttttggcatccagaatagaagcaacactccaactgtgtccagaccagtgcagagcacagaaagactattttttttccttactctgaacactatacttctgctaatctggccttaaatatcatcagggttttcagcagccaagtcacactgttggctcatgtaatgttcactgtcagctaaaacccctagatctttttcacatgaactcttattcagactgctcattctttcatcctgaacttaggcctgtaatagttttctttcttgtgttcatgtaatagagtttacatttattcccattcagtctcagaacttcagaccaatcttctagtcagtcttttgtggagtctataggcttgacaaaagaaaaaactcagactccagtgaataccacaaacagttatttgctttaggttcaggaaatgaaaatgtgctggttttaagtttctgaagttgcctccctccttcatctcattccgtcctcccccttcagttctttggtccgagacccaatagaggatgtctacagccactctccctctagggagggcctgggtctcatcttccacccactgccattcaataatagcttgggtctgtcttggctaagccaagggaacatccagcttcactgagaaaacctttgctgcatggtgatacgccacctacttgcactgtagcgttgtctggcaggtttggcccattgtctcccagaggaaacagaaaacaactccccagcaacccgccaatctcttttgtccccacagtcgagctctggaaaatatctgaatgccacagaagtgggagtaccctttgatgtttatattggctggctccttttcctttttgctttttctttttttcatttaataatcagggtagtagaaaatgcggagaattaaccgcatgacagcagcagaggaattcattagagaaacagagatgaattctgctcagatttcaggctctcaggcagaagacacaaaggagtaatcgtcttctagttttttttaatcatttcttttgtggcaccttccttgtccatgaaggcaatctcagcgtctggcatgggggagcccaagaacataggcagtgcaaatggtggctttgatttgggga

SEQ ID NO: 60735 - DNA, 2099 bp, Homo sapiens
atttcaccatgttggccaggctggtctctaactcctgacctgaggtaatcacctgcctcagcctcccaaagtgctaggattacaggtgtgagccaccgcacccagccaggaatatctttagaatagttctatagttaggaacgttgagaccaggtaacaagggatttattcaatgggatgacaatttttatacaccatgcctgaagcaaataaaggtgatcagtatttatattgcagtattcaaatactctggagccaaatagataggactaccttaaaaatgttcttgtacatgtgggtttgatcttaaagatattagggatggtaacataccattctatgtatatacatgaccaggccttaggttacttaagggtgatggaatgaccattgtgtgtgtcttgtgtcttggtggccttcagtgaattctgcatgagctctagtagtaactgccactgctgtagtatcatggaaaaaacactgaacttaaaatagttttcttacctgtaacaaaatggacaacaatctcacagagtttgtgtgagaattaaaggagaaaatacttgggaagaagtgctttgaaatctccattgcactctgcaaaagcaaggaaatgcgcttgtgatcagtatcatgttgacgtggagtgagttactccccagctgttcacgatatggtcgcccacaaagagcaagtaggtcacttcaccaaacagaattctgtatgtattacagaaactcccaggctgagtcaccaagtaaaatgaagggcagtgtgctctatttaaaatgttcatttcattttcgcattccattctttactaacagaatggtttcacttcatttccagtcactttcattttcaggttgtcaagcttcacttagtgtcagttgtgttcccacactcaaacatgtgccttgtcttccttgatcttctctctgaggatgtttctctgactaatgtgctgtggtcagaacaagagcattgccacatggtgcatttcctaggtaggcatgtctaaaatcattaagtggcctagctcagaacattctttgtgaccctttcccctccccacccagtgcctagtgactgatttatctgaatataaggctacttccacttttagttcaagggccttgctccctgcctgcaagaatctctctaatcacattgccctccctccacccgctttccccattgaaaccaatgtttggagaagatagaagaatgaaaagaacatctcaggtcctgtttttgtaccaccttcactattgtagcacctcttttgtgttgccaactgaatatggtatacatggctttaagggggaaaaaagaaaaataaaacataagaaagtaggagagctcctagctttcttaaatgaattaaaggccttaggccagagtgaattatattatagattgtagactagatatggtggggaaggttactcaacaacttggttgggaaataaattaatatataaaaccatcagatatcagagcatagttgtggaaagtcacctaaggaaagtcattgtctctaggccaaagactggcctagacgtaagtaatgcaccagtgtgtcagaaagggggttggtcgacatcagaagcacccagaggcaaacactggttgtgccctgtacccacagtaactgtccatagaaatgtgaatgttggtagtcttcaaagtttcagtgtcactggcaagtccttctttgttggaaattcaatttaacattcaagttctatagcaaatgcctcctattatgatgtcttgtgtttacagtttgcctctgtaagtagaaccctctaaagggaaaaatgctctggtcagattgttatggtctgtatgacagatacataactgttgtaaatcaacacattggcattctcgtttgctccaccagtttgttgtgaacttcgtcaggggaaggcatcatgcctaagtctattcaactctgggatactgacaaggtcaaatttctgtgcctgcaaggctgggactggacccaagctgtacagttcatacaatgaaatagtgccatttagtaaaaaagggagataatatggcacttggttggaagtttggctctagaa

SEQ ID NO: 60736 - DNA, 5628 bp, Homo sapiens
gatttaatctaaatgattgctaaggttccttccaggtctcagcttttgcagcttcctatagactgtgaacatgggaatacagtctgattttctcagtgactcatctgggaccctagaaactggcagattgggaaagaaaactaatattctctaaaactgaatttcttaacttacagattataaaactctactttttaccatgtctaaaaattcagtattcgtggaacagctgatattatcttttgctgatgggcaaaattaacaggcacctttgagacctagcttcatatctatgaaaattcattaagttgaaagttcatttgtaaacaagcttctctagacagctgagaagtgattgttctatcttgcattgtatatattttaatcttttgtattgacctgtagtcatctcactggtcaagctaacatgtttttgatagccaagagttggaaaacctggtcactattggcctaattgtactcttggaccacccatggaactcttggcaattagattttcttataaaactctttcctagagggccctttgtggataagatgagcctcacattgcattttagaatagtacgtgctaagaagcagtgcaagtaaaagtgtgacattatagaagatgcctctggcttactcatcttcattatgacaggaatttgccattgtcaatgtcttatatgttgtagaatgagaaagaaatgactctttggagtagatatctgcaataaaatctggattgatctacttacagtcagtttcagagtaggcagtctccagggcactgggagtaactagactctggtctccaggcctaggttcagctacattccctacaaggcctttggcgtgtacctgttcagttggtcagtcaccctgtttccaaacaaaggacatggccctgaaaactatacacaacagggcaagatcctggctctagtttgggattcgtcatgtctttttagttaggcaagccttcaatttaggggacaggatcagagctgtgtcatagatctcttatatctttgtgccctatcttgccctcaagactgcctcatctctttgattagttcctgatgctgtcatgggctaggccaccttcctcatttcctactaaaattttcactttaactaggttgaagcaactcatatcatttctagcatgtcactgaattctatccctgctcttcagaatcagttacactttttcaactaggtatccagcactgagaaggcacagaggagaccaggcctgtagccagttgagaggttacaaaaagcatcaaattgtaggacagtcttatacaggtgactttctcattcagtgtaatgtggattatataagttgaggctttttgattgcaagcaatataaattactttggctaactgaaaggaaaaaagagtaatttttgaaggtatagagagtgtgtcatagaattgaaggaaaagtagaacagattttcagagtaggacatctgtgggagtagaggaaacagaaactaatggtcacgtcaaggcaccaccactggaatgagttcactccagacattttctgttaaacatctttattgtttgactagtcattcagattcccagcagagaatctgactggctttgattataagcctacctcttagccagggaaggccctgtaccttagatgacagtcctaccagcactgcccataataaaggtcaggggtggttacccaaagccaagcacttttggtgttcctaccaaaaaaaggacattcaaaggcaacagatgtctactacaaaatctgttctatgggatctacagtgagggaatagattcagccttacagctaaagaaacggattgctatgcagagatttctgcttcttaggagttgccaaaaagacccttatccggcttaggagttcttggctgtgattttagtgttcttttgtttcccaagtatttttaaaatgtaaatcagtaactagcaagaggcatctttggtcattgtagttgcttggagtagaataaatttaaaaaattctttgatgtgagaaaaattactatcatcattatcacacatggaaggtcaacattagggccagtcattggagttaaactgtcagaagaacatcccagttactttctcacttttgagttgtgtagactgacaggatttgagtctttgagggctttgactagggtaactgacctcaaaacaaatagctagagggatatttctacttctatccgctgagggatttgtagcaagaagccatattgtggatggtatattttaataacaaaggggattttaaaaggaggatgacacattgatttggaatgttttctcaactgtatttacttattcttaaatattttccttcatgctttctttctcaagtggatgaccagctggttgccacctttttcttctctctttgcctctgttcctaatttctttcttatccttaaccactccactttccttcctccaatcttgttttctctctaaatctttcctccaaccttattgaatctctccccttctttttgttatctggtcatttgatctataatttcgattccttttcctgaaattccctcctttttccttttcccctaaaccatcattctagtcctccccacacccaagcttcttatctctttgctgttaatctccaatgtgtttattgacttgtgtgccaaaaggcaaaatccccagccccctcccaaccatgccagtgcattgaaaagcagcagctgtcattgctcaacaagttccttgtgatctacaaatcaatggataagaattctcacagtgaaggtttacatgtatatatttgtatgtatatatgagacatgtgaccatgtttaatgaatggagaaggacttggatcttttctagtagagaagagaagcagaaagctttgcctaaccctatttctttactaaggtaatgaaaaaattatacagggaaaataaatgatgttaatgagagaaacagggacaggagaccaataaacaatcatcaggcatgagaatatcttgctgaacttattattgatagtagacacaggaatgtaatataaatgcagtgatggaacagaaagcagactcaggaaagaaagagatgataataaatagtaataaaatccaagtgattcatatgctcaagtgaaagaaagaagaaagagggcagtgtacacaaagtaaaagggcaagaaaatggaagtagagtcatcactcgtagagataaatagttgggaaatatgagaagccttcctgacatcagtaaaatattacatgttaaacagcaaacaaaagacaacaacagtgtctgtagtacttttggaatataaaagttagataatactagagtagtatcttcaaaataagcaacttcagaaatcaagtccccagtaaagggaattggaagaatttgaatagatgaaataaggagcagtggcaagtgatacaaaccttaagcaggaaaagtgattttaaatggtactggcaggttaacaactggcaaaaagaaaaaaaaagaaaagaaaagcaagatggtgctatatcccccaggtgctgggaaaccaacctggcctaaaaaaggagcagacccacctaactttttgccaagcactgtgctaggtgcattgcatacacttttaatttaagcctcgctgtacataaaagtgaagccaaggtctgagaatgatatccattgggaggaaaaaacaggaaaattttctgagccagttccaaagtcataaggctcagggggaataactttgactttgtcaagtcagagtgaacagccagagtcagcagacataggatattgtcagaggtaaatcaccagcttggtctggtctgtcttattgcaaggtcagaggaccatagcaagccagccaaatgttttcaaccatggaaatcccctaactttccaactgctgcagtcccacagctctgagcttttactcacaggatggctcccttccagctttcaaatctctccaagttgattaatcattttcttgttctgactcattcaggcctctagaaaaatagctgtaggtactggaagggctatgtagatcaaggaggtcagataaattggcttgatgttggtctatagaaaaatctagaagatattgccaaaagcttttaagcataccgtcttcagatgctgggatgtgggctatatccacaggccattggctcattcatgtgtttgaagcagaatatttttgtgtgcattaggagacttgggtatgttcatttcttaatgtaatgttagatattgtaagctggttgtttagacagtagaatttcattgtgaccacttatttttatatctatttagatggagtacaggccagattataaccccctaacaagaacagcaacagtaaacacacagatagtgcttattattagttaagcatggtactaatattttccctaagaggccacattcacaggactgaaatgtcagttctggttgtctgagccaagggcatatatgctgattacattattttgtctggctaatacactttatcatgaagcttattttagaagaaatgttcatttttagatttctgtttgtatatttaggtcatactataaggtccattctcttgcttttataataatttagtcttctgctttattcattcaattcatgaacattcattaagtacctgagtatgctagtcattggagatgcagttgtaactaaggcatcaccccagacctgaagttttatgttgtgttttgtgcttagtgattggcataagtaaaatacttgaggaaacacagaagcagcagcaaatatttctgcaaaggagaagagaaaatatttgagttgaagcttcaagaatatatcaacattttccagtttgacaagggtgggaggagccccatcaatacagggaacagcatgtggaaatgcaaagaggtgtgaaagagcatagtatattcagggtgaaaaaatacattttttatgaattgtagtagaaaatgagccgaaataggttaagttgaggtaagattgtgatgggtcttacagcatactaaggcattatcctgtaagtaatagaagggcttatggaggttttaaagaaagagagtaacttcatttgatttcttttttcaggaagagaattctgatgatagtgtagggtggaaaaaaggggtaacaaaggaaccagtgggaaagctgctgtatagtctggaagtggtagcagtaagaggagaggtgaagggacagatttgagatgcatatcagaagtcaaatgagcagactactgtgactggttggatacaggggtgggtgtttgagtgggacctccagttaggaactcagatgtctggatgggtcatgctgccttcaacaagaaattcagaggaaaagcagccttggggaatgatgaggtcattttgtaacatgttgagtttaaattaaggcactaatgagaagagacattcaggtggagaagtccaatggacgacaatagtatgggtcaagaaagaaagctgagaagtatctgaattacaattatgcatcacttaatgataggaatgtgttctgagaaatgagttattaggtgatttcaacattatgcaaacatcat

SEQ ID NO: 60737 - DNA, 5858 bp, Homo sapiens
ttatatctcttttcctgttgcttatctaaaaggacagagactcagaggcagtttaaaagtggaggtgggcatatctccaaggcgatttatgactttagacgcatatccctaaaaggcgaattcctgctctcacaagttgaatagggctctaatcccacaatctgatttaggccaagaatgacttacatttgaaatcccaaaccaagactgttcaagattggtattaaagtcggagcaatgaggtggaggtagggttcacctccacattattctgagaatgggcctgaccctcatggatctgtgggtgtgaggagtggtggttgtcaggagccggggaaggtagtgcggggagtgaaggaggggagacagcagtgtgcttattttcagtttgtcagctgctctggaaaatggccaaaatgaatgagatacaacaagccttcagggctgctgtaagccaaggagagacaaggcccctccttttaaaaagctctgtggaatttagacttaaagttttatatgttattttgtttagggtaaatgtgaaatccctaaacactccccaggaaatgttagctcccaggaacacacagtgggccctaactccctggacagaagtacgtcttgagggagaaaaaagaattcagcaccattccatgaagcctcctggctctgtttggccatgggagaaagattgatgagaaccatgattagatctgtctctgtggcctccagcagattattggaaagccttgaaaaaaaaaaatctttttgacaaaaaaggatagaagttccagtagacaggggaaagaaaagggctaaatcttccaggccaaaatatgccagggtttgtacaaaccagggagatggagcaaagctgagcacttttatgagaagaggcactggcatcaatctaaaggagagagaatctgggacatttaagaaaagggggcttccatgtgggaagaagggcttgtgaacccagtgtggttgtgaattctgtaacggaagtcaccagctgggctttttctaggcaggagttatcttctttactggcaatcatgttccaagtttaatctctcctcagtgtgactttggtctcacgttcacatcatgaaaactccaggctgttttttgctatactcctgagtaatgttgacatttctaaggagagaggaaatctggataaatagagttcttttcttggcattgttaaaaatattactaaaaagagcaaagggtgttttcagagctaagtggaagtaaagtctttctttgcaattttgaaaggccaggtaggtggctgggtacgcactttcttgtagcctgtttgttttagcccgcagtggtttctgagcagctctaagttctgataaaggacacaaacacacccatgctacagtggccatctcacttaatgctgtcttttctatcctgtgactgaagagcaggggctcttgttcatgcccagtaagaagtaaaccctgaactaaacatcacacactgagaatctcttcataatctaggcacagataatctttaacactaaactactgtgaaattctaccagcattaagtactgtatattgccctgtgcttggataggctggctaactcgtaggaagagagcactgtatggtatccttttgctttattcaccagcattttgggggaacatttcttttacattttaaataaaacttcagcttgaaaaaaaaaatgtatgtaacttgtaggacatttctgaaaattacattatagctagtctatcacggattttgaattgtctttaaattttgctatcaaaagcagaacaacaacttgtcatcatagaactggaaggcatggttattttgtttacctcttactttttgcccatttggaaactgaaattgcttaaagttacatagctagttagtgcaggaacggaaatgaaaaactatttcctgatgcctggtttatcacaatggaaggctctgcccacaagaaggaaagttcagttcagattccctgtaattttaagaactttcatgaatatactaattttagtagaaacaactaaccaagatggcttatcattctcaacggaacataattttaaggagaaacacttggaataatctaattttaaactgtaatgctaattctttattagtctatttgggggattttttatatgttgcatgacatacttgcacattttcctatttaatacttcttttaatcctgaaagcacttatttaagaatgatcactagcactccaggacaagttaaatacagaaagccatatacatataaatggcagacataactgcaaaaagagaacaatatagtgagggaaatggtcttcagggtgctgcaaagcgctttatagttacaaaatgccttcatgtacatttctaattgatcctcaggacagtgttgtaaaaggaggaagaatgtgtgtgtaagtgtacagctgttttccagaacaccaaatcgaagctcagagatattgcacaactcaccagcacagcgaggaagctactgaattgggactcacactcagaccttcaccccaagcccatagctcattttattacttcataatgcgttagttgcagaagtaataatactttaaaaagcaatccacattttttctgtttactctttcctctcttcttcaggacagaaactgtactttccttgtccagttccagtttgtattattgtattcatggtatttaccttacctggagggaataggccttttaaatatcattaaaattgggtttttgaggttatgttcttttctccttcacatcctaaacttcagacctcatgctctttggccttccattcaattcaaatgagaagggctgttgtaattgttggcaatgcctccccaggctgccactgtatgtgaaggatcttcatgtttggaaagaaaaaaaaaatgcagtttagtgaagttcatgattctacttttactcttctaacatagccttttttttttaatttatttgtttgtttttacatgtaacactaggtggcagaataactacaccacaaagcaccacatcctttgtttctcactactctggggagtgggtatctgaatagtgaggcataaaaccatctgtggctacatgagattggaccaaccaacaaggccaatattttcttgacagggaactggctgcagtgattctaaaacgtatgcttccaagatactgtctttaagatttccatctttcttttttccccagctcccctggattttaatttctctgccccattgcactctgctagcagagggcggacacagcctgcaggcagctgctttgaaatggcagattgggatggatgtgcccattggtgctggcaccctcgcctttgtgtggcagtgggtcatgaagggtctgggggtaaggcacctgagtccttgcccgaatggcaccaggccctctggcagaggggcagcagtggctgggctgagtcagttggaagatgctgccctcactaactcaggtttacagaacaggtgtttttaaagagcagtctgatcctggttcagctctgtcaccggtttggaaatactgccgtgcagtcggtgggtcattgcctctcagtttcttcctagcaatttgctggtgtctgctaccctggatgcctcacatgccacaggacacactaagctaaataaagcagagcaagttctgtctttcatgttgtgaagagtatgaacttgggctgcggaaatacttctttggatttttgctgaaaaagaaaagaatagcattaaaacaaaacaatacttaccaactagtaataatactctaagtataccctacattaagaaactcctgtaaaaccaagtctgaatgtataaaatcgatcaaacaaaaaggttgtattttaattacaaaagcgttctttgtaactggaaccacaatcggatttcattaaatagtgagcttctgatgtgaattgtaaatgttttaatctacaaaaaaaagtacttaaatcttgacttttcaggaacccacttgttatataaaacaaaaaccaactggactatagttttacacacatacttacatcacaccctcaccactttccgactgggaatcctagagtattttttagtgtttagctggaggtccaggtagtgtcctaattttgcacacacagccctggtgacatgaaagggcattgttgaaatgaccaagtgagtcatggtaatcagggcaatcctgtaggttagagatatgggggtcttgtttatttgtttgcctgctagagctgcaattctttcataaactacatgacttttgaaaatacctcaaacaacatatataaatcagaccaaggatattaatctcaggccaccgccatagtgaggctttgaagccaggggaaggtggtgagaccttcttgtttgttaaggaagaaatgtcataaaaattccaaagcaggactcaaatttccaggggagagggcctctttattgtttcctctaatagctgctttggcgctttagtgaataaatgtgttgcacaaagtaaccctagatgcatctgaactttagtctggcttggctcccacttttgtatttagcatccattctgaattatttatttaagatatttttgctgttgtttgtcactccttcttcctgtctccctaccagtccccctcattcgtcctgtctttatttttacacttctctaattaattgatatcttctgctcttagcactgcagcaaatgtgcctgcatttttatgtggatcttcactatgcaggctatgcttttaagtttctggaatagaatgatggtaaaaatgagtcatggcttgtttctatatttgtttctgagtcaagaagcttaattttcttactataatgcctgagatatcaagctatacagtttacttttaagggaaacaatcacaatttcatcaattcctttaagtagatgttttcaaatattatagaattctttggatttgtgtttccaaaatgaacaacacaatggtagtgctattattgttttaaggagaaaaagaagcatatccaaaataggtaaaatcttcccctaaatcccctgggaacaggcctatgggtgttgccctggcctgctcacagccccaggacaaccggcattaattcactgagggcctcatacctacatctcaatgactgcttaaaccagatacctgagggtctggggtctaacagaagaaaaaaggagagtagagctgagggttatggaacattcccaggaagggagagaatatcagaaaatgcaagactgccccagtgcagcagcagtgatgcagccagaggttaccagaagttctggcacctccaccttcatggacacaagctgtatatatcagtttaccatggttttcagtgtaaaaaagcaacttatgtccttcagtgtcagtttattgagctcttcagtgcagcctcataacttatattaattgggaggaaaatgcttccagagaaaggagagatgctggacaaaacaactttgtctttgactagttgtcaaggccctgctgtttggagtcattgacaagtccttgattcttgtatgacagatccaggggaaaaaaagaagtgattcatcttcttctgttgcacctttcaaggaggaattaaaaaaaaaaaagattttgcttatggacttaacatcactggcagcagtaagtgggctctgactctttgcaaggtataatttaccattgtgctcctccctcctgagtttatgcacctcgatgagccccggcccattaaaattccttcttaaaagcaggaggtgaaaagagccaagcgtgtgttttttttagaggagagtgtagctataca

SEQ ID NO: 60738 - DNA, 2294 bp, Homo sapiens
tgacccagtatatcttttgaccaatttgcattggaaaccacagtgagcatggaagaaatataaccttgatcctctggcctaataaacattcttgcaattctaaatgtacctagagtttgtgacaagtgtgtattggaaaactcgttgaaaacacatgagttagtaatgttctctttcagaagatgaacttgcatggccgaagtgagattccagtgggaaagacctggtagagaaagagtgggagaatgcgttgacctctggagggcagattatggcatgccaggcaatgggttgtgccatcagggaaggaatctagaaagacgaggagactcaggagaaaggagatgacttctgttgacaggtcattgttgctcagacttagtgcagatgagaaaggaaatccagaaacctacatgacagctcctcttggattggatgaaaatattgattttttttttttttccctatctggaatttgacagggtcagttcatgtctgggttttcagcacttaatacagggcgcttttgtcttgggaggcggctggactggtttttcctccaggcaggtgcacagagggcgtttattgtagcctgaaacacaaacaccaagcccctaggccctgatccacacactctccagtgtggctcaaggaaataaagtgaacaatgtctcttgcaacaggcgagcactgtaaatgccactcctgaatgatatatttcttaaaactttgtatccgtaacctgatcatctcttaaaacttaattatatgtcagagaaaaggaagctattggctcctccagctgtccaggttgaacgagagcacacaatggagcatatccgattcacagccttacttaggtaatcagattaatatctcctgaattgaatttacccttttgatatggagtctttcagctgccttgtttcacatctcaaattctgacaaagctgtgcggcctttgagtaatttccctgaaatctatatgtgggaagcctgtacttcaagcagtttttgggacttgcaccaattaaatctgtctctggcacacttttaatggcatgctttcccctgagtcaacaactgctccaaaatctgaagtcatttgtttaatttaaaagcaaaggttatggaacaaccatttcaagcttcaccagccaaactccagtggctttgaaaagggagatgaggcagaggaaaggctaataaactggatttcttatacacaaaataaattaattactgtgtttctgtaagctagtatcaaatcaagtttgttcacaccctccttgccaacctagctctccctttctcttcaaactcaccctctctgggctttcatattcacgattgaggctcaccctcttactgttgttcttgcaacacaaacatctggactggatttttgtcagctggagttgagagagaactgtaaatgatgcagtgatttttttttcgtccttattaaatttatttatagccagtctgaagccaggaaacatgctagagcctttgattggaggttctcgaggaatgtacggtggatggtattttctcctgttgttttctaaataatatcaaggatagaattacataactcccaacttgagtattttttgccctgaaggaccctttattaggacattttgcacatcagaattcttccattatatttgcttatccaatatgccttcttttctgtcagtgagagaaaaggaaatgtacatgacaggttatttctgaaaaattagaaagatggagagtgagtttctggttgtttgggacatgaaccagtggcatgagtattttcttttgccaaagggacacaacatggatcctatttctacctcttaacaacctctgcaatcttaaagctgccaaatctcaaagaatttcattcatttagtcattatttaagataataaaaggccctacaagcagcttacgaaaataatttataaaatatttttctctgcccttagaccttgttaaataacaatgccttggtgtttataaaattatttaagaaacaaaactttctagaggaggctgaatcagatgatgatttcttgaggtcccttcccagttctatgatttgagatgattctttaattttccttcactgtcatttatatctgtgtcattaaaaaaaaaaaaaaaaaaagggctgtttgggaatgagatttgctacacccgtaggcattttcttcttcagaaaagagactgtttagctttctgccacccaagtcagtcatcctcagcctgaacaatggagcttaatgttctccatcttc

SEQ ID NO: 60739 - DNA, 26962 bp, Homo sapiens
atacctaaataaagctgatattaatgtagaaagaattggtggcccatatttttgactgtataaatttgcatactaccatatatttgtagttgataagttttctctgattgtggtataattcaggaagaattactaatactttctttttttttgagacggagtctagctttgttgccaggctggagtgcagtgacacaatctcagctcactgcaacctccacctcctgggttcaagcgattctcctgcctcagcctcccgagtagctgggattacaggcacgtgccaccacgcccagctaatttttgtatttttttttttttttttttttagtagagacagggtttcactatgttacccaggatggtctcaatctcctgacctcgtgatacgcccacctcagcctcccaaagtgctgggattacaggcgtgagccactgcgcccagccctaggaattattaacactttcaaaccacatgtaaagttcactgaaaaaaaaaaaaaaaccaacatggtttttaaattgtgttaataaatattaagcttgtagttaactatatgcatgctaaagtagttagagaaaagtgtactgatgtttgcaatttactttgaaatgtaataacaaccagaacaaaaaataagatgggttgatagataaatagatatgtgctaaaaaacaagtgtaataaaattattttggtctttttgtttccgttttttgagacagggccttggtctgtcacccaggctggagagctaatcatagctcattacaacctcaaattcctgggttcaagtaataaaatgttaatggcagaaccagttgatatgtttatgggtattcactataaaattctttcacttttgttttatgtttgaaaaggttcataataaaatgttgaggaaaaaaccgtaaactcaaaatgtcattctgaccctgaactatttactattccataatttactaagttaacatcctactgatcagaaaaaattaatattttctttaaggagccctagctcttttctaggcaatactttcttatactttgggaacttgatgtgttatattataggtaaacattttgaaaacaatcaccagagaggtgttatacaagagcataatgatattctatgaggaaataggatcttataacctcagggtcaaaattcctaagagactcttcccagagactacaattatattatttatatatcatattattatattgtatattattatttatattatattttttagggattcagatcagcttactttatgtcccctaatttctgtagaaaaacttgggaagtaggccacatgtagacaaattaataaattcatgcctgctcaaatacagttcatttttccatcctgccattttccagcactgtattacttctacagatcttgctcttctattatgagaaggcagtttagatgccgctaaactcattctctgctctgcccgcataatcctgcaaagctgctggtgttgaggcttcagtgttccatgcagagtgattttccaagtgatgaagcagattctaatcagtctaagatccaactacagactgggagttggacctctgccacctttccctccagctctcgcaacacaatggggaattcctgtgaggatcactgggtacacttcaagctcccctgatcctatggcctcattccagtcacagatcttcctgtctggagcatttccggcccttctgtcctttggcttggagagttcagctcaacctgggaagggacagaagactttggggttatcaaaagcctgttgaattatctgatgcaagactaactggtttgtttgcctccctggctctcttcctgagcttcaaagcagctgagaaaacaacttttttctaagtcttggacaaggaggaaaaccctggcatgaaggatttctgtcgcagacacttggcatagctagaggaaaggtttgtttaacttaccaatgggttttattagcctaggactccagttgaagtgagataatagggtccctgtagaaggacatttcagtcagtgggcttcctccctaatttctcgacaggacccttgcatgcagatgaaaagcatcagacacattcaacaaggaaatccccactgaatttatcaacgaccacgtaatcttgctgatcatgagggagactgagacaggattaaaaaactagcaggacaggaaattgtgtatggatgcaaagtcatattggggagctatctacttcaattgcttcttgctgaacttctctttgctgaacgtattacattgtctctgggccccacatcttatagcagatagcagggatagaaagaaagccagtcctaccacctgtccttacaggaagaaactcttctgcttatacttttcctctgccaggtcatttcactcttcctttcacctcccaaccaatgtgagatttggggttggggtgggaaggggaaggaaatagaagagaggaagaattcatgactggtgtacaggaagccttcctggcacaggaattagagaagagaaagtagaagaatcagtgccagcttaccctcagcctcatggccgcctattcatgtctgctttcctgggccacataggcaaaactcactttttcctaaggttggggctgtattgcaggaactcatgtaaactgccaggaccagaagtctataaaagcagcctccaggccgggcacagtggctcacacctataatcccagcactttgggaggctgaagcaggtggatcacctgaggtcaggagttcgagaccagcctggccaacatggtgaaatctggtctctactaaaaatacaaaaaattagctgggtgtggtggcaggtgcctgtaatcccagctactcgggaggctgaggcaggagaatcacctgaacctgtgaggcggaggttgcagtgagccaagatcacaccactgcactccaacctgagcaacaagagcaagactccatctcaaaaaaacaaacaaacaaaagcagcctccagggtagcctgtgcccaaggttcctgacatctctgtgctgcctgctccacactggccttcctagccacccatggagaaggactgggctgggttgcctcagatgagggccacacctatactttaaaaaggaggacccagacactatccctagaaggtgtcgccatcctggagaaggcctggggtgactatgcccagcactttctgttctgtggctccttttccactttctgagcctcttggaagtgggatcaggccaggaaaaacatgtgatgctatagcaagctgaaaccaaagacttgactttgggcctggccaagccaagaatcttggcagtgattgactgggaagcctgctgttttctatggcattttctgagtcccctaactctgggaagagggaaccagataagtcctaaaaatggatatgaatcagtagagcttctgtgggtcatcaatttgtgcatttattcactcattcattcttgtatttcataatgaagcttctcttacgtatatagcaccacactagaggtttgtgggaccagaaggagcagcaacaacaagaatgggtcaaatagattatgttaaattgaggtaacattaaccataaaacagtaaagaaaactaataattagagagtacagataaagtatgaagagattagagagagatgactttaggctggagaaatcggctgaagcttctggaagaggtgacatttgtatttagactttcagggatgaagggcagaatgaagactgccagtgtggaagcttgcgaacagctgaggcagcccgcacggataccctgtccagctcccttctttgtcttgaatcatgcaatatccatgcagggaaaaaaaaaaaaaaaaaaagcccttatttgctgttatgtatcctgcctcatttaatgtattatcccagaaaagtagattgagttgtatgtggcagattgggagctgccatcatggtggttaaaagtacagaccaggtagtacagaaccaggtagcctgggttggaacccagcttcagtacttataagctacctacctttgaggattattgtgaagattaacgtccattggttgttgttgttctcatcagcattattactgtaggaaccctggaagtctcccctacccacccaagtcctattgcactttctatcatgacagaccatttctcttttttgagagtcttatattacaatgcagacacacctgagagggctaatgcgtgaaggtttaccagccctcactttaggggtagagataattagctgacagcttatttactaagagcaaaatagaaacctggggagagggacataaaagaaggaggagagagtttacaaggagaagcccatgggccccaatggccaattttccttccacgctttatttagagtacataggcctctgtgtttctacttgtcattggagagaaacctccacacaccagcatagggatgaagtgaagaacagtgaggaagatgcctgcccatcattctaggagccctcagctgaaaagcaccgtattgggccctagagaagggaacagagtgagattacagaaaatgccccagatctgctgagtcccactgaaaattcagagcttgcctctaaaaaataaactgaggtagaaacaggtagcagtattttaataagtgcacatttacagagtgtaaattgaatctgcctggcccagagtgtggtactcaataaatgtttgttgatggatggattgaatgccctagagtgaggagcacgtagtggaatgtcacagtggaaaaagcccaaaggcttccctgtattgtctgtcttctgccaccagaatgtcagctctatgagatcaaggacctctctgtcttattccctgctctatcccctgcacctacaacagtgccaagcacaaagaaaagagcccagtaaatatttgtggattgaataagtgcatggatgggtgggtggatggcacaaataacgaaaattgcttccagatggtagtgggattggggatccagcatcgagtacatattggatataccttaaatgttcctccaaagaattgatggatagttggatcaattaatcaaaacagagtctcacgatgttgcccaggctggtctcaaactcctggcctccagcagtcctcctgcctcaacttcccaaagtgctgagattacaggcccgacacctccaaagaattttaaaatatgggtgaccactttccttgcaaggataggtaaagagaggagaaagtgtatttgttagagtgcagttaaagccaagctggtctgatatgaaggaaatattcaagaagaaacaatttggctatttgtgggagatgggattaactgcccacataccacatacctaccacaaggagccccaggctttctgagccacatatatctacactcattcttgctcagttacatatttctttgaaccctcagacttccaaagccaactttcacacattgcacacaggtttgagtgcgatcagaatttttcactagggccctgttgttttattaagtacctaggcctccctgcagggcaccatgtattgaagaagatagaatgatacttgaaaaccacctaagtcagacaatgattagaactccccagatttatgggatggatgaacatctgaaccagcacagcctaaattacctgctggggggttgtctgctttggaagaggatagtttatagtttgaatggcagaagggtcatggggcattaattcagatcaaaaaaagggaggaatctatatgtatccacaaagatacatggcaagcatcactttttttcctgaaatatattgggctagaaagctaatttacacttcccctcactagtatataatactatagaatcttcaggttagaaaactcaaaagcaatgtgcatcttcatatagtatatactactagcatataatattacagaatcttcaggttagaaaactcatagtgaaagcaatatacatcttaatatagtatatgctagtatataatattacagaatcttcaggttagaaaactcatagtgaaagcaatatgcatcttcacataatatgtactagtgtataatactagcatatgacagaatcttcaggttagaaaactcatagtaaaagcaatatgcatcttcacatagtatatactagtatataatattatagaatcttcaggttagaaaacccatagaaaagcaatatgaattttcactccagtcctcttaccatgatgtttgcattgaagtgtttgtggtcattgattgctttgggcctctaaccaccttcttgtttgtcattttttcttttggaatttgggccccagtccaaacacattgcatcaggcatggtttcctgggtgaggaggagagcaggactatcacctcccttgttccacatactatatctccattgatataacctgagaacttgctagatttttgaaaattacatctcacagctgactaatattgaactatagttaaccaacattccattttctgaatgctgaatctcattctggctgttccataatgaatcattggtgctctgttctcaaggacaaggcatttcatttagttcaataaaattgcatcccaaacaatgtgtaggatttgttccaacattctaaccaaattgagatttgttttgatatcatgtttatctgatctaatatatgacctctttctctaaattttttgtcttctgttaccttcccatcaattcagcatctcatcattgggtttagttacatgattcacaagtccaaatgtcacctcttcagtgagatctcatgatactctattcaaaattgatgcccccacctccaatccagtacacttcctgtattctttatctgctcttttcatccattgcacatatactcattgaacataacatattttatttattttgtacttcttatctttctttagaatgtaagctctattagaggagcagtttttgtcagttctgttccctgctagatttcatatttgttgtatgggtgtaattgaatacatcagcaatcttattcaagtcagtaagaccaagctagaattctgtacattctactagaggttgctgcccctcaccaggttactactgaccttttggtcactcacaagtccacttaatggtattagcacccagctcaacttatcttcactttatccagaaggctatcaagagagtttgtcacattttttgctgaaatcagatattttttattggtgctagccctctgatctatcactctggaagttcttttccaaagaaaggaaatggaattcatctgacataacttatcacttccttttttctgactgcacacagatcatccttttgatgactcattataaatcctgctccagaaggacagtgcattaatcagtgacctgtccgaactctttgatttccggcagagaggtccctccaggtgtgagatccttttggctggggttcagggcttgctcatagactggctattagaaggtggagttagcaccacagagttggaaggcttaggctcagatgccattcttgtgtctcattgaaatattacattctttttttctgggtctcagtttctgcagtgcataaaataaaaagggtaatatttttaaaaatatagcatgatactttatttattgctatttacacccttttggtttcatgtctagttgctacatacagacaacaaagatctgagatttttttatatgtttagtttatttttactgctatttgatctaaaggatttacgtttatcttatccatttccttttttaccactctttctggcacagctatagtttaggcccttatcatctcatcactgaattattggagttgcttcctaactggccccacatctcccatctcttgcttctccatcttagactcttcaatcaggctaattgcctagaacctggctactcaaaatgtagtctatgaaccacagcatcatcgtctcttgggagcctgttagaaatgcagactctctcaggctccactcaaaacctaaagaatcagaatatgtaggtcaacaggacccataggtgatgcaaacccacattaaaatcgagaaccactgttttttcttctaccatgccattccccttctaagggatatccttaaaattcacattgaaccgggccaggcgtggtggctcacacctgtaatcccagcactttgggaggccagggcaggcggatcacgaggtcaggagattgagaccatcctggctaacacagtaaaaccccgtctccactaaaaatataaaaaattagctgggtgtggtggtgggtgcctgtagtcccagctactcaggaggctgaggcaggagaatggtgtgaacccaggaggtggagcttgcagtgagccgagattgcgccactgcactccagcctgggtgacagagctagactctgtctcaaaaaaaaaaaaaataaataaataaataaataaataaataaataaataaataaattcacattgaaccatctccgaactgtctcaggcagaaagcaatctaccttaattttcaaatgagatatttttgacatgaaagtgtaaattcccacctatactttcttctcattggttctgagaatgatgaattagtgtatctaaataactttagaacatttgtaaaaattactgcaactcaactggagactttcttctggtaggagccaagtatattgttatttggtgagtgagggttaagggaaccatatgtgatgggttagttggaaatgttcctattatttattgtgaacttattttgtgtttgacacagtgacaggtattttgtatacttaatttaatcctcataataatgccacttaggaaggtgtttttatcaccattttacaggtggggaaactgagacttaacaagtttaggttgtccagagtcacagttttggttagaattcaggctgcactgtagcatcaaagatgtcaaaatacagtggttgagccaagtggctctgccctgagaggactggtgaccccgagtgggagacactgatgctctctgaagccacccagcttccctctctcatgctgccttgtcatccccagagtgttgtccacacccatttgcttggatctggttcctgccttgggaagagcgaaagagaaagtggagggcacgcagttttcttatgaaaacataatccagaatttctacctatcatttgtactcacattctgctagtcaaagcttggtcacatagccacacctacttgcaaaagaagcagagaaatgtggaaacttggggagttatttactaaagggaagaaggggaatggctgctagaggaaaattgtaggctctgccataggctcctagccaatcagtggaagagctagattccaagcctatgactaaaacctgtgatcttttcatcacattttcccaccacttctcatagttgacagcaaatatttgttgaattaagataggccaagatattatatataagccttttgatcatttgaaattgtttcttccttctctcttgcctccctgattacctacacggttcagtgttcaaactgtctttgtttctgataatgttttaatgtgtaaaacaggaaactgataattaatcttcttcagtagaaatactataataaaataatctactaattattagaggttctgtagaaccatatgagatgtgataatggcttaatgatactgatttttttaaatgatcaaataaccatctcctttaaaataagtgttgtcttaggaaaatgccattgctgaaaacattttttgatattttggctggtatatcagttaactcttgctgcacgcactaatgcttcatgactccactaccaaaatctcagaggcacacagtgatatttaacttgtgtatctgtgggtctctaggggtcaactctttagcctgagccttcctggccaactctgtttcaggtatctattgcccttcttctgagatagcagactagcatggacatatttttctctgacaatggcacaaacgttaagagaacaactagaaatacttgaggctttttgaggcctcggctgggaactggcacaacctatgtcatgccacctggcaagtcatatgcccaaacccacaatcaagggccatgggaaatgctctacaccttaagtaatagaaaatgtagtcacgtagtagagggtttggtgaaggaccagggccaacaaagaaaccttcaattgctttgcctttcgcaagttattttgaatatttgcagtgatagtaaatcttttaaaggtagctttgaatttttttagtaaaacagctaagtttataaataaaattagagaatcaagctaggtttatttttgggcagaaaggtagctatttaagcatgtgttataaaataatgagacttatttctagaagaattgattcaagaatatggcatttgatgacagaatagttggaataagcatacagccttttaaggtgaccactttgaaaggataacactcatttaaacattgggttataaaatggtttttttttttttaaataagccttgtgacttacagtcctatgttaccactttgtctcaaagtgggaaggggagtgaatagaggcccatccctgatcctttgactaaccctagaaaaatgtgctttatgtgcagattcttattgccaagtcccctctggctcccttcacctcatttgtctacaccatcaaggaggaaggcctggttcttcaaggtaagatccttggattaagccatttctttaagcttatgctcagtgctgcccattgctagtggtaattagtgctatggttctgatagaagctagctccagacagaatcaaaaaccaagatgcattggccagtgatatttaccctagtgagagcaagagagcggcagttgtggcaagaatttgacagagaagattgaggtagggccgaaggagacctacagaatttcctaacagaatgagacaatcaaaacatgaggatcaaaccaagaaagctcggaattgctaccaccccattcctctttgcagatcctatggcatgaagtgggcaatgattctgacaccagtgtggaggtgaggagccagtgctgccccagagccttcttgcttaacaagctaaagaaccatctgggttggcagcctctggggcacaatgtcatggctccatgagccctacttccctgactccttctggttatcttgtttccttttcctgtcctgtcctgacatggtcttcctgctggggaccagacctttaggacctgcaccttgtgacgtgagcccaggacttagaaggagctgagttcttgcttagggtatagcaccctgaggccacatcctggaactcactgatctacaatggtgattcattctcagatgctagatacgccagtggttaggaaaggcacccgattacaggtctttccagaaagcaattaacatgaaggggtaaattccagcactgttagaagagtcagcccacaatgtcagatgtacaaaactgctttgtggatgaggaaggatctgcacagaagtgctcaggatatacatctgtcctctgctgtggggcaggagaccccaaccacagagatgcttaggtgaatatctggcctgaccctagaggagcatattgtcactgctgtccatgggagaagtcctgccctgaaggatttataagttaaatatttttcccaggtttatgaaacagggcagtccctgtaatttccccatggagacacaatgcagtgcaaagacctagcagggaatatgcagggcaggctggagagttcatgcttctaactaaggaacaggctgcagccttccctttccttccccttctaaaatgtctgcttcttaatggactcacaaagcggcatgtttgtttggtgcagctgagctccacagcggggactctcaggtccacgaaatttggggtgagaactacgacctttggctcttagcctttgacttatgctatccaagttccttggtaaatatttttttttacaattgcaaatagtgttttctgacaaaggagcagagattttaacaccagattaagcaaagcaaacagcaggcctctttgttacatactctctacgggtgtataactaataagcaatcagaaagctggacttttatttacccagtacacagggtggcattcagctcttcatttttagaggccttcttaaaagattagaagtatagtaagtagcaaatttcgttgaagatttcaagaaattctatggaagattacaagacaatttcaggaggaaaaaagtttgttctgctcagatgacgtgtgtgaagaggcttgatgtgatacacgcaccctgatcactaggcattttgttaaatagcatttctaagcccggtcaaatctggataacttttgggataacatttgtgagaagaagagtcactgagttgcctctctgatgttcattgctaagatcatgattttaagagggaagagaaagttatttagagaaagtagagcctggaaatacaatgaattggtagagtttaaaaaactgcaaggaatgacttttcgaaaaagttggaaaacaggggagaaagtggatcactaaaggaggctgacctggagctgtgtccaggaaagagaaaaattcaggaaaatgtcttataattcaagaacaacaaccagtaaataaaatgcttggttaggagacctcagaacctcacctggttgctttctaagttgttttctctatcccactcccccaagctacacatccctctctgaggtttcccagaagcagtggaacacctctgcttttaccagcaatgcccttgaaaacaaacctcttggcacactctgccttcttgctgtgtgctcccaaagactttgggaaaacaaaaaatgcaggtccccagaaaatgcaggcccctcatttactagaaagaacctttggattttaccttcagctttggtatgatcttgagaaaatctctgggccttgcttttgtcagctggaaaatgaaaacattaaccttgattcaagactttgaaaactgtcgcaacccattggtgggtcatgaagtgaaattgatgaatcacaaccagcatttgaaaacagagagagagagaagacagaagaaagagtgaagaaaaaatatcagattatatcacacatattgtttcatttcataaaatatttcttgtgtgattgtgtgtttgtgaatgtccacatacattatgagtttgtgtgggggctgcagcataaaacgtttttcttacgtggattgttgtaaccatcctgcgggatctctaacagccttgtcacatcagctttgtccgatcctcctaggagaggatgtactcatcattcccttagctcagcccagttgtacccttgagatctccacatactgcaacatcaaagctaatttttcccccttcttaccacatgaccaaactaaaagacacctgcatgattccccaggtttaaagcaaagaaacccttggtccctgggtggaaaacttggaaaggtaccatcagtcaaggccaagtagcttttcttacatgaggagctgcactggcaggtgagccccgagttggtgtggaggttggcacctggagctctgggtgggatgtgcagcccatgtccagggacttagagacagacagggcagctcctgtgctgccaactagaagggaggccgccagccactgtggccgacattcggtcttcaatagagccacctggatggtggaaacaagccaaccacaccagctacccgtgggggtagggaatgatccctcagtgccttttatcccttggcaagccccaagatgcctactggcctgctagcccggagattttataatacctgaagaactcctgagtgctcaagcagagggagggaataaaaggtgagggcagaattcgatttaccagctccacaggccatttccctcaccggttctcaaggattaggatgctgagaacagtcagcaactgggggacttctacccttccctcccctttgttcactgggatgggaaggacaataaagcggcaggctggagagactgaggggctggttagagatttctcaggctgctttttgaaactcttgaaggagccggtccatgctattgttgtagtaaaatagaaagcggaactattctccttttgcaaaaaaaaaaaaaaggaagaaaaaaagtaaatgaaagaacccccctcctcccagcatcttcaggaggcctcaactcaggccattaacatggtaataccatcctgtttgcatctcctttgtctgtccagcgtttgtctgggatcctggcctctggatgctggaaatacttaggccccaaaggagagggagctcacagccaccagtttcctgagggtttggactctgagatcccaggcagagagagagttgagcctctctgtgcaatgaagtgggaaatgttggggtaggaggggatctcatgaatccatttttcctttggtccccagagttcaccatgcaagtctcagtgcccactaagtgaaaaagctcagcagtttggctagcctcttagagtgatgctcaagtgtgctggggcctagtggagaggtaagagcaggagttggttctgggaatcagctttaatggtgtgtgcccacagaagcatctggcagcagaaaggaaagggagtttacagtgagctccaggttgacccacctctcctctggtcatgtcctttgttcccttagcaagccccgaatgttgtgccacccagaacacagctgggactcaaggccaagaataaagattctgtcattgaaagcagctgggctgtgttgctggcgctgcaggaggcctagaggaaaacccaggtcccagctctccgggagccctcctagttttcaggggctcataggcacaaacacctgcggacttggtgaaacagaacctaaggaaggggaggtccaggggaatgaagggttgatctagcacagcctccccgttactcctttcctcagggatctggggaggatttgtaaaagaaaagccaggttgtttggaacaggacagaagatagtggcttagttcctcagtaagacagaagtgtgttttttatatcatttttgcaaaatcaaagtcaggtatgacaggtttaatttggatcctggggctgtcgtctattagtgtaggtttgaatgagcgggagctggggagaccagggcaccctgagacaggtccggagaaggtgctggagatgaaattagtttcccatatctccaaccacttggcatagggtggcagaagaaaacagaaaacaaagcaacagcgatcttttttagagctggaaagctatgtgcctcatctttcttgctttgcttttgcaatcaagaacagtttgatcaccttttgaaatgtatcaggacaggcattaatctcttctgtttgttcccttgtcacaaacttgcgttaagttttcccaccccatttttttagtcactgagccagctggatgatttattgacaaaaatgtccccccaaataccaccacttgagttcatcagatttcagtttgaatcagtaacctatcaaaatgttttatgctgctggactcaaagtgacccagaagattctcaatttatttccatccaggtacagaggtatctgcatggtaaataccacctccgcacctggcacagcctggcattcttgtaggagcctgggcaaagagccctggaactcaatggagcaaagagagtgaactcctctcccagaggtcatggagaagaaggcaaagcaggcctgtcacattgtccccagcctgccaggtgccactgcagcctcggaaagtttgtctaggccaaggcgctctcctttgctgcttctgcctgcctcttagtgtgggacctcccagggagatgagaaaggagaggaaggactcgtatctgttcagttctcttctcccctgtgcacattcactttacatcccctccctccatgacatcttctcacacaggctctctgctttgtttactttttttttctggcaatcagccttgaagagagattttacaatatttggaaatattttataatatatgaaaaaaaattttaaatacagaacagtacagaaaatcataaaagaaaacaggtgaatctaacaccccaaataaatactaaaattttgtcccatttgtttcagattttttttttatttacaggaatgaaacttgacaaactttaggactcctttgtacctattcctggtccattccctccttatcccacattcctccacaaaagtggaaactctccagagtttggtctacatctttcctctccattcttaaaaacttttctacatatatgtgaatccacacatagtataatgattgattttgagtgcattctgaaatttgcataaatgatttattgtacacgatttcacaacttgcttttgttgcttaacactgtttttgtaatatagccatgtgatacacaggtcacatgatacacaggccacgtgatacacaggtcacattctttcaccttagatatccacatccattcagtgtgtgaatgtaccacatgctacccactcccctacttatggaaattttgattatttgtaacaattttattacctgtgcttcttgatgtttaggtatgagagtttcactaggtatatataaaaaatggaatggctggtcagagtgtctacacgtttccatttactatatcttcccaaattgctctccaaagacttttaccaatttatactcgttctggagatagtagaccaatttctctgcagcctcgtataatcgttaagtttgttgtcatctttccataggcagtcttctcatgccttctttagggatgcactgcactctagcctgagtgacagagcaaaaccccatctctctctatcttaaaaaaattcttcatttccctaaagttaactatataatagttcccagaaagtgagcttttaatctcatccatcaccctgattctcacttgaggaaactgagttccagaaaggtaaagtaatgttcactgcctcaaaattgggtttgtagccatttctaagccctcagcctgggctcctaagattttagaaaatccgaagtgggtttgggccctctcatcttccatcagggaagcccctgtgacaacttacctctcaggcttcatgagcctctgttgagatacttcaggcctgtcctgaaatttgaatctggaaattctaagctaaaatggattggtcatactgatacaataatccttcaacgaagtccctgagtgcagttagattataagtttggccaggtgtaactataacctaaactaacagtggtatacatgatagagatgtactgcttcctcctgtagtgccgaggaggaatgcagtccagagctggtttggcagcttagctctacatgtctatcgaagagcccaggccattgactttttgctctgtcacacctaggatgttgccgttaccatggtccagaatggttcagcatcatgccctccatcccagtagcaggatgtgcatgagatagagaatggtggtgggagagaaagcatcccccatcccttaaggacattaaccagaagttatacacattatttctgtttatatgatgttggccagtctgtaaatatatgatcagaaaggctaaaaatatagtcattaatctgggtggccatatacccagctaaatttcgggatttctgttatcatgagaaaagaaaatgaatattcggtgacacagccctttctgaagagcccagttgcagagattaggtgcaatagtacagacgtaagggctgggcttgttgcataatagagttatactcttaaaatgcagcataaatattgtatgtattgaaaagtgccatcaggaccctctttggttccagactctaaagtagaagagaaagggtatcacttcaccaaggatcagcacccaaaaatcttgttctgcccacccaaaacagaatctccttcaggaaggaactttagtatgtgttttgcttttatgcagtatccaggaaagaaacttcaatgagagctactattgcttatagcacaaggcagggcatgaacttgggtccaaagtcatagaccaaacacttttttttttccaaaatgttttttcctacctccacttttaaaaaaaaaatgaaacaaaatatcagttgaaataacattattgagaaaaactttattccaaggcctggactatagttagactggatttacatttctcttttagaacctggaagccacttggctatctttgcagagttaacaatttgcatttgcaaaaatggccaggtaacagtaccaaaatatgttaaatcaattcaggttgttgattttctttgaaagtctcttccaaagaacttcatgttctttctggaatatgatttaagctgcatttcagtgagttcagttcagcaaatatttgttgagcatctattgttcacaaagcatggtgctcaggggtcaagagatataaggctgaaaaaaaaaaaaaaaaggtcccttccttttagtagcccagaatctagttaggagagatgtagttaaataagtttaatcaaaagccaactgtgatacctattaccaaggttcaaacagtggaatatagaaggataaagggaatagacttattccaagtaggatgactgaggtaggttcttgagagtacgtgggacttggactggatttcagcttgtgaatactgacaaaaaccgcattccattgtctcttgacagaagccaatttcttttgctatttgaggatagattcagggacactggggaatgctgattagttccatcactaatgctgattagtagtgaatgttgagtcatgctgactaatgtgttctaaatggattgactcaacaataaaggcaacgttgagagtcaagagttcagatcctgaatttcaccgatgaagtgtaaatcatttcgccacttagtgcttaatttttttgtcaattaaaatgtgctcgtgggtgagaatccagtaagtcatcttgacccatgagggctttacaaacttcaaggataacagacagcttaacagcaactaccaggacaggcttatgcaacctcaggttattcatagctcacacagagtcagaacacccatcacatgctgctcgccagccatgcgaaacttctgtttcctcacacatgccatgagaactgacaaacagtgcactgaactcacaaaacccgacaaatagaggagcttttgaaaaatcttcctatctacctactggggtgtctgtgtctttctacaacaaatgtcgccacagaactaagggcttgcattgcagacacagctctttctctcttttgacatctccccagctagactgcttgagaacctggccttccatgtccagatgtttactgaattctgaagccctcccagagagcccaggttcttttgttgctctccaaatcatttcccacagaggctgaccagtgtcctgaaggagcccttcaatagggaggataaatgaaggcagatgaagacatgaccccctgaggcttgcccacatccactggaacaaagggtgtgaggcacaaccttgtaaggagtgttttggtcagccgcgtccctatgcgaggccaagtctcccccacagggctgctttcaatggctaccatcatagtggaagtattgggcatttgttaaggactgtggtgtgctagatatagcacaaaacatctaaatcatggtcccctgcctttgtgagggcttcctggctacagatggcagctggctttctcaggggaaacttgggggtcatagagaaagctgaagaggggtgcttgcttctgtggatgacctcttcccacccagtgcagcgacactccccttttgtctatagctatccttagtcaagccagggctgcgggaccctaacccacacttccgctgtgtttctggatctctggtttgcaaggccagtggctctgtgggcaatacgtatgaaagaggactgctgttggaggaaagttccatttaggttgctggtgggaagttagtgcatttcataacaatttttttttttcaaactttctcttttttttttttttcctttaggccaagagaagccatagggatactgtgacctttgtctagagttgatgggggtgtgatttgtgaaataaaacaggaccgtactgcttggaagaaggaaacggaagctgacataatggggattaattagttgattgctgttgagatggtaacagatttgctcctaaaccattgagctagcgatttcagacctagcagggaaggtgaagatgaagaagcctttgttcaggtctctagatgtgtagggctgagggctttgccgccatgggatgtcaacagccataataataatttgcacttatatagcacctttcaaccaggcacctcaaagcggtttaaccacattaattaattaaagcccacaatcctcctggggagaggaggaggatgactaacaagatttgtaattacaggagggaacatttccgaataaagtattgtctaccagataaaaagagtaggtgtaaaggaattggggtctccaaatagtaaccgattcagaaatgaaatcatggaatgatgtgggaggctgggggcgggcatgggcaagggggtcgactctgtgtcagagggaggtcgatgggctcagaattcactgacaggttcagatccagccgagaagtggagcatgtatggtattagtggcatttgaaggtcattagtggcataactattgtagtgtaaattcaagttttattggtatattgtgtatagccctgcagaacaaagactgagactcatgcagtatttaataaaggatgaaatgatttctttagatttaaagcccaaagctgggccagtcaattagcaaataaatcaattggtgacccgtaggataatttagtcgtttccagtagaacacccagcctacacactcctactgccatgaggctctgattgaagcatcagactgggttcagggcaaggtctgggggctttagccccttcaaagccaggcattaaatctttccagcctttggccttgtgacctatcttacccaggttgttagtgacctcaagctgtcctctgtagaatcactttgtacctgctcctccatcagagatttttagtgcattgagggctagaatcaagtctcatcctatttcatgtctcctatgagtgcccaacagagtgctgtgcaccaagtaggtgcagattgatgaagattgatgaagaaagactgagtcctttaacgactcagtatttgttgagcgcataccaagtgctcaggtaaagcttgaaaacaaagctcagtgtgtgcctgccctccaaaaatgtactccaaggaatgggaaaagacttacaaactattaactataatataaagcagaatcacatccaagccccgggcagcaagggcaataggaagagcatcttattcagctggagtgaatcagggaaggtattggtgtgctgtgcatcggaaggcaagaaggatttgggtagacctggaagaggcagagcaggaagatgtcccaggctgtgaccatgtgtctccctctgagtgaggtacattttgagaacttgggatgttcaatagaatgttggtgaaaaccaaggtgagttttcgtatttaatcaggaaatatacatttcctgtggattcttatgacatgaattggttaatttcagacatcaagggactatttgagaagttggaggtagggttcaggatacagtactccaaaatccggcacgttggccttgaaaaaacagcagaggcaggaaggccgttgtcaccttcccctcacccctcctctcctgaagcaggttgtaaaatgttcattcctgaagtgttcactctctacccagaggaaaggaatgtccttatctctgaagacacagggacagagaagaatctgaacaaacaggccttgctaaatttcccccagtttattcccattagatcatactctttagtcctccaatcatacttctgcctgactgtctactcttcatcaaacttaagcataaaaatacacagatttccctggtttgggggtggtctttcttcttattcttctttttttttttttttttttttgccagagtctcactctgtctcccagtctggagtacagcagtgctatcacagctcactgcagcctcaacctcccaggctcaagcaatactccaacctcagcctccgaagtagctgggaccacagatgggcatcaccacacctggctaattttttattttttgtagagacagagtctctactgtgttgcccaggctggtcttgaactcctgggctcaagtgatcttccaggctcaagccaccttcccagctcagcctcctaaagttctgggattacaggcatgagccaccgcgcccagccaggtcttcatttctaaaggttctcatgtcacataaaacttacgttaaataaatttttatgcttttctcttgtaaatcttgttgttgttgctgttattgttgtttgagatggagtgttgctctgtcacccaggttggagtgcagtggcatgatcttggcccactgcaacccctgcctcccgggttcaagcaattctcctgcctcagcctcccatgtagccaggattacaggcatgtgccaccatgcccggttaacttttgtacttttttttagtagagatgaagtttcaccatgttggccaggctggtctcgaactcctgtcctcaggagatctgccctcgtcggcctcccaaagtgctgggattacaggtgtgagcccggccttctcttgtaaatctgtcttttgttatgggggccttggccatgaaccttgcaatgcgttcatgcaagatattactttttctcccctacagtttctggtgcccaatatggggtgactgagacaccccactcattctggatcttgcagatgagatcctggggcaactgacaaaaagctggaaaaattagaattcttatcaaagtcagctctcccagatctctgtctgtagtgcttggtcaagagagacgttagaaatttctccttgtcccttccttcccaaattcagattatcaggaaaaaaaaaaaaatgtctatattgtgactctctgactaaatctggctttaaggtactcgtttgttactgatcctttccctcgcagggactgctgtctctttccttgtttttctcaatttctgtcctgataacttggtttgattttctccctgttggggcatgcaagctgtcttgagttccccaaccaacttcaggggagggaactcaagaatacggctggacagaaatgtgggttgcaccctatttccagctatcctaccaagtattgccagctcttggggggtttatttgtatatttcttttgactctctttgggggtagttctggatttgggagggctgcactctcttttgagaaccccttcttagtccatggtgaagtcataaaaggctctttggttttggttgagtcacttagtaggtactttcagtttaaaacaagaaaaaggtaaatgtatatgtttttctcttgttaatctgtgttttcttgtagtgctctcagccacgaaccttgagataggtgaggaaaatatattatttttcctcccttacattgagcaagatgctgtctgttctctgcaactcctaattgttctctcttcacctccattgtctgccacgaaaaaaaaaatgctacattgttcacacattaaaatggatcactcaaaagtgtctgaaaaaagcaagaggaaaacatatcctaattccaaatgtcaaaaattaagtggctcctccttgagactacctttttgaccccaagaaacaataagagagtgccctatacccagtgtttgacaaaccaatacagtactctcctgcccaaggccctccaggccttcaccacaaaccatgctgcagggacaggacgtaagcactgcctctgatatggagcacttgctgcgtgtctgacacacactttacatacacaatcttctctaatgcttccagtaatcttacaggtagaattttgtattattccttctctacagatgaggaactgaagcaggagaggttcagtttgtcaccagaaaggatgaaatgtggatttgaactcaggcagttctactctcttttctctttcatcccttgccctgtaatatttctgttcacaactcttattcatcctaagttcactaaagtactcagcataatactacacacacaatagtaaagaactcagtgaatattttctaaataaaagaatcaccaggaacaatgctagtagtttgatcttctactctgagcagtgatgctcagaatatagtagaggttccatcactgccttatcatgtcaccatttttaaggagcagaagacatgcacaggaaagttgccccaggaaatgttcacaagaaagaaggacacaggtagcattcttccccgtgagctgataatctgccaagctggtaccacccatgagattctagtgtggcattttgtatcattaattacttttactgaaagtaattacttttactgaaagtaattaatgatgcaattcagagatattttaggggtgtgtgtgtgtgtgtgtgtgtatgtgtgtgtgtatcaaagttcaactttgtctccctaatcctgctagccttctggccattctattaaggtattgcagtcctggtgaagattcagaaatgtgtggtccccgtcagcctacagggtgaacattttggattaacccagagagccttgaactctgtgcataatgtcttttaggttgtgtgttgtgaacaaagcaaaatgactgctcagagacagggttgtaaaagtttgtccagcaaaaccaggattgccaaatgagaattctggaaagggaggataaggattaggtaatgggagaaaagtgagtgaaggcaaggagaagtgcaaaatatctgattctagcctaaaaactggtcttggaaccatttggaagggtcattttttccatgttttattttcaatatcatcaccatcacttttatcctgtggctgtgaaaggactttcttcattccactccagaattcaaagaggcttcttttgcacaaatggagggaaggcactcatcacacttctcagccaaacatcctaagtgtgagagaaaacacactgcctacttctgaatttcggtgagggcagggttcagatggaacacatattttccaaaactccaaatagatctgggaggagaggaaaccattaaatcactagacataagtcaggacacatttggttttgttccctatcaaacagtccccccaaatctcagtgacttgcaaaatccatgcatgtctgagactctccagacaagctctccatgtgtgactcaatattgcacttcagtattaacatgcactgccacagttgccacagtaggggaagggaaaggtggatgggggagagagagaagaaagtaagaaagagagagagattgagcactgataattaagtccttccctcaaaaaatgatatacattccttctactctcctggccatgcagccactcctaacttccaggaggcaggaaggtaccacttcctccatgttctgaaggaaaggggaactggatattggtgaacacctgtaatgtttggcatgcacagctatacccagtgggcttgcaaatgtttccttcttccatattcacgcttgtatatacctttccctcagattacctggcatacatcaaagatttatggggtagtgttcaggaagaccaaacagttttgcagcctattttagtccacaggtgaccttttgaaatagaggggtagccaagaaagaccagttaactctgggtacttttcccctagagctttcagacacaagtaactctgggaagggatagtgggttcaagggagccatggcctgatttcaatgacacattcaagatagaacaactagtttgagtgaccccagaccatcatgccttgtgtgaaaagacttttggaaatgtgcccttccatttccattctgccgcttgttaccagacatgatgcacgttccttcaaagccctgtgacttttccagaaagcagctctccctgcaagagagagaaactttcccttattattctttcagtaatgaattcctgctctgaatgggctgcctccatgtgttttcagtcaagtgctgatggcagccttgcctgggggcatttccaaagctgaggacataagagatgaaggaggtctcatattgacaagagctgcttttggttttccttccagtttagccctcctgagccttgaaatgggagataacaaatgattcatcagttcttgttggtgaaccaacatgaccaccacacctctttgctcctttcaaccaatgaaaaaatcatgttttaaagctttcctcagagaggtttgtggacctggattttggtgacttaacagggatttaactttctcagaccaaaccagtattttgtagatgccaagacttcctttcttcaggtctcaaacatagacttcgcgtaccctgaggtgataagaacaaaggagaaattaggtcaccctgtttcctgcctaaaacctaatctcaagtacacaagctgcttccaagtaagctgtggtggtaggccatgtttgctgagagccagcccactcactctccctaaagcaaatgtcttcagacaataattcagctttcaacctacctgcatgaaacttgtacaaacttttagttacagttgggctattttctttctttttcttttttttttttttttgagacagagttttgctctgtcgcccaggctggagtacagtggcgcgatctca

SEQ ID NO: 60740 - DNA, 4446 bp, Homo sapiens
ttagtagagacggagtttcaccgtgttagccaggacggtcttgatctcctgacctcgtgatccacccgcctcggcctcccaaagtgctgggattacaggcgtgagccaccgtgcctggcccagttgggctattttcattgggaagaggagtctcaattatctccggtaaaaggggacacatactgttaaggatataggtggtgcagaattggaaagccttctggaggggaggcagccctgggaattcattatcctggggtctctgcttttctttacatgtctgcccagggctactctcactctcccagcagattttgtcctgcatactatagtttatttactcaaaacttcagtttgcacatggctcaccctgtgtttctctcttagcctttcaacttcagttcccattggcttttttccttggttaaaattctgaagagagaatctgattagctcggacttatcttagtgttttgtctcagacaacatcattggtcactggctaaccaaacctttgttggataaggaagtcgctgaaaacatagctgcccaagcagcaggaggtgtgggaaggccagcttttcctagaggggctgtgagagggcaagacagtgatgaactccagggcatgctttacaccctctaactggactactgcaagcatactcattccctcttgcttcttgctcataactgtagacctggtccccttacaccctcacagcctaggcatctcttttcactgctcacctccagcccctgactccaggatcttacttctcaccctgttaaagtgcccagtcacagaggtataggactagtgagtgggaaggaagagctgttgagatttatttaagaatatacagaagattagggaaggtgtgtaatgaaaagaggaatgaaaataaaatccctctctcagctaaagaaaattgtgttcccaccatgggacccagctacctttcctccttccaccagtctttggagttacttccttttcaaaaaaaaacagacatcagcagaagcaagaggagcttccattgaggaaccctgaccaagcaagtgggaagatattctctcttcattaacccccaaggtcttctctgtcccctgcaaggatcccttgtccctatccctgatccttgcatttctccagcccccaccctcaggtcttgtaaagtccagattcttgactaagaagtcccaaataactttcaaactaagattttaaaacacaagtgaaggactcggtttggatcaagtttttgccaattgtgttcttagtgcccaaagctctttattggaagttattcacaaatcttcatgatggtttttggacgactagtcacgtgtggtgttgccctatttcaaatgagtcagagaaattgtgctttatatgaattcatgcatcaaccagaggattagggggaaaactgaattgtggtagtatgctttaccatttattcattagatactattacttttgtacctcatcagatggctaaaagccaaacccaaaccaaatgtattcaaatttcagtctgcccatattatttttagtggacgtgagtctaggagtgaaggagaggctagtctaaatgtctgtgtttccttgccctttcttgaactccgggtatgtcaaaggtgattaaatcattggtcaaactttgtcctgtgactgacacttttatctagtgactagaattgcaacatttccctaggagcctatgatagtttttccaaacctgctactgtggggttctagtcagttcctccagagcacctccagatccctgcccattctatttagaatcggaggtttaagtctattgccactggctgtcctctggggcccagaaacctatatggggtttgtccagcctctcatcccagcaccatcgtccaaaccccacagtcattaccaatctaacagcttgaaagttgatacaaagatgaggcagaagccagtttggctttctcccagttctctgtgcccctccggagttaatcaacaacgacctatctttgtgtcaataacataagcctctctaactagaacacctggtgaaaagccggaggaaagcttaaaatgaagcaaattttgcagtgattattctgaccctcactgtttaagctggactcaggatctccagacaaaaactgcttgttaaacccaaccaactagttggatgaaccttaagccaccttgggttttgctaatatttttcatgcccacacctcaactccaaagtctgtaaactttaagcatcaactccccatttcaagcacacagggtttagtgagatggcctgagttcatctcgctggtagaattctttagtggcatctcctcatccctttcccaccctcaaagcccatcctgatggtgcggtcacaccactggagaaaccatagaccttcttaactgggattaccaacaccttctcttagtacgtattcacatggccttggatgttaggtgactgcctgttcagagaaagtggggagggtgaaagggagtgaaaaggcagagggcacatggacaacagttccttgctgtattcgtctgctcaggctgcataaaagaataccacaaactgcatggcttaaagatcagaaatgtattttcacacggctctggagactggaaatccgcaatccaggctccagcaggtttggtttctccggaggcctctccccttgtcttgcaggtggacgtcatctctctgtgtcctcacatggcttgttctgtgtgtgtgagctcttagtgtctcattcacttcttataaagacactagttctattggattagaactagtatcttcttgctttttattttctgtgtatccattgtatgttttttggtttgaggtcaccatgaggctaggacctcatatttatgaccttgtttaaccttaattacatccttttgttttatttttggttgttgatcatgatgtacaattcattacttttttttctttttttttttgagttaagtctcactctgttgcccaggctggggtgcagtggcacaatcttgactcactgcagtctccacctcccaggttcaagcaattctcctgcctcagcctcccgagtagctgggactacaagcatgtgccaccacacctggttaatttttgtatttttagtaaagatggggttttgcaatgttagccaggctggtcttgaactcctgaccagaggtaatctgcctgactgggcctctcaaagtgttggattacaggtgtgagccaccatgcctgctcattaattaccttcttttaaaggccttatctccaaatacaatctcactggaggttagcacttcacatatgaattttgaggggacacagctcagttcataacacctaccataactgttttcctcacagaacatcccttatcctctgatcttgcccttcttatctgattgggaaaaaagtagatgctggccaagaaatgcaagtatgactatgcagtttgagaattgctaagctaggtggggagggtgcatgagacaggaagaatgaaaacgtgggtggatggatacatgaatggatggttattacatggaaagacaaatgaatgaataaatggctttggcagtgtgttgatggcaccaggacagaaattacgttctgtttctttagggtttgtcttttttttttttttttttttttcaataatacagggcttacaaactcaaatgtgcatgccagacaggtaaaaagagttgcaaaaagaggccaggtgcaataataggcagttgtagggactgacagattagagagagcctaccgtatataaaggggcaccagttactgacaaagactctcattctgaccaaacttgagtcaggctcctctgagtcctctttctgactaggccccaaccttgggctctgtccttggcttgcttagtccagttttagcaagaatcctgctaagtcaattgagtgaaaattccccaccctttgtatttgatcaccctcagtacctaatcaaattcctcagcccccacccttaataccctatcacccttgcctgccttcagtaagaatcctgccatgtcagtttagcgggaatccccctagccttggtgtttcttcttagtaatttttcatccactgacatccaccctgctctttggctacacattatcacttttccttgttgtattcggagttgagcccatctctctccaaggctgcaaaaccccattgcagtgttccttcttgaataatgtcttacttaaagtctttaacaactgtcatgaaaaatttctctttcacagtctcagctctagacaattgttatcttgtgggatgctgacctcatgttgccagaatgtcggattttacaagggaagccagaaatctgggttttcagataaattttttcactatttttattttatttatttattttttgagatggagttt

SEQ ID NO: 60741 - DNA, 6215 bp, Homo sapiens
gcgggaacatggttgttttccattcttgttcagctaggcttacacatcctctcactcccaaaaggcagagtaggcttgcaccccacacctgactgggctcagctctttggcaagtgattgcgtagctgttctgcctgtgactgcaggccccggtctgcaggcgggaaacaacaggcagttgtgtcctgagccctgggaactggagatctttccacatctgttcgcctagtcggggggcgggaggaaatcaccagaaccttcaaacatggggccagagcagggagacaaaggggaagccttaagccgatggtgaccccaggtcatatgagccccccccccaggcctcccccatccactttcatcccctcaggtccccgacactcagccttttcatccttctccaggtcagcaggatcaggttaatgtgacttgaccagaaagcttatcaaatgaaggcagagacaggtgtttgaaaccccttccctgctgaaagctgggttgaacaaggttagcagcgtagctgaggccaacatcctacactaattgcattttctttcttggagctccttctcttccccttctttgttctctggcttggaacccctcaaggtctccgagagccagtaaccaaaacaaaccattcaaaaaacgaaggatttagggaaaaaaaattaggggatgtgacattctggaccaaacagtggcccttctatgccagagcctaggaaccagcatttggaggcatccggccacttccacccagtgggcatgctgaaatcagttactatgggcttatcagaactgattgcacaaaccttttcccaacttcacaatcatgatgtcatatttgtagcttgagttgaccaaggtgggaatatttataccacagaaatcagcaagctacaaaccaggcttttccacctccagagccagttgttaaacatttaccggcacaccagtgcctccactgtggctattgtcactcaaagtatgattctcagaccaattacataggaatttcctagagatcagaaatgaggtggggcaggagggttgttatttaacatgcagatttcctggccaacctgaattaactgaatcagattctctggaggtagagcctggggaaatgctttttagcaagtccctgaggttattaataaattcaataaagtttgagacttcagccttagggaataggagaaaagagtgggcgtgcatctgactcttggcatctggaaggaacagctggcttcagtcccagttggcctaagaatggacagctgttttctctcgagatagaaacttcatgacaggaaaagaggtgggaattttggggtctcagctacccactgacaacacgactggttctgccttggatctcaggatgaatccattttccaacttgagactttgacccaagacagcatgagcaaatgcccagatgtatgtagaacgtggagaaagtcaccgtcatttgcaccattggtgggaccagtggagcccagggaaagcccagagtcagttttctgtattagattgcccaggacagcatttttctttcagatttgtctagacattttcaggatctttcccaatcaggcatgattttgtaaagcaaagaccttgttgacttcatcccactgagctggaagagaaggtcttctaaggcagaaagaaaaagagaaaaaaaggagaagagagaacgtttctttgcctagatgtaaaacagaaagttcataaggagcttaactctgctttcgccttgttttgcacctgcctgagggagtggtttagacggggacaagtagtgtgaaaacagagctagttagtaaatgcaagagctggggtttggaccccaatttttacagccaaaacaaaacaaacaaacaaacaaacaaagaccaatgcactttcctcctaagcacaatgcagtattttttccacatgcagttggaacccagaggaatccttaatgggcaactggggtagtgacataggacatatatgctcaaagtactgtgaattcctaaaccatcagagcccccataccctggtgcaaattccaaaacataatccaaagccacatgtaaaacttatgggattataggcaagtaaattatgaactattagattactggctattagattatccactggaatggataactgagagtcaaccatattgatacatatcatttaggcactccccatattagacagttaagcttgtagctgtttgctaagttcatgatcatgtgatcatttcctatacatttgttctaactgttcagggctttaattaaacatataacttcatcaaataggaggaggaagaaaccaaatagctcctcaggaaaacaagatatgagctcatatgtattttttgccaggtttcatggcctttctttgtgcccagaaactcttcctcaccctaggacccatcttcactttaatactatccattcaacaaatacatagtgaggacctactgtgtgccagttagggtgtggggaagaacaggagacaaaccacctggtctcattctcatgaattttacagtctattgggaaacaggtattacacaagtcaatatgaaaataagtaagtgattatacattgtcctaagggctgtgaaagaaaagtacaaggtacaaagagaaacgtcaatagtcctgaaaggttgactgcatcaagaacatgtccatggagaccaggctgatggagtttttgtttggattgttttgggtggcagggggtaggggtaagggcacatggagcgttttgtttgaggtacttgaaagggagatgtcaagtaggcaactgaatatccaaatcaagagagtctgtagtggagtggtgactcaagcccgcacctggatgaggtcatagggatggaatgtctgaggagaggcaacagctggggcctgctctctgggccacccatatgcagagctcacgaaggaggcactcccagagaggagggagtcccagaagccatttacaaagggtattttatgagtgggcaacgtgaaagtaccaacatcagaaaagcacctcaggacctccaggtcctgactccccactcctcccttctcatgagccaggcaggctgtctgcaggccagccagtgaattgaactggggctctcagagtctgaacagctggccatgtcttggacagtgcttcatgactctaagttattactttctgttcctttcctagtccctaactcagacccaagctctttgctccctggagtttctaagtgtgtaggtattaggaagagagcaaataaaccagttcacacagatgtatgaataatgtttaaccagccagttctctttgagatatattgttgtaaagaagcaaaactaaatgtctaatctgtggaatttcaggcaaccttatacgtttcaggtggtgcccttgagagggaagaccttttgagctggggctgccaccctgttcccttctagcttccctgcactgttcctgcagcagcttcttttcttcctccatttctgaatccccagagtcttgaaaacctccagaattttcagagtggttcctttggcaccagtggccatgcatctgacaattacagtagctaacatttatatgtaattgttagcccctcatattaaacctacattaaccctatgttaaatgaagttaaccataacatagggttgctgtgacttcacagcaaacttcagccctatgttaactgacttcacagcaacgctataaggttgggtcggttactcttctctgggtgaggctgtggctggatgagagatgtttgttagctgcctgtggacacacagctggcaggctgaaatttgaagcagcgtcttgctcccagtccacactcagggccgtgtgagtgggatgtgagcctgagtctgccctcccttgggtttgctgtcctgagagaacaaaagcaaatccgtgttctggttctctgagatagctcttactagacctggctcagtttgacccctttctgctgctggaaaggaggacagtgcaggtcaaagccctggttgctgattacagacaagatgggagtcatgtggggtgtcagcttctgtctcctgagagagaaaaccgaaaaatgctacctgaatttccaggatgaggttgaaggcacaatcttttcaggccaaatctcttgggcagaattgaagagactgcaaaaaaaatatggaagttaccctcaccgtttctgggatgtctgaattcctccctctctggaatggagccgctggaaggctccataatcctccctctcctggctcagaggcccagctacactttctaaaacaacccagagccatctgatttcaagcatgtaccggctcgtgtgtggaagacagtaattacctccattccagttaggaaagctgaaacctgcctttttcatgcctcaaacaattatcgaagtgccttttgaagctctggatagaagagaaaagcaaaacaaaccaaagagccaattagagcctgggatttgagggtggcttagttttgtgcagtgggacttgggaggaactgtgggagagggtcagaggtcaccccaaacctccagctgccaaccaactttgcctgtgccaaaagaacattattttgcattgaaaatcaaggctcctctccctgactcaggaacaatttgcaggaacaacctctgcatcagctgtgaagagggctccctgattaaataaggcctggaatgcatttgatgttgaacaaaacagttctctgacagcttttcttacttgccattagaatgcttccccttcagctgaaacttggtaagataaagtgaatccccggggacccttttgttttggtgtacatatttgaggaatttttgtggcctgtgttccatttggagttaaggttcttggtccctgaagttcttccaggcttggtggtagaagctggcaattcagaggcaggctgtgatgagagtagaaagcggataccaggcatgagggcagaggagagcaagtggccctgccctgggatgggaagcctgagggcttttttacagtccccaaggagagttccctgacattcaacactgccacaaggcgcagagtggaaagtggagttggggcatggtggggttgaagctggattagaatggacttggccaagatctgttcgtgatgtctggggtggccttttggattaacaggatttgattcactgtgaaggcaacgtagcactgtctgggaggttcccttttgagtttgggtgagaatcaggaagacagccagcaccaaagagccctgagagaacccactatgccttatttacatccctaacccaaactggatagaggagctttctcttggccctggcataagtgcccggctttccatctgcctatcatttaccccctcaacagtgggctttgatgtctaccctccactacaagaaaaagcatttgtaggaatgcctcttggtgtatgtgggggactgccccttagtatagggaaagttgtcctccatacacaaaggttttgtatcctgcaagtgctgtattttctatctgtgtttggttgaaaaaacaaaaacctacatataagtagacccaggcagttcaagtccatgttgttcaagggtcaaatgtattcctataaagcaaaacaaagaagcatattgcttaggaatgtgtctgtcgtgctcaaaatggagtgaatatcaatggtctggtggcatcaaaatggccagttctgtgacagtaaaagaggtttgtgtcttatttaatcttttgataataataacagctatggtgtatcacagctttaccaagtaccagacactgttctaagggctttgcatggttcactcactccttacgtcatccctcggtggcaggtgctgtaattatccttatattgcagacaaggacattgagacagaggtcaagccaccttcccaagggcacacatggcatctgcactgctcctgaccgaccgacagagagagctgctgtcacgatcctcaaatgagctatgcatgtcaaaagtttaaaaataaaaaagataaaaacatgcacaaaatttaaaaagtaaaccatttcaggctggacagactgaaactgagagatggccagagaagagtatgaaagataaatctatggacagagtaaaccctgactggcttgaaattagggcccttactcctccacactcctgacg

SEQ ID NO: 60742 - DNA, 3448 bp, Homo sapiens
tccagaattataagataaattttccttgctttaagccattccattagtggtaacttttacaacagcaataagaaagtaattcaaagttatctgggttttcaaccctcaggtcataggacctggaggacattgtcccatgagctgggaagtgaaaatcatggtggtcaccttagcatccttcccactgaccatctgggaattctcatggttctcctggctaagccccacctgcatatgagcacttcagccatcagagtttccctgcaatggggtctcttcttgacgagtgatgttccatttcttagcagtgttgccagggcctctccttagtgtggtccagacatcctatagcattacaacaagctgcttttcacacccacactcgccccaaatgccaaacacttccagccagcacagggtctgggggatttttctccccttccagatagccagccacaacttcaatgagctccggcatatggaattagcatgatagaaccatgacatgccaagtgccgggagccaacctgagccattcttgggtttgagaagttatcaactgggaaatacttgtgatttacaattttcttctgtcctccaccattccatcacatgaacatccaagtcaaactcctgagctgggttaagaaattggaattcctgaggctctggttcaggttcttactacctctgtgacattgggaaagttggttaccatcatagcgcctcagttttcttatctgtaaaatggggaaaatacatgagttaatatatgtcaagtgcttagtgaactgtctgggtcatgttcagtgctataaaaatgttcattgttgttgttgctgttgtttctatcgttgttattattaaatgggtcccaaatcttgaggcaagtcatttggaaaaccagcttgttcgtgctttgccacatatagtcatgtgccacataacaatgttttggtcaacaactgaccacatacaggactatatagcctaggtgtgtagtagactataccatctaggttgtgtaagtatactggacgatgtttccacagcaacaaacccacctaatgatatatttctcagaacgtgtcgttaagcgacatgtgaccgtattatacgtccagcaattgagatgaattaccgttgcacacagtgctgaagctcaggtgtggacaccctcttttaaaatatttttcccatgaacatgtcctccaggaagcaggctccagtgtgtcacagccagatgagtgattgttagggaagacaaagcctgtgtttagagttatgcaagtatagtggggagagggcatcttattgctgactcacgcccactggcaacccagcctgattcatctagactgctgcagaccactctgcatggaagacctctgctcagaggatctcagcccactgcatggcccaccaagagcctctgacattcaggccgcttggttcttctggattcagttcttaggtccccgaaagtggtaaaggagagaggagaaaactagttcattttcagccaggagtggcccctggcacacgggacactgcttgctttggacagaggccactcacaacaggcttccccttctgggtgtggtggccagcctgccctgacaacagtgcggcctgaatctgtgactcttagcggctgcttgggactgctgcaagactctttggtctgtgacttgcccaagagagaagtttctgggcagaacggggagctcaggaaagaagaaagttacatccgcacaaagtttcaattataaagcccaataataacgatgaccaaaacaaaacaaaaaacgaaacaaaatgaaaaagcctacatgctctttggtattgttgggactgaaaacaatggaactgagtttcttgactttttcttaaccttatccccatgaaagaggtttgaattacagtatttttcaaagtaaaagccatctgaacagctgcctgaactaacctgggagcctagacagtttagcttcttgacctctgggatgtgggggaaggggacaaaaggaaagagagagtaggggaggagcgagctccttctgttttctgggctggccatttgaggcccatgaaccaactgagctgatgtcagactctggcactcccacttccaggagtcacaacaaagtggcagggatcaggggcacccctgggtctcagagaagtagcacattgtaggagaaagagaatatgctgtgcagacacacccagatttgtgttttgctgctcctttcactccatgtgatttagacaaattacataacctctctgcaaataggaaaacttccttgtgcctgttggtcttggaaggactgggactacataatgcaccaatagaatgtctggagcacatcagatgtacaatatatgagcagtagctatttttattattaaacacaacaaccacttgggccaaaggccacctaatttgtagaatcattgagccagaaagaactgcaacaagtcagctcataaagtatgcatagaaagaagcctggaaggaagtttactaaatattaacaatgattatttctgagcagtggaattgtaaggatatttgtgttttcttctttatactctttcaaattttccaaattttctttagtaaatgtgtatttttttatactgaaaaactttaaaacattattttttttaaaagtcttccatctcagtttgtgggctccagtcagattgcactaagccatctaaaaccacagtcgtccaacctgttgctaaagccatgagaaaaggctggcaccaaccagtaaagaattccctccagtcttccgtaccatacatcctgaatggagcataatccctgcatggtttctagcccatcataaccttgctacactgtttcatagaaaaacttcagccattgagaatgatgtcattcatcatatttcctctttctttgccttttgctgccaggaagccttaaacaaatttaatactcaattacagtaataattaactcagattttgggcataattattttcccttcttcctctatggtttaattttccctttattattcaaccaacttattgcatatgtgactttcattgtaaactacctcaagtacactttaaaagttggacataaatcataaagtataaataaattaagttttatctgatctcttgtaaaaacccatgatcagcctgttaaaattcatattactaaacatcttgaccagtaaatgtcaggagggtggcatgaagagcaagaaagagaaagctctgagtcaaggtccatatttagtgggaaaaaaaatcctggcaaatatagatttgttcagaactaattatttacctttttttttttttttttgagacggagtctcgctctgtcgcccaggccggactgcggactgcagaattatttaccttttaaaatgggttacttaatacttattctagtatg

SEQ ID NO: 60743 - DNA, 5664 bp, Homo sapiens
tggttttcaaagcaagtagcacaattcctatttggtagataaggcaattgaggcatattaaatgacttgccctatgaatgatataactgggacttctgattcctaatctaggactctttttgttacaccagacagcctctcaggaaattagaacaaaaaaatgacatattgcaaaattaagtcaaagaataaattaaccccatttgaaagtccaaggagaccttcagacaaatgtgtatcagaatttcaatggtatttggcagagttggcctaatggaagtgtggacaccctgccaactttgcataagatacataaatctcaaaatcaatttaactaactttcatttatcttggaaacacaaaaatttagactagaacttggcaggaataaagagatttacaccaagcctgcatccccactactcttgtaaactgtttcatgaaccccagtgttgaagacctcactgttttgtttgactctgaaggccgcctacgcatacttgctgctggaggaaggttaatactgactcagaagcaagaggaccactgactgaatcaccaccacttactacagtcctctgctctgtattccttggaaatctcttgcctcagcttgggcttaacccaacccacttagaaggagagaacaattttacagccccgcatggagtgactccaagccaatcgtatctgtttccaagtgatctgacgcagcaagcagattgtatttcctttggaggcttggctgagaattgttgggttggcaacactgaaccagagtgaataaaataagactgtcaagaaaaatctgaaatggcccctaaagagataggactaatgaaatgctcaggtcaggggtggggtgctttctgggcagactgaaaaaagaaaggaggaccaggtgaccatgtgtgaaattcaagagtcaacaatgatctaggtaagccaggcagattggcacatgcccagtacttttctgagagcaggcatcaagcctaaaaaaatgcacaaaatctacctcttatttttattcttacctttaatcagattttttattgaagttttttcatggttggttacctatccaccttcctcccatcctgccaaagaaggcagggactccaaatgcatttgccaaaaaccaacagacccctgtgttcaattattgtgggcttagggaatagtaattaaggagttccagggatgggatgtgggagcagcaaaggagttaggtttcacttaaggtccttgggaataaataaatattctgtcactaggatgaatggggttggttcttcacagatcatgtaaagggacaggcttagccctagaaccaactcatgatctagatgagtttctgttcagatggataagggcatatctttgagcaccaggttccatgggcacatatctggttcattattctttgctttgcttgtgcaaaattattttcaaaggcaaagacacggggacaaagttgggctctttgaggctgttccttgagcaaagaggtgtatgcctctggctgcccacttggcagtggatatcttcatgcttcttttttccacccaaatattatggccactggagtatttgtaggaaacagtctaaaaaaagacaacactcacttccccttgcttcaggctcttcacagtcaactccactggcatgtttcaggcacctgctgtgtgccaggcattttttttcagaatggaacaatattgcccttgtctttaatgccttaactgtctagcaggaaagacattattatgagtacctggggcagaaacagtgtgagaaacattttggagacccaaaggaaggggccattgtaaagaagttccaccagagtagaggtaagaacggggacagggcatgcctatagacacctatccatcattcgcttgtccacacattgatttccctaaatatttattatctgcttgttatctgccaagagtgaagggcttgggattcacagatgaataggacatggaatatagagtagggggttgggcagaagaagggagtggtgggagagggagttgaaaaatagattgggccgcattagtaagacttttgcttgccaatttgggtctgaactttgttctgtaggtaatgaggagcctctgaaggtctttctacaaggggtggcacagatacctgccccaccccattatttcctaccctgcaacttagaagtattttattcatgtatctgttttttagcttgcttcttgtttgatttccctaactgggatgtgagttccacgaggacagggaccctactgtatccaccactgtattcccagttctgggcacaaagtctggcacacagtgggtcaccagcaaatattttacttactgaataatcagatctgtgtttagacagttgtctccagttgataccatggagggacatccaaggttgggagatcctggaggaaggactggtagcagcagagaggtgctgagagcctaatccggggctatggtggcatagaagggaaggggagagatttagaggactcatcagagttaacatcatcagaccttggtgagggagagggagggtccagaggtttccatgtggatgtctgagtagctggtgatatcgttgactgagagagaggagacagggtaggaaccttcaggtgaagaggggcttgttatgggaagtaagggagcatagatagtgagatcagtcttggacatgtatgatttgagacaaccatagaatgttccactagagatgtccagtagacagttggaaatatacgtgggcaattctggaagatggctggagctgaggtcacaggcttttggtgataaacgaagccaacaaagagtaaagtcactcaaggagagcagacagagttgaaagaaaaaatagaagccccaaaactggaggaataccactggagggtgggaaagaggagctggggggaggagacaggtgtgctctgagaggcgggaggagaagagaagaggacttctggctactatgggatagcatgggccctacctaggacagggcagaggtcagtgggaatgggagctgttatcttgggcgaccaactccactcagttcttaccatgttaatgttaatggcaaactcttggcaattctgggcaagtgagaagagcagaaacacctctgtgcagtttatcaggactttctccttctagcacaccctgagggtgaggccagaattagtcatgtgctgaatggtctgcctatttcatgatgttctcagcttggaaacattttttttgtgcaactccaactcaagcaccagcaaatccagcctctcctcacctcctattacaaatggctgtcatggactagaccggtgcctaacaaacagcccacacttcgggatctgagttcaggttccggcacgattagtgcaggtggcttctggctctaaatctctcagaggagacatcttcttctgggggctgattcacacgtgagtgctgatcatgaccttgtgtcgggattaacctcctttctcagcatctcctgctacattccatctgtttctaaagacacctcattctgccttccttccggccatccactgttacctttcacttcctgtcggcacgtacaggccagggactttactcaagtcactgaacattttggggaaatgaaatgaaaacataaagagaaggccagtccacaaaacagctcaaaatggagatgctctggctgaaggaaggagtgttggggtccaggagccccgctcactcctcagcacccgggagcatcacggaatctaaggtgaacctccggggcaggagacacagcactggccttagagtccacaagcccgggttccttggccctgtctctttccctctctctgttgtctgtagctccctcctagctctgaaactccaagtacaagtgagcaggtcatgagtcaccaagcctcttttcctgggcgtttttccttccggggagagaacagccaggcttggacaaaaagtgttgggacaccctgaagcagaacacactccctgtcattcctggcctcactctcctccagaacgaaagcacccagacctgcaggccttttttaggaatgaagtcactggtctgtgtaggttgacagagtgtccttggaaaaggctgcttgggaaggaaactcacaaggcatgggtatccccactggaagaatccagagcaaaacccttctggaaatcccccaccccacatatacacaaggaaactccatggaaggcatcctgtcttggaggcctcagtgggttcctcctggagagtttaaggggagggaggcagaggaggaaggagagaaacctaaagtcagcaggatattctcatgttctctctctgttaattgcctcctctctttttctaagaaggctgagataccgaggcttcctcacccaccaccccttcctctacctccccttagtgctgggtgagttcatccatcaggacccctgcctgggactgtcctcactctcccgctgtggctcacttgcccccagggcccatcccagcccagcccagccctgcccagcccagcctgctgcatgcttctaccccggctcccactcaggctcgtgcgtcactgctattcatcttgtttagtgcttggcttggctgcagatgctgtaaatatggtaattttagactccctgattggaaaggattgcagagcgggttgtgggggaggacggcagtttgatttactccgcaggagctggttccgagatggctctccaccctctgtgcacgcctcttctccaagctgtgccccatcaggccctactcttagtgttgagtcctgacttcttggggtcttgggagaaatgagagggacagagtggatgtctgtgcgttctgggcctgaagaattgctggttagcacagagcatcacatgcaaggaggccggaagtgtagtcagtgatgcgcagggtgggcgtcctgacactgctaagacaatgcccaaggctgatgacccaggattatccccccacccagggcacactggggatgaagtgggggctgcccgaggcctctgaccccttctgagctctctcccttttctgttctcctttctttcctgacctccctccatggggggccatcagtccccagggccttctgccaggcactcacagggttgtcagcaaatccctcctcccacccctttgttgaataaagacctaatttgcatttgattacaggacccctgagtgggtaggggtgtattcagatccccagggagtgactgtgaggctggcatttcaggccctgggagtcagagtgggagctgagggttttgagccccaggagtaggtcaggttcttcaaaagccaccagatagtctcccagctgtctgtcttatctcctcaggacaaccctaactccaaggctggtgactgagtcagacttggaacatccccgtttttgagccacagtctatagtcacagaatgttccagggggagggatggggggagaaaaggagggcacaactcacatttctttgagccccaaacttcatttgaccagtgaggagtggcttgcaccaaatcattggtgcagctaaccacaagaatgttagctcttatctagtgcttcatccatgccctggacacattttttttttttttttttttttt

SEQ ID NO: 60744 - DNA, 1081 bp, Homo sapiens
aaacttcggtcagctctgaccgttgtctaataattcttcattgctgcaagttttccagctgtcccccacatctgttttagtggtggtggaggattgggggactcagaaggagggcgtagattgtcctgctacagaaaaagaactagcaggactcctctgagggagcaacatggagagactttctcacccctctgcaggcaggctctgccccctttcactcactggagtgctcacttcctgtgcacacgctgcgccgtgctccctcctggcccatgaggtgccagtcaccacacacttggatttgtttacttttcctcctggaaatgtggacatgagggcattatactcacttttcaaagcaaaggattctttcctggaggggttaatagtccttaggtgtaagtacccctccagtggttgtatagcagttgtctgttgggggaccttaagtgattattcatggaatctttcatgctaaagatgcattgcagcgaaacgtcattggtttggaccaaatccggttatggtctgaagaacctcaggtatgggacatccccagcaaagcagtcttattactctttatcctgcagagtcacagcttacagaatcttccctagaagaggtgtgcctggtgtacttttaaaaatagatgcgcctcttgtgtaaacagcattttgcctgttggaatgtaaatgaatgttgttggagtgcttggagacagtttgttcttttagtggattagcaatttcccctgcaaatgttgtttcatggtatttgctaagcacatccttccttcatatgcaatatggaattccctatcagccagcctagatgggcgaaaactctggaagttctgctgtacccagtccatcaataaccctagcagtgatctgtgttctagaaaggcaggggtgggggatgagtccaggttttctaaagacattgggaaataatagcaaattttccagagaaggagttgcttccaaaaatttaaaaaatagttaaagagaggcatttataaccatgaagagtagtcaacagagaaaacaaacatgccagtgaatgaacatcctagcagagg

SEQ ID NO: 60745 - DNA, 7247 bp, Homo sapiens
agtcttgctctgtcacctaggctggagtgcagtggcgtgatcttggctcactgcaacctctgcctcccaggttcaagtgaccctcctgcctcagcctcccaagcagctggaattacaggtgccctccaccacacccggctaatttttgcctttttggtagagaagagtgtcaccatgttggccaggctggtctcgaactcctgacctcatgtgatccacctgcctcagcctcccaaaatactgggttacatgcgtgggtcactgcgcccccaggagcaattctgagtaatgccctgatttcattaatcaaaggaagactgcagaggtgtttgtagtcctttttctgcaattttcccactaaagcaatggcaggaaaggtctgtcgtcttgaccacagacacacacgcttgccaggactgcaccccgaggaggactccagcatgtggaatgggcagaaggcagaagccctatgtctgccctggggtccccagtgctgaaggcagcagctctgctggctgcgcggctcttccctaccttgttttggatgagaagacccagacccagagtcctgaagtggcttgtccaagtccacatggacacaaacagttctagaagtcacactgccacatacccagcagagctacttctcttctctgcctcctccttgccccattttcccaactaataatcagatttttcctcggagtgacttctgacgagcatactcagatgttacaggtagtcacaaaaatagcacccttttcccatcaaatgggctgagaaacgatttttcacggaggtcttgccacattcaaaggttaaagtactttgtgttctgttgttttggagctgttggagaggcggaaaaaaaattctttttcaatttcataaaggatttttgttttcattttctcagactccagactgactcaccaaaaggttcatctcatattcggcatacagtggcccacctgggaggtcttttattaatgagtctggggacttgggggctgctgctcccctaaatctacttgaaagtgaccttcagagctgggcgcggtggctcacgcctgtaatcccagcactttgggaggctgaggtgggcggatcacctgaggtcaggagttcgagactagcctggccaacatggtgaaaccccatctctactaaaaatacaaaaattagccgggcatggtggtgagcgcctgtaatcccagctactcgggagagtgaggcaggagaatcagttgaacccgggaggcggaggttgcagtgagccgagattgcgccactgcactccaggctgggtgacaaaagtgagactccatctcaaaaacaaaaagtgaccttcagaagcactgacctggcctccccccgccccacacacacttctgccccaggatgtccccctctctccatctccaccctgctctctccacactacaaggctacttgacttcgcttctggaagccctagggcctgattctctctccctcatgctcactgggatcatccggcagggaacagaagggatactgcttccgggcagaaaatgggccagattcaggaacgcctgaaatggggctctggaagccttttgcttggaactttcttggagcatgtttttgccagggccatcacccatctaggagttccaaatggtttggcagaaatattgccctgcctcctacaccttcctctgccactcctgacttcctttcaccccagcctccccagctgagaactcccatgctggctcccaaatacacaacaagctcttcgcatggtgcccgcttccacaacgtctggtgatcaacgtatcctaattcattggaaagcctaaattgtggacctcaaatttaaggatcatttagggggcttattaaaaatatcggtttctaaccccaccactcaaagtcttattgaggtctgtggcagagcctgggaatctgcattcttagcgcaccccaggggattctgaggttgggcatctagagggcccccttggagaaatacagcttaattctacagcaggcatgctcacctggggcctctgctctgcagagcaccgctggggacacttaggcgaggtgactaggaagaagaaaagaatagcagtgtgaggattcaggctgaggtataaatataaaccaggtaggtcaaggcctgggcctgggaggagggcagaggaaggcaagttccccgtgtggcttctcagggaccagcagcgtgagggttccacgtggcaacgctgctggagagatgtttacatctgggcactggcagagccttctggacaggccatcaagccagagggagcaggccctcgagctaaatggcatcattctgagacgggagctccttcagctttgtcctcaaaggcactgcagcttggtgaatgaacataccggctttagagtcacactggtggcccgacttgtctggtctctgtagtttcctctgctggaaaaggaggacaacagtcttccatgcagagggcgagtgggaggatgaaatgaggtcatgtgtgcaaagttctcagcatggtccttgtggcagcaatgtacacgagctattgtctttgtcctcagagctgctcctgtctgcctcacagcacgtctctgaagctgtctttgcagaattagaccacatgaataatttggagagtccataactgtcctagaaagcttttggtttgtcctttttctccctgtgaaagccctcgtcaccctggaaatgccagttctgaagaggcaacgcttacaacgcatcaaattttctctccaagtgaccctgcctcaccagacatttgcagcccttccagtgatactgaaagaaccactcaacaggtgggggccagatctttgcaacggaaaatgccacttttgaacgccaaacctctgcctgacgaaggctgtgtgatctacagggtgagacagggagtttaaggtgggaaccaaaggctcttgagcaaatgcagaaaggaaatggacttatgcagaggcccatacagcccccagtcaaccctgcctttgccatgtcagctgtgggggattttgtgctggtctcagcctctgagcgctctctgcctcagtttccctctgcagggtggagccagcacccacagccatgttttggcacgtggcaaactaactccttttgtgtactgtgcagtcttaggagtaatgaggcagcaatattattgttagttctctgttctaatgatcagctgtgaggacctaagcaaatgagagttgctatagtgttatgaagaaaagaccctgacttgttagagtggccatttgtttccccacagctattcatccccctggtgccctcatcaccagggcatatctaaaagatgccatgctagatacccatccagggtatggtacagacatcacaaggtaagtattccaaggccagagaagtgaaaatgttcacagcagctctggaagagaggaactcagaaacctctgggcaccttctggatggagcccattgcctccacatccaaacatggaccatgtattgctacaaaggaagcaatagtgtgctccacggaaggcccgggctgctgccggtccctccagagttcacggctgggcatgatgagaccaacctctctcaccctggccgcttctctagccagtgggagggcagaggctggcagaaaagcctccgtctgccttgttgactctgccgggttcagagagggcttcacatttgacttggcgaaggagagaagttctttatttccctcagcctcaggtctgccaagcccaaggctgaggtgagcagttttctcctccgtctctcattgccacatcattacctgcagagttcaatgaaaagccccatccagaatgggccaagccgagcctgcaatgggcttgttctctcctcggggcgtgctccttcttcccctccagctcagcctgccaggccttcccagtgatactgcgagctgggtttttctttcttcccgccccccaagtccagagcccagttatttacccaaagaaaacagggaagtgacaaggtaacagagtacacatgttgtgaaaatatgcaggctggggctgaagaaaagaaaacattcttccataagtagctgccttgttaattcatttttttctccagattagaaccagccatttcttgtgtgccttcaagcaccttctgtggtttcctgacagctgcctgcaaggggtgagatttggcttgaaaaatgggccatcggtcatgcttcgggggaagggcagaaaccaaaattcccagattgctcaaattcactgctccttttctaaatgggaacgaaagagggagaggtggtggggagaggactgtataaactctgaggcgtaacctgattttccgtaagaaacgacagctcggtaatgagcagtccttggaacgtgcttttttacctcctcttgaagttggtttccgatccctggcaagcctgtgctctgcagccttgagtaacggccacaggccgattctcggcaattaaaaataatattggccctgatagagaactcttgggtgctcccccacacatacacacccttttcattatgtgccaaagatcactttcccaaacctgtttcggaacagctggccgcactagagggcctgcatgggctgggggaggctggggttattaatagcatttgctctgcccggtgtttggggcaggaaaggggtgatttgcgtctttttggaaggctaggccctcatcagtttgggcctgatttttctgcgctggatcctttaaacctcagggcctaccaagaatggttgagaaagcctgaagagaggctctctgcggccaatatcccttcggtacaaatcttcgtgcttctcattatttccctcgtcaacagtctccgtctcctttgcagcctgtgggtattggcctgcagcttggctggtctccttttgggagaggtcatgccgcacaggcctagccggcccctgttagcattgctgtggtgctttctgttaacgagaggccactgaagctgggcgatgcctcccagcaggggacgggcttgtgagaaggagctgcttgttgttgcccttccccagagaggaagccgagtgcaggcctgagcgggcagctggggttggagaagcttcacgatcccttacttatggccacagagttcatcagcttcccacgaccagcacccatagccttaaccccggggtgggtggaaactctgctatctcctcacagggctccccaccaccacaagggcaccttcccaagagcccaggagagggctggctttcaggcctggtgtggtgttgataatcaggtcgggttgagctgaaatggaaaaccttgagagtgaggtggatggtgggctccaggctggcatctcccactgaaagagccgggtcgcagagacacactcaacaagtgccagtggcctggctggctgaggggacctcagagcaccagtgtttgggaccggggctgggaaggccctgccatccaccctagtgacatccgtcatgtggccaccaggttcccactgggtgaacacagcctctcccctcactgagccagattccagcctccggccataggtgaaagacaatttccgattattgttttcaaacattctacatccagcgcataaaaacacaatagtgacaggaaaaatacacacacacacatacacacacacacaccccacatgcacacaacacaaaggtttaagcgctcactataagaaggtcaggggacccttttctcattccagtccttgatgtggatccaagggaagcagtgcctttgaagtcagcagcaaccgcagcaggctcagctgtgagggtgtggacagggaggcagacaggatgtgctgccttatcagggcccaatctaaggccctcctgtaaggaccaagcttcctccagcaaaaggtgacttagaggtgtttgttcaataatgcgaggagactcattacaaccctggggcacttgggatctggctctctcagagccaagcctttctgtttggagttttgcacagccctttaagaggagacttcagagtgagactctgtctcaaaaaaaaaagaagttctttcttacattgaggtggaatctgccactccatgactttgattcattgacccagttttgcaataattctcaagagctgggaagaagtatagccagatttcaataccagggagagcaggcagagaaagagagctaatctcctttaccccatccttgctgctgtctctgtctcatggttgattattaatatattgattacattttgaacagactgacacttgctttcaccctaatgtattttcatgaaatacttaacatcttcatgtcaatattatcttataaaacactgctgaaaaggtgcatgttggagaatggtgtctcactccatccagttctcccagtgcaactggggagggtatctggatcttttccctggaggtgtctggccactctcatccccgccgggctccaatgtggccacaagccactcttgctgaaggaagtgtgtctgcttttataccttgggtatgttggggtagaaagctttaggaccattcttctagaataaggtaaacttgctccctcttcttggtgccaagccacctcacttcgctgggccttgtcactcttcaccctctctcctgatttctccaggttaagcagctccaggactcatctttctctgtacctgctgagaaactaactttacatagctttttactagaatgtttgctctgtgaggtcggggagtgtgtctgttttctttactgctctgtcctcagagtctacaagtatttgctgaatgactgctgactggtttcccaggtgtagctgacaaaaccctatcttcagctcttacactctgtgaggaaactctggagaattaataagaaggtgaacctggtctatttcccatagaattgtctgattcatcccctttgttagtaattagaagaacaacgtcaaggccaaatttcaaacagcaagtcagcagcaaatccaggcaaacccctcaaacttgagcactgcttgtcttgtatgccctgttatgccagcttcattcaaatggtgaccttgatccaactgaggaagctcatactcaggaagcactataggatctcattaccactgccagattgaccactgtcttctacagctctgttcatggacagtccagggctcacagcatacacctaccaagctggga

SEQ ID NO: 60746 - DNA, 2203 bp, Homo sapiens
ctcttctccctctgcttattgtgctcagaagggcaacagggtcagcagcagcaaactgaggggccaactcaccacgccttgaaagaggctcgttttgtgtttcagtaatgagcgctctttctccccttggatgcactcaaatttcacaagttacagggaacctgtcaactgctgttttcattgtatggggctcacagggaacttggatatagggcaagcttgtttcaaagaaagcaggggaaagaaaagtcctgaatagctgcaatgtgctgtcatatgcagatcacagccccagttgctatgggacacctctgcccgcagagagggcaagatgccgaacgtcccttattgatgtgattgcctccttggagatgggaatgcccctctaaaagggccaggctaggagccgacagcaccacgggctctcgggtttgccatggaaccgggcctgaagcagcctgcatcccagcagcctctgccttcccactggctgttcagtagggagccccccaacccaggggctgagggaacaggccaagctaaccctggaaaagtgaggagaggcaggtgggaagggtccctttttgcggggcacaagcctttgctcatagaagggctactggagggcatggttgtgaaccaggcctgatgttaaagacaggtttcaccttctttgtttgtcttgccctctgagaacacttggcaataacattcctttcctgacaggctcattttgtagctgacggacattgttttctttcccctgtttacctaatgtggcccagagtaacagaacaggctgtgccagcgagagaggagagtgagcctccccagtggctcctgggtccccatacccaggtccctctgccctgagctccttgtcttgcatctgtttgccccacctgtgggaacagggactacccagagggctgtcctgcctggaatcaagcactggcaggacctgggtcaggggagcctgcgattaggagagggcccagaattatgactctctccccggggtcatttgactgcaaggttagaaggcctgagatcaaacaaggctatgagaaaccagccttgtcactttgcataggatagaccagtgggagccaagattggaggcatctgaaggtcactgtaggaccttaaaaataccaggggagggtactgtgagaaacagattcccatcaactgtttactaaacactctatgctatttaaagggacaaaggcatggccaggtcctatcatcagggagtctaaatctggggtctgcagctgagccaggaggggggtccagtgcccttggcagcctgctgtaaccttctgaccctctgtgtccagcccccatccccatttttacctccagccaagcttccccctatgggggttaacagggtaaatactgtccaggcccttccctcaaagaagctgcaaatctagtaagagaataatatgtgcgtatatgaaactataatttaagacactgtgatcaataacctaaagggaaaggctctgaggacatccaggggtcttgggctcaaaggctggagcgccacacacacacacacacacacacatgcacacacacacacatgcacacacacacacatcaaatcacatattagctcgtgtcttcatgagctttccagtttgcaaaccgctcacacatacagcatttcctttaaacttcacatcagccagtgaaggggctttgtaagcctgacatgtaagatctaacaaccctcccagaatgatagaattggcagaggggggaggcagagactgtcaagcaatggcaagttttctgattggctggaacacagggcaggtgaccccgtgagctaaggtgaaacaaccaggctgaaggccttgcatgctgcagtgctgggtacaaccatgtcagttcaaaccagattcaatttggttggttaatgtgcccatttcccattgctgccatacaaacttagtagcttcaacagtacaaatcaattacctgtataatcctggaggtcagaagtccaaaatggatctcactgagctaaaatcagtgtcgtcagggcagtgttcccttctggaggctgcagaaaagaaagtgttgtcttgttttttccagcttctagaggccgcccacattccttgactcatggccccctttctctgtcttcagagccagcaacatcacagctctccgaccaatcatt

SEQ ID NO: 60747 - DNA, 2973 bp, Homo sapiens
gagtcttggcagcatagaggtggccacctggtgagagcagtggtcccaagggccacagtccctgccatagccaagcaccagagcaaagagggagcaggggaagagacaccctcctgacctccagcctcctgcctgtacctcacatttgccggacacaaaaggaagctagaggcaaaggaagctggtgattcagctcctagcactcagccccaggggtcacagagcagggcaccaaagggaagagaatgaacatgaagggagaaggcaaatggagaaaaataagcacaggggacaccttcctccttttcgtgattaggattgttaccattgcagacctgcctgccacccccaacccagaggaccttgaggctttggggaatgagaagtaaagcccccactagaaggttgaggatgcataaagcttaaaacccttgttctagggaaagtgtctttgcagcctttccatggcacttagtgaggaatgagtcttgtttccagatggagatgctaaagcatccaggcatgccagccctggggaatgcagggaaacagtcttagggatggacccaggccttggtactttagagcttctagggtatgagtcatctttgcctcttaacaatcagatcagtggtacccttctgacctctgtcatttggctgcactggaggcaagaaatggtttggactcacgcaggggcatgatgttagtaaggaaggggtcagaggtgaacctagcttgggtgctccacctcttgactcagagtctgtgctctttgatgaactttctgttaccttgggatcttctacagcaggtcctggtgtgcaagtatttcaagatcaagataaaatatttcattgtgttttatttaggaaaaaaatggtagatgaaagcggaaccaacaggggcattccgtttgtggtttgctgagattccctggaaagcaagcttgggaggccagggtctgtcagaacacaagaccaatgtcttctccaaaacttggatgaacagaaggtgcttacaagctgacagggagttatggggaaggaagcagaatttccagtttggttccaagtcttttctggtcttgacctttagcctaaaaacagagggcccagttgttctccattattactgtaactcaaaaggagacacatgggtccgggagagagttgggaggcaatactaggtttgcacgttctgagttcatggacacccaaggaactgcccctccctaggataactagagccaagccactggacccttctcatcctgtggccttgtctacaattttaatcattttgaagatgaaggttttgaagatgaaggcccagcctcaaaaaggaataaccaagaacaaccctctctccctcctttagtttagatgcttccacagtcaaatgtaaaattattcatgtgcttttactcattattcatctgattttatgtaaaaaaaaaaaaaatggaatcctaggctggtcactgcatggtgttctcaatcacaagccatgagccagggttcaacatgctcccttcacttcagaccttcctcacaactgagcctggatcccactctggacctcatgatccgcctaccacggcctcccagcgcgcccagcccctgctttatttttctatatagcacttattgttaccagatacatttgtgtttatcacctctctcatcacacacacacacacacacagttaaaggcagggacttggtctattttctcaaagttgtgtccccggcacttagaatcctacctgccgtggtgtacatgctcaataagtacttattaagtgaatgaatggagtcagacatgtcctcaagggtaggttcaaatcagggagaatggtgggtgtccttactgctttataggatttcatgctggccccagacttgagtcatttccatcaggcaaattcctgaaatacttactggtcttcctgattctgtggtatgtgcttgtcaacagcacattgtcgaacacgttgctgcctatgcaacactatgtggcaatggctgttgaaactcgttgctaacagaagtgaaagcaaagaaaagcaaagataaagaacgtaatggctgggcgcggtggctcatgcctgtaatatcagcactttgggaggctgaggtgggcagatcacttgaggtcaggagttcgagaccaacctggctaacatggtgaaaccccttttctattggctgggcgtggtggcatgcacctgtaatcccagctactcgggaggctgaggcaagagaatcgcttgaacccgggaggtggaggttgtagtgaacggagattgcaccattgcactccagcttgggcaacaagagggaaactccatctcaaaaaaacaaaaacaaaaaaaggagaaagaaagtaatttccccgccatggatgatatgacatggcagctttcatggaggtttcagaatctgccggcccacctcacacatgacttcctatgcaattagtataaagcaaagagacaacagacaacacttcacacctgagccccaggtcctgaatgtctttggatagcctctctccttgaaggatatattgactcacaggcaaagggcccttataatgatataaaggagaccaagttggaaggaatagatcacaggaaggtgaagcccaaaatccagaagggaatttcagggaaagtggtctggactcaggtaccctgcccagatccatgtgccttccaacacgtggcagacagagaggtgacaagacaaaggaggaaagcatgctcaagggatagctaatgggtgtgtcattcgaccttcccaagacctagctctctggaaatatcaagggttcagggggctgggtcataggcttgctttccttctagctcactgtgtggacctggataagttgcttggccttacccatccacccttagtagcctcttctctggccccttccatggttctgtgcagagtaaagaggtag

SEQ ID NO: 60748 - DNA, 1972 bp, Homo sapiens
agcttgcagtgagtgagatcgcaccactgcattccagcctgggtgacagagtgagactccatctcaaaaaaaaaaagaaaaaaaaaagttaaaagatagagattttaaataaagaaggaaaagtcatgagttttaaaaggttagtcctaaggtcaaggaagcaagttagacagagtcatttactgcagcctcccccaggctgaagcacatttagaaatggaaaccaaaggtatggtggaaggaatccatgagcaggaggagtcaaagagttggtgacagtctactctgaaagacattaggccacaacgaacatataacctctcaggcaaacatccccagatccctgtcctaagaaagggaaaatgaaatggtctcccacctttctgtgaaaacccattaaacgtacttgccttcctgaggaggttattttctgcatagtgcaccttttctgtcttctccttaatcaaagggacacttaagtccccttttgaggcttctaatgtggcaagcctattcagtctccaaggttgatgtttttcctagactttcacttgatccttgccccaaatataatgtacctttcccctacccatgttgtgactcagtaccaaagcctccagggccactaccccggggttagcctctctctctctccctttccttccaggagtctttccaagatctgaggtaagattgatgcttctctgggaatcagacctccttacccttcctcttgcataggcttaaacatgatattgcatctttcttttagagaaaaagtctatattttcttgttatttattatcattaaaggcaatacaggcttacccaagaactaggcaggttattggactggatctacccaggagtccagagattcccaagtgagtcagcagacgcctgagatagtaggggcctaagaatagcaaccttccctacagcctctgcgtgaccccttctgacctgtccccaccatgggtagctgttgtaatctgactcactgtgtccctccagacagctctggtttctgataagaaccttccatgaaagaagagccttgctcacttctgcactagctgctcacattattggttcaaggcttagagagtatagtcctttgacccctaacccttgatcctggccccagtgaactattcctactgggcataggaagaaatgcctatacctgacattttttactgaagggagagcagagacaatctacccaatgatttgctattgttaattaataccccaaatccctaagtaggagtgactgaaaggcttaaggccctttaactcttcctattctcaagtgaatctaaagtttattttccctatatcctttaatcatgtttcaggtcctcacctgtctgtccacagcctgaatacaattggtctgggatgggatttggaaaaagcagacacaatgccttgtagttgatgagtggcagctcgggagtttctgtaaaggagaacctatggatggaatattggctgatacaggagccagggggttttcatcaggctgttttgtatagtaaacactctatttttccacttagattgcatgtttatttacttagaaagactttaggggaagccaatggagactggaggggacggggcaaggccctcccaaaccactccttggcaatccctgcctaagatggcttaacccctcattggattctctcacttctcacttatttttccttcctttatcattcattcaatcctgggaataccacgcttattgtttcattcatccatccacccacctgtccatgcatccatccatccattcatgatggcagctccttctcaatggaaagcaaaagccccttgccagagagaacctctatatttttcatccaggcctgtggggtcatcctctttggcttcaaatgccaagtgatgcccaagggtgctgatggtgtcactgcacttctccacagccacctttcttctc

SEQ ID NO: 60749 - DNA, 6922 bp, Homo sapiens
atttcgttcctaagtgagacttcttccctcatcatcccttttgttttttctaagcaaaagttacttggaccttgcagataatttcatatccagagccctcccatgcctcgtgggagtacataggataggagccggtggttccgaagcgcctgcaggtgccacacatggagctaaggggtcactttgccaggaggatcttatgaaatcctcagacaaccctgagatgaagaactgttactgttcttatttttactgataagatgctaaaggttcagagagtttaagtagcttgcacgaggtcacacagccaataagtggtggagctgggacctggactagtcccagccctagtgcccacactcataccaccttatagcatgggaattccaggtctttcacaaagttggaagactgggatataatgaggagggaaggccatagctcccctacacccatggtcagccaagctctgcccatgtcgtgagatgtgtatcggagctacaactcctccaggcattttacctgagagcagggactctgtctcccttgaacttttctgcatacgctgtgcctcaagccaggcctgattcacaaaataatgtttattggcagaatgaaggaccgcctcccaagctgccctcatcctgcttttctcctccctctctcctaagctctgagtagacactgggctcgccaggctttctatttttatttattttttatgaaacagggtctcactctgttgcccaggctgtagtgcagtggtgcaaacatagctcactgcagcctcgacctcccagacccaagccatcctccctctttggcctcccgagtagctgggcccacagaaggcagggttcctgcacaggcaccaggttctactcaagctgacctatgttcccacttctgaccctagcatgttaaacatccatgtccctagatgggcagatgggggaggtcttgaacatgtgtccttcctacaatgggttctcagctgctcctggtatctctatgaatgggttctgaaggttttctctcatccacacagttttagctcttctttgggtttccagggctgccccgcaagaagcaaatctaagcaggaggttagcaactgcgttcttggccctggtctccttcccctgagtggccacagtgtgggtgaggttcagactcccccatggtgtggctggctcctgggtgggcccaaatagcatgttcatcagttatcaaatgtcaaagatcagaagccaagccatataaacacctcaagatgctgttccagcagttatcccccgtatttatccactggaacagcttgacaaatctgtcagtgctaaggagggtaggaatcaaatcatataggtccctatcttcaaggtgtccaccatcgggctgaggaggcttatatacatggcacagttagtgagcagtgcaaggtttgtgtggtgcagtgtgccaggcacagctcagaaagcagggatggtgttggtgggatgcaggggcaaaaaatcctgataaataaagcctttcaaagtagctgagctatcaggaggtcctctcctatcttccataccccatctagcatttcattcctcttgaactacctactgctacacaacagacactctaaaacttagtgtctcaaaacaatgcatttttatctctcacatctctgttgactgggctcagctcactcaggatgtcttgcagttggaacggctagggctgaaatcatctgaaggttctactgagctggacatccaaggtcaccatcactcactcacatggctggcagtgatgctgaatgttggctgagagctcagctggggctcttgactgcagcaactatttctggcctcactctgtggcttggacttctcacaggatggtggctgatttctagagcaagtgtcccatattgaaggttctaagagatccaggcagatattgcaaagcttcttacaaccaagccttggaagttccagaatgttgctcctagcatattctgttggtcaagcaagtcactataggtagaccagatttaagaggtgagaagcagctcatgaatctgaggagggaaagaactaaaggctgccatcttggagactgtctattacagcttcctttatataaagataacatgcctttgttgaaccgagacagaaaatgaactctcaactgggaaaggaaaaagaatctgtccctgtgtctagaagaaggtacttcttcaagtcccaccccagcctgttttcttacctcataccccaaggtacattctttgactatgtcctaggcccagaattctggagtcagaatgcggaagagagtggaaaaaaccacttacatcatcctaactaaccagcccacatttaagaatgagattgctacgtgactgttgccatgaaattgtttatctgcccttgctgcagtgtggcctttaagggacacaatctggtgccaatgatgtcccagcagcagttgccatggagacctggaggtcaaggttggtaagggagcttcttgccaagatgatgtcacataaaaatccctttgctttcttgtgaccaccaggttattcagctatgaaggaaaaagaaagccataaattcctcagatgtgtgtccacagttggagcagggtgggctactgcagactcctagcatacaagtcacgagacctcctttgagtccttgcactccccctgacttgtctgatgggggagatccatctaacctcactggacatgctccaggagccgcgtttggaaggctgtgaaatcatctggttgggactgcctttctcacccatctgaataattcaagcacaataactcacttctaagcctgccgttggcttcccacagcctctgtctgccagtccccattacctatggggtgcaatcactgtccatataaagcagaactggggtactttgcacatgccacctccccccaactcactcctagtctaccctacttcagaaaccttatctccttccccaacaacacaatgtatttaaatagctactaatttcctcttctttctttcttctgcataaaatttcattaattatacatttcttggttcatgacacaatgtcatctttgtaccatgcacacttcacttgtatttagctattcagttatttttttttaaataaacaccatccagtcagcccacaacccaaaacaaaagccaggcccttgacgacaaccagtatgtcttccaaattccaagtgacagtgaacagaaaaatgaaagagccgttcacccagcataaacaaggcggaagaagcccacgcctatcaaaagtttccatcttctagcatccgaagatggcgcatcttccaaatgtcttggtttttacatgacccaagtgtcccagtctttccagtcattgaaaatttgggttctcaagtggtgtatcattttatcttgagctgtgtgtcctatagaaacatggaagatgactatttcttttttcggctaaacatgcagcagccagcagactagagccagcttctgcctcgggccgccccggggcgcgggatgggaaggggttaacgcagcgccccgcttacctggggtaaaagccggcacagaacccgagcgcacaggtcgccgcgcgcatgcgcactctcctggcccagcacagtgcttgggggccggcggctcccagctcccgggccgccctgctgcacaaaggcctgctttgttctctcggctctgttttaaatatctgacgaatattccccccatccctgctccaaatccccggcctgacggcaggcgcggcacaacggcgcattgtggggccaagcgaggggcgaagggggctgggggtggccggcgcgatggggacgctccggttgcgccaagttgactctgccgtttgggtcacctgggctgagtcgcgggcgtggaggcagagggtagggggtgaggaggtgtttcttgtcttcttcttccaatctcagaagtaaacattggaaagtggggcccccagcagtgtacagcccgtttccaaaccaggcctgtaaggaggagctgaggtttcggctgagcccccagcctcccccgaccgcacagcctcgggcatgaacccgcgaagccagacgcttagttgcttatcaggccatcgctgtacatatttagaaagtacctatcactcagacactttgaaaagcgtggcgttccagcgcaaaccaacccgaacgggttggaagggggcagtcctttcttcccgcaagttcggggctcgagagacggctgcaggaaggccatcacccctggcttcctgcagccacagcttccagccccacacgatgcccaacttcattttagcagtggcccccaggggaaatcacaccattcttggttttgtccctccctcctgaggttgggacattgttcaaacaaaagtaagccttcagctgacagagaagctgccccgcctcttccctgcccttgtcttgctggcattcattgggactaccaggtagctttccttcccagctcaggtgtttacctgctgctgcagaggaggagtttttgcattgtctccagggggtttgcaaaataagaaccccaaaacccacctctctttcccattttcttctttaaaggtagagaaagcactgcatttcacattgggtcttggaaacccaaagctagacacaaaatgtgggcgttagcagctctgaaaagtgtgtgcttggtcttaacgtttattcttaaaaaggaggtgttcataccccagcttgcgaacaaagctttcataccctcagcatcttgaagggaaattgctgcccttccatccagggcaggtgaaggaggaactggcttgggagggttggattcagaagcaaatagctttatcgttttgtgatgcctgtttgaggcctgactgggagcccaggagtcctccttctgtggtagtttgttataaatcccagggtcggacttacattccccagctgcaaaaagcatacatacgtcctaagatatttatttttaatcatactttataattttcacatttcacatattgttacatttcaccaatactctaatacttgagtattaaagctaatccaccatagaccaacagtctaactttgcaaatgaaggaacttgtccagagccattcagaaagacagggcagaggcgagcctggaggccaagcctcctgtccctatgaccaggtttggtcccttctaacatgctagtcatgaactaaaagaccaggtttcctaccacttctcacaaaattcttatcacgtcagggaggattctgactccacagtaagaagctttggaaaaaggtttttggtattcaggtagctttgaggagagggagtctcttctcagtacagcccctaggaatgccgagtttgccaggactgtgctcacaagcttagagacgtaagtcacgttccattgcctgggttgctaagtggcagagaaatcctgggtgtttgtttccaggcactcttgagcctccggaggaatttcttcaagcaacactaactgtcctttcaccactctgttggccagtgaaccccctatctctgtagatgacagcagcccgctctttctcccccactagtccccctgcagcaggtcagcctggagccacatctgggaaggtgtgacctagaacttgacctccttccctgatgagtatgcagaatctccccagctataaaatagcatggccgtccctaccccaccccccatgcacctccggacttggagacattggaaggtttacttcagcacatttgtgatgcgatactagctgcttggagagaaaccttcaccagcagcctcatcctatagcagtgcctgcccatctgggcaggaggtgccagggtttatactcccctgagcttcagagggtgggatcgttccagacaaccttcggccggtaacttctacgggcacatcctttttttcgtatgttctacattgacccataccaccaccaccattccaaccccttgaaccaacccctggtttcaagctctcccaggctggcagatgaaggaacatttcaaagccatcacgtggtaatactgcctgctggccaacaactccatttcaacagcgtcacctttggactgttcagcagtgtttgtgcaagtatttgaatattttctggcattttggccctattattttataataataagtggaaatggaaaaatgaagtgctgattctcatgataagaagggcaggtctcacagagctcatataattgaggcaaagatggaaatcattaggcacgctgaaagtgggattatgtagcctcaatcaaatgctcactggagttaagcctgtcaactatgtgtccaattgttaaaaaaaaatgaatacaattagggagcatatatgaaattctggacgtatatggtcaaagactgtgtctaaaaggcgggtgtagttgggatatactggattccctcaattctaaagctgcattgatttaatagcagttttccaggactgggttgggaagacactgtgagaccagaaatcaggaaaatacagtgataatattgtttcacttcctgggaacagaaccgtccctcataacatgcaagtgtactgcttgcccctggcatggtggaccagagggttttcaggacagtattagggtatgggaggagggagtggcctggagattgatcccttggggagtcactacagctcggaagccggggacaggcctttagttaatgtgctagaatggatggaacttgactcaagagaggccctcatgccacaaggttttgaatctcccatgtgcccggcatatagaaaatttagggagttaaaagcaaagagtataaggtgcaccttttcctctttgggcactcgtccctttaccactgtcccagctctccctgggggcca

SEQ ID NO: 60750 - DNA, 1335 bp, Homo sapiens
gaagctaaacaatgttcactttacaactccaggtgatgataatggtatttatagactcagtgacatgtttgaagctgtgagtcccagaggctaatattttaagctggatatcctgagacccagacgttctgtttttgttctcctccccatccttccctcctgtaacccctggaactttccatgcaatctggacaaaagcatgaaacctctattgtttctcaatccttactagtgctagggaaggatttaagaactgcttcatggaagggtgacttgtgatgagtggaaaacattctgaggccttaaaatgacatttgccattacaccaaaacttccatcagagaatttcaaaattctaggcagagacaagggcctttctgccgtcagagaactccaatggtaaaggagctggggtttggaagagtgaggccttatttatagatgaactcatcttggccagaggttctggagagtctaggtccacctatttaagaactttctttctctcaggtccatttttatattggataatcattcctgaggcaaatctataaacaaagggtgggaacctaaaacttggctagttatatagcccagaataaaatggggaaatcagtgttttccttcaaagcaatctagaaagcactagccaaagaacaaattgcaaacagctacacaagcatcagggaaatcccatcgatcataagagatggaaaataaccatgagatcattgcactcatctcccctggggcctggacatccaggatgcagcttcatggtgtcccttcagagggtgttacaggcattacctttctcttgctttgcactgtgaatcgtgctcctgattagtctgcaatacatccccctgaagacaggcagcaaccacagaacacagtacctcatgcataggaattaagtccagaacattctctactaggtgggttttttgctgtttgtaaacaactctagatgttcatccacagttcactcaactgtgctgactggtttcatgcactagccagaattggtcaaacttaaacatgcacaaaatcctgtagtcactttaggcccaagtccaacatttagaagctatcaacacaggaaaaaagttgtacctgttttcacgctgagaaaagcagatagctaatctgtaccaggaaaacaaacaagaaaaatgatctgaaaataacttggaaggttttgttttcaccaaaggaagcataaatagtgaaacacatacacataagacatgcatgtacacacatatatatacatgcacacacatacacacattgtatgcacacatatacataaacacacatacataaacacac

SEQ ID NO: 60751 - DNA, 4460 bp, Homo sapiens
atttagaagtgattatggcttttccaccatttaaccttgttggtatccagttcagcatatctggtttatttttcacattcctgttctgagggtagtctctggctgctgactgtaaaatctgtgttgctctctctccaggaattagcatctcctcttccacagctgtacttcagctgtacctcaggcccctgattgccaagttgtaggtgttctataacgttctttcttctggaatcccaagcgagtagtccatatgcacttctttccagtagtgtgctggtaaatgtttaacagctgggtttccaattgtgaatctgatgtgaatgttggttaataattacatctacaataataagtaagataaaagtgaaacaacaaagacgcattttggaacttcactggttttttttccatatgagccacttttttgctgaatcaggtaatcgttttcaaaaactagaaaaatattacctcaatatattatgtgattcacaatgtcactgctacagacacggcacacttttacgtctaatcttactgtattaacattttctctagcacttccataagtctagataatcaacacaacaataaatcaagccctgagtatagagtgtgccaatttctgtggtgtaaatattctcaccacggccaatttcaagctaccaatgtgatgttactgactgtggaattgggaagagagtcagtagtatactacgctacagtcttcccaccatatgtgtaataaacataactcaagcacatagatgatagtaaactgtagtttaaaaaaattaggatctgatctgttgttagtatttattacctttttaaaatataattaattatatgtttatatcatttaatttttaacaatggctgtgttccacagccagcttgcaaaattcctgaaaatttaccaatcagctttcacaagccaatgcaagcttcagcacaccaccgtcccgttcctcttcccgttagcccagatgggtcccatgctatctgatggccacaccctttgttaaatagctccagttagtcctgatccacgcaaatcaagagaacattagtcaatgcccagtttctccaaataaacaacgtcaacagcttcagtccagtggagtgacttaatgatctgtttccttcaataaactgtgatttctgaactcaattcagatacctgagcgtcgcagtaagctgagagtgaggcccagaggcgttcataatgtaatatactaagtttaaacttggcaagcagatgacattgtgagaaatggctttttttaggccgattttgggagtttggggtgtttttttaagagttaagccaaggcaaaaaaataacccttgcaacacatcacttcacagctggtcagcccaggagaggctattctgggatattcaagctaaagaacctctttttaaactccaggcaaactggaatcaggatgcagggtttttatttttgtctgtcatggatttactctgtccagtaatcctgtacagtaatctctgtccagtttgttccctgggtgggcctcagtttaccttctggagaagtcaagtcagctgcctttacctagggcattattcgatttttgaattgtggagactgaaaaaagatagttgctagggtttatcagagggtttggagtgtctactcgaggtgttccaaatcagcggagagtcagagaggggtgaagttgaagtaggatcttataagaaatgacaaatgaacaagatgtaagagagaggaggaggaagaggaataggaaggtgaaggaggaacaagggcctccaagcaacgtaccatgaaaacatcgggcaagtggctaaactgtgcgtccagtgttcactttgctaagacggagagtgagggcataagatgatttagttacagaagaaaaggcaggcaagatggagcaggcaggtgccttttgtctgggtttgacaagagagtttcctgggtagggaaggaatgtgatcaaagttatgattctaagacctgcctggaagatgaccagggagtgggcaaacttggaagcaaaaccagcctcccaaacacctgtgtaatatcgtgtcctgggccactgtataaataacctccctcctgttcatcagtaggctttgtagttctcagcctctctcctctgttgaaagtgtgagccagccctttgcatgaagaagcattagaagggatcactgcatacttctttaattgtcaagaatgcatacatgccatgcatatgaaagatatagtggactttggggactggggagtggagcaggttgggagtggggtgagggataaaagattacaccttgggcaccgtgtacactgcttgggtgatgggagcatcaaaatcgcagaaatcaccactgaagaacttatccatgtaaccaaaaaccactcgtacccccaaaaatattaacattaaaaaaaagaattcccaccgtgccttaaacttatgtcatctcactttttttttgtcagcagcctagagggaaggggacacaatcccaattttaacaccaaagcaactgagacctacagatattaaattacttgctccagattacaactgagactcaaacccatcgcctggccacaagtctggtgccctatctacaccaatctgtctccggtaaacctaactagctagtcaacttttcccatccataggccagacaccttttgaaataacaaaccatctgatctctagaaaaactgaaaggccagttccagttgtcagacacaccaagctcgagagagtctctcccaaaagttctctggaaagcccagggattccgaattccaaagccagccaaatttgaatttcctctataaagagatagtccctcctggtttagaacataaccttcctcattaggctggttccatgttttgtaataacttttgcttacaccacaaaattgtcatagattacgaaaacacaaaggccttggaaaaaaggcccagagccccctggaagtcattatttcttcctttagcaattgctgagttaagcaccataaatatggttcccatcctgctccccttcccccgccctccccgccccccacgatcagctggacatatgttaggaagaaagcagggacgtgggggtggaagaagattcgcatgtcgtgaatcttgagcactgaaaagaaaaagtggggagagggcggggagtttgcagccctggaaatggaatctctgaaggatttattgcctttgagtatctcacaaggcttttttttttttaataaaaatctgtagcttatggcttttttttttttttttttttgtatagggcagtaaacaagagctctgaaaggggaaggaagccaggagaaagccagctccattagtcacgcagcagcatatcctgtcacaaaggaccccagttgagtaatcgcccaaaatatgcctgttatttttttctgtcagaaaaaaaatggggcctgccaaaacgtactgtaaaaaaaaaaaaaatctggtgtcttaggcccagagagggaaaagaaaataaagaagaaagagtcataatttcacagtgctcttcaaaccctctccccagcttacctggaaaagaaaaagccttcagactcttcaccacgacagagcctgccaggcttgaagaaagctacagccttgggatggtccagttctcagagtcttcatagttacttggtgccaagagcttaaaaagaggaggggtggtcggggaaagttgaaggaggacagcacggggggagagaaaaaatgaacagaaagggacccaggatattgaacaagtcctttgacgagctttaaatgggtgaggcattgctcatagggaacccgcaggagcccacaccagttccatgagtattgcatgagcccagcaggggctagtgacttccagccaatggccgagcctgcttcgtaagcttttctgatggccccagcaaaaccagcactgtctcaggcctccaccatgccctgtgggtgtttgggccacagactggacaacaaggacttgtgcagaaggacatcggactctggagaggtctgaaacaaggggtggggagagacaggctggtcagagctgcctgcaacctcccgtattctcctggattggccttccaaaacccgggctgacaggctcttggtaggaaaacaggcccagcaaacaaaggtgttctcaagcccagttcagtcactgcctctgtcccatgctcttagtctcatggctctcaggagcaggacacaagagacggttatgcccaagcacagaacactcttggaaagccatcctttcccttctgctgacattctgaccccctcaagggttgtccatggggaacaggctttctgcacccaattgaccaaaaaataacagaagccttctccttaagaaagagagcaggccagacacagtggctcacgcctataatcccagtgctttgggagg

SEQ ID NO: 60752 - DNA, 1213 bp, Homo sapiens
cacacacatgtatagacacacatacaaccttcccaagcacacgcacatccttgagggccttcctatcaatacccccacttgtattcagctatctatcaggggcaaaaaaaataaaccaggtctctccctggaggcgcaatgattttatggtagaggtgcttttgagcggccagcaaaacaagacaaaggtcttatttggtttatcaagcctaggttaacccattgttcagtgggccaggcagtgttaatcagtacccaagcctttgaataaaatctttgccaaatagatctgtgcagatattcttgctacataatgataaaagcaatacttctggtagggaggcaaaaccactaagattttaggcaataatttttccttgcttacaaaacagggagtaatgcctaccccaaagatgtaaacagtttttaattctttgaaggagaatctgtcacttatgctaaaaccaattgccaaaataatgctaaatggagctttctggaaagaaggtattgtaagtaaaagtcccagaagaaacccttctctccaatttcttcttacgttcctgtgcaaacccacgaaggagggaattgcatgattttaagaccaaagtcctctgtttttaaaaatcatatatcaaaacttgagaatgcaaaagagttctaattacaacacccaggggaatggttatgaaataccaataatggttgataaatgctcaacctattcaatgaaacacatacacaaacctttgaccagaagcacggacttagaaggtcaccatcagcatgatgaaagccttggaacacgcctctgacaagcaagaagggcattagagacccaggtgtttcccctttgattaatgcactctctgagaagcccagattgagagggagctatacatgatcaacctttgttttggaaacggctttccttgatcttcttgggttattgtgcagcccattctacaagcctcctcccatcctccctcctggttgtcaaaacaagtctgtgggagaggcattctcaggaatgtatgatgctctgtttaatatggaaaaatgatccttccaaggcaggggaagaaataaagaagcagatttcctcctcagccttcacaatacaaaccctcaaggacactgagagaagggtggtttaacaggtgcatgaggaagatttgaaagttgtggctccttcagaaatttgcttcccagt

SEQ ID NO: 60753 - DNA, 873 bp, Homo sapiens
tgttgtggctgagcacactattagatggctaaaacatatcaggaaagaaatcctcaattgttcatttgtgccagggttgaatgagctatatttaacctgatgattatttaattaaatagttcccttggagtctctctgcagtccttataatttgttatacagaatacaatagtaattcatttgcacttgtataatatttactctttgcttcccagggctactttttttttttttttcagtttcgacaggcctagaacccctaataaaagagagttgaacaaacagtttgagaacagaggagtgagtacaaacacagagtacttgaatcacaagatagtccagctggaaggagccttgaagataactgaattcaactctgtctttttacaaatgaagcaactgagacccaaaaaggtcgggtgactcaccccaggacaaacagccggagaggggccacatgtccaattcctaatactcattccactactcattaacctcaggacaccacggctccctcaaacacccacagccagcttttgaagggctaatcccttagaatcgtgggctcttagaagctatgacacctgtaccaatagaaaaatcatccattcagtaggtaagtgcctgctgagtgccaggcatcagcgttgacatgaaatagaacggtgaacaggaggctgggcgcggtggctcatgcctgtaatcccagcactttgggaggctgagacagatggatcactcgaggtcaggagttcgagaccagcctggccaacatggtcaaaccctgtctctactaacaatacaaaacttagccaggcatggtggcaggcgcctgtagtcccagctactcaggagactgaggcagaaaaatca

SEQ ID NO: 60754 - DNA, 14633 bp, Homo sapiens
ggtcagcccagcaagaactcactcccagctccttggggtggctggatctactggctgagctgaacatcttcctgtggagctccaaggaccacttcccaaaaaagtagaatggaacagagggtggaagtggtgctgcgacagccatgtaaggcttccatgcacccttgagtttgagggccagtaaagaggggctgggccaggcagcccttccccaaggcccctctaagcccttatcagcccaggggagggataggccaggacaggcaggcaagcagcccacaggggtggctcccaggacagtggcttctggatgctggcccaccagacagtcaaggctctccactctccggccgctcagagcccagctagcccccaactcggcctccctttacctcccacagggcgtaggaggtactgactagcaaggaggcttattttaaatctgcaaaaagaaaaacttttctaatgcagatgattacacttactaattagtcaacttcgttgtgcctgggttactgcaaatttagctttcctgcagaaacagcacctgttcactgagggacagtattaggtagtaggaaactgtgcaagcttgagagccattggggtgggattcaagccccacatcccctgggcaagtcactcacctgctctgagaccattccctccttctataaaaggggactagaacagtacctgcatcatccagttgttgctattacaaagaccagccacaatttattaagtgcctataatgggccaggtactgaatttctttttcttttccttacatgtattaacactcacgacaactgtataggtttgtctttttgaagtataacttacagtgaagtgctcaaatcttcagtgcacaggtcaatgaacttttacatgtattctctatcctctaatcaaatatcaattatcatagatcactgttgcctgtttatgaacttcatacaaatgggctcatgcaatatgtgctctgttgtggctggtttctttcattcaactttgttttagcaattcttccacattgttgtgtaccagttatttgttcttttatatagctgcatagtattccatgatgtgacaatcccacagtttgtttgtttatccattgacctaggtgtcattatcatcatcattatcaccatcatcctattttacaaatgaggaaactgggatctgaacttcttactaagtgtttagcttgaagtcacagagtgaccttgaggccaaacagggacttgaacccaggtccctgtaactccaaaaccagctccttaccacggacaatagagcctcccatagctctggaatactgggattggcggaaatgaatgctgacctgtgtggtcatgagctccttctccctgaggtacatttggagtcagggggaagctacctgcctggctccaggtgctgaaaaaattgccttagttttggcgattgcccatatttattttcattgcaacccaagctgatagcacaggtacagtcatcactcacagccctgtactttgagacctgggctttgccaacatttcagaacaactgcaaacagcttcaatgtggaggaggcatccttgtccactgaccagcagctggctcttatgggcagcccctgccctggctcctcagagtctggttttctatgatggtaactcagctgtaaccatctgggactcccacagaaagcattgtaggccaggtttctcaacaccagccttacctatcaagaggtgagacccccagtgctgaccttattcaagaaaaggctgagattttgccttgctttccaaccttcagaatctctgccttctgcccagcaggcaagtggcaggccttagaagggccacctgcaaggcagcaagggggtgaccaggggcctggctaacctccccacctcctccccctctgaactcaggtagcctccagtcagtccacccagacatgattaaatggttggctacacacaggggtggaagaccccgggggaagaagggcatggagccaactccctgaggcagccctagggcaccctttggtctgttgatcattaacagaagccacctcatggcaggcagagaaggggaaagtccaaggggatggcctaccccctcctcccagactccgtcctccaaatgtgccaatgcagggcctcatgggaggtgaggtcatggcactcaacggagggggtgtgtgcagaatcatctaatccaactcgttgcctcctgtgttcatgcagaatctccacaaaaggccaagggagagggcaactaacactgattgatttgcagttactgtgtgccagggactgctccagtgtcccagcctacaacactctagcatagtgatggaggtcgcctgcctgggttcaaatcctgacaccgactccctgtatgacaaattagtgaatttctctgcaccccaatttctccatctatacaaaaggaacagtatagagcttcctccgtggggtcattatgatcattcaatgagttaacacacaggaaattcttagaggactacctggcacttacaaagagctgtcatgactaatggctcgcttgatctcatagtaactccttgagatacagctgaaaaatccaaggttgagtcatttatccaaagcacaagctggtagaaggggagctgggatttgaaccctggtccaagggctccattcaacaccccttcttccttcacgccctggatccttcccctgccatgacccctgcctcttcggtaaccagtgcttcgtgatccagttgactgtaaaacccatcttcagactaacccacaatctcagttggccctcaaagccctcctttcatgagtgtcactgaaccatagccttcctcctgagaatgaggcctccaggccaggaaaggcattgctcggtggccaaaatagctcatttctttgagctgctccaagagaagatcttcatccaacagccagagagtgggttgcagggccagtagccacagaggccccacccatccatggcagacctggtgcaggcccctaaacccagccttcaagacaccctggcctccagggtaaggggtggagaagaaggctttgtgccccaggattggcctggcctttcctgacccacttccctcgtgaaagccttcccttcaactccctcagcatagttcctatccttcctagctgcagaggagctcagagataggggtttcttgccagttctgggctcacacttccctggcctccctgccagactacagcacagggctgctgctgaggccccttcttctaacatcctggagaaataatgggcctgaaatattctgctgttccctttcccaagggccatctcctctaactttaaggactcaatgggacacaaccaggctcttgtggccaccacacatgggcctgggttacctaaatcccagcctgagtgagttccccagggagacacttaggtagaggtaaagggttaagacccggggacatggagcttccccacatgataaggagtctcccctgggctttacagccaacccccaccctccagggcctccagtagtcaatgtctctatcttggttagacaaagtcaaaggactgactcagtcaaaggactgtctcctctagaggaaattcagggctggccaggaggtacgcctgggcctctaggaacctaaccagcgtcaccatgagaggggaagttagaaaggtgtctgccacatgctcaggtatgcctgcagggaatgagctcaaggtgaatgattaaatgtcttttttgcttttactccgaaaggaagatcacatgccaccaccaaccaccaccaccaccacctccacacacacacaaagttcatttcctccttaagggacaagaggcctaggtttactccagtcctaagaagggctgcttttccccttcctaaaccaccagcccctgccctggaacaggtaatagtccctatttttctacctcaccccctgacccccagtagatatctgatgaccagggaaatgagttgagagtagaggtaggtcttcgagtctcagggacatccctggcctgcccaatgtctgctgcagaccttcggaagaggcctggtggaatcatggtgactcagctgaactcccaaaacttcctgggtgtaaaggaaccaaaggcaagtgagctgcaaatagcaatctctgcctctccccaaataaatcctcccaaggctcacactcaagatttgtgaaagttccaactcctccggcgggtgaaatgccacctcttaagtggtcatctagccttggtgggggtgcatctagccaaggagaccccacctttcccaagatgacgacatacctaattttgcatagcacctgagattgtaactaaggtggtgggaacccttggtgacttgctgtgttgtgttggccagtgttaacactcacttccccttaacagccctccaaacccaaaaggctatgtcaaatccagtcccagttcccagttccttgtgactgagcccctcaccccgctggacattcctctccaagcaggcagtgcttccttataccctccccacacgggtaggtgttgagaggccagtactgaggtaaatttctttcttatgggcaaaatgagcccaaggcaccccaataaaagaactcactcaaatccaagcctgcaagtgtgccaagtgctaggtcctcttttatcattttggcaccccaaacaccatccaaaggaatgaagagcacaggctggacggggcggactggaaggccctgagccttggctccccagaagaaccgcagaggccacacaagtgtcggcaaggctgggcccgctgctattcagccaacaactaacacactgcacagtcttttcagaagtaatacagcaggaagtacaggctcctttgcagaaaacctccaccccgtcccctctaagcgcagcaaactgccagcatcaaggaagggagctataggcttagcttatagggatgagagatgccgccacccacagccacagccctctctctccgcctccccctacccaggacttgcaaggtatacaaggggagaaccttactggcaaagtcaaaccaaaaccaagtaaaaccagctccaccatcaatgtttcttgaaaaaacggggtttattgatttttaaactgcaaatagtcgttacaaaaagtttttttttcttttaaataaattcacacaaagaaagagaaatagaaagcgacggtagtgaccagcaagaggaataataattacattcatcttaatgtgtgtgtgccagttctgtttacattaacattggaaaactccagacctggaatccagaacctcaaatctgtgagtggaatgtcttgagatgggcacgtggaagtcaaagggtttctctttttttttttttccccttttagaagctatacataaaaagttgttttccttctgtactgtcacagaacttttacatacattctcagtcctagttgtgaaaggcctaaagagaaagaaactcaatttgcagtccaacacaaaggggggaatttctaaaataaataatccaacagttttttgcatttttttaaattaatttttcatttttttaaaataaaataaccaaaaaagtgtaaagttacaaaaaatgtcgttgaagaataatatattaaaactgtggaaaaaaaggaaaaagacacgtcacaaaattttaagattaatatgaagatcataatttaacataaaagaatatattctatggatttgtcatcccgataaatatgaacaaaattaacaaaaaaaagcatagtttggcaataaatacgttttgataagttaaataagcttttttatattgatgtgcagtgacaagcaaaatttttgctctccaatttctgaaagttatatgaagtttaaaacccagggaagaaagcatggcgtgagtgctctaaggatagacctacggtattctagagcaaaaaccattaaagctacttctacaggaaatcgttttacacagatattgtatgtggaatgaataccattaactgctcaccccttacttttttttttttagcttttctctcattttttttttgttgttattttttttaaaaagatgtcacatatgaactggggaactttagcaccaaaatcaagtctctcctagtccatctagcttccccttcctccccacttaaaaaaaagaaaaaattaaatcacaaagtcccacttaagtcaaaatcttcgtccgctttttcagccttccttcctgcagacctacacaaacccaggcaagattagtcaacaggggttcagatcgggaagaaaaaggttttgaatgtcaagacaggtttcccccaaaaccctggtctggcaacaactcttccaaggggcaggggtggggggggtgggggggcgggtacaggtggagaggtgccaccgggaagaggggaggaggaataagtgtgcgggagactgaaatgagggaaggtgcagttgtgtcgccagtggagggggctgctggttccgggtctccaccccgccatgggcagaggctccgggaggcccacgggtgccctctggcgctgaagaggtaatgtagtcacagtgacaaagttagattacaaggcactaagttgcttctgtaaactgttactgctttttctcttgtgatttggcacttaaggcttaagccggaaaaaaaaaggcatctactgacaaaatatgggacttgtctgttatgcatggtaagtgggctataaaatccagggagggggtttcaagccagaagaagctactgacaaattgacttgtccttatgttaggtggggttatgagggggagagggagggcacattctgaggtgctgggggaaaggggttgagcttaaccttgttaatgtagggcctgtggggaatgggatgggtagggagaagagggtatgggatgtgggtgcagggtaggggctggagtaggcaggaggtccctccctaccctggcttagtcatctgagatggaaagtctgctgaagatgggcaggcgtcttgagttgtccaaggtcggggagtctgagccactgtggctgctgctggagctgctcaggtagccctcctggtccgagagagaatcctgagggctggggggagagtcaaacatgtgaggggactcggacatgggccggaagaggaaggtggtcggggagccacccccgggcagccccatgctaggggcaaagaggcttgccagctcctggctggagaaggcaaaagggttattggtgccatcgggcagggtaggtgagcccaggaggtcatcggcgctcagaatagggggtggggtgatggacgtggggctgtccagcagcccggtggcagcggcggtggcagcggcactgggaaacccagcaaagctaaagctatgctggaggcggggacggtcagcggagaggtcccgggccccggccagggcacggcgctcttcagcgttgtggatgaagtggcagcggggcccgtaggggcaaaagccgatggtgtggaaggtgcggcacagctccgtcttgtacttggggtggcgggtcaggctgcggagctcgtggatgccgtgtgcgaactggcacttgtccccgtacttacaggcaccgttttcctcaaaggggcggcacagctccgtcttgtagcggctggagttgacctggccgcccccgggctgcttctgggtgggcagcagccgctcgcccccttccgagaaggagcggtctcggaagcggctgtctcgcgagctcagagcgggggctggctcacccttgaggctgctgaggagctggttctggtggaacttggagctgggcagggtgactgagtgcctccgagggaagcccccaccagcaggggtgcccactgcctttctgtccagcaggcaaccccctgcactgggagcactatagttgagcatcttgttaccctggagagagaagagaaaggatggtaaggacagaggacatccaccaggatgtccactatgggcagccccctacacaatcacaaacgcccgctctttctcaaagaactcatctctacctcggctctagcaagctcccttccctctctccctcccataggccattcacctgggtttattttggccccatgcgtaagaaaccacaagatccaaactgtgtgacaagcaccctgctccatgctgactcctgcaatgcaacccccatgtcctctgtccccaaagctaccactttaaagttcaacttttttactagtcaaatagattcttcaactcaaaatatctcacacaacccagacctctctagattaccgcaccccgcccccgccaccgcccgcgacaaaaacaggtaaacctcagaaaggagtctatcataggctacgttaggtccccttccaatcagtctctgcttaattgataccccctccttcaagacctggcctaagactctcaacttcctccttcagaagtgttcccttcctttggcaacaggttttcagactgcctttgctttttcttgtggggaggagattgggggcctggtctgaggttgggggagacagggatgtgattcctgaaaataaaactctttgccctaagttcccggaagagatattttctacaataatctctctcaccatttccactcagccctagcccaccccgcccccttcactgagaagatgcctttgcaattagtcttttggctgcaagagcaagcttggataagagctccagtgtttaatctttaacgcaaagctgcagatggaaaggaaaaggaaagcaccaacccccctacccacctcctagtcaatagcggattgggggtggtggggatgggggcagagccaccaatggcaggtttctgttccaataggaccctggtcacctgcccaaattgtacccaagatttggaaatggtgcaggtcagggacctaggagttagttcccagcccatgtgggtgtcattgtgcaaattctaatgttggtcccttaggatcagcagggggggaccgggaatctgtaactgcaaccaccccaccgagaggattacaggaacccagtcgagagctggttcccaacaatgaggttcatttaaaaagtcgtgaggggggaggggggccaaagaaagaaatagatcaaagagcgggagagtcgagaaaagaaggaagaaatgttggggagcgctggcagccgggctggcaagtggagtttgggaatgtgcagggagggaaggaagctgaaaaattcaaactttttaaatgctactcttcagctcctcggcgtccctgcaccccaaccctgcagccctggggcgttggcagctgcaccaacaggagcagcaagctgggaaaacagagcaacatgacccgacgtgttaagagaaggcaaaacacttcagcaattaaaaagtagcccagcagcttcaccctttcaaattgggagggggaggttggaaagaaatttaacaacatccatagacttttgctatgtacatttaaaccgcagtcctggaacattccgagtttaaaacttgctttttcaacactggctgacaagcaacatgttttaaggagccccccattaaatccttactcgcgggactctcgagttcaagccagcattttgtcgccacctccccccccaaccccgcccgcaatcgatgagccgcaatgcctcggcaacacaggtaagcgggtcaacctgaatgcctctttcaccccaaagtttgctgcacgatcggctatcgcgggaagaagcccaacggagctagggcggactcaagccccactgcaaacttgttctgcaacatctttttgaatcacaacttggcctttcttcctcgcatatccccagctccccccaaagagtggaggaaaacattgtcccgagactcacttccccgagggacctcccactcccaaccccacgggtgggtaatgccgctggacagacctagggcgcagactgggaacccgatcagaccagcaaacctgggatccagcagcacgttacgtaaaacaggatcgcccaaaacttgtcccaatcccagccctccccccgaagcccccgggctgccctgccaggcaaacttcgcccctcaaaaccctggcctccagattcacatgtaatccccgccagcaactgttgaaactcaaagggtgggaaggacggggccaaattccttcaaacttgggagaaatgccggaggagaaaagaatcatctcgctgcaccactttccccattgccttccaagacccaaacttttgggggttctttcttaaggcaaaagaaaaagactttttgaaaagcaaatgctccgcccccctttaccttgcataaaacttcgctcaagtcgaagatggtggcagacacgagggtggtggtcatcctgtgcgttcgcgcgagccaggggcgaggatctggtgtgtcgcgaaggtcccggtgcggggaaggcgcagcctctcctgtctggagtcccacacgccagttcccggcgcccctcgcctttctgactccgggctggggcgcgcaaagcccaatttataaagttcagatttggtgggccggggggaggaggagctttaaacttatttaaatgaggaagaggaggaaaaagaagttgattgacactggagttgaatcagccatgcggtcaggcggggagggggggcagggggaggagaagaaactttcaaaaggaagaagggggaggggagacgagaaaagaaggcggaaaaaaaaaaccccactgtgagccgcgcacaacttttttttttttttctttaagaggaaaagtttcaagtcggctgacttccctacccggcgcttcaggcgccccctctccggggccgcgcgggcgcagagcgggaggggcgcgccccctcctttgtcagcctcagagcgcggctgtgacgtcactcattccactccctccggggttcttgttgtcatgttgttgttttttgttgggcaggaaggcgggctcgactttctctttttgccagcgggagctgaagcccgtccttagcgcccgggccgcggtttccatcttgagctggcggtctccttgaaacttccccaagtgtctgcacaacttaccttttcccgacttctcttcgacactcggctcccttcggcaaaccgggcaggccgaggacattagaaatttgggacgcacagaatgttcaagcctaggattttatgttgctgttttttttccagcggggcgtagggtggggcgcgctgctggggggactagggaaactttttccccaggaggacatggtctggcgggggcgagcgcggcacaatttagtgcgccgcacgcgtcgacactcgcgctcgctttgcagccggcgctctccgggtgtgggcgggtggggggcgccgcaaaaaaagaccacaacccgggacgattgtttgttttaccaggcctaggcgtgccgtttcttttcacgcatccaatctttaaactttttagtcaagaaaaccctaatccttcctgaatgccccttcctcccagaaaaagcccaccgagcaactcactactttccacgcgcgctccgaattctgggcggcgccacaaccctccctcctcctccatcctccccacacacacctcaagactctagaacaatgaaaaaaggttactttggtaagaatgaaggtaaagaggtggagggaggcggcacttttaacttattgttgcttctctctcgcccccaccggagtggaacatatggcttgtcacgctgcgccgttttggcgggaggtggagagggggacatgggagccacgaaaccgaagggcccgcaatggagcatgactcccttgaaaatgataaaatatatactgttaggtttggatgccgcccacccaaataaaaagttaacgagtcccccacccgccccctgcgccttggcccgactgctggcgtgatgacccaggcggaagtcgcagggctgcgcttctttccgatttccacgcgggctccgccgcccccctcggccctcgcacgtttcttcccagcactcgaggccgccgagtctgttatgaaacccggtgctgcggagtggctaagattgagttccattgcgatgtaattaggtcaccccattatgagcacgtttctttggaaaggacggggcgggccgaagagagcgcattctcaccacccccaacacacacttttttttaaaactgcatttcttatttattcgtaaacatctgggcaaacccagcgaaaccttccaaatcacaattgtttgagaaaccggctgtttttcaactttgtgaaacccaacttttgctgcagccacgaacctacgtgatcccagcggggtcggctttcatttgtctcctctgcccgaaatggatggcccccactttaactcggctgctgcccctcgcttgttctgctgctgccctccagccgtctgttgcttccctcccccgctcccatttttcagcttttcttgaaatctggcaagcgccagaaagggaaataacttccatccaccttaatttaaatcattcaagtgtaggtttctttcttagagggatgtttgctcgttcctttcccaagtgggtgttggggcggtgggggagagatttcgtgcagtttcttggtgatgaggtaatgagttccagatttcaggacagagcagagtgcgcgttgaaaccacaaggttagtctgagttctgatgtgaagctatttcggttttttattcccccggcctccacccattcccgctcccccaccccccaccccccccaaaaaagaggccggctggtctttaactcccgagggttcgcgaagctcagctggggggaccggaggaggggctggaaaaaagcaaaggggaaggggactgggagcgggcggggcccccttcccggcccagggcctgtccccgcggggcaccggctatgcccctgcttcgggcggcgccgctttccctccaaggctgcgggaccggccaggagcaccatcaggcgccccagaatggctacaaagtggatttttccaaagaaagctgattcctcgaatttcctcggcttttccaactcccggaggccctcccctccccctctccccgggggcgcgggctccgcaaggctgcgactggcctagcccgctcgctcccgagttgtttaccggccccgccgaccaagggtttgttccagctcccagagcctgtctctataattaaactcttttttaaattgtcgggttgaaacgtcatttcggggactttccaagggtgagggagccgagaggagggagcgagtcccttaacccttcgctgacccggcgtccccgccgcggtgagggcccgagggcgggagccgacccgccctcgcccagacgtggtcgacaggtgcccaggggtggcgggagggcggccctacggtgcaggaaggccgaggcgaggcgtgcgtggccgtcccccgccaacttcgcggtgcattccgccctcccgctccttacccgcgcagtccccaggctggccgccgcctcacctgcactgccgcttccgaccgggaggcggtgggccggctcctctgtcccaggcccgacttccgggccctccccattcgcctggagcgcgtcccttcgtggggaggggcggcccaggtattttagcttggaggtggtggtggggtgggatgttcggttttgtgcaagggggaaagtgaaagtcttcggagtgaaggaggcgctgcgggtgtacgtattcatcggccaatctggaccccaggcgcacctcaaggcagatgacagtgtgcagcactgggccgcaggaccccagaaggttaggcctagtcacaggcgtcagcagggtaccccctcctgagagccctgcagtgttgcacttcctctcaggcttcaggtcatttgcaaaatcccccaaattcttcaggttgaaagagagagagacacctggagtccccttgtttaaagtttggaatgctgattccctggcccagatggggccggggaatctgcatttttggtaaatttccatctcacgacccaaatactaatgtttgagaatcagtgagccagtatattgaagttaggcaatcctggatccaaatcttggccattttctagctatgtgacttttcaagtcactgaccaaggcctcaatttcttcatctctgaaataggaatcatgataactgcctacatttggcccataaagtgcctagagtcatgtctcgctgcaaccgtctatatgtcatgctgttgtatgtaaactaagccatttggcaacccttattacaccacaaaacaaattccggggctattcacttggcaaaggattattcagtgtagacttccattaaatggtcaactgacaacttataagtttgatctgtgtcactctctagcctccacccccagccctggataagacaggccctgaggcctggaaatggggagaggccctgggcttggagcctgggggagagtaaagtggttcagggtagggtgatggggatctgttgcccatctgaaaaatacctgattattgacacaagtatttttgaaaacaactacatcactggggccctgtggtagtctgtacaagccagactatcttatctctc

SEQ ID NO: 60755 - DNA, 620 bp, Homo sapiens
ccaaggtactattttgtcctagcatcagtgagtttgctttggaattatcctccactactccctagcaaggccctggtatggccaactccaccctgagagctgttcttttgagaaacaggaacctccccagccagagcagagatcagacagctcttggagggttgccatgtggacagccggcgggggagtgagagaggacgggtctttgccacagccctgtgacttctttagtgctgagtttctcccaccaactgcaccctccaccccggggtactgtgggcccccaaaccagggcctgctcttgtctgaccaaaggcaaccagatctgctgcagctgctgggtgaggaaacaagctctcccagagaccagggaagcagctggagaaagattcctgccagccccgggggtgtaaatatttatacaacgtggtgctggtgcgtgggaagagggaaggcagagcgaggtggcaggaatgaggaggcactgacacggacagatttaaggaggctgcacttggggcccagctaggagtgaggcggcccaggcaggaaggagcaggaggctgctgggatcctaatccccacttgaattcctatgtcaaagaggctgggtctttgcc

SEQ ID NO: 60756 - DNA, 4129 bp, Homo sapiens
cagaatgcctgggttcaaatcctagctctgctatgtattagctctgtaacattgggcaaagtacttaacccctgtttcctcctctgtaaaatgaggataactatggccctatagggcagagtcgttgcctagaacagtagagaactcaaaattaatttagcaaggggccctcctctgcccagtgggatgtgctactattgaccccatggggttctggaagaaatcaacatgctactacaatggaaggcatttgaaggaagtggaaagttttcacagaaagtagcccagagacatgcacagagtgctgctctctgtgcagaccagaaaccccaaagatttgtgcctctttctgtcagaatgcagctttctggagcccaccgggctatagaagctgcatggcgtctggaatgggaatgggttggcctagtcttcccctggaggtatggagaggaaaggtgacactttcaggctttgtgcaggacaagcagagaatatcactcaaatccaagctggctgccctgtgggggacacaggcccatgccggcaggcctggggagagccaccgcttgctgaggttaggccagcaccagtgggtgtgaggaacccacctccagtctcaagagcagggttgggcttccctggatggggaggaaagggttaagccggcttgggctctggagggaaagcactcggcagctataaacagagagcctagggagggagggggctgacaggatgtggccagggctcgagctgtctgattattaacttcacttttatttggagggggatttgattctctgttttacttcccatcaaggaagtgaaagcccaggtctcagaggggcctggtttcaaattgttttgtcacagctcatttatttttccttttaaataaataaacaaaaccacctctttgttttccccttaatgagcattcagcaaatcatctgtgggtgaggcatgaacggggttttctggagtccttcatgggagaacatttggcttattattttaaaaggaaaaagcaaggatgtctcctttagctcccagtcttctccaaggctgtgaaggcactttctcttttgcctcctctgaaataccgacctagaccagcgaggagtctgaaatcacagcctcaagctcggccaaggccccaggagcttccttggttggaccttggggctggacccgcagcctgccattccatctgacaggccctgaccctgaggccacgcagaggaagcacccagcacgggctcagtggtttgtcttcttgcttgggctcagacccatggcttttgttcctctgacaccctgacatttctactaaaataacaaagcaattaaacacacaaaaggattccatgacagccttaaaaaacaccattacatgttcctttacccaaggttgaaaacatttgggaacttgatttccaacatcaaaatccagatcaaaacccattcaacaatcccatgatccccttgcaacaaccctttcctggccagtatcacagggtgccgaccctcacagggtctcacaattcaacaattcagtgagagaggatgcagcaacaaagactgtaacgaaaaaacaagagagtctagggtctcacatcaacaattcagtgaaagaggatgcagcaacaaagactgtaagggaaaaacaggagagtctacagctgaagctactgctactcaaggtgggcagagaacggaagagacggattctgttggaaactaagaggggaaatccaggaaggcttcctggtggagctgatctttaagctgaaccttgaaggactggtaagatgaacggatgttctggaacctgagaaacacccaagtaccagagagacagcatccatgtgtgaactactctagacagaggcaacaggcgtggtggggcctggggctcctcagaatggcacctcaagtccccatggtggtcagggactggaatgcatcggccgcctgcagccagctccgcggggccagtccctgacctctggctcggagattggtgtgcccggtgaaggagttgcccaagcatcttaggcaaccagatactacgcctggccttggaccctgccacttgcctgccccacaaaaacctgctgaccgctgtgacctactttaacgccctctgacttcccgctctttgaatatggggcaaaaagaagaagggcgactggcaccatccaattcacttgaggctcggaggctcaggcctgccttcctggcggctactggggtggcgtttcccagcacccccgggaagctaccaaggtccagggctctcctgggcttctgcgacgcccacgcactcctgcggccgagcttcgcggtcgggctctcccgtcgccaccccggcgtctgctcagccgcgagcgagaaccaagccgggccgggcgcggggcccgggcgaggccgccaagatggccgacgcgctcggcagcgcgcggatcacgcgggaaggctgcccttggcctcccgggaaacagccaaggttccgccgccctccttggcgctctgccccggccggcctgccgggatctcctccccggcgcggtctgcggctcccggggcctcgcaaaccttccaggcccgaggccatccagacgtgcacaccaggcccggcccgcgaggggagacacaggggccggggctgcggcggctgagctccctgggcggctcggaacgcaaggggccggcgagccgacgctgctgcaggaggctgcggcgtggggcgaggttctcgctacggcttcgttcccgtcctcccgcggccgctctcccccggaagccctcggaggcagcacgatggacgtggccacactgccctccagtggccagctcgccgaacaacacgtctgggccccttttgggggtctgggtgacgtgtccaccctctctctgccctttgctacatttgaaggtggggtttgctcatccatggttcctcttacaggtcaccaaagctgccacagtgcacactcacccaacagcaggggatttgccgccttcggtggttctcaaacttcagtgtgcacaggaatccccccttggacagttctttcaaacccggattgctgggtcccccaaccaagtcagagaatttgcatttctaacaaatcctcaggcgatgctgagctgctggtccgctggtcctggagccacacttagagaaccactggctcggctcactctttctctcacggggtttctgtcatctactcatttaatacagaatatgtcctgctagccccggaggacgagtggacggaacaactttctcacccctcgcggagcttagtctaacggaggagacagacttgtttcaacaaatcacctagaaagaaatataagattccatttgaaaagactttcaaattcctatgaaggaaaagaatcaggtgctcagagaacatatataaatggggcactcatttagatttgggatgggaaggttcttgaggaagacctctctgaggaaacccttaagctgaggccaggaggagggatgaggtcctgaggggaatggggaggggactggaactggcaggaggagcaggtaagatgcagaccctgtctgtagaagcagagactggtagggggccaggcagggggtcacagcctcctaggcccatgcctctggtacccacagagctgcctcctcagaagggcagcatccaggggagaagagggcctgcctgcatgctcagatcttagctacccccgtcagtgccaagaagaatgctccaccttgaggaaccccagccaggtgcccacagcccacaaacttctctttgcctgagcagatttatgtaggtaccttctgtaaggcctgaagggcagtcacatctgatggaaccaggtctgctgagtaatgatgaacagacatgatgttaccatctacccatcaatgccctcagtgtgccatctcctccctcctgcagtccaggatccagctgtttctccaatgagcatttttaagcacctactatgtgctctgcactaggatcactgcaatgctctgtggggcatggcacaaagaggccagcctgccctaggaggcgccaagcaccctggagggcaggtaggtggagtacaccctccccgccccagt

SEQ ID NO: 60757 - DNA, 7341 bp, Homo sapiens
gtcctacggccctactgctctgcacacatatttaacaggcgaaggggcttagcaagctcttggcacataataagcactcaataaacggtgggcttcatcattagccagagagaagggactctgtgaggaggtcctacagaaggagaaatatggagaagtgggtgacccaagatgatggctcacacacctctcccaggagggccagccccatgcctagctaggcagttccctggctaggacgtcagctcttactcactctttccagagagcagctaattagcctcccagcagccaggagctctccagatgaaaggtgcttaatacaagctcaaggcgtaactcccatatgtataactaaggttccctgaggtgaggaaggccccagggcggagagacaggccagatcagggcctcgccttctttatgacggaggttcccagggaagggagccggctggggtggcagtgagcctgagaaagggctcggggtggtgggtgtgcggcttcagagggagcccctccctgggagtgggcggggcccggtggctgaggaggcagagtgaatgcttcagggcccaagctgcctcccagagtgggagctccaggtcagaagacagcttagaactgggtgggtcagagcgagggctttgctgctgggctgccaggtcagaatcccagctctgctatggccattccatgtcccagagcctcagcttcctcctctgtaaaacggagataatgataacattgacctcacagctatttactgacagcacttagtacagacaggacctggcacccactacgtaaagaatgaggatttgtacatttgttcatttaacagatatttattgagtacctgctatgtgccaggcactgggtgttagaaatacagtcatgaacaaaacagatccattttcccttgattctgtagggaagatagaccacagaccccagaaccaagagatcggtaatacactgcctggcagtgacctgcgctgtgggaatcgggtatgaggatggggtcaggtgtccaatacagcggcagaagagcaggtacccaggcagatatgggcagattaagaaacgaaccagggttgaagggccaacccaaagtgcgcagcaaatcagaggcgggagcctgggcctgcagcataggaatgttcacccacagctgctgaagcagccgcagcagctccctctgcccctgactaaggggtgtgcccagcgaagccacctgccctcacctcccccttggctcctgcccctgactcccgcagtctggagtccagcaaggcaagggaactgacacagcccccagggtcacgatggcttccattctttgacattcaccagtgtcactggctgagctcaggctacacggccatcttctctttgaagcctccaaaccagctggtgaagtcagtagcacccctgtgttttttatcaaggtaaggttcacataacataaaatgaagcattttaaagtgaacacttcagtggaatttagtatatttacagggttgtggaacctccgcctctgtctagttccaaaacatttttatcaccccaaaaggaaacccatacccactaaacagttgctctcctttccctcctcccccaggccctggaaaccaccctctacttcctgtcgctatggggttgcctattctggatacttcacctatccagagcttttgtgtctggcttctgtcacttagcatcatgttttcgaggtttatccaggttgtaacatgtattgttattacaccttggtctatggctaaataatgttccattgtctgtaagcactcccatcttacagatgaggaaacagtcccgaggcgctgagactcccagcttgagtccacaccggagagacatggtccgtgcaagcctgctccccagatggccccatcctggcactgccgtctgggaggaggctgcccctgggggcatgctggtccctgagtggtgacctgaccccttctgaggttcacttctcagcgcaggttcacttctcagcgcaggttcacaggcgagggtgctctggcctcccagtcaccctgatccaggcaagaccatagcgtggccgcaggggccgcctccttgggggaattccagcccctggccaaccacagaccatagcactcccgggggttgaaccgtttctcacaactgggttgtgacagctgggaggtgctcaaccctgggggccagcctggtggcaggccgggttgggaacgctgttcccagccagcttccctaggcaacatggccagccccgtccagcaagtggaccactcagatggcaggcatgtactgagcacccactgtataccagccaggcaccacgaggcctccaaggagctccctttctgatgaggatgagccaccccagaacagaaactgggtgctggggccaggggcaggacagaggggtgctccggagaacaagcaccagcactgagcctggggagttccccgctggcagcgcctgacacagcccacaccggggatccctggcctcaggaaagcagggctgtcacatcaagaaggccatgacataagggcccctaccaacgtccagccttaggtggagggcacagatatggcaatacacaggaccctagaatgcctgcctggggatgcccaccttggcccacttgatggccagttgagactcagtgtgcactgtccacacaccctgttctgacactgactgcctagtgtccaattattcttccatctcactcattcagtgccagttactctactgagcaataaggatataacattttaaaaacaaaacaaacatgttcctgtcctctagaagcttaaaatagagcaaactgagaaggaaactaataatgaccaccttgccaggggcaaggagaccagaggcagggccctaacccacgggcagctgcagctggaatatatgagacagtgtgtgtgtgctcacatgtccacagccgagctcacctccagacagttatgcacccctaccgctcaccccatcccacctcatcctcaccaaggcaggtctactcagtaagtcaggctgaaaacatgagcctggggagttgggacttcttaactgccacccccacctgcaccccatccaggatgaaagaagcattatccagcaaggacatggccactgaaagtgccaccaaggaccggccaaggggaggggaagggctccctacagcccttcccctgctggctgagttgaatggccagggacttacccaggctggtacaaagccactggccccagggccatccccttataacacagcacttcctgggtgtcagtgcatgctgagtatgtcacgtgtatttcttaaaccactaagattttaccagtgacttatccaaggtcaccaggccagtgtgtagaaaatttgcattctggtgtgagccactcaaaggtccacacccacatttctacacatcccctaataaaagccaaggggcccacaacgctcccctgtgaacctcacatggctgcctgtctaggggaaatgaaggaaatcccttcacacggagcccctgccccagccgtgctccagtccctctcttttcccctgccctagctgaccccacagctaagcccaccttttggcattcagggtgcacctcctgccccagggaactcccagatgagctggagggaacagtctgcactggggctctgggtggaagggaagaggatgggggctaaccaggtcctgggcacatagggcctcatgtgggaaggaaaatgctccctcagagggtcagatgctctcaaccagttcccaccccctgctgctgtcacagagaacttccttggcagagaggggagagagcaagctagatcttgctccaggtgtcttggctgacctgaaaaccccagggcgccctgagggaaagaaagccagggaagggatgcatgggaagctgggtgattattgccctctattccagggttgggggtggggaccacctgtccagggagcatagcctagctgaggggcaggaatgggcccctgcctgtcccagggtcagcccagggtcagatggggccaactatagtccccacggccaggacatggctgctgagaggcccggtgaccacagctgtgttctctgggctctggttgaagcactttgcatgcattaatcctaaagccgatctttacagcctccctgaaaggaaggtgcatgaggtccctgttttacagatgaagaaactaaggctcacagattggagaaatgtgcccatagctaggtggccaggaaacagtacagtcaggattcacatccttctgattccaaaggctttgcccttgacaactgcttagagcttttctgctggctgtgcctagcaccaggctggcacctcagatgttcaggtattcactgggatgagggagggagtggacaggtaaggggatatgtgagaggatatggggatgagtgggagggcaagtgagtgtataagcgcgcatgggtgagtgagtggttgagcagtcagtggacatgcagactagtaaatgaatgttgcggtggttaaagggttgacctagagagaggagcaatcgctgctctgtcaaatggcctctgggagtgaagagggaatggggcttttgagaaattgggtggcccactgggatctggcttaccatgaataatagcccccaggtggtctccccccctggaaagaaccctacccagaaagggactctggaggccacagggcttctgcttgccaggcacacacacattccatgaccaagtaatgggctggccaggtcaatcatctacagggctttgggagctccattgcttaagaggaacctgggccacgtatcgatctgcccacccctgctgggaggaaaagaagaaaaagagatccattggttctgcccaaggtggaggtgggggtgggtggccaagaggccccaactgctgtcctggaaaggcaagtaggcctggccagggcagaactcctttgcactggctgttgggccctgggggtcactgcccgggccctgtttgcccaagggggtgggtgcaaggtggtgcggatgtgactcagcaaggggtcactgccatggacagggaaggccaatggggtaaggggcaggctggactggacccaggagtcaggataacttggcaaaaaggggctgtggatcttggggctgcaggcagggaaacatagggatctatagcccaccaacaccttccatgaggcacaaggggaaagtaactggaccaagtcaagggcaactccatgagttaaagggcacacaggggaactctcccatccagccctcagccagctctccaaggaagactggagtaagccaggggcaggtgctggccagcgtgcttctggagaacaagtcccagatgctgctcaacttggggtcagaggaagccaagaggggaccccagagccatgcctggtcaggcacagcccctccccagcagtgagtttgtacccactgcccacttcgggagtgggggcttgtcatgacatacagtgagctaacagagggtatgaagggcctcctggagggggtggggtgcacaggaaactgctcaacaccttggtgccctcccctgtgcactcaggtcttgcatgagctgcctgtcctggaggaatccttgaaggggacagacagcaccatcctccctcacctttctgcacagagtcccaggaacctgagcagggcaaatgttttcaccaccctgttctgagaacaaattgagcaggcctattagccccatattcccacatgtggtcctggagactacgctccatcctggaaaatgccatagaggtcactttgggcatgcggcacagcggctgtccgagggggtgtgtttagggctggacaccttccggtccagcacaggccatgaggagcaggcgagtgccctctagtggcctctcccggcacgggttgcatagagccccacttcccaaagacagctcgcctaggagcacagggacaatcccagtctccttcctacagggtctggaagcgttgtgcaactaaccctcaattttttcaaaagaaaaaaggaagtgatagatctacatcagaaggtcattgcaagatggaagaacaacatatacagccctttagcatggctttcttcaaatattagtgatgacaacaccaacaagagtaaaagttatcttaatcctcacaatgacccatgaggtaggtgttactatttctagttcacaaatgaaaaaggggtggccaggcacggtggctcacgcctgtaatcccagcactttgggaggccgaggcgggtgcatcacttgaggccaggagtttgagatcagcctggtcaacatggtgaaaccccgtctctgctaaaaacacaaaaattagccaggcatgctggcaggcgcctgtaatctcagctacttgggaggctgaggcatgagaatagcttgaacccacgagccagaggttgcagtgagccgagattgcaccgctgcactccagcctgggcaacaaagcaagactctgcctcaaataaaaacaaaataaaacaaacaaaaaatacaaatgaaaaagatacagaacttgggtttttcaactcagctgtgatggcaaacttgtgctggtgtttaggcactcgactttaactgctcagattttaacaagaggctatttccaaccaaaagcgtagctttttctctcctgtctcctgctcccaagagagactgcactgttgaggagaaagcagggaaatggctcttcctcctctctgtggtaaaaaggatcaatgataaacttttccttatcttgttatactttacaaaggcctttcacctgtgttatcttatttgcacgtcacaccagccctgtgagggaggaagtattagccccatccaatatgtaactccaaaggtagctgtccacttaacttccagccctgcagctacacaagccccatgggaccaaacccaaatgaagtctcaataaatttaaaaagataactgtcatataaagtatctccttggaccacaacaggatgaagttaaaaaatcaataacagaaatataactgaaggccggtcgtggtggctcacgcctgtaatcccagcaatttgggaggcctcggaggtgggcagatcacttgagcccagaattcgagaacagcctgggcaacatgctgaaaccccatctctacaaaataataataataataataataataataataaataaaaaatagccaggcatggtggcgcacacctgtagtcccagctactcttagaggctgaggtgggaagatcatctgagcctgggaaggttggggct

SEQ ID NO: 60758 - DNA, 2668 bp, Homo sapiens
ggcatggtgatgtgagcctgtagtcccagctactagggaggctgcagcaggaggatcgcttaagcccaggagttggaggctgtagtgagctatgatcccaccactgcactccagcctgggtgacagagtgagaccttgtctctaaaaaaataaaataaataaaaatcaaggttcagaatatggtatataataaaaggtactttttgttttatacaaaaagggtacaaagcatggaaacaaacatttgcttgtgtgcagagactgtagtcaaattcttacctttggggagagaactaggggctggaggataaggagtcagagggagaccctatcataaacctttttaattttttttaaattttagatcatgcacatatattatcttgtcaaaataagtcaaatgcaaaggttctgggtctataaaatccttaggatgctcttcctcagggggcagtcctgcaaaagtgacccacagagcatgggccaggggccccaggggagccagcctccggggagtggaggtggggctcacctggatctcctcaatggtgtgcacaatgaaggtgtcctgcaggtcctccatggccccctccatccagttgttgaagggtgcagcccgcttggcatactccaagtacagctggtcaatggtctccagcagtttctcggtccgctgggagtgccaaatagggtaagggttagtacagtgatgtccagaatcatcccccactcctatcaagatcctcctggtgagccccaggtctagaagcactgactcaatcaggcagaaagaacaagctcttcctgccagctgtatgaaccatctcacatcacagtcacctggcctgggtcccagagtctggtgtgtagaataggagggttctcaaatggctggggttgggctgtaaagcacactaaactgggaggatgagacatgtgagggcaagagaggaggcatcgccatgagggcaaagtccaaatcctgtgccaaagtgaatcttccacatttaggccagggttgggggaggtctggggaagccatagagtcttttagcccaaagcaaagagagtcaagaagcaggaaggggcaccacagggctgccggatatgggcctagatctccctctgggacctctcacctccagagcttcccttcgcttctgagttagggcccccagattgtcccactggtcacagatcttttggcaacgggcgttgacactgggtgagtcataatagtccagctcactggggagggaagagacaaggaagtcaggggacccaggttaatttcatggcccatctccctctctctgaggctgtcagtggggtggctggtggtgctgggaagagccaggggcgctcccttcaagagaccttccaggcactccttccacccctcccctctttcaggagactggcagagaggagaccaaagaagacccctttcccagtcatggctggaggtgacaccagccttcacctcaatggccaatggcagggagccctcgaggcccaacgagaaagctcagaaccaagtcttggtcaccctctgctcctgtactagctacaggcgagaactggtggcctttaacaggatggcagtggtcccgggctccttccccaccaggagagatatttgtctcctgcgttgactccctccccacctgggcacccacctgtacccaccctccccatcttccacggccacacccccacctcccccagcagctgagaaagcccagcctcagcccctcaccacagggtaggggtgtctggggccacctacttgagctcctgtgcgatggcggcaatctgctccacacggtcctggtgggcagccaggtcactctcgaaggcctcatgcttcttgagcagggccttgatctccgagagggtggcggtctcatagtccttctgtcgcagcatggcctctttgcctgggttgagagagggccacatggctgagctggagtgagaagcatctccttggtcccaaccgcccacccctcagggccccaggagctccacttctgggggtgcttctcaaggaggtgcccattgtgcagggatctgcagggtgcaaaagcagatgtgcaactagaacatccaccaaccggcgcaacggggaaaagcactctcctcagagcacttccaaggccatgaaagtgtctacgcaggaaggctatgcaggagtctgtgggaatgcatagggcatgacgctatacacacagcgggaaacacagccatccacaccctctggtataaccaggaaaaaaacaacccaagcacctcaggagtaccctgcctttagaatgtccccagttaccgtcactggctgccggcagccctgcaggggccccttccctcggtcagtgtgtccagtgcactctgcacagaacccgacagtggctagcgccttctctgaccctcagacacactgccctctatctacagggcacaagcaggtcttgcgtttcttaaatttgtttccacaggaggaaagcaggaacaagaaatgacctcccagggccattgttagacgacgctcaccagctgccttgtgaagttgacaggcacaggatgggggctggcccagcctccctcactcacatacccaaccctctgctgctggtatgctcggcccatctcaataaataaggctggg

SEQ ID NO: 60759 - DNA, 1987 bp, Homo sapiens
agatttgtttaaaactggggaagggtagtggaggaggtaggaagcagggacattctaaaaggcagttagaggcaaggcacggtggctcacacctgcaatcccagcgctttgggaggctgaggtgggaggatcacctgaggtcaggagttcaataccagcctggccaacatggtggaaccctatctcaaagaaaaaagaaaataaataaataaataacggcagaggaaaacagcacggtggctcctcaaaaaattaaacagagaattcccatgtgacctagcagttccactttggggaatatacaaaaaaagaactgaaagagggattttaaaaatattttgtacaaccatgtcctagcattattcacaatacccaaaaggtagaaacaacccaagtgaccaccgacaggtgaatgaacaaaatgtggggagccattttatagctgtaggtcatacatacaatggaatacgattcagccataaaaaggaaagggatggcggcacatgctccaacatggatgaaccgtgaagacacagtaagtgaaataaaccagtgtcacaaaaggagaaatactgtatgattccactcgtacaaggtatacctagagtagtcaaatcagagacaaaaagtagaatggtggttgccaggggagggccggggggagcggcgagctagtgttgaacagctgtagggtgtcagtttgagacgatgaagagccctgaaggtggacggtggcgatggctgcacaacagtcagtgcatgcccttaataccgctgaactgcaccctttaaaatggctaaaatgatacattttctgttatatattattttaccacacacacaggttttatctgaaagtagaaaaaactacttttaaaaaaaaagggcagttagagcttgtgcaaaggcacaggaaacagaaagtgcatgtcatctggggagagctgcacgttccccctgcccccaccccacaactggcagaggatcgaaggtctgatacctttttgggaatagttagttgaaaacaaagcaggtgccagctcatgcaggattccataagctatgctaaggaatgtggcctgcaggctcaaagccctggagaggcaccgcgggctgagggctgtgagagggaacagtgtgaccatatttggactgactgtcggacaagccctctggctacagtgacaggggtggactgccaggaagagctggggtaaaggcctttgtgggatcatctaggtgagagttgacacaggccacactgacaccacaacagtaggggttaaaagaaggactgagaagaaggaatcagaataaacagaacatcagtaacaacttgcaaagaagagctgtctatgatcccagcttgggtgcagaagaacaggactctgggagggaaaagaggtttgctagggcaggagtgacaagcacagagttttggacatgctgagaggactgtgtgggacattggggtggagacgcccagcgaggttcagcatttcagaggtggctcgagggagagggctgggctgggattaggtctaaggctcaccggcatcaaggtgaagagagtagctaacatggcccagtgtatcaaccaaggctagactcacaggactcccaccccttaagggatggtggcagaaaggcattcataagcaggatgagatgtgtgttccagtagagctgtccctccagacatctggacaaaccaggggctggggaatggcctgggtcacctggatacaggtagataagtagtaatggagccaagatttggagacagtcacccatggttaacattcttggccacagaatcctggcactggggaggagaaggaacctcagttccttcaaaccctttttttttttttttttttttttaaaacaaacaaggatgctgaaacaaatgtccaaggcacctggatggctggcagcagaaccagaactcagacccacgctcctaggatgaattcatacatgtcat

SEQ ID NO: 60760 - DNA, 6675 bp, Homo sapiens
ctcctgacctcaagcgatctgtccaccttggcttcccaaagtgctgggattacaggcatgagccaccacacccggctagagcgctctattctgatgtttaagcctcaacacacaatccaggccatccactctggctgacctccccagagaagcctccattgacaaaggtgctttttccatttgttgcacagtggaataaacaagataacccacctgcagccaaacaagactagctgggcagtggtgggacagcccaggctccaaactcacgtgctggccacacctcttccaagcacatcctcccactctcccggaatcaaaaataccagccaccattcaggccaggggagttaagtgttcagaggatgggatcaggaaacctgggacctgccctggctcagccaggcgtgtgacctcagataagtcacttcaatcccttccagctctgctagcgcaaacaagtccctcctaccttgcaggctggagcccagaaacttttcccatcagaacacgcctaatgagaagacacaaccaaacagcacccggcaacaatcttttgttcctgtgtagggtttattctgattggtgggctctcaaagaaagccaaaaaatttcccagggacaatttcatctccatgaactcaaaacatactcagtgtttctgtctcaagacagccagctcctaacccttctcagcaagcagaatcctgacgttagtgtcccggacagcatctaaaagctttatgctagaacattcctagcaggacacagaaggaccaggatcatcggctgcctccagggagagaaatgggaaggcagggggtagagaacacttgcttttcacagaatatgcttttgtttgagttttgtaccaaaatgtgctgtcattaccttttttttttttttaagtatgcaaataaaagaacagtctgtctagggggtggcgggaggaactgttacgggaattgaagctgccgattaggcctaatcaagatgacaaccttccaaaagcaccgagagttcgtggcagagcccatgggggaagagccagtggggagcctggccgggtgaagtcctgggcaagaagccggaggaaaggggctttgacaaagcctatgttgtccttggccagtttctggtgctgaagaaaactgaagacctcttccaggaatggctgaaggacacttgtggtgccaacgccaagcaatcccagaactgcttctgatgcctttaagagtggtaggacaacttcttgtgatgctctctgggaagccctcaatccccagccctcatccagagtttgcagccatgaagggactcctcccctgtcctctacagaggaaaagattgctattgtactcacctctgatgtactccagggtcttttgagagttttctcccctaaccatttcaacttttttggattctcgctcttgtatgcctcctccttcctttttcccttgccaattccctggtgacagttatcagctttcctgcatggattcctggccccgtctctcacccccaccctcacttgcagtccatttgataccatttggctccttttttggcagaacagtcactgtccttgtaaagttttttagatcaataaagttagtggttttcaaaaaaaaaagaaaaaagaaaagtctgtctgggaatatatacatttaattgttatgtcagacctctaggataggatagagaggacttcccatttctctgggattatttggcaagggtgggacaaggctcaggtattatggaggaggaaaaaggatgtttccaaaataaagataaaaaatgaaaaaattatcccatctatttaaaagaatgagtttgagaataaaataagatataatatagggaaaaggctctgaagaactttaaagtgccttatcagtgtaaaatcttaaagaaagtcataattagggagcaggacatgaggatacaccagcaatcacacacatctccccaataattaagacagcaaactgctaactgggtaagataaagggctgtgctctggccaagtgaccccaggaaatcacccaaatgagcttctacacttcctgaaaatggtacacagcttcctatacaagccagcttctcgtctgatggtcgttcttctccctgagtagagcacccaggactctggtctaggctcatcgagtcaaaaacaaactcaccagcctccccaggcaagcaccctgccagcccaagccagccccctgctgtgtgggcggggtgtgtgaaccagcagggtccttggagaaggccaggccagcacctgtgctcagcgttgagtcctctgcagcatccactgatgttgaagacgttactgaggtgcagccagggggcgtgctggaatccctctgacccccatacaagtatggccagtctggccagggcgtgggccctgggtggtttgtctaagcaaagacctgcccagaagtgatctcagatgcccagtgttctggcatggtaaataggagtatctggctaacttatcaggggctgactgccagcccttcaaagccagccgtcagctggttcatgcgctgatgaaaagcagagtcttcgggaacatctccacccagatctgcccacttcccacccacctgggagtggctgctgaaaaagctgacaaccaccaggcctctgctgagacctggcactgctctaacagcctgtccccaggacatgtgagtgctggggtcctggagattcagagtaggggggactgggggtgcaccttggactttggaacaagacagacctaggctccagtgccagcccacacctcacattacatctgtctgcttggacaggagatttaatcctagcctcaggatccctatctgtaaaatggggataacaaggcctacaatggcacagaatgaaagacgaccaaattagaccctatgtcctgaaagacttagcctggtgctgtgtccacaacagacacttaaacaatgttaacccagcaggtcctcaccactcactggctgtgtggctttagttaaactgtctaggtgtcaattgcctcaccttacaatggggataaagaacatcaccactttgtgaagattatgacaatggaagcaaaacagccagcaagataccctggacacatcaggagcccagtcaatgtcagcggtcagcatgctctcacttcccatccactgtctatttaatcaaagttaatcattcacagagcaagaaagaagtcctgttgttttttttccccactgatgagagaactctgagacgggcctctggccaagaggaggagatggggaggggggagtggagcctgcatttcctggtttacacccatctacagcccatttcaaaagacatagcaccagacacccagagggtcaccagggccaagaagcagggggcctgcagctttttctgggaggcctaacaaaggcaccgtgcttgagagggctcctgggccaccatgagactctgatctggcctccctgccatccaaggccccccagaaggcagactgcccagctccttcttgcctggtacaggtggaacctatgggctcccaggagaaatcagagccactttaaaacaggtggacacacgatcctagtgaagaaacaggtctgtcctcttagctcctcgccaatgagagtcaactgcctcagccaatctgtcaccatccacagcctcacccctcccagggacccaagagcccaccccaactgccagccaccagctagctctgtccagtacttgcgactgggcctcccggagccttggttctcacatcagtaaagacttctgtgggccagaatgatgatggtgaaaatagtaataataaaataaagataaaatgagcctgcagcccataaagtagtcacgagggagggctatgtgagctagtgcaaagggctcagtctgctaccagacgcagaccaagcactcactagatgttaaaacacaaaagcacctaggaagaccgaaagcggcttgattagtggtttcttagggctgggaacggaggagttgggggaggtgatagctaaggggtacagaatatctttctaaggtgataaaaatgttcaaaactgatggcaaaaatagctgcccatttatgtgactatcctaaaaaccatgaagttgtataaatgggttaattgtatgggtatgtgaatgacatctcaataaagctgttatttctcttttaaactaaaatgttccaggaccccgctaagccttttatatcaagacgtggttttgtttttaacccatttggcccattggaaagaaaccaggctcaaagacaggccctggaccagagccctctcgggggactgatgtaattgagctagttcagctactgaacagtggctggtaagcctgctgagatgaggattactaaatgggcggagctggtcttcgaagcagagtggcacccgctccgggaggccagtgtgagaacagcctcctccccggtcctccggggttacagtttggtcctgctgtaacccctcccccatgtctggagtctgattctggcccttgcaggtctgagagcacacaggcctcagcaggctgtagctcccagcagtggccagcacattccttccccaaagaaggaaaagccaccaaaagtgaggtcatttggtttttttggcacagatgctgagagctctgggtcactcaattccatagagaactcccccagctgacagggatttggcccagcctgctactcatacaatatgggaacccggggtctggcagactctggcccctaacttgacccctccatgtagttgaggtatgaccctcagtcttccagcttgaaacctccatggtcttatctgtggaatgggatgatgaaatccacccctcctggggttgggctaagaattaaatagcacaaaactagacttacggtaggggctcaaaaattaaataaggctggctctggtatctcacaccagcaatcccagcactttgggaggctgaggcaggaggattgcctgaggccaggagatcaaggccagcctgggcaacatagcaagaccctgtctctacttaaaaaaaaaaaaaaaaaattagcttctatcctctccccagggtcatttctcctgaatgtgccttgttgaccagaaacaaggacctgcctagattccaaacccctgtgtggaagctcctctccaaaggtcaaaccacttatcattacaaatttgcaagaaagaaagagatcctgcttggacaaggaagttttccaagtctcctttctgtgcccctaaaataatctcccagcaggagcttctgtcctggtctgtcccacagtccacccctgggtcacccggacccctcaaagcacctccttgggcatagtgactgggaactctgacccccatggtggttccggtcaccaggctgtcagctggagcatcagttctgtcaactgcttttggggacttgggaggggttcctgtggaggccccagaggacgaattactgcacctctttaaaaggggcatgaagcccctgaagagcagccagggttcaaagtctgggctcacagtgactggcccaatgacaaaaggggagaagccaggcagaaaaaatagaaaaaagaacagcaggataattcagtgcggtggttctcaaacttgaatatgtaaacttgaacatttaccagaatcacctggagggcttgttaaaatacagattgctgggccccaccgccagtttctgattccaaagttctaggccggcagagaaactgcatttctaacaagtatccaggtgatgctgatgctgccggtccagagaccacactctgaggaccaaggcttagtggctaagaacggatttgggcacagaagagctgggttcaatatgggtctgccacttactaaccttggaacctaagcaagttcttgacctttctgagcctcagtttcctcatctgtaaaacagggataatacctttctcaactggtttggtaaggagtttcaatgagataatctatgcaaaaagcccagcacaccctaagtagttaatagtgtctagagttcattactaaagtacaagaaagacaagagaaagggtgctcatggaaaggcatgagacaaaaagaacgactccaggacccatggaattgcccttgtctactaaacggtcccaggtagcatcaagggatcatgggggacaccttggcacccagtgtgttccttcatctgggctagcaggatccagcaggcactgcaccccaacctctctgactcagtcaaaacttgatcaataggacctcagcactgatccagcccaaactccaagccaatgccacagcgccacccacctcctccctgagggacaaccacccggcagcagccacatgactttgcaaaggaattctcaaagctccaggaaacccaagcccgcaggatgccagagataccaggggatgaggcaacaagttcagcaactgtggaagcatcacaagccaccacaagtcacagcagtgatttgcacccccggggtgggactggagcagacactcccagggagcagaacttcctgcaggaacctacgcaacaggcaaaaaactctgtctctacaaaaaatttaaaaatgttagccaggcatgatggtgcacccctatagttccagctacccaggaggctgag

SEQ ID NO: 60761 - DNA, 1893 bp, Homo sapiens
aactgaaaaaaaaaaagtcacagtgcaggagggaagaagagggtgccagagactggagatcaactagccacatgggtgttcgggttcctgcagctgttgtttctcctgagagcagtggaagtcaccgaagacattttattttagctgaaagaaacaaatggggctgtggcgggctgagttgggctgggagtgccaatcagatgctggttacataattccacctgcatcttagaaagagacctctaaatgccatgggaagggcagatcagagatggaaaagagtggctgaaaagagaccaagcacaagatcacgaaaaggtcccagccagagacaaagggagccagtccagggtggcagtgtaggagagggagaagcaggtggatacaagagatactcaggagagacggggaggaggggcagaggccacacccagattttcagacctgagccaacagaaggaggaacaggcagagaggccacagctttgcacccatactccctgcctgcccagacacctggggcagctcgctgttcacagcagtccccaaaggtccaaagtcctgaggctgcagatctaattgaaaggtctgagtggaagagcttcagagatcaggatgtcactcccaacccactgccccaagtgttctaccagtgtcaacccaatcaatcttaaccaccccagaaggcatctcattttacagatgagaaaaccgaggccaagagctcacagccactcaaggtcacagcgaacagtagatgcaggagccagaattccacccgcggtggcagtcacacactttcaaccacaggctcagtcagcgtgactctccccagggcctggcagcaggtcaccgtgccccggccacactctcacaactgtccgtaacagggcccctccgctcacagcccaccagcccaccagcccacctcaccaccaccaatcaagtcaccctctgggggtggggcccagcagaggttgaaatcctccttaagggcctcttaagggtaaactggaaaggatgacatagtaaggacctaaaaggggttttctctaatggaccaggccaactttgagaaggaggaagcagacaaggcagtgggaccccagttcctggcatcatcagctgaccctggaaatacctattcctcaacttccctatctgaacaagggagccagccctgcctgtgcttctagaaaacttcccagcccaataaaaaaggcagaggaagaggggagaagtggcagaagtcctacccacaggacttccaggactccaccagcagccctgaggaggagtcccagcccctcccgctgggtccatgctgcctaagaccgcgcctacgctctgacacctgtggattcccagtggttctaagaagcccaaggccccacatgctcactggggccctggttttcagaaggcacacctggggaagcatcctagtggggctcagggctctgtcccaccatccatcccccacttagtctctgcaggttcccaaggccatcatggaggccctcagccctcacctccttcctgtcactccatctctctccatccccaccttcaccttttccatgctttagtggaatgtttgcaggcacaatggacacacatcactgggagatctcagttctaaatctgcttccaccacaaggagctcagggcctcaggccagccccttcaagcttcagtctcacctgcaaagtctcccactttccaaggggccatacttgtctcattccaatgggcccccgtgaagatggaatgacacagcaactggcagagcaatctgagggaaacggcatttcccagactggcccgattataaaaaaggttaaaagtagagacccctcaccccaacaaccaccattctggttcaggagttct

SEQ ID NO: 60762 - DNA, 2374 bp, Homo sapiens
ctcactctgtcgcccagtctggaatgcagtggtatgatctcggctcactgcaagctccgcctccctggttcacaccattctcctgcctcagcctcccaagtagctgggactacaagcacccgccaccacgcctggctaattttttgtatttttagtagagacatggtttcactgtgttagccaggatggtctggatctactgaccttgtgatctggctgccttggcctcccaaagtgctgggattacaggcatgagccaccacgtccggccctaagcatgtcaaacttttatcataaaacaaaacagatattgaagacttgtaaatcaaaaacatttcaaattgtgattcaggagggtgtttaagacctccagttagaggggggcaatgttatcacctgcctgccctccttgccaccagcaccagcctgcctgcagaaggccaagaaactctcccaagaagcgacgaaggcagacgaacggcagggcagctggatagcacaggccttccctggccccccgccctttgagaaacagtggcagggaagcgccacccatggccagaggcaacggggtgacgggcaggctcctccctgggccctgactccagggtgactcaggcgctggtttccccggaaggaagtgagccagccgactctctttttccctttctaggaagacacaagggaatgacttggcccaatcccaggggcccagcctttttactcagactgttatggagaaaccaccccaccgtcctccactacaggagaggaagccagagtgaggagggagagaaagaggaaacagctcatcccacagaggaagatacagaaaaggggaggcacaatggacaagacagggccttctctttctaacctcaactcccaacataaatgcccaaggagggatgcatggaagctctgcaaccccacagacttgggctctggtcctgacgttcccgctgactagctgtgtgcccttgactccgtttccccaactctaacgtgaaggtgatgcaacatttgatatccaaggcccctttcagctctgaaactccaggctcctgtaaaagccgggtgatgggctgggactgaggaaggcctggagaagactggacgtggtcttggaacagggagagctttgggtgtggagactcgtgcctggtacccctcccagaagtaatggctctaagtgcagcaccagtgtccccaccctcaggccaagtaaccccatcattcattcactcattcattcgttcgttcattcattcaagattttctaaactcttaccctgtgccaggtactatactaatgctggcaaacagcagtgaacaagcgcagccttgtgaacttcccattgggtctgaagatctttcaccctactccctgtccccagggccggccctttaagggagtagagcatggaagagcaaaacaaacagtagccaaaagggaagccacatgaagctggcaaaagagcagtgagccaagctgagagctgagggaggtctggttcagtctccagctttccgggcctcagtttctttatctgacagagggggctggctctggtttctgtgggaccttccagcgctggtagtctagacatcctagggattgactcaacttctcaatcctgggatcgccagagggaggcctgctggaggccagccctgggcagcttctgacaggccccagcttggactccgcagcagcaatgacccacccgggaccctgcgggctgcagacaggtcgaagtgacaggcggccaacggcagggagttctggggcacaaagaatacagcttcagcctggcaaagtccagctgctggaggctgcctgaaagcaaacatctggctttaactgcagagataaaatggatgtcacatgcagttttctccaagttgtaactgtcgggcttgggatggggtcaaagaatgagaaggaaggtagatatgtgccctgtccctgtgccgcaatgcctagtaggggaaagcggcatcccgcccaccccccatccctgctggattttaaccataaacacagcccttttctgaaggcacaggcttaacacaaaccagatgcggtagggactttcccccaccccctaccttggccctaaaattaaacgttcagtatcttctctgccaaacctcacttgaaggccgagccttaaagagccagagcctccggttctcaccctcacacactctcaatcacatctccacttaaacaaaatgtcaaagtcccccaaatggaaagtgtggatggagcagcccccaggagggcctgacacccaagcagggcacgggcagatttgaaaggagaaggaatgctgatcctccaccaccagtgacgccaccaacccagaag

SEQ ID NO: 60763 - DNA, 5039 bp, Homo sapiens
ggtacacacatacacctaagaatgtgagcgaaattacataagggagaaaactgggggctgcagtcaccctgaaaataacagcaactcctaggaaaagtgacttcagagcccagcctcaaagatcaggaaggttatgaaacctggaaaagtagaggaaatgcctctaatccacgtgctctgtctggaagataactgcattttgtgtctggaggcatggcgaccagcccatgaactccgtaccgaagcattctttgaaagagggacaagcctcggccaagccagtgcagcttcttgagtcatgcctcctgcctgcacagacttctccctgcctccacatcaggccatactttcaccaaggaagcacttctcaatgcatcatttaacctgattccccagaagagtcctgagggctccacgggcagaaatgtgtcccatttacagaggaggaaacctaatggaaatgccacaagaacgggaacttggtctgtcttgctcagtgccccatccctaatacctggaactgtgtctgacccagaatgagtgctcacaaagtatttgctgaatgacctaataaaagctcgatgaaatggaaagacttgcccaaagtctcagaaatagctatggctgcaccaaagctaaaaagagggtcttctgccttctaccgggtgacctttgtatccctctacactgtgtcctcctcttcccctcctcacactcactcccctgcctccctctggaaccatcagcctctgtccacttgtggactctggtcccacacaaaccccgcctcccagtcagtagaaagagtgtcaaaagcaacacgtttaccttacgtcttatccctcacctgtaataccacctccttaatatcaccctactgagaactaggcaggccagaaattctgcagactgaggcccacgaaagataatctagagaattaacaggaaacaaacaaacaaaaaatgtggatctgaatcttcagagtcaggcccagagctccttctgccatggcccctccatcaaccccgcccaaagcacgtgtcggctctcctggttcccagatgctctggctctggctgcgaggcccagctttcctgcctcccttgccaaggagggacaagtgaggggaagctgccagtcccaaacatggctgcatcccagccccaccaaacacagtctggacttggagctggttacttcccctctctggccctggtttcctagtccttgttcgtgcctggcacatatcagcaaatgccagttcttggcactgttgagtttgcctccaggataacccagtttcccagaccacctcttcctacctggctgcccaaaggcctggggcacacccactgccacccaggtcagagccctgggaatctatattcttctccccactgcgtttaatatattcattcattcagaaatattaaatacgatgttcaggccggtgctcagtgtctgtcccctaggaacttggtctcacagtcctttcaggggcctagttcctaggcagctctgttactcctgcccctcccaggcacaaagcaggtgctccctaagcagggatttctccttcgattctaacccccagggaagaccccaatccaccaccctaatctcacttctaatttaaaatccattctcaagaaggcttcaccctgaaattattaaagagccttctgcctggtgccccatagggatctccaaattactcactcacttttcagttccacccacagcacccatggtcccaggaaataagccaagtgagtgggggactgtctgcagcccccagtcttcagctcttactaggaagatgacaggaagagggggagtttaagcaactggcacattacaaagaagtcagttcgaagtcaggggaccttcccatgtccgatgtagatgaccgatgtcgctgtatagggcccagccctgcataggccttgggcaccgcggcccaggtcatcctgctttgaggaagcccattgtgtgtgttttagattacctctgcctgtctgatgaagtgagtaaaagggctccgtttcagggcctaggattcctgagtgagctaatacaggatgcctttggctgaaaaaaaaaacttcagtcggctctataaactaccccccttttaagtttaaaaaagggaatgaatgttaccatttttggacatgagcgttctccctcaagcccagccctaaccgcactatccaaagggacgcgccatcctgtcccccccccacccaaaaccccattcccagatcagcctgggggtggggagggtatgaaacggggagggaccggatggaagtgggcagccgggaggagggggagggaaaggggtattcagggtacgtggccgcctgggggcacaggctcaccgcgcaggcaggaagcagcggtagggttgaggcgccctccccccaccaccacgagtggtttctgacctcttcctgccactggccactgtgcccgggtcccatcgccagctccgagcccagctcccgtggcggggcgcgcacccggcacaccgcgcctgcctgggatgcagctccgtggctaagtagggatccccagtgactggccccaaatatcccctaagactgaccctcgttctgcagcccctcaactcgaaccgagctgcccacctttcccgggggtcggaggggcaggacgtagcgcaagcccatgtcggggttacagcttccaacccactgagttaagcaataaaacggtctgctgtcctgaccccgcccccacagggcccgcgggggagcccgcgtacgccccccagttttctcgtccccagccgcactccagctggtccttctccaggcagatccggaggcggccgccgatctctccggcgctctcccctccgcctaaggggcagcagggtcccgggaggcccgccgctcaggttgaacccagggcggcccaggaagcggcgctgccaccgcacgccatatggagaggtggccaggggcggaagaaaagggaaaatcgatccggagcaagcagccccgagccggggtctcagccccagcctgaagaccaccgcccccgagcacagcccacgcggggatggttgcaacagccgcagggtggcctggaccacggacccccaaggagacctgcccgccagcggcgccacctccccgcgctccggcccggcgttcccgggctccggggcaggggcgctcccgcttccgccaggcgcctgtaacccaacaccccacctcgcaacggccgcaccgcccccgccccctcccgtgcgcgcccggaaccggttcagagcccggagccgagagcccggcaggcagagcgggtcggggctgggggctgggggctgggggctgcagcgggcgggggcggctgctaacctttctctgctgcttctcccaggccgggtccaggagcaggtcccggtcccagtcctcttctggctgcatgtaatcgttggtttgctgagaatcataatggtccatgatggtgcgcgcgtgctagggtctggatttcttcctccaccttctctctgagcaacggctgctgccctggcgtggggagggagtagggctgggctgggctgggctggcggggccgggctcgctcccctgcgcccggttccgccgcggcgctgctggcgaaggctgctactggcggcgacagcggcggctgggctcgcggactgcctgcctctgggcgggcgcttggacctaatctccacgcacactgaactaggcggacacactagcgctgcgggagccgaggcgggcgggggcggggggaaggggcagagccctcccgaggctctccattggccaggccgagttgcccaaacttccccccatcgcctctcattgggaattcctggcatccgtcagccgggctgcggcgcatataggtggactgggcggccccctcccggcgcgcacacccccgcccactcccgcggtgcccgttcccccgcggctcatgtgacgccagcttaagctgaacgggaccgaagccgggagacgcctccccgagctcggggactgagtggcagcgcgcttgggaaccccaggagccgccgggattggacccgttccccgccaccgttattgcgctcccacgcgcgctccaaaccccggggtgggagggggctggagaaaggacgcgaggaaacccgaagaacattcattttctctttcccagggaacctgggtctgggcaggtcggcaccctaggaaagggggcggagtggggcaatggaaaggaatttcttgggaatttcacgactccaccgccgccccccccggccccgccccaccccaccccaccctacaaggcgcgacccggctgatccctgccctgcaggaacccggtttctcgccagcgaactgctctcagaggctaccgagcgttcccgcctcgccgcaggaactcttctagctcgccctcgggctctggggaccgctccacagcggggcctcccggaattccctgccggtctccgcgggcacacttggctggctgctgcgaccaaaactaccttcgcgtggcagggtcctccctcctcctcacagacaccccgacatcaccctcaaaactggaagggacaaccccgagtgatctaggtaaatctactccgtacccccctcccacatacacacgcctgacagatggggaaactgaggctcaaagagccgagcgcggaaagagcttctggacttcacaggccaatccggtaaccttatgcctgacaaacaaaaccttattgtcattggaggaggatggagggcgggagtgactaaatagctctaacttctgcttgccacctgccaggactcctttccctgggcttagtaagaggagagtctaaacgcgctaatgcccgggaaggagcaggcctcgcgttctggcaggctcctctatgggatcccggttccgaagaacagtagcaaataaacctctcctaggttatgcactgtcttgtgaacaacagatgtgccagtcttccaccccagcacccagcacatagtagagcttaatt

SEQ ID NO: 60764 - DNA, 393 bp, Homo sapiens
ctttttctggatgcaaaagtcaccctcatatttcccaggtggggcaggagtatccttctgagaatgctgggacagcaggaagggctcctccctgccagaggtccatgagcccttcagcatcaccagtcctccactgtagccagtaggttcctaagtcaatgcaccacccagtggtaaggaaagtcccaggtcatgagcctgtggactgctgacatcctgtccgtcctgtcctgtgcttgctgcgtcagccaggccagcttttctgaccagacctacccagccagattcagccttcggctttacctagagctcattctttcttttgggtccttctaccaccagcctctatctcagctacactcttagctagtaatcaggaagtagcatttcagc

SEQ ID NO: 60765 - DNA, 524 bp, Homo sapiens
ctgattccactgcctcttccttgccttgtggcttcacccacttccaaaccccctgattctggtgtgctgccagggatgagagccacggacttaccgggtgctcagggaataagcattgacctgaatgaagctgctgggttgacacaggcatccttccgggaggggtgagtcattcagccatgctgccagctgtgaacaattcagtctggggaaatacaaagagacgtggtccctctcagagtttccattcccacatggaaagctggtgctgggaagtggctgggcagccaggctgggcgctgggaggagtgcagggtgaggatgagagaagggctgtacccacactatgctaggccgactccaggcactggctgtgtccagctggttcaatctttccagcaaacctgcgaggagggatgtcataggtgaggaaaccaggtctgcagagttgaggtgtctggtcttgaacccacgtgtgtcctaaccatgacatggtcctcctccaggaactgtgcgggggcaga

SEQ ID NO: 60766 - DNA, 2418 bp, Homo sapiens
cctgccctggtgcatgccctccaggatgcctggcaggctgggctttagaatggggtctacagaggccagttttcatggcaatggggcgggatggtggaggtgagctccagtggttggagtggctattggcccctgttagacaccaggaatccttgggtgggagaggagatttgggtcagatcctacttcacactcacacttcatacttcacacagggcagtaatcttcccctggaaacaaggctgctcttgaggatcacacaagaactggtgaaagtcctcctgcacaagggcaagtccattccaatagagggagaattgcatgacaaaagggaggtagccaagtgttgacagtcccaggcctcgctggcagcacctctgggcttccaagggtgacatcatacctaatgagtcatcagagccacagcacccagcactgtctgacacatagtaggtgcttaatcactggttgctgttatgataatgaagccttaacgtccttatgcagaaattgaattggaagctgaatttccttttgggctgagaccaggagagctctccaggcccagggcttggtaaccagatgaaattggttcctaatgggggctctgtggaagctcagcaagtggctctatcaaattagcaggctcgatggacacgagggagcagaactcttcctgagcctggaccctgccatccctcgtccctctgaaatcagattatggagatggcagggccagggaggaaactgagctaacacaattaccagccccggccggtccatctcagcctgggaatagggcagggaagaggagagggcagaggggaagccagagcttccctcaggaaattacaaatccaagaaactgaacaggataagcctttccctgccttgctgtggggctccatcctgggattagtgagctaatctccctgctgttcttacagagcatcaattcctcctcccttggagatcagggtggtcattccttttatagctatgacgtcatcagccctggcttgaacctccctagtgaggggtgtttgttaaccaccgagaccttctattccatgactgattcaaaagcaactgactggactgtagccaagactgccactatctggtcttggatctgccgtcatctggatgttgaaccttgggaggtcttcagcccatttccccatctgtaaatgagatttatgaccccatggtaggcatgtgctcgtgttctcagcgtccatccacccctttcccactgtgaagcaagctgcaatcttccagttggcttctgattttaaagcccatcagccccacaccacgcctcttgccctcttggcctcaggagtttgggcattgccctggctgtggtggtccaggcagagccacccttcagactttcctttctgcaggaagatttgcttgccctgtccccagatgagaatgaggcagtgtgttgccctggctgatgatgttggctgccttaactcctcggaggaagccagcctgagacaaggcagatacacatggagggcagagccaagagaactgcagagaaagagacagaactctgatacattttaaggccactctatcatggaatgtttcagttatgtttacagcaaaaaatcatcattcttccatgtactttgagctgcattttctgacacttgccatcacccatcttctaataggcagagacttcttttagggttcagagtgctgggattcctgatcagagattgatttctttgtcatttctgctcagtgactacagtcttagcctgtgtgactcaccactggatgcacccactgtgtttccacaggaagggagactaggaatgtgtttgaagagttgcctcatttcccacctatgtctgtaagctaagaggagtaggaataggctatacagcagaagcctatccacagagaatggtgcaaaagaagagaagagcaagttccaacaactcagttcagggagccatacactccctttccagctgctgccagtttacgctgggtttctgtctcttgtacccaagatagctggctcagaaaatcattttattcatcttcgttttcccagcacccaacactgactggcacatagtagaattccagttaagatgaagactttacttcccattatctggacccttctaccaatttccccaaactcaatattacattggtgtttttagttgtctgtttggaggagcagattaggttttggaaaggtagcttcagcaaatacctaccaggtgtcatctatgagttaggtacactgctaggtgagttcatgtatattacttcatttactatcccgaactgctccagttaattttatgcccactttccagagagaggaactgaggctcagagaagttaggtggaattttaaagtcactcagctagccaggt

SEQ ID NO: 60767 - DNA, 988 bp, Homo sapiens
taccctagatccctacacccaagggtgcctctttttacacaacagatgggcatcatcagaagtcttttgcaaagaacccatttgtatgtcatgtgaatccctttgtcctcgttatggtttcctaagtttggatttctcataattggcttttcttaaagtgaaagccatactcctgctcaacaggctagaggtgagagtgaatcgggcagtgttgggacagactgggcaggtcactgtgagcgcctggctggcagctgggaggggaagcagggctgggagcgcctcgggctccctccagctgctgccactccgttcccctcaccagcttctggtttttgaatcctagctctgtggagcagctcctgtggctggctttatttggaagtatttagggcaaaaaaggaaccctgaatttcacaacactgagcttcatttctatttatgttctcataaacgcagagagggaggaagagatgacatttttggagaagtcaccagtactttctacctctatttgtccccgacattttgcttaaggacagtatcatggcagtggagccaaagtcaacaggtcattggacctgaaaaaagacaggattatgatgacaataacagctgctctttctacccagttcctactgggcattgtgctaggtgctttgtgtatgttttcactaatccacaggagagcattgcaaggtaagcctcgtcgcaactttgtggatgaagaaattcaaggtcagaagaagaaagtgacttggcccatgcctcaaagcatcacactgtgattaaacatcacattcttcctactacctcatgctctctgggacccccactttccaccccaccgaggccctcgtctttctctgacttcctacttctgctcttctaagacaactaagctgtgactcagagcatgaggggaagaggtttcttggcaccaggaagggactcagggctcagggagacagtttagagccagaataag

SEQ ID NO: 60768 - DNA, 679 bp, Homo sapiens
ccagtcccatggcacattgaatgctagttctgtggatccaggaagttaatggacccacctagcactttatttcttcccttgcagtcttcctaatcccgtcccccagatgtcttccctcccagcttccctagataacaaaaacttcccttatgcctaaggagtctgggtgagcccctggatatcttaggggctttattgtctttcccagctttagtaggggaactaacaaaggcagatagacttctaagctagcattctgtactttggctggaatattccacaagctcatggctttgggccataagcccaaaggagtcatttcccaacttcagtattttgaaacattagatatcctgtttccttacaacgtgaccatcttgcagataagcactgctagatcatctgcacattcgagtaaatcctgttgtgaattgaacagagtaactcctcttgcttatccaggcaatgttaagtgcagggcacagggaagtttaagctttgcctctaagcctccattctgagaagcatcttaccaccactgttctaacaatgaaatgcagttaggattcagacaggttttcgatccacgtgcactattgcatgtgagaagcatcactgagaaattcaaaattacttttaactatttgaattcatgtaatttaattccaatatgagtgct

SEQ ID NO: 60769 - DNA, 4847 bp, Homo sapiens
tgcagtggcacaatcattgctcactgcagcctcgacctcctgggctcaaatgattgccctgccttagcctcccaagtagctgggactacaggcaggcaccaccacacccagctaattttttatagtgacaggggtctcacttccattgcccaggctggtctcaaacttctgggctcaagggatcctcctgcctcagcctcccaatgtgttgggattataggaataggctacacgcctagccaggtctagagttttctaaagaaaatgtcatacttgaaaatgacatcgaacatccccaaaaagtgtaagtccaacatacacacaacctcctgcctaacataaattactaaatactgtgcaatcatttaaaatcaatttcctagccttcaaaacacttgtaggaacatgagaaaaaaggcaaagacaggtgggtttaaagatgaagaaaatgctatctatagggattaggtaatcagggcacagtggaaaaagcagtgggctcagtttctttatctgcaaaatgagagaactggactggtggctctgtaaggctcatttaattctaagattctatgattacactgtgaaggaatgttggaggctggattagacctgaaaagtccctaagctgccagcccaagtgatttgataagtcactccacaaacatgctcaagacaaggaaactcataaggccagtcttgttaaactttaatttaaaagtttcctaaactacaacaacaacaaagaaaaaacaacatgattttaaaaatgggccaaggacttgaacagacatttctccaaagaagtagaacatggccatatacaaatggccactaagcacacaaaaagatgttcaacatcactgatcattagggaaatgcaaatcaaaacaatgagataccacctcatacccatcagaatggttactatgaaaaacaaaacaaagacccagaaaatagttcccccaaaaattaaagatagaattatcatatgatccagcaattccaattctgggtatatatccaaaagcactgaaaacaagatcagagatacttgcaacctatgttcataacagcactgtttataatggccaagaggtggaatcaatcccctatgtgtccatcaacatcattcagccttaacaaggaaggaaattctgacacatgctacaacatggatcaactctgaggacatcacatcatgctaactgaaataagccagtcacaaaaagacaaatactatatgatcctactagagtagtcatgaaaattcagacacgaagtagaatggtggttgccagggcctagtggcaggggaaatggggagttgatgtttagtgggcagagagtttcagtttgagatgaagaagaagttctagagatggatagtggtgatggttacacaacaatgtaaatgtacatatatatttaatgtacacttttttttttgagacagagtttctgccgcccaggctggagtgcagtggtgcaatctcggctcactgcaacctccacctccaggattcaagcaattttcatgcctcagcctccccagcagctgggactacaggcgggcaccaccatttcctgttacgttacacgtttaaaagaggctatcaacttcatgtggaattcctgctaccctgccccccataccactgcaaactaaacaaacaaaaagtaatatttaagaagagtgagcccagtggtcttatcaggggttttactatttcatcgtgaagcatcagtgctttcctatttgttcggctattcatcagggcaaagccatgagaagggaaaacaggattctcagacagaatgctgactcagaagactgccttagaaggaagaaaactctcccagagttaaggcctgttgggtttaatatgacagctcctaaaatatgcagaaaatgcatagaatgtacaggcttcctcttagggataaaggcaactcctgatctctcttcctcttggaactcttcttccacccaccataagagaacagctagggatgatttttagggagggcgtcttgcctcgctgccatctagtaagggcatttaagtgttcacacactctggaatcacaaaactgtcctgcagaattcattatggcatttcacggttgtctgctggatgccttctagcattaaaagttggctgcctgggatactgctgactataaggacagaaataaaagtgaggtcattcctttattcattaaacaaatatttattgaatgtctaatatgtgttaggcattgttccagggaagggaaggcagagttgatcaaaagagaccctgttcctgtcccatgaagcttacattccattaatgggaagaggaaaatattacagacatatataatgtgggtagagcaaaaaaaagttaaacaaaaaataacatatatatatataatgtgtccagtggtgacaaatattacagaggaaaattaaacagcaggttagcgcatatagggagtgctgggggttggggtgttagtttccgttttacagagggtggtcacagaaggcctctttgataaaatggtattttgaatagagccctgaaggaaatgaggcagcaagttatgtggatatctgggagaagagtattccaggagagcagacagagttctggctattttaaaatataaggtagccattaagagctcttttgtcttttttttaagctttgtggaaataaagattatttcaagtgagctgagtacagagatacatttactatcataagagcagctagaaagattcctgtcttctaaagctatgctgaaaggatcatcccctcctggactcaggctggttggggccactgagtggggcgctgctgatggttagtgcttaagaggaccaccaggacactgcaggtctaggcgggccatcttacaaatatttgctgtgggatacaaggaaatataagcaagaaaacaaagaccaaacagtgccagtggcactgtttcactaccaaaggaaacaaacccaaagtacttcatcgtattaaaacttaagaaacacagtaattatttcaattaaccagaaaactgaacttcacctcaagtagtgaaattggaggcacaggtttttctctctgtcttttcttttatcttgatgatctaatttcaaatagtacctgctcattctcacccaggaaatctggtgtttggggtctgaagctgacctggagcaaaatgcttctggcctagataacagaaaggctcaacagcagatactcctatataaataggcaagctatagaaacatagtagaaaaattggttacccaaaattcctatgtttcatattttttatttccttttatgatgtatgacttcacaaccaacgttcatatttaatacactactgtgaaaaaaactaaaaattactattcaactttagaaaggcaaaaactaaataaagtgatatgaagtttgtggccaaatggggacatgaatatgaaaaattcattgccttctctaagttattttttttaacgtcattctaaacatgacgagggggaaaccacagattaaaaactcacttcatgttctgctttagtactaaaaaaaggcaataacaaatgtaagaggaaaaaataaataataagatttaaaagaatataagaaaaaataaaaaacaaaaaaaatgaaactcacttcgcacagccttttatcttatactctattgagaagaacagggcggggctccaagaggaagaaagaatacttcattctttctagataaatacttcattatctaggcaataaagtccccatttcccaaaacaccctgagttgagggggaggtaggagatccatagactacaattagatcagcgtggaagatatatttaatttttgtttggttttgtgggtaaggtgggaaatatcaatgctaaaatgaacatgagttgtgtggacacacattatccataatctttcccagctggctacaaaggttaaaagttggccacattctgattcacctcacttttcattcattctgtggtccaagagggcaagctatttactgatctgaatgtttactgatctagacattttaagtagggttaacctgaggccagtgcatggtggtgtttcatccaatccactgtcagtgtggagatactaacttgctcgagcataggaagagatcaacaactctctctcaatagatttcaggaaggaaccaccatcatgaccaccaccaagaacaacactgaaaaagattactgactggtatttgtcactgtctcactgacccaaatgtcctctgtcaatccattgacctttatagaaaatgtgtgtgtgtgtgtatgtgtgtgtttgtggtgcgtgcttacacaggatttgatcttctccaacatctgttgatgaagaaggaaacatatcaatcagttactattcattgagtactgatcaacttacccagttctctccaaaggctccttccatagtaattgattaatgattctccagtaaatggcatgcctgtctaattagctgtattgactaggacagaaaaaccagatggctcgctagcctggatcagtaacagcagagagactgctatttaaatttaaatcaaacacagctcttattttcccctgaccttctgtcagaaagggaaaaacaatgtgattgaaaactttgtgatatgctctctagatgactatttccagaaaaaggtttgctaactggcatataatacacctttgatcataccatttataaccagtgcttgccacaaataccaaccaaagcaatcagagcaaattttctttggaaatgggcaaagccgtagatttattttatttgtggtaagagaaat

SEQ ID NO: 60770 - DNA, 602 bp, Homo sapiens
gacagcccaatccatgggagattggaatcactgaggcaaaaatcatcgctgtgatggggcctgcctcttgactttgccctcaaggttagcatcagaagatgtaagctaaacacacccccttactccactcaacccctcattcctttaggcaaggtattaagagccctatgcaaaggcaatcttcaagtatgcgttggcagaaaaacaaccagtacaaattgaggcataatgtaaaaccgttaggctgcttttcacccagcagagggcgctaaacagctgtgcccaagcctctgattcaacaaagcaaacgagggctggtgaagcaagggaaagtcagttcagacgcaaaagcagctctacaattgtctcccttaatctcctagtcagttcagaaaggcagagatttattgtttagttccacagagagagactgacctgcaaataatccaagtgaagaatatttaggatcatttcagaccatttaagccagccccatgggcctggcagttggatgagaatggggtcagcctcaggagagggaccctagccccagcctctctggggcaccggaggtggagcacagggacttctcgggaaggcta

SEQ ID NO: 60771 - DNA, 1053 bp, Homo sapiens
taatgagatagatctgtgtaaaagacttggcccagtgcctgatacatattaagagctagataaatgtcagctaattattatgctatttgaactcaaacaacagctaacatcagttaagtttactctgggtcagggactatcctaagggtcttatatgtagtggctcttccaatccttttaacaaccccacgaagtaggaattcacatgaaactacagaaaagctacataatatgaaggggtacacagctaccaagagtcattgttggcatctgaatctaggtaatgtggctccagaaaccatgctccttaccatgatgcaatccagcctcgcaaatataagaggccaggcagcaaagtaaatgagtcagacttgccagattaagtgacagactgaagaatatatctgtatttttaaaagataagccaccattcagctcttgccagttgttgccatagagaaatacagactcaagattgccagatctcccaatttttggcccagggataagttaaggttgagtgatttgcccaaggtcataaaactgctgttcagtggcacttcccaaatcgaaaccagtaggcagggaagaggcgggggtacaggcaggtctggagagataggagaggtggtgtcacacaaattttgctcttcactacagaagtagctatagggataacatctacaggcattacttctgctgacaccctgtttttacctagtacccttctgctaaaagctgagtccacttatctacctattatctcatttttccatgtctctaatgaggtaagtagaacagaaacatccccattttaaacatgttaaaagtgaggtcctggcttgccttagctcctagctagaaacactttacattaaataggaagtattaagcagcagcaacaccctaactagacagctagagccccataaaatgaaatggtttctccaaaatcagatgactaatagcagtggagtttaataaagctagggttttgaaatactaaccctagacaatgtctctaattcctgatcagaaacagagaaagaaatc

SEQ ID NO: 60772 - DNA, 3378 bp, Homo sapiens
cctgggcaacagagtgataccctgtctcaaataaatacgtaaataaaggtgtgtcaagctgggcaacgtgtgactacttacaattccgttaacatgattagttcagttgtctctaaaagagtacccccaaactccctcactcggtaggtaaagtttacttgtgtctgggaacttctctgttgtaatacatcgggagttttatgaatacataaaaaacaacagcagggaaactgggagctaggtctataaagaagaggtcttcccccatttttgctcttcaaatttatttgataaaattttatacggtgctgtgggggaaggaggcttttgtctgaaagatcaggtttcttcagaggatgatctagggccaaaatctacctagtcaaagagaaaacgatctggggtacaaaagtcaagtcagttctggacagaccccagaaggtttatcataaaatgatcacagaagacctttctctttgctacccccaaattggactgtacgccccatgtcacttccgaaggttactcgcgaagacggatgctttgccaagatcccagaagtttctggcgagctgctcacggacacaaattagaaagacattcagggaccgacctgggtgaagctaagcgccacgtccagcgctgggttcccccttcatccctcccaatataggaaaagggacagaagagggcagcagccaagcaggaacgcccaatcagccgtcttcaccccccctcccctgagccaggtttcggggagccgccccctagccctcacgtaggcccattcccacccgcccctgccctgggcccgcgaccccagggaggaggggacgacggcggcgagcgcccccaccggcagcaggcgcacctccccaggggcagctgtcgccgcggcccgcggggcccgggcctccccgggagcaataggctatcgattcagctgcctgtcgctaggagccccgggagagcgaggcctacaccgcccggccggagccccggcctcgatttcgccactttccccaaaccagagggagagcccgggggcaaccaggcccgtctgggcgagagggaggagaagcagagaccacttgcaacagcggccgcgggaaacggggtgcggggcgccgggctcccgccaacaagtctcccgggggtcccccaccctaccgcctgcctcgcaagttgcgcattcaagttcaggctggtgccctttagcctccacagccctcgccactctcgaaactgtattaaaaacaagacgcagaagaggccacaaccgaacgaaaggcgatggtgctgggcctctaagagcgccgaggggggcggcccacagcgaccctaccgccccagtcacttcccctctgcagaccccgccagcccccgggtcgcagcccccggcccctcggcgtccgggtctgtcaccgcccgcttcccagccccaagaccccttttccttaacgccggcgacgggggcttcagctcccccttgcctccggcgctcctcggcctcctcaccctccacatccccaaaatgcccccagcaccttttaaagtacgcggaggaagagtttgccgtcaaactttgtagagcggtaacctcgcccccctccccgacctacactttcagggcaggcatcaggagagatcactttgcacttgggataaagcgaattaaggagctgtcaaccattttaggtcttttttatagaagacatcctctccttcccctccccctgcaatggttttaatttgacaccaaaccttcccaccgcagaagggggtagagaaagggagggggtggggacagagggcaggaggagggtgacgggggagagcgagagggggaggctgggagggtgcggggaggcgcggggaggggaagggggttgatttacctgagaccagccactggcctccattgttggagaattcaatggcattgacacagccgaagtggccgaggaggtccttcttgtagaggtttctgcagccccgcaggcgtctcctctgaaagtcctgagtgagcagggggtccccatgcaagccccgctgggacaagaagcccaccactgacctcatgctgccccccaggccagctctcctcttcatgctggaaccgccgccgccgccgctcgcgccgccgcccctccctcggcctcacgcgcggccgctgctccccccacccggccctccccccgcgctgcgatccggatggttctttaaccagccatggcaggcagagcgaggtgtgcagacactcggcggcgttcgcggcttcctgacggtcccctccctctccttccccccgaggctcctccctctgcctctccgcctcctccagcagctgatcctcagctgccgccgcgcttccgcgatgcgcggcccttccgccggctgcggggccccgagaacgcggcgtcggcgcccctcccctccgcggggggctggccggaagaacgcgggcggccggcccggagaccacgggcgccggctgctttcccagttgagccgcttcccgcctggggacctgggtggcgccgggcggagacccctctgcaccccagcgccccgcactccgcggagttgaatgcgcgtaacaatccgagtggccgccgggctttggctcgccttcctcccgcggggacccgcgggccggctgctgcccggaggccagcgcccgtacgagttcggggaaaatgcggctggagtgggggaaggtgcgggcgggggctccggccctccttcctctgctggcctctgccttgggcagtccggccctgcccgaggcgggggaaccgggaggtagggccgcacacttggaggaacgttgcctgggggttttgttcgcgcacccgccccttcccctctcccggtaaatgtttaacaccaccgctcatccccaagtccagttctctaactcttccttcctccggtcctttagttgaaaaaggctaaattgttccgtctggcagattagagtggtacatggggggaaagagaaagggataaagaagtaggaagaaaattgccaaaaccgagttgatgaagtcccgagaagcacgaggtacttctctccgttccagataaatttgcacgacacaagaagcgtgatttgaaactaacgatatatgttatttaattgggttcggtgagctcctcttaaaggtctcgagtggggagcactgaggttggacagctgttaaccagcagctgcgctccaggccagaagtggctgcacttcagtaggatgggagtcaccgcgttgaccctagtgggtgttaaatgctttggaattctaccagatacagttaaaagtccccttttcgatgtattatagtacttttcctggaagctatcctctgtcattaagtggta

SEQ ID NO: 60773 - DNA, 1581 bp, Homo sapiens
acaaaaagtattgtggttatcgctataaaagatggcataggttgggcattcacgcctgtaatcccagcactttgggaggccgagttgtgaggttcgcttgagcccaggagttcgagaccagcctaggcaatgtagggagacagtatctacaaaaaaaaaaaaaaaaaaaaaaaaggagggtacataaaattattatagtggctataggataatgtgcactgctaatgaagactacattatttaaatacagtgtctttccttctatttactgttatcgtttagcagaaaaacagtacgcaggatactaaagaaggaaaattcgatgtcccatattacatttgtgagagttctggaggtttctcccttcaaagccaaaaccaaaacacaaacataccatcccagtaacaaatgcgtcacttttctgaagaagacgttaagcccttccaattttaacagatcctttgttcaacagaggagagagactgggtaggcatcacctgccccagtagcttccgtacaaaatggcgttgcccgttcccacacgccagctgggattacgtcctccaggcctgtcgcaggaacggaagtggttacggccctagtgaatccgggtgggtgcgcgcaggcggccgcacaggttccaggtctttaacgtgagcccgctgcaggtgtgcggcccagtccgagacagcaggtaagtgaggctcagaagccggcgaagccttgcaccaggattgtgcgcggggcagggggtgcttccagtgcagactaagaggggtcgtggagcggggggatattaccgtgtacgggggtgacattgcggggcccccgctgtcccggagcgagttggccctgcccctctccccgcccctcggcgtgaccccctcgcccccgtcgcacacggcggggcggttcagcacccaggtgcgcaaggagggcctcacccctgcccgcggcctcccacgccctccttgggcctctcctttcgacccccttaccctctccctgggagactctaccagaccttcgaggctgcgtgtcccagtcagctaaaaaggaggccccgcccgcggcacctggtagctcctcgggcgctgcgggttcgacgcggcaacagctgctgttttctctcctggattcgtgtgagccgccaccctcgctaccatccctgtcctcccagaccacaccctgctctgggccttgccgggagccacctctttggcttttcacatccctgggatggatcaaaactaagaaccttaatcattatttattacaaaattgacatctgctccttaaaatacaaacaaaccaatcccccgataagcttttgatatgattccaacattcaaactcctttatataccctctcctcaaaaacacaaaattgaaattatactttattttcttagttctgttccaaggatagaaggaattgaaaggttttgttaatcataggaattaggaagtgcgggttggggcgcagcggggaagatggattaaatttggtcaagttgagcttgttttaaaaatgtatttttaaaatattctagttatagtccgtgcataaagccttgtaac

SEQ ID NO: 60774 - DNA, 1047 bp, Homo sapiens
tctcactcccaaccttagggtccgccaccacgggtaggtgggcagtgtcagcgcccgaacttggcgatacccttgcatgaagtcagcctcgcgacatctaagcgggcagggaaacaaaggcagtgtggcacagcgggggcggcggcggggctgcgggggcccttggcgctctggggacccgggcgggggcgtgcggagccgcagccgccctgcagggggcgatcctgtcgccgtctccgtccgagccccaggtgacagagctgtgcgtggccaggcaggggcacctgttgaggcgggaggctttggcacccgccgagagtgcgctcgagcgggcgcattcttccagacgggggcggttggtggacgagagcctcggacgaccctcgggaactaccagggcggggcagcctggccggatgaggaccaggaagaggagagccgagtggggcgggggtaaaggagtgaggaagcgtggcgattccgacaaggaaagatctgggcctgggggtggaggggtgaggagatccgcgggggaggtgcaaggtccggagggctgaggcttgtgtggagccgaatccgagaaacgcatccagacgcggatctgaaccccaggaatatcgggaagttcattggagagtgtcccctcatattcccatcctgccccagattccgagtcccctgcaaaggaaacattatttcagggctttgcctgaggagacctggggcgggggggtgaggttgtgggttttgtcctagataccagtctgggtgaactctctgggggcaagcctgattaggtgcactgttcccttctgggctgttctcccaggacactgtttccaaagcacttgtcgccctttggacagaaaactgataaggaaaagcctcctgtgctgaggccccagagtgttgtgatctgagcagagggacaggttggagctggaactgtccaaaccagcagtggcctccagaccccagggagcttcctctccaggagcccaggctgccacattcatactcagtggcaggaagagccctagtctcagg

SEQ ID NO: 60775 - DNA, 2215 bp, Homo sapiens
tataaatacagataagtacaggatcgagggctgagggacgcgccacacgcaatacctagaggtctcaaaaacaggaaaaaaaaaaaaaaggcagagcacaggaaaacgaaagctgaaaaaacactgcaaagcaaatacgtcctctcctggcccacatgctgggtatagctggatctgtcagcttcgagaatagttagacaaccctggcccattgttcctacagcaggctagagcatttggagggaaaaataccatatccggcagggcccggtggctcacgcctgtaatcccagcactttgggatgccgaggcgggtggattgcttgaggtcaggagttcgagaccagcctggccaacatggtgaaacgccgtctctgctaaaataaaaaaattagccgagcgaggtggcgggcgcctgtaatcccagctactagggaggctgagacaggagaattgcttcaacccaggaggcagaggttgcaggggtctgagatcccgccactgcactccagcctgggcgatagagtgagactctctatctcaaaaaacaaaacacctcccccacgtctccctctaccgagtaacaatcgggagagagttcatcctcaggcccaaggcacgccggacccgagcgagcaggcgggcgcgcaaccgcagggcggaccggggctccgaggcctagagtcaggcctggcgtccctgcggcgggaagaagggtcaatccaccgactagagtggcggggagcatcacgcggcgctgcatggggctcgtggggaggggaaaacgtatggggctggggtcgctctggaggccggggactcggactcgggtagccgcggaggcctttctcaccatcgcgccaaactctcttcgctacagcagctgccgacaccgccgccgttacacgagcttaactacaacgccgctaacagccaatcctcgcgagaggagccgccggaagtcgtcgaaagtgcaacgcaaaagagccttttggatcatagaggcacagtcacttccggcagctagagcagctactgactctgtttcagccatcttcgataaaggcaaaaaggtaagggaaagtttccaagctttaggaagaattattttttttcaagacgctgtcttccgtactttcgttattaaacatacggctcaagtgatcaccggtatagacagtgacatcagacatctttcattagccctactcaaaaatggcggcaacgtaagtatcctgggccggaggtcggttgtaacccggaagtgcctttgtaaaggagggggtggttagacaatccggaagtggatggaatgaagagatgccacttggcggccatggcagctgtagtatcggcgactccgggtcaaggcccggtcgagtgcagtaccatgggcagcaccgggtatagggcagagacagctttgtgtcaactttgctgctgaacccctaggacccatcgttagagacctgcaggactcctttcctcatcccaggctcggaggagagtttgctgggactggtgggctggtttcctgctctggggggcggatcaccttcggggccgcctcttggagacaggggcgcctagggaacgaacaggttcgcttgagtcacttacccgccgccgcctaagacattgtgccaccctcaatccgacaatcgaagaaatcgatcattcgcacattttccccattgacttttcccatctctgttaacccacgagaatctaatgactggcatctgagaacccagagcctgggaccttagattgctgtaagctttctctggtgctaatatcagcaaaaagggtctgttgccgggtacgttcaagaggaaggtgcctcgtgaacacatctgctggtgggaaggcctaaagaactggaaagcccactctcttggaaccaccacacctgtttaaagaacctaagcaccatttaaagccactggaaatttgttgtctagtggttgtgggtgaataaaggagggcagaatggatgatttcatctccattagcctgctgtctctggctatgttggtgggatgttacgtggccggaatcattcccttggctgttaatttctcagaggtaagaaattctcaattttctgtcagctgtcaggatggctgtgagatagtagttttagttgcaaagggaagctgcttccctagttaaatctcaaagctgaaggtctcattaagaaagactatctttt

SEQ ID NO: 60776 - DNA, 556 bp, Homo sapiens
catttttgtttttggagtcaatagcacttctaccttgacacattactaaatgccatccccatttctcccctgtgaccgcctgccttcatccacttgaaggcagcttcctgcacgtggctgtctagagcagggcacctgccatccaggtcactggagcagatactgtgggtcaacttcaatggtctccaaagaggggcatgggcaccctggggacacacatgatggcccctttgggccatggggaataaacatgcagaactttttcttgaagggttttcttctctaaaataattaaaagaaaatgaagtcttccttagtttcaatacatatattgacactggcaccctcacttaccctggatgccagggatgttatgtcatgatcacatgagggtttctgagtgccacaatttggaggaggaagtgacaatggcactctcccatgtcatattcagggtattgtggtgcattgtagtttacatcttgtgaaatgagtatacagattacatatctagttttaacaagttaactctcatagactgcattcatggctctaa

SEQ ID NO: 60777 - DNA, 763 bp, Homo sapiens
gtcaccgaaagggaactggaatttatctactcactcattcaacaaatatttattgagaacctacaacatatttttaaaaattctgtgatgcttccccgctgtcctcacaacttaaaaatctctgaagttgggctgtatcttaaattcttggcatcttgcaattgctgttggccatgctgcagtcttgatgaggttatcattccctgtgcaaacatcaaaagttccagcattggctgggagcagtggctcatgcctagaatcccagcactatgggaggctgaggccagtggatcactttgggtcagaagtttgagaccagcctggccaacatgatgaaactctgtctctaccaaaaatacaaaaattagttgggtgtggtggtgtgctcctgtaatcccagctacttgagaggctgaggcacaagaatcacttgagcccaggaggcagaagttgcagtaagccaagattgcgccaccgcactccagcctgggcaacagaccaaggcttggcctcaaaaaaaaaaaaaaaagaaaaaaaaaattctaacgtcagaacttgcagaatgtgtgtcaatagcttggaggaaaaaatccacaaacaatcatgaagcatgctcttagcccataagaatcaaatggtggtgtgggggaagtggtgaattcgacatgtttggcagcattcatgattataggagtcaacagcaagctaaatccacaaaattatgaagctgttttttttgttattgttgttgttggtttgagac

SEQ ID NO: 60778 - DNA, 1244 bp, Homo sapiens
atacagtgtagacattatcatctccatttaaattccttttgcacagcccccaccacccacttcagctcagtgtactcacgctcatccattctccttcctctcagtagagtcgaatttgcagaacagaggttttttcactctaaagttctacatcaggagttgataaactatgatctgtgggccagatccactgcttggtttttgtaaatcaagttttactggaacacagtcatgcttatttgtttgtatagtatctgtactgcttttgcaccacaatggctgacttgagtagtttggacagacactgtctgactcaacaaagcttgacgtatttactatcgggctctgtgcagaaacactttgccaacccctgtcctaatgactgataacagcttgggccagtcatcaatgtattgcctcatagctccaagttcaccctacagtaccttctctggggtgatgtgctgtaagcgtttgctgtaagcgttttctgcctgacagtgagcccaatatgaaggcttgccagtagggggaaccagggcaatgttgcaggaggaagggggttactcttcccaatcctgtgtgcggtgctatttgctttttcttgcccctgctgtgtggttagtggtggtacagctgtgtgggaacgtctgtggtactctgctccagttgcatctccataacagccccttggtgaccttgtagccccggcccaggcctggtgaccaccttccagtgccttcctgaggtggacaccaggtgttccaggcctcatacccgtagtggcactctggctccctcccaccagcctcagcttacctataatttcctgcttgctcaacagctgtggagtggctctgccctgggcagacttctgtgtcacccaatgggctgtaacaatacctcctctaaggaggtctgaactccaatcttttttttttttttttgtagagacaaggtcttgaactcctggcctctggtgatcctcctgcctcagcctcccaaaatgctgggataactggcatgagccactgcacccagctccccagtcttgaggagggaactctccttccaagttgtccttccttgaatactctccttcagccttggggaaccgttagcttcatacctctttgtgttaggcttctctgtttaaattgctatgtggtttctgtatcttgattggacccagaactatatacagcttaatgtgtaaccattcccaatttctgagactaaagcct

SEQ ID NO: 60779 - DNA, 1566 bp, Homo sapiens
atcacatgaaaatgaaccatcagggagggaatacagtgtccaatgaccaggagctgtgtgtgtgtgtaggtgtgtgtgtgtgtatatgtgtgtgtgtgtgtgtgtgtgtgtgtatgtgggaggggtttgtgggctggctctgtctagaaaggcctcaggccctaggctatccccagtcccttccttcctccctgcagattgtctcctagagtcactgcccagcccttgggcaaagggcaagcagcaggtcatcaggctggttggcaccaggggtgggggggatctgatattcattcatcttccactgggataccatctggagacatagcaggtggatgctccctttctaccttggcttttccttgtgtgaaaaatggggccaacacttttaccagttaacctgacctgtattagggaaagaatgttgtcaaagacatgcttcagaaaagcaggtggggctgggttgccctcttatatgtatctgctaattgggcagcctcaagtgcacattttctaaggctagggtcagagttggggtggatagggaatcatagctgctgctgtgaatagcccagatctaagccctgaactctgacctctacaaagctccctccgaccagtggcctgcagggattgcgtcaccaagcctggctctcacaggctcctgacaagctgcaagaagggttgcccctggtgatggtgcaggctcacaaattcagataacctcctgagcctagatcttcctcctctggagtgggagttgcttctcagctcctgttggcctagccctgtacagcccacccattttggactctgacattctgcggtgagggtggcctcaccttccacctcctctggggtcaaatgggtttaccttcacagggctttgaaagctgcccaaggaatcttgaatcaaaacatgaaactcatgctaatttctatatgagatcagacaagctagcaacctttcagtgcctcaacttccttataggtaaaattggggacaataatgtctcttcgttttatggggatgttgtaaaaaactagctggtatgcaaaaaagcacttttttaaaaagcaagagatatatgaggacaatttcaatctttatttgctatttttattaggggtgggaggaagcacatggtttatttgggaaagtgtgacctttggaacagacaaacaagaatgaattctgcttttgcaacatacatacttatgtggttttgatatgtcaaaaaaaaaaatctctctaagccttgcttgtaaaatggtgttaatgataattaacttggaggactgttgccaaaattagaggttacacgtatcaagtccctaccaagcacctgacatacagtaggtgctttgtaaatagtagctgtcattactactattgtatgtaataaccatagcaactgagattccatgtacttattctgaaccttttctctcactttcagagagccaaactcctctgtcctgccctgcaagcagtaaaggcacacactccttgttatattcctgggagatgaaaggaatactgtgcctcctgactcttatcatagg

SEQ ID NO: 60780 - DNA, 2618 bp, Homo sapiens
agtaggagttccttaacacttatggaggacctctgagaccgacacggtgcaaggccctggggtacaaagataaaaagccagagtcctccccatcaaggcgccacgggccctgtaaacacataaaccgaggacacactgcatgagagatcaccaataaacgatgtagccatacagtgcacaaactgctcactcagtatgtgctagaaaatagccccagaaggcaaggctcaagaggggaaatacagttaggaatgtggcaggcttctagcccgggctctgccagtcctggctctgaactgcggttttctcaaccttgagatcccttgtgtgcttttagtatgctgaaggatcactcacttcagaatgctagtgaaaatacagattcccaagtccgaccccactgaatcacaatggctggaggtcattcggggccccgaatctgcattttcacccccacccaccccccgggcagctttaatgttggcaggctaggaaccacagttcggattactgcttaacagggagataataacctgcttcagacgagctaggtcagacgagcaattcaagagctaacaaggcaacatgcgccaaaagccttgtaaacctcagggcagtacaattctttgcaaataatagtaattcaatcatgcaaataataataatagtaaacgaactggagagcgcactggaaacgccgcatagtccagctgagtcggtgccaccgccccatccactccagcgcagagggactgtctctttaaggaccccccacctccccaaccgcgtcgcttctcccttgggtacctggcccggccggcggcgcgtgcgtgcagggcctcccggcggggcggtcgcggcggcgcgacgccggcgccgttgcgtgcgcgcctggccctgcccctttcccgccccttccccgccccctcccctccgcggggcctcccccgcccgcgcggtacagctgggtcagtgacgcgggcgctgcagccgtcgctaccgccgcgttctattctccgaagccggcgaccgccccacctcctccctccctcccgcccgcttcctctgcccacagcgccggccagagcgagctagacaagggcacgcggggcctcgcctagacccgagaagactgcgggcgcgcgcaagcggcggcgtggaagctgtgagcgcccccatcccggaggtctccgccggctcccgggtgagttgtcaccgcggcccgggggcggcggggccggcattgtgccatcgacgcgctcggccggctgtcaggggcgcgggaccagcgcgcaccgcccaggagtgacgctggccggagcccgggccggcttcggcggctccccgcgcttctctgcgccggcccgctgtcacccggccgcgagccgcgccgctgggagccccgcgctggcgtggcgcggccagccggccagcagtgggggctgcgcggccggggggaccggcggctggtttgcggccgggaacttggtgacccgcggtccggggcgcgccgtcccgcgtcgctgcccgggcagcaccggaagagccagacgccgtgccgatgggtgcagaggaggtaggcagaggccctctgtgccactgtcattactgccctcagcccagcaaagctgcggggcttgcgctggggcagggctggcttagagaaggtggatttcctgaggaaatctcagagcccgcctgtgcgcaccgcggcattcgggagcccccgcgcctcggctgctctttaatctcaaaaacttctcttattaaccaggctaaactccccgaaaccagctattttctttcaaaaagtaggcacgtacatacagactttccttttttcgcttggttttgagaccccagctatgagtgtggatctgactctccctcatgggagtcgtggctggggagctgctgaagtggagaaaagttaccctggacgaatttaggagcaggagggggaggtggttatggggacagcaagacccaggagcaaagaggcgtcaaaataaagtcttgggctggttaaagggaagttggcgtctgggcaaggaggcctaaagctgttgttcccacagaattttctttcagtggcaggcgacatgctgggctttgttgctctcgctaactgggctcctgtgtgctcttccagaggtgcagtaagattactcagttcaattaggcctagggatttactcccttttttgatctacagagatgggaagtatgtctttccttcacagtagttaattcatttcttgctgttttcgttcctctggtgtaaaaacatacataggagttacgcacacacaccttttctgttttgggaattccacacccaaactgtcaccatctagtggaggctagtagagacatgtgcttggcactgacttctgagttctctgggttttgtgtttttagctagaagcatattcaaccagaaattaaaattttcctggagttgggggaggtatgtctacatctcaggaaagaaggtatttaagcagcaataatatggaaaggttcttgaggacttactgagtaccaacctttgtgctaagggctttacttttttgaactcatttaataacagacttttgatgtagatattattatcc

SEQ ID NO: 60781 - DNA, 1097 bp, Homo sapiens
ttcttgagggcagagactgtctgctatcaccactgtatccctcattgctggtgcagcgcctgggatgtggtatatacacagcaaatgttgaaggaatgaatgtccccccctaaccagggtcagcataccccagtgcgctctgggaactgttctctgaccctctccacccttaccctgcctaaggctctctctttctgagctgtgtgtgggtgctggagagccttggataatgctgagttgtttttgaagtgtgtctcattgtggcaaagcattgggtgatgttgccatccccacccccaggacactcttgcaagaattgcttccaccagggatgggcattgactttgacctggtcctcctcatctccagccctggaggaggggcaggcaagcacgtgcagattgctgtcctctgaccagctgcccagggctgggccatctgctgcttgtgacagcgggtggggtgagaggggtgagtgacctgtgcaggggagggagtgtggggcagcagcatagtcacttcagtgcactgactgcatgacagagtccagccccccttctccccacgttctatcttcttttccagtgctcagttatgctatgcttcatccaggtcttggttttgttccagctgctgccccccaccactctgctaggagaactcttgctgtgtttttgttaactctgtgtgtgtgctttgcccttttgcctatgcctccaagaatctttatgttacataagacagcagcagcaaaaaacagaaacaaaaacaaaaaatgttagaaatgaaactttggacccttgttattctctgttcagatgcaaatgatgaatctctttccatcagagtttatacctttctgtttaccaccccgttttctgtccctcctcctggagagcctttgaatggcagggatgggctgaatcactcacttggaaggactgtaatttagcttgtgcttcaaaccttgcctctttctggccttgtaaggacctaagaaagacgcaaaaaggaagtaatctacccccatcactcttggtgtgagtttgaaggttctgaactggggtggggtggggagtgtgtgtgtgtgtgtgtgt

SEQ ID NO: 60782 - DNA, 1891 bp, Homo sapiens
gagcatgaactatttctgactctgagtgagttctaggggttgtgccacccacttctttctgatcattattttcccacccttgctagtttcctcagaggcatgcacagatcagtactcagcccaaaactcaaaggggtccctctgcagatgtttggtggttttgctctttgcagctctctccttttcaattaatttgccctgcaaattctagccacttgggcctctccaaatttccaactctgttttttcaactgagtgacattgctgaactctttcaggtttctctgccctaccctatggtctggaaactctcaagggagttaagtggggcagtagtagggctcactgcgttttttcccccatttctcaaggattactgccctgtgctgcctgttgtccaatgtctgaaaaccgttattttatctggtttttcagttgtttagggaaggagaataagttgagtccccattattccaccatgactagaggtagatattcctcagctgtccctcaaatcaggtattaaccttggatgtcttttccttctgtgttcacttattgaaacatggatcatttagacaaatcttatggtaattcagccagattcacatcatgtcagtttgccaaatatttatctggcacctgctatgtccaaaagaatagtatagccagtatcttgctgaacgtggtataatctgtaactttacccatattctaatgctgcaccttctagcagaagattctgtgcatcctgacatgcatgtgacacaaatacactttgagtcttcttcctgtacctcctgatcatggtcccattaaacctgggcaaacaactgaactaactagtcagaattggtgagcaaacagcaggtgcttggctgtctgcctattcatgagtcaggcccagacagccgtgtgtggggagggaagagagcattaagtctctgtgtgtgggtgagcacctccattttacctggccttattctgtgccagatactatattcaatttcaaaaatgtgtgactcattgactctgtaattccatgaagtataggtctgttacctcaattttatatgtgacaaacagaggctcacaacagtaaagcagcatacctaggccctgtgagaagctagaggtagagtcaggatttgaattcccttttgtgtgactccagagactatgtactattcactagactacattgattgaccctgtaattttctctgtcacttccctcttctggactccagcttatcttcctgttttatctttgacacgttggctgtatatctcccatgacttttcactttgtacctcatgttgtaattatttgtgtttgtgtcttatatatatacacaatatacagtagaccgtaaactcttaagggcgtatgcttcctttacctctcaaggaatctcgtacatgtaggtgcccaatgtatgtgttgaatagtcactgagttccttaagaaagaagcatgttaggaatgagttcataagccctgtctggagggaaatatcaaattctctcattaatttatgatgtttcttcttcatcttctctgtgtttatcataatcccttttaacatattccagaatgttgcctgaattaattaattaattatggctgggcacggtggctcacacctgtaatcccagcactttggtaggctgaggctggcggatcacgaggtcaagagatcgagaccatcctggccaacatggtgaaaccctgtctcttctagaaatagaaaaattagctgggcttgggggcgtgtgcctgtagtcccagctactcgggaggctgaggcaggagaatcgcttgaagcaggaagttgcagtgagccaagattatgccactgcactccagccttgcgacagagtgagactc

SEQ ID NO: 60783 - DNA, 1670 bp, Homo sapiens
tggcgcacacctgtacttctagctaatcgggtggctgaggcgtgagaatcacttgaacccgagaggcagaggttgccgtgagccgagattgcgccactgcaccccagcctgagcgacagagcatctcaggaaaaaaaaaataaagaatcaggatatcaggatttggaaccagagaagctcttcaagtagagatcgtctggtccagccctgcattttcagatgatgatgacaataataatgatagatggtgatgaatataatagtaactactatttttgatgacttactaagtcacaggcactatgctatgtactttatatatatttccccatataatacttaaaatatccctgtgagataggcattattaagtaccattttatagaaaggaaatagaggtccggaaagcttggataactacattgaggtaaagagaatgctgaagtagctatcacgcagagagatgaagcagcctccttgttcaaggtcaagttttccagttaaaggagaaacacaagtagaatccaagtctcttgaccttgagctcagttgagcacctattttttgttttgacctgagaactcactttctctggtcatttttgtcttatttctcactatccttttaatttcagtaaaattgaatgaaatagagggaaggatggtttagagttggggtttttggtgagtttttaaagtttatttttaaataggcagctttcccagactgactgggaatgtagcagaaggcctgagaaccaggaagtgacacagacctgtttataccatcccactcccaggcctttggaaaacgatccacagagatggtaaaaagtaaacataactgcatcagccagctctctagggtttgctatttttgacctggaggaggtgtttcctgcatagctgtaagtactcggaataccaaaatttagctcctaaacattctttgagtgaaggtatatagacagacagacattttttgttaccagacagcagcattcagtgactgtaggcagacaaaattaagttttttttccctcctctctctgccatccttttggtgagttgttcttccatttctttatctttctttgtaagtagcactgtgcatgcaaaacactgtcctgggagctctaaatttgtgcatgggttcaaggtccaactcaaagctttctctttcacttctccctactcccatcagaagtctttgttcctgtgtcctctgtgttctcatagcactttttaaaaaaccttctttggggccctagtaacaatttgacagtgttatatagataaacataattcctctcacgtaagttgtgaattccttgagagtaagaattgaactgtgccccaattcatctctatgatcacccaagccttgcatagaagacagccagtaaatattagctgaattgcagtatagtcattggagacacagagccctaagaagtcagctttagcaaatcggcttcccggactttatttgccaactgggtattgaagcctgttccactcagccctgatgggaaccaagcagagagatgtgatgacacatgagatatatctctagggtctaggaaccaattacagtcgcctctgccaagcatctgttttgctacctggccaaaatttcaggatttatataatcttttccctcttgtttta

SEQ ID NO: 60784 - DNA, 923 bp, Homo sapiens
ccaggccatattcttctccaaacaggaattatagcagcttttgtccatatgtatcccacccctatgttatactttgtaggtcttggggtaaatttttttctggtggcatcagaaaaaatcaagaagcttccttgtagaagggccagccagaatttgaatgcagactctagtacttagaatccaggtgacctcagtccattactaaatttttcagagcctcagttttttctgaacaaatcaagttttataccaccttcttcctagggtggaagaatttaataggataacacttttaaagtaccagtgcagtgcctggtgataaatgttaattctcttccttacttgtatccttttggcaacagagatcattaaatttgttttaaatttgattgtgtgtttcttgaggccctgctgtgtatgcctgggactgtacttggcattaggagttaccattagctggtaggattggaaatgaaaccacaattttggcctttgtacccaagagtccaaccctgttttaaactctaagccagactcctaagtcagttatcacctgctcatcagctttccttctgagctgccgtaaacagccatctgggcctttcctgagaggaccagtcatctcctctgggagatgaggaattctgagaggggagagcaaacacatattttagctcaggtaggtgatatggtgaaggagatgagaacaagaagtgacaatggctgatgaggaaaaaataagcattctctgctttttcttaagcctttaactgccactgtcaagggaaacagtaacacttgctaatacacgtggaatagcctggctccctacctccattgtcatcccaccatctggaggtggaggtaggagacagctgtgggctctgctctataggtcactgtactgacctatagcagtggta

SEQ ID NO: 60785 - DNA, 1056 bp, Homo sapiens
tatggaggctgcggtgggaggatcacctgagcccaggagatcgaggctgcagagagcagtgtttgcgccactgcactccagcctaggcgccagagtgacaccctgtctcaaaacaagcaaacaaaaaaccaaaacaaaactaatgatgcaaaattttaaaattgaaaaaaaaagaagaaaatacagggtccacgaagaggagtggatccaccccgtcttctttccctgctgccatgccctttggcaggcagccgtccccacgcccggaaagccccagcttcggctcagcccacagcacaagggcatatccttctgcctgcgcaggccagggtgctcgacgccctcgcggtccgcctgcgcgcccccacgcaggctcagcagcgcccgggcctgcagcagaggccggaggaagcgccacgggcggctcagacctgaggccgcaagggcgcgccgggcgggcagggcggagggtccgatttcctccctctgaacggaaaaaaagccactttccctgggaagaactcgaagaagttggatgtctgatcttcaccttggatttgtggtctcggcccgcgggcgactcaccccacccaccaggatcccacgaagccgggccggctcagcccgctggcgccatctagtgtcgaatgaggaggcggccctctgcggctggaggggacgcttgggcgtgtggtgagttagcttccaggttatgcaaagcgggggtcagcggagagtcgggggtgtgacagccagggcctccagcgggtaggggatgcgacctaggagtctatgagaaactgactcctgcttggactctgtattctgtttcctagagctgccgtaacaaattaccactaactgggtggcttaaggcagcagaggtgtcttctctcacagttctggaggccagaagtctgaaatcaaggcgtgggcagggccgtgccccctccgcaggctctagagagagtctttcctggcctctttctagcttttggcggctgcccgcacttcttgttgtgcgtttgcttacagatgcctcactccagtctctgt

SEQ ID NO: 60786 - DNA, 1025 bp, Homo sapiens
aaagagaaaatgcggggaggaagggagaaaaacaacaacaaacaaaagaacaatcctggaaaaattgagataggccacattactctaaagttcatacattagtaggcaggtatgaaagtggcttatgtatgtaaataggttactgttattttcttctgaggtttgagttgtttagcttcagttcacagggctttaagaaagcacagctgagttttcagtgactccaaattgggcaaaatggaaaaaaaagaaaaaacctgaaaatattattttgaagacttgtagccaagaaaaattagaatttggttcaaactgtagaaaataataaaaattgaaaaaacattaggcaagactagaatctaacaacaggtgtactatagttttgaaaaaatttttctccagtttcccatttttactaaagataaatcatgctagaactggtttgctttattacacttggcctaattatttgcctacagtgcagcgagaataattattttttacacaggcttttaaattggctttggtggaacttcctccataagaggaatctcaggtaagactttttaaagccaagcccagccatagatatgtgtcatcaaatacctgtgagttgagtgaatttcctctcctgttgacattccaagataaacctggggcttctgtgcctgtcagaaagtgacatactttatttaccacaggtcacaaaccctgtacatggactgtgtacacaaaatatgagggcagtttcccaaaggctttattgactgtataagtcaagtttgattccttaaaggaaagcacaccattccagtcaaagccttggtataataactagtttctccaattgtgtcctgttacaaatgagaacagattcttattacacttatgcaaataaccatattaccataagttaaaaatactcacaaatagtttccaaattctggagaaattatgtagagagaaacaaatatgctccaaattttgttcatagaattatactgaactgttaaaagctgtcaata

SEQ ID NO: 60787 - DNA, 761 bp, Homo sapiens
gaagtggggaaagatttttatagggtttggagcttatgctgaatgatttgggaatggaacaaggggaagcaggagcagctctggattgagtgtcacagtgaagcaaggacagtttggcagttgtgtttctcaggaatatttgttcaggaggcaggagaaaccagggtatcacttgcatctgtggtttgcattatgttgctattggacagttctagtttagataatcattgctagactagagaccagggagaaaaaaaagaatgtctggttaaagattatcagagcccttctagaattggtgaaaggtcattaggctcctcccaaggccacacgtagctggatgaggctcctagaaagggatcttaaaaccattaaagtctcttaaaaatttgctcagttgttttgttgggaatgcaaagttcttccaggaagaaacagctatttataccaaccacagcgctctactccagcttatgtttgggacagtttctttcaaagactttagagaatctgattccatgggtttaaggaaggcctggaaattgcattgttaagcagaccttccaatgggtccaactctggtgggtctctgagtttgagaatcagtgactttgaaagtgcttctataggcttggtgacccactgcaaagaacgaaagaggtgcccaagagagggcatgaaatggccctttaagaaaagccatctgcttcacagaatgtcatctgatgagggaagtcagggagaggatttaatgtgaggcc

SEQ ID NO: 60788 - DNA, 2352 bp, Homo sapiens
cactttgggaggccgagacgggccgatcacgaggtcaggagatcgagaccatcccggctaacacggtgaaaccccgtctctactaaaaatacaaaaaaattagccggtgtggtggcgggcgcctgtagtcgcagctactcgggaggctgaggcagaagaatggcgtgaacccgggaggcggagcccagatcgcgccactgcactccagcctgggcgacagagcaagactgtctcaaaaaaaacaacaaaaaacagcttgaaacctcttccagccactctcccagagtgacggacatgcagaaatctgtattccagcctcaattcaagacagccttctagctgcagtcccattttcaacatttcatcagtgaaaatcctttcatttaaaaaatacttcagtgccttagtcttctcaccacaacaaaaccacacagctgtggcatggttgaaaaaagaactcgaacatctaggagctccctgctttgagggcaaatttaaattgcaagcagcaagagctaaggaaaggccaggtatttctgcaaagctaagtttctcctaattagtaatcttctgggtgtctaagaaaaactttagatacaagaagggttgccacttttctcaggagactcttctgggagagatgatgatgaaccgaacgccaaggacttagcaggggcgaacgacgtcaacagatgtccctccagactccggcaccagccggccgagcccaaacgagttctcgcccccgaccccacccaccgcgggagcagggttcggtcactcgcagtgtcagagaggcccacatcctcctaaatttccggccctcccaaaacttccgtcttccctaggtccaacggggtggacccaaggcccaggggcgtccccggaagtgacgtaggacgcgccctccattttgtggagcgccagagctgctaagtgcgtcagttgtggagtggcgtagacgagttaagtcctggtctgcgtggaggtcgacgactccgtcgcagactacggacctgtctgggtctcagccgccaaagaccccgtccggtaggtgagtggctcactttgagggcaagccttctcggatcgaggcttcttcatggccgctcagatcgtgagcggccggggctgctctctttgcggaggatggcgtctaatgagcgcagttgattcgaggtgggcgctggggcacgtctcccttttggcatactgtttgaggggtactgaggtgaaagggcggtcactgttcgggtcgtttttacacagcggttgtgcgcccgtccctgccagtcttaatgtcttcatctcctggacacgtagaatagtgggccgggatctccctgactttgctggcgatgcggctgggccttttgtagggcggccgcagtgacccccgagaagggggttgctgggaggagaagggaagagggaatttggcacgcgcagctctgctgcctttgattccaccgccgccattttgtggccgcagagcgcccgcccgctgctgttggcgcaggcgcggtcgaggcgtcgcgagattctggcttccacccgctgtgacgcgcccgcgaggccgccattgggctggctttgcggagggcgcgggcggctccgcccgcacttctcggcctttcctaactgcggcagatgggagggggccggagagcccggagagtgtgcggctgcgcagttggaaaggtggcagtgggcgttgcggttgctgcggtctgggcccagtagcggaccgtgttgggagggagctgggttttcattttgtctgcaggtaacctggcctcattagaggctctgttggcaatctcgttcataacatcactgtgtaaacattttatgccgttgatgtttttgattgtttaatcaggcgtttctctgtgacagtcattgctattatctcgattgaattactttctaataggaagtactagccggacatcatgagtggctgtcgggtattcatcgggagactaaatccagcggccagggagaaggacgtggaaagattcttcaagggatatggacggataagagatattgatctgaaaagaggctttggttttgtggtaagtatttagaactgggtgaattatctgctaagtaggtagagttttgataagcagttgttttcgatcttgagtccgggtggaatatttgccttcagaaaatgttacccagccttatgtctgaattttattgaggctgaaaacaactttaacttgccggctcactggaaccccactcccagtggctccttgattaggtttgactgtatggcagtgtcgttaagatactcttcccattctgtctcctgatttcagtgctcttaatgtgttg

SEQ ID NO: 60789 - DNA, 689 bp, Homo sapiens
atactttgaaactcatgagaacttgtcatacatatttgtctcaaataccttgattacagatagggattttatccattttaggatcaattctggaaattgccaagagtcatttgaaacaaagctggtaaacaaggtggatgatcaagcccggaaatacggttttaaacccaaaatgatgtctaataataaggggacaaacctactttcttgagtgacctgcaaattgaatatgaaggaagttcccaaaagaactttcagaaatatcttgggtgataacaacatcattggaaactatgcaggtctactctgaatgaaattatagggtttttcattgtgcaacataggatgcaacctttcaaagtgcatgtgcactccatgcactttgtactttccagtgtgcattttagagaattgcgtcctccaaaatgataaacaggtatgtgtaaatttaagactgtcccttttatctcctgagtaaagaaatacttaacttttctcaaacttaccatgttattttgtaatagttacatgtgttggttcattttttggttcattcacatgtgttgcattttatatttcctagtaacattttaaaaaagtaaaatatgtatagcaaagtttgccattttaatcacttttgagtgtacagttcagtggcattaagtacattcataatgtcctaacgacat

SEQ ID NO: 60790 - DNA, 6106 bp, Homo sapiens
tgtagatagtaaaagatttcttaaagaaacccctaaaaaacataaaccacaaaggaaaaatattggcaaatttgactaaattaacataagcaatctatcagacattattatcaaagtgtaaagaccagctccaaactgtgaatagactgttgcaacatatataaaacaataactttagaaattaattttcaaaacccacccaaaccacaatcccatagaaaaacaggcaaaggacccaatgtttccagaagaggacacatgaatggccaacgcacacgtggaaatgtggtaggcctcccatgaaatcaaatttaaaactactgcgatctgcttcactgttttcatttggaaaaaattaaaaagtctgacaattccaaatatagatgaaggcacagagaaacagggatcttcagacactgctagggaacgtgtgaagtgaacaatgaccttggagacctcttaaagatgtgtgactcccacgacccagcagtcctgcttcaattgcatatgccctcatgtgggcagagggacacacacaagtctgttcacagaagcgagacgtaaaatccacatgaatctgacaacaggagaatggataaatgcaagcaaactgcacagcagttcagatacatgaggtagctattttctttacatgcctatttctcaaaaaaaaaaaaaaaaagcaagctgttaggtgatgtggacagtataatactgttcgtacaaaattaaaagacgtaaatcccgcagtctatcttgtttatgaatatatacgtatataatagttgaaaagggtcggtggaaatgctgaacaccaaattcccagggatgctccctttggcaagtggtggagggtaatgagattgggaataggaatacagggggtttcaatgctactgttgatcttctcttagggaaaagccaaacacaacttgtgtgtttgttctggtgacctagagcagaggaatcatgcttactttggcttgtgtgtcaggagttttggagtttggacttggtgtgccttgtcagcttgggtatgcaggagccatgttccctgatccccaggtacttcctccacttgcacaggtcctggggtcaggtcagggacatccatctcctagcctgctggcatccgtgactgttgtgatccttggtttaccccaagggacagggacgggcaaggactttttcagactctagattcctgagattgtaggcctggttgcctttcagggggaaaggggcacatttgttttttttatttttccctcctgcttaagttccaagagcacagcatagaccttgcttttggacatctgtgtaccccatttaagggactcgttcgagtgtccgtcaatgcacagattggaggcagaagctgagggagctgtgaggggcctcaacacagtctctatgaagtggaaaacttctgggaccccagtggcttccatcttgtcctggttgagcttcctacatcatggctgggagacctgtggaagtgcttgggttgtgtccaagcccattgtccccatggccattggctctgggctctgctgtgagtccgatggtggcagggggagcagatgaacttggggcagcaaggatggtcaaaagaggccagttcctgctggcatagcactctcttctctgtgcctgacaagccatactcacttcaactgtgagggcgttttctcttgcctgtttgtcacctacattttttgaaacttgtctagtggccttccttgaggagggagctgccgtccctggctgcattgaggggtctgcttggtggcctggcctcctgggatggcaggctgtccccagactgactccacctatgaggcagagtgagtggagggagacacagtttcccacaaactctgggaaacctctggcaagtctctgacctcagcctcttcatgtgtaaaatgggatctgtgtcttacaattccttccagttctaaatgggatgtagagtattgtgcttatctcaaactggggcctttgggctacagctggccctttgacatgtattgtttggtttgcacatttaaaaaaatggaatgagttgctgatttcacataaaatggatattttaccttcttttgaaaagtgggaagctctggctcccacacaatacttgctgctgagacacgggtgtctgcccatgcctttgaggctgtctggccattttgtttgtggaaatgctgacctggaagatatttcagtaaaagcacaggttccggagccacccagacctggagccaatgtattgacctctctaagattcagtttccttacctctaaatgctacttgttacatgctgtcccccagggtgctgtaggaggatcacatatacttatccaggtaaggtgtttagcactgtgcctggctgtttcttataatcgttgtcattattataatgcatgtaacaagttgtcccaaattggaatgggatttgaagtctggcagcacatgaaggtagatgaccagattcccattccgacagtgggatctgagacatggtttaatgtgcatgggagggttgtttgttgggaaggagttttatggcagaaggtggctgtcccagcagagcttatctcttgtgggggtctaggtaaaaatgacagtcatcaggggtctggacaaggaggttgagcaggagagcatgaggggtcatgttcttgagtcaccagaggctctgcctgggtggggcctagagccacagcaatgtaggcattgtggcagaggcctcaatagtggccactggcgatggggctgggacatctggccactcacacttaaaagcacagttgccttccacgtcccctgctctgcttcttccacagaaacacaaagccctcagagtaccccttcgcaggcccctgacttctgcatccctcatacaccaaaattcagatatactctaggattcttgggacacacaggctgccatgagccttgtccagaagccagatccaagaccaagggcttgctttgtagcagagaggatgtggattagacagaggaaagcattttctcacagtgaggtagttgaacattgaaatacctttccgtgggtgatggcacaagccaaatgccctctttgtgcctctcttcccattgactactaaagtgagggctgaatcatatggaaaaagagcccagagcttctcagatggcagatcctgttaaaccccaactctcattcactctcacttttttatttcctttttttttttttttttgagagagagacagggtctcactctgttgcccaggctggagtgcagtggtgtgatcatgactcactgtagccttgaactcgtaggctcaaagatcctctcatctcagcctcccaagtagctgggactacaggcatgtgccactatgcctggctaattaaatatatatgtatatatttgtagacacagggttttgctatgttgcccaggttggtcttaaactcctggtctcaagtgatcttcctgccttggcctcccaaagtgctgggattataggtgtgagccaccgtgcccagccattctcacttttttcatttaaaaaatctgtcccagtgtcattttgcatcactaggaggggcttcttgactgggttagttttcctaggaaagtttggctaggagtagggtgctgacagacacaagcagatggactttctgggttctgctgctatacctggcattgaatagcgtctccacggaggactaaaccaggggggactggcttgagactgaggtttcactgaaagcaagagcttctgctagtgagttttctttagcttcagcacaggctgctggagctggagcaggtctgaagtagctcctctggcagatgttcaagactagagtctccccagtttggaaggatgagcatcaaccagcccctgtgtgctgcgtctccaggagcgagcccttgctgatttctgcttataatgctttgggcagggggttagggggtgctgctgtcttccccttatcagggtggctgagatggggctggcctatctggagtgggtgctgggaaactctaggatctccctggttgtgcctttgcatggaaatgtcattgcatctgatggggaatgagggactttaaagagaaaacatcttagatgaccaggtaattgggaggaccttttggaaattcttgcccgctttgcaggaatttgaggtgctcatttggttccaagtcaccttgatctccctgatgatgtttggaacgaatcacactaccttttaaatctctgggctcaaagcaggcaacttgtccactgttgtaggtggatgcagttctccagaggttcctttggctttaatcagtgctcctttaagacaatccttgagacacctctggaagcaaggagatcaccacgagcttcctggaccagtatggtccctttggcttggtgcctaaaccagacgtaccccaactcctgcccccatcccagcataagctcttggcaataaatgccagacttcccctgccctagcctccacccagcctgcattcactccttttcctggctttagcccagctcttcccctcaattgtgacatatctaatgtagctcctgtcccaggctgttccctcctcacccccaggcctacctgaggttcatgtcccccttcatggccagactgaagacattggacaggttccctccaggtgagcagccacagaccaagatggccagtgcctcaatgttcttcagccggaagaccttgcccagcacaaaggccgtgaggggcatgatgccatactgtgccaccagggcgatggccagccctttaggcttccataagtgagccttgatcttgctgaactccatggtgcagcccagcgagagcatgatgaagaacaacatgaacaccaggatgacgctcagtgccaggtctgtggggcgcttgccaaagttgggtggcagggtgaagttgaatggggcagacgcgttgtgggcctccatcctcctgtgaggcagtggaagaccactccttgttctccggctgactccgtttcttgtgcagttcttgctggatgccttctttaatcacctctcaggacagagagtttctggacaaaagctctgggcaaatagaagggttatgcaactatctgagctatttctctggctgtcgccccaaagaggaacagcccagaaccttatctgcctgccctagctctcccaagctccctgacctctgctggattcctgggtgctacttgtactcctcccttgtcactttgctgcttctgggcttatttctcccctttgccctccactgagtgtgcctcatgggcattcattcagttactggggacctgcccagggcccacctgaatctaggtccagcccatctccttccctgcagctccttttcccagctccgctcttgattccttagtttcttggttgggggaaggtgccctccccatgtccagtgggttatcatttgtccccagaacccatgagagtgaaaggagctgggtgttgcctttggttcctagatacaggtagcatagtccaagggggtgtgggacaggcaatgtcactggcctccaggaggggatgtgtccatgacccttttcctgggagctgagaggatgccagtatcctccctgcctgttctggggaaatgtttgttttatccccaaactgggactgtatgagtcccagggaggaatactggtggtggctgctccacactacctggaatgcttaccatcagagggaataaccagctgggatggtgggtgggctctcaggaagcttggaggctctttccccgaaaagcaacctgagagaaccctggctgtggagattgctttgtgcccgaggaggcccattgcttgcaaaacttgctgagaaggaagcaggaatgcagtcttttcttcctgacttcctgattgctttacttttgcactgggcctgtgtgtttcaggctgggagccaggcttggggcgtggagcagaagcagagagaggtgggcatgccaggggcggggccacctagtgtgtgaggttatcctaggccttgctctttccatctatccccactgcagaggtgggacaagggaggaggggt

SEQ ID NO: 60791 - DNA, 773 bp, Homo sapiens
ctgagagctgataggtcaggtggatgctggcgagaaaaggcagtggcaagtggagggcattaggcctttcttgggccataattggctgatttgatgattatgagcgaggactggggaatggggaaggtcattgctgctggctgccgctacctgccacgtgtcagtgatgttttctgggtgcatgggtttcctgacccttgttgggttgctttactgctttttaaaacttccaaaggactcaccctgccttcttgggaacaactatcagtgtttgatgacttttgctgagggagctctttcaattatcttcctggaatcacgccagttgtgattactgccacactctctatggttccaccactcagcctggaaaatggtgaggctggtggagtggaggtcagctaccctctgaagcacttctttcccccttgcaactttaagcaaacattccatggccagaagggagcaaagtctgtaggagggcagagagcagcaggactcacccggtcagaagtcctttaaaacattgatttctcttcagcttgaacaaaacaatatgagttgcattatggaggaggcagaaaatgaagataagcacaaaaaagaaaacaaaaatctcaccacgcagagataagtgctattcatggtttagtctgactgtttacaactgggttcctagatgtcctggggttctatggaggtgcttctaagacgccttaaatacttagaatttaaccaaagaatggccgggtgcagtggctcatgcctgtaat

SEQ ID NO: 60792 - DNA, 584 bp, Homo sapiens
ccacccgacatccattcacctgcttcaggtgacagcccccaattttttggtgcatccattgctccctcacaatcaggccccaacttagagctgaagcaggtggcaggtggaagccagtcagggcttctcattcctctggctccagtaattgagtatgtggctcagccagaagcagtgaggcacacagagtctggcagaaattctgggaaagacacggcggctccctcctgctgaactctaaccagagaggatgtagtggtgaaggtgctgctgccgggctgctgtcacatggagcctgaggcagcacggaggcaggcagagtcaaacaatgaggtcatctgaactcgaagtccaaccacccttgaagcccctggctttttttttttaaagaaactttttgttttataatagttttagatttacaagaaattgtgaaaatattagagttcccagactccatacccactttctcctaatatatatatatatatatatatatatattttttttttttttttttttttttgagacagagtcttgctctgtcactcagaatggagtacagtggtgtgatctcagctcac

SEQ ID NO: 60793 - DNA, 1524 bp, Homo sapiens
aacgcggttcaggctggccatgaagccgcgtgtgtttgtccagctcggacgtgtggccctgccgggtgtaggggggacacccatgcctccaacacgcataagggggtgactgtatgggggtcgtggggcgccctcccccaaggggcacagctagagcaaagcagagaaaggagggggtgaaggtggggtgggggctgggtggaagggaagggttggggaacctttcaaaaatggaaaccagatgagccgttcaaagaggagcaaattctccacggcgcgctcctttgttgcgagcgtgtgaggcggcggcagctgcgtgcctcgccccccagcccacagcccgatgaggcggacacggataactgcattagatgcactcagctcttttcaataaaacgcccttgttggaggcacaatagggggaacagggcagcaaccccaggccgggccgggggcgccctgccctcctcccggagagcgcagagcgcactcatttttccgggctctgctaattgacgtttggccgctgcgtggttcaaaagaaaaggccgaactcaagtccacttccaccggaaaccaggcggcccctcccctgccgccccgccatggctgggtctctgggggcgcagccagggaccacagtgcagctggccgcaggtggcgcggaggctgctgtgactcagaatagaaggtgtcctgaaggcttctcccaaaaaggctccgtgcgcaggcttctagtttctgtttgaggagacaggtggcagcagcaagagcaaagggcaatttcagggctggaagacttcatcagtgattacccaaatgccacattcttttagtgattctagtaaagatagcctagaacattcttttaagttaaaaaaaaaaaaaaggaagattactatttcttgaacctctccagtgagttgctttaactgtgagctaggtgtttaccatccctggtttacagatgtggaaaccaggacttagattactggccctctaaaatcgcacagctaggaagtggtagagctggaatttgagcccaggtctgtttaactttaaagcagggtttttcaaccttggcactattgacattttagcctggataattctttgttgtggggcctgtcctgtgccttgtgggatgtttgtagcatccctggcgctatcatccagataggatcaccaaaaatgtggccagacattgccaaatgttccctggggagcaaatttgccccctgttggaaccactgttttaaagcatccctgtcatgctacatgtgctggcatactcatctttgctgggctcaggaatttaatcttttgggaaaaccaattggccatgtgggattcttttcttaaagttcggccccacatggttcatgtgggtgaggcaggagaagagttggctgcatcagacaaggtcaacctctgtgtaccagcacctgagtatctgtggagtacttgaggcattttaaactgggtatctgtctgtctacatttcttgggcctcattgggttggg

SEQ ID NO: 60794 - DNA, 1657 bp, Homo sapiens
aagaaacttgtcaattttactttttttgcttggatcagaagattaagcctggcagagagatactgtttgggactagtggttctctggaattcctaaccttctctgggcttgggaggagttgggagaagaaaatgcatcatctgaatgatggccatggttacaacaggcctcatatgccaaccagagggaaagaaaatacttgctgagcagagtaactggaaagcagttgctcatagtttgaactaaactacatgattgaaatccagaataatgtagatttttggaccagtgaacacttggaaataagctttctggctggaaagcagcatttgatgttagggatggaaagggctattgcaatgctttttccctgggcactttgtgctgccagatactcagggccatctgaagcatatttacttactccagcagatttctcaatagttccagcaacaggaaggagttgaccagcttgataggtgaatgtagccaggtggtagagtcaggaaaagcctgtcacactgctgagcccgatggtaacagttccatcctgttgagcccctggagggtgaacacttaggtggacacatggatattgatgtcagtgctgcacagggcacggtactggacaagtgtcacaagtccagctgggcaaactccaggatgccaggtcacaagggctgtttccaggaagggctgacccctgatgtttacatccttttcctctgaagctcagtggagctcaccagtctcagttcaccttgtaggccactgaagaaattcccaattagcacagaggaacgtccaaccctatgggatttgagactggagattgcagccatcacatgatggaagcagaattagactccaaaaaccttgccttgagtctcggcgtctcggctctgtcatttgccagccaaatgaggccaggcaagtcacaatctcatggagtattcacttatctacctgtaaagtaggaatgtctgacctatttcagaagattgttctgaggataaaatgagatgaggcatttgtcctgtcctcttcaaatgccatattgtgatacttttcacttaattattttaagggctttaaagactccatctcctttacttttgacaacatctcatggcaggggatactatttttatccccattttacagagagaaaaacgggaccctggatgagtcaagtgacttcttcaagcttataccactaggtggcagactcaggatttgaaccctgctgtacagctccagagtctgtctgaccaaagcactcattcccagtggaggaaaagatagaccattcttttagaagtgcgcttcatttttgtttggagaaccacaagtactttgttattgttccagcatccagtctgagctttcttgtcagagggcaatggggagaggggaagtcgtttaagcagggaatggtgagttccggtttgctgcttaaaaggatcactggcttctaaatagcgaatagacacactggctgccgtgtggaggttggatggggccagtgtggagagagggcaaaactgaattcaggagtcaggtgcgaagctgtttcatggaatccaggagagaagccctgagggagcagagctaatcttaggacctctcagaccagatagggagggggagtgtggca

SEQ ID NO: 60795 - DNA, 1979 bp, Homo sapiens
ccattccccactccaacgccacagcccaccctgtgcgggtcatccagcgacttcccagttactcttcccagatgcagcagggaggcagatctctcggcgccttcgtgtcacagcattctcatctgataaatggggctaggagtattttccctgcctacttcaccaggatgttgggacaatcacgagcttgagctaagaaatatacatgcttaaggcattattattagccaggtgagccttctggtgggtgccggctgctggggctctctcaggcttcctcgggcaggagtgccgggagaaagttactctttatcccactctctcccggggcctactcccgcggagctcctcggcggggggttgaccacgagtggctcctcttgcccctctcccattggctttcacctgccagagggtcggcttcaacaggcctcttggcccgtcaatcaggcccgccgtgctccgccccgcccctcccgggggtttataacgggaattcccatggcccgggctcaggcgtccaacctgctgccgcctgggccccgccgagcggagctagcgccgcgcgcagagcacacgctcgcgctccagctcccctcctgcgcggttcatgactgtgtcccctgaccgcagcctctgcgagcccccgccgcaggaccacggcccgctccccgccgccgcgagggccccgagcgaaggaaggaagggaggcgcgctgtgcgccccgcggagcccgcgaaccccgctcgctgccggctgcccagcctggctggcaccatgctgcccgcgcgctgcgcccgcctgctcacgccccacttgctgctggtgttggtgcagctgtcccctgctcgcggccaccgcaccacaggccccagggtaagtgcgcccccagctttgcgcccacctgcggagggaggggaggttgcttcccccctcatccctgagggaaggaggagggggaagagagatgtcagagacctgttgtcctctgtctactaccaggtcccctgcgggcttggtgaagttgctgaaatattttttttctcccattggagccaccaccactctccctttcttgacccaccatccctcccctgtccccgaactgtcactggtgggttttctttcccaatctcttctctcctgcattttgctcaagaccctcagaggtgcctcctgcgtcggagagaagctcgctctccgctcatgcagggcttccctgtggtctcacgctggcgcccggtccagcgcgctggagttgttggcaggcggcgggggttgggacgggggcgggtgcagctctgcctggagagttttaggttacccgcgagccacacaaggaccttgtgttgttgttttaaaaagcgatcactgctcgtaaaacccacagcagataattttaatgtcacctcctgccgggcaggcactggaagagggtcagaggtggggtactgtaaagaggtgggaggggagagttgcgcaatgttcaggggtctctccccctgggttcagtgctgggaggttgaattactcgttgaaccttggtctgattggagtttctgaacgacatgaaacctgccaattctgtgcacaggacagattgtccagggcattgtaaaatctcctggaaccgacagtattgtgttcatttctggtctagattatccccgcaacaccccccaccaattggtctaataaagaatttcactgccttgaaacatgtactattaaacgacctagtggttcttttgaccaaacttaatccaggcaatctctggccaagcatcagtttatgtcagggcaattgactcttaactggcagcctgagagtccatgtgaaagtagctaggatctttgtgaaaacaaggttggctcaaccaactcgtgctttctttcttgaacatccttgggcctggccctttaccacctgttcagattgcaggttgtttattcatagcttttactatatgagaatcatc

SEQ ID NO: 60796 - DNA, 4327 bp, Homo sapiens
gatgtcctgtccaatgccaaaattcttaggccttttctcaaacaggggattcaccactttcttagcctcctgcttcttcacgacagctggggccggagccaccttctttcccttggccttctttcctttcggcatcttgggcagcgggaggagagagctcctttgaacaacttctatatctggtccacttgtattctaacttgtattaatcctcctgcagtgagcatcttaatatcaggccagcatcttcctcttctttgcaccaagttggccctttagcatttcatgcatgatctgttttgttaaatgaacaaatctgcaagccccttgaggacagaatagagacctcattcatcagggtgcttgtcacattgtaaagcattctgtaaatatatattgaaatgaagtggactgcataatgatgtccaacctgaacccctgctgttgtttaaatctgaaattggttacttacaaactggcttttccatttttgagtttttgttctttgtttaaaaataagtgtgtttggtagttacaggaaggctgggggaagagagactcaacatgcgaatttgaatagggaaactggctttatagctcctccccagtccttttttgtatcttgcatttgccaagagtgaaacagcttctaaactgtttccttccatttgactagcccatcccagcatctggtccagggtgggtccttgtgtctgcttagatgcttttcctattatctgtgcccctgacaagaatccttcttttccatatggggggatttagctgaagtgctactgaagtgttaggccaaggaccagatttaaacattttggtagagctgacatgtgaaatttatagaaacaaaaggacaggaagaggaaacaatcatcttagaatctctaggaaatgcaatcaaaatagaaaagaattgatatgatctaattatcttctgaagttgagtattcacatttcttatggcccagcaattccactccggctctatgtgcccaggagaaactcatgtcctgtgcaactatgtttataatatcacatgcctggaaagagcccagatgctcatcagtgggagggcagatgagtaaactgtgatgaattcacagtgtaaaattatactcagccaaaacaagtgaacaacagtgacatgcaaaaatatggataaatcttggcaatatgatattaagtgaaagaaaattaccaaaagatacagtaacttataaataactaaaattaaaaaaaagtttttaggactacatacagctacaacaaaatgctatgaaaagcatagtaaagtaatgatggatacagattcagggtgaagttagggtgaggcagggggataggatgggtaaaaccatatggttggtgtgggttggtgttgatactctacctttttgggggagagggaggatgggctaaaggcatttgtccattattcaagatctaatagctgataaaaaagtgagccctgcataaaccaatgctgagtgtatcatgagccaaagattaaaattaattcaattctttgcatgtgaggtcaaacaaaaagtcccagagtaagggactcctttcttgccaccttctgcttcctccccacctttcaagatgtgcatgtggctctatctaaaataaccccactggggagtgattttggcttctagacccagagcagacccaggccctggcataaacgtctgcatcaggtggcctaagggctcatttgtaaagctaagctggcagtgggcagtcttcccttttccttgctcagggtgattcaccctgcagagtggaagtgttcatgagctgatgcatgggtcagaaactttatttgccagtggggcctgtgggtggaggtagtgtctggactaggggaaggcctgtttctagtttgatgcctgtctttattccaacctcccctcaccgccttttgcaggagctgggggtgggatgcatggtcctgcttagcaggtacagggcaccctttctctctgggccacatagagatttattgtttaggcagccaagtcctggtattgctgctagtggtagaggatgtcagtgtggagggccccctccttccatgtttggggaggacaaaggttgagttgcggatgagaaataaatcggagctgcttgtgaggccgccaaacagggttagatttgtacagtatgtgctctgcatgggtcatgagtcactgagaggttcagagattggattgccatgaatcacttccaactgtccccatgaagaccccaaagcaacataggtgactatagggttttcttttgcatccaacatcattcggaattcagttgctagatcacaaaataatcttacctttggccacatctaagcttgttaggtatggagctctgcatacttcctggacgtcaccttggttgatttcagcatcctttttttgagtcagaatggggcagcctctctaagacaggaaaggtagctctcatctcagtagagcctttcccaccaccagggagcactgggactgagcaaagttccatgaggtcaggcataatgtgttttgaaacctgacaaattatctagaggtttgaacaactacgcctcgcctccttaaaatctattttacactacggtgttgattggattctataagataagggctgaaagccttttttttttcttttaaagtattgacagtggagaaaaattggacctgcttcccagagtggtttatttttagaactagatatgcattctaaggcagtgctgggagttttaaataatttttatggatgttcattatgcatttattcttgaaacttctgccaaacccctggggagaggacacattgtagataacaaataaaagagtgagatagggagtgttataaaaggacgtgtattactccttcacttcctccttccaaagtgccagtgacctgcttaaaaacgatgatgccagtgacttctcttcatccacagaactttccacaaggatggacatgttttataactgcactgtccaatattagccacatgtggctattgaatatttgaaatgtggttagtacactgaggacctgaattttaaattaaattaaattaatgtaaatatgaatgttaatagccacatgtggttggtggctatcatattggacagtgctggactctgaccagtgtgtccaaccttaccttctgctggatacccccatgtgccctagacctcagcagggctgaaccactgtacttcctgatctctccttccttccccatttctgtctgtcagaatcctgcccatcattcaaaaggttcagatgttacctccacgcagtccttctagattggtcccaggaagaattctctcagcttcctttaagcaaagaatcatttgcttacccctatgatggcatgtgtcaccatcttccctgtatcccagccaaccaggagcagcctcagcataggctcagaggcagacagacttaagtgtgagtctggctctgctgttgggcacccgggctagtaatctggcctcttaggtcctctgttccctgatttgtccaatggaggtcacagcacctcttttccagggtggtggggaaaatggatgatgtgccttgtattagctttctattgctgccatgacaaatgaacacaaacttagtgacttaaacaacacaaatttctacagatcagaagtctgacatggctcttaatgggctaaaaaaatcagcaggactgagttcctttctggagctctaggagagaatctattttcttgccttttccagcctctagaatctgcctgcattcctcggcttgtggccccttccacctttaaagctagcaatcattggccaaatctttcctcatgctgccagggtctctctggttctgaattttctgtgtccctctttgcagtttaaggactcttgtgattacactgggcccacccagataattcaaactaatctccttattttaagtttagctgattagaacaaacctccttgccctgtaacatagcattattaggattagcacatggacatctttgtggggagcgtgattctgcctaccacattcattaagggcctggtacagtgcctggctcatagaaagtgctttacaattgaagccatcattatgaccagcatctgttagtttctttcctttagggtaggagcctcttaatgatgaagtcgcttaattttctttatagactccatcctgcccgaaagcaggtgcttaataaatgtttattgaataatagaattttcaataaaggtagatatgtctttccttataaagatatattggatagtaaaaagt

SEQ ID NO: 60797 - DNA, 978 bp, Homo sapiens
caagggtctctcaatcagtttgcctaatcccatgtttgagggaaatctgaccttaagggttataaatgtctggactaatagaaaaagatcctcgtagtcaaatacaggtttttatccttaaaagaaagatctttgctctgccctggaactgaaagggttagtacatggaagaaccattctttctctccctcaggagtgggtttgctttggttttccactgatctcccgttcctgcctgtagaatttgacatggttttatttacttttccttggcccagtttgggtcaacaggatttctctcctgctcagaacagcctcacagttgtgcgaagtcagacgtgagcctggggcctgggcagcggtcatcaatccttgtctgagcgacgcagtggggattttcagcttgagatggtctgacagcaccagcgccaccgccagtcccacacgggccaagctatttcttctccccttttgcctgtgacttcgaaagcattttgtgtgtgtgtttgagggtatgcacacatgcatgctcacatgtgtgcatgtatgtgcttttgtgtttggtgatctgaagccaggcatcaatcagtacagcaggatctcaaatgacagtggaaatagcaatgaaaggaagcacacgagttaaacacacacagccccaacagaattcgatgatatagcaagactgggatttcctcttctgtttgttttagcctgcacttgctcagcttcattcccagggcttagtgctgtaagggagtggatttcctcaagtgctgtggataaagcatttcttcctctgttatctcccttgtcagtgtaaatctctccactgtgtaagtggaaatgaagatgagcctgtgtgtatgccataggatttcacccaaattaaacaggcacttaaatgacattttccttcatgataatcctatgacactgaaatataccagttctccattttgttattacagagccatg

SEQ ID NO: 60798 - DNA, 954 bp, Homo sapiens
agccctacagaacacagtgtcagctgctctgtccagcactcagcagagccctgaagcataataggtgctcagtgagtctttgccaaatggatggttctttttccttcctccctgcctctcctatcctctcttttcctttctacgagtttgctgtgaccatctcacatcttggattgtctggcatcccattttcccatatcctatctgtttgtttgtgacttaggctttgcttcctggtttcaaaaatgcagccccagtggagatatgtccacatgtcagtctttgcaactagatcagcttgtaggggcagggcctgtgttcttgtttattttcataatcctcaatgtacctagcatggtggcttgtattaaagggggtgggcagagaaatcgccagaaacttctctgagtgcctatgggggtgtctgatgtgcccttcaaagcaaacattctttggaattttttctttagttttgtgtttattgtttttatcttgtttgtttgctgagttgtaatttgcgtggagtacaattgaccccttttaggtgtacacttttatgaattttaacaaatttatatagttgtgtaaccactaccataatcaagatctagaatatttccatcgcccacaaacatgttctcctgcttctctccttatctccagtccctggtaatcattaatccaatttctgtcactttggtttggccttttccaggatgtcacataatggaattatatagtatataactttttgagtctggcttctttcatttggaataatgctttatttttatttttttggaaatttgatgacttgggccttaaccctcactttatgtgcacctgcttttctgaaagattgagaaggagcatgggtttggggctgcagacagactctgtgtggattgggagcatgtaggttaacttggccccgtttgcgttcttattagggtc

SEQ ID NO: 60799 - DNA, 1168 bp, Homo sapiens
catatacgcctgtctctgtcttctgttggttctctttctctgcagaaccctgagtgacacagaccttctctgtctactgtctgctctctccacccgtctccccctttgacctccacttcctccatcaccatgaggttcccatgttctttctccaaaaagcttacagcatagctggtctaccaataactgctgactgcatgtgcagaaggtgctttggtgttgggttacccaggatctcagcttttctgtctgctcctttcttcagcagttcctcctctggaaggcagtgtctagaaagaaaggccagcccaaagatctgaaactcaaatcttgtaatgtttatgttttttggccatttttgctttaaacaaaaaaagaagagaaaggaaaaagatgatgaagaagaaaaggtttctgggataaaagactaaactctgggctaaaatcaagtctggggattagctgaggatttaggttatccatgctttcctttgttcctaatcaccatgagtaattgagaggcacagaggcctgggctagtcctagccgacagagctgtgctccaggcttatcctctcttggtgggatgtgaaagaacccgtgccctgggcctggagacagggttcatgtttgtctggtccaacctcttttttcctctcctgtctcctgccctgcccactcctgctggactttggtccttctttgctatgtgcaattagtggtggacagggttgtgtgccttctggtgacaaggggtggacatggtttcacttctatctgagtatttaccatgtgccagactaggtactggacagtttgcttggatgttttttctattgtgtttcttctcttaggcagtcagaggtttgtcagtgaaactttaaccactcattgccaagtgcggaatgacctgactctcacttcttctctgcaccatctgagggacaggattataggggcgggcgtgtgagtgtgtatgtgtggccatgcatttccatgcccccctggacagccctgattgttccctctccccttccgtttatggcttccaggtgtttacagatggtcctggcccattctcatagatacctggccagaccttctaatcttgtcatctttccctgagtgttcctgagcacagattattttagaatagtgtgtgttcact

SEQ ID NO: 60800 - DNA, 495 bp, Homo sapiens
aaaaggctttatttcctagaaagcttagttcgtttccctggcctgggtgctctccacttccatccaaggacatctgaggtgctgccaatgatgaacctagcaggggacccggaagtggccagtgtggtactgcacctagagaggggactcccttgctaaaggtgtttgtgcactctctgtaattcttcctcttacctccacccacatgtctgccccacgggatgcccctccctgactgccattcccttcctctcactggaatgtagggaatgttgctggcagagctttgggggcagggcttggggaagagcctattccatggcttcaggctgttgaaagtgggtacattgccatcatccagatgacaagacgccaggctgaaatgtagccataggtggggagcagacccccagtggagtttttcagcctgtaccccagttttgtggggtatctattctggctgaggctgcaggtctggtttgcagagctggagaa

SEQ ID NO: 60801 - DNA, 616 bp, Homo sapiens
gcagctcttccagaaaggtccctgatgccctggttttcactcatacatgccaccgaacatctggcccatccctagagtagtgagaaggcctgcagttggctggaattccatcattctctggtcattgtctccatgaatccaagactttctgctcagcagttatagatgggtcagcaagacctgggtaggccagctttgactgacacaatacctcgagggtgtttttcctgctgctgctcatgagagaagctggagctgaactttcccctgtattgatcccctgggtcaggtgagagtcatttattcctgctcagacaccccagggacaagctggaaagagcataggactgtgagtaattaggaagcatctgggcagcttgtcaagatgagcccacggttgtcgaaaaaggaggaccaaacaggccccattcttcagagagagagagagagacagagagctttcctttctatccgaaggcttccaatgtccaggcccaggcccaacagtcttgattatgttgctcagtgttgctctcggaagtccacttctagactccagagcaactgtgtttcctattcagtctcccttttttccttcccttttttccatccccca

SEQ ID NO: 60802 - DNA, 777 bp, Homo sapiens
gtagggacaacaagagagagagtgtgtcgactgggtcggtagattggttggtcacctggagcacagcctttaaaatcattccccgtcattcctggcacatgcagtccagtcccaccatggtggctttcaacaggaccatggtggattgtgttgttctcaggtaataaatggtcttagtttttcttgtcttcttggtcatagttgttcttacgggtgagggggcagggagccaggaggcaaggaaaggtgggcaaaggaagggagccagaaggacagaaggggaggagaaggcagaaggcgggtaatggtgaggaggagtcattttagaccttgccaacagttagtaggaagtgagtcaggcagcacattccactgggtgtcacatgataacagtggcatttctctgggcaacaggtaaactactaacccactgggaataacccagggtcttcccacaacagggaatatgtcaacagaacccagggcttgtgtcccttctttatgtctatactcacttccattgtgagtttcagaaagaaaattttaaaagaaaagtatttatgaggaaggaaaaccagacagaggaagagaagagagagagagagagagagtgagagagaaagagaaagagagagagagagagaagaaagggaggtagaattgtgtgatctttctcattctttatctcatagggcttcagtggtgggaactaaaataaatatgtattaaccacaatattacataggaatcctttactatttacagctgatgcatttc

SEQ ID NO: 60803 - DNA, 1759 bp, Homo sapiens
tggagggattagcatgcacgtgtgtgtgtgtgtgtgtgtgtgtgtatgtttgtgtctttgtgtcagtatttctgtgaaggaggcagtccaagggaccagcaggaggatttgtagctggtgtgtgtgtgtgtgtgtgtatgtttgtgttttgtgtcagtatgtctgtgaagcaggcagtccaagggaccagcaggaggatttgattattactgcctagagacatctgacgcaggggagccctggtttcttgtggttgatatacctgggcaaggaaaagggagctgagaagcaatcagagaaagttgagcaaaaaggatgaaggcaggaggaaatagctgaaagaagacagaagagcccagctcagacacaggtgattagcagttcctcagggttcctttgggaaccctgagggttcctgagcagttcctttggggtccagggtttgtgaggctctgctggactacaggcatcagccacccctgagggaggcagctctgcacaaagaagatacagtagctggaggagccagttcatccagccaggaatcttctggcctcacagcatctaaagggaaaatgcagagagaacaagtcaggattcttgattatgggactccctgtggagggcaaggccctagaaaaagttggacatcatctaagagttctggcttcaaaactcagtattgtgtggtctttgtgcaccctcttgtggagtgagcagtgactcctgaaggcttgcccagaccaggatcatttccgttgggagtatcatagaccaaagtccatcctcaaaatctggtctccactctcacaaaaggaatgcacacaaatgtcatccaactgaaagtcctatttcagaaaccttttgtccactctccttctattattctagtaatgattacagtaggctaaacattgtttaagtttcaaaaggcagaaaaccagaaattttttttaaaaaaacagtattatatgaagcaatgcttgtagaacaatctatcatctgtaagcagactattttccttgtactgatcaatactactcctttattacctatcttatctttcctgtctctccactgagttccatgtatacctcacacagtcacacaactgttgacacagtcaaaactgcagttcgcagatgaggcaactggaactcaaagaggttatgtaatttgtgtaagattacacagtttgtaagtgacaaagtccagagtccaattcagggctaccagtttacatggttttccactgaacttcactgtttgcagaaaagagatatacaaaaacatttagatagatccttccacccacacagaatttattgctactaattgaacagactactgagtaatgttattaaaatattgttttaggtgtgacattttgataagaacttttttttttttttgagacagtcttgctctgtcacccaggctggagtacagtggggaaatctcggctcaccacagcctccgcctcccaggttcaagcgattctcctacctcagtctctatggtacccaccaccaaaccgggctgtgtggttttgttttgttttgtttgtttggtgtgtttttgggtttgtttgtttttgtttttgagacaaaatcttgttcttgtcgcccaggctggagtgcaatggcatgatctcggctcactgcaacctccgcctcctgggttcaagcgattctcctgcctcagcctcccaggtagctgggattacgggcacccagctaccaccacacccagctaattt

SEQ ID NO: 60804 - DNA, 1784 bp, Homo sapiens
aactgtgtaaaatatccattacctttctaagatcacttctttcctttagtctgcttaaatggaaaagctggtaatttcatctgcgccaacattcatacaaaataaaaatatagtctgtatttaaaagcagcttttgttcatatgctttaattatttcatttactaacacatcaaggcttgctgaagcaaaataactggcccgtaatcaaaaagcaaataagagtcatctggatttcaactctggttgtcttaagccagcctcagcctgcatttcatgacatccttagggaactcagtgtggatatggatgaaaccatataaacacggaagctgttttcaacgtgctttagaaattataacacagcaatcattctggctacaatgtggcaggcaccgtactcaacactttattcacaaggtgttattagttcatcacaactctaagtattaagctaattcacaaactagaaagatgaaacagaaagataccaggaattcgtgcagttaaatggaatacatctagtcccaatgatccacagtatcgtcaaaacatagctaagttgggggcgaggaagcaagcttagtaatcatccaaacttggcttaaagtgtggttctgactgaattctctgagcttcaatttacttaactgtgaatcaagggtagtaacaatgaccgcgttcgacgatgggaaagacgccacgctcacaagcagacagatcctagtacacctgaaatccaaccgggagtgggggacagcggcggggaagtgggggtgtggaaaagactggtggaagagcttttaggaaagctctcaccccgtcgctagctccttcctagcccgagtgccagcccttaacttcacattttacagattccctcccaggtcttgatcctgccaaggaggagggtcccaccccttgcggaagatcctcctcactccactcaccaacatggggactccatagccgagagtcttgttcttgcgaaaagcacgcatcaccgcgggtgcaaacatgagtgaactcttccatcggctcagaactccaagcgggcctagcgcagactcccaaatctcagcagctcacgctctcaccaagacgagtacgtccttaactcacttccttttccttggttatttggtgctcggtccttagtgaatggtttccgctaggcaaaagcaatcgagccatcgtaacatacttgtgcgtccgcccagaaatgtgggcgtcagcgtttttggttccgtaacgtcggcgtgcaattgggatttagagatttgaatcggtttacgatcaccaccaaattgatctggaaaccagtacttcccacgttctgggtcctaactaacgtctgcttagaacactcccttaggcacatagccactcgataaaatcagctaaggaaaaaagtattttgaggccgggcgcggtggcctgggtgggtggcctgtaatcccagcactttgggaggccgaggccggtagatcacctgaggtcaggagttctagatcagcctggtcaacatggtaaaaccccgtctctattaaaaaaaaaaaatacaaaaattagccgggcgtggtggcaggcgcctgtaatcccagctactggggggccgaggcaggagaatcgcttgaacccgggaggcggaggttgcaatgagcagagatcgcgccatcgcactccagcctggggaacaagagcgagacttcgtctcaaaaagaaaaaagaaaaaaaagtattttgaagctggtactccagtctttatggctatttgtgggatgag

SEQ ID NO: 60805 - DNA, 1713 bp, Homo sapiens
tttactgtgtcagtttagctatttatccattaacagtaacaatagtaggaaacacatactgtttaccataggtcaagcaatgttgtaaacattttacatggattaactcatttcattctcacaacactatgaagtatatttataaccatccccattttagagatgataaactaaggcttacatcagttaagttagccaataagtatcaagaatcagtaagaggttagatacaagatttagacccagatactgtaattccaaagctaaagagctcttaattgatcaactaaatagttgtaaaggaaagtaaacaaagtcgaaagcaggcagaatgtagtaatgtcaagagcccggtttaatgaagagccacagtgggggaagaggatagcagtttggctgctcaaaatcacatgaggtgttcataaaaaataaataaataaataaaataaatctgtattaaatccaaatccctgcagatgggagataagatttaactttttattttcttttttttttttttttttaaagccctgggtaattttgtggcggaaccaagtttgggaacctgtgtaataaaagatttctaagggctcttcctgctttaacattctagttgacattgtaaatgaagttcccagaaatcaaaggagcgagggagggatcctagctgcaggaaaacggctatgcattcagagtccacaccgtttatgctcccattttactaaacggtccctcatagggggagggatagaacaggcaacggaaagaaggatgtggtatccacgataagcaggctaaaaaagcaggcttttaaaaaggcttttctagcacgatttgcacaaagaaccccttcttgactatatatatttgtgttcatccaactggattttgaggtggattcctcagacccgtatctggctaatgatggatttcaatatattttctctaagcaccccgaagcgttgcacgaaacctctaggttgtggcctgcccgccccgaggccaggtgaatccggctcagcagcagaggtgtctgcaattacaccctctaatcccctactgtcagatatgaccctttccgcacatacctgagggccctctggtaagattgatctcttcctcagtgaccaaataatccactcttccgttcatgttttacagctcgtctggcttcctacttgggtcagctggagtgcagcacaggtgaaggtgaatcaatctcggcgctgcgcccacagcacagcggtttcggtttcagcagcctcgagacccggaaaaggaagcccgaaggactcggagcactgggaatgctgggaatcgtggttcctaccgccaatggattgcagtttctcaccggttcccaaagccaagcatgaggtgagcaaggggcaagttaccattctaatttgccattggaagcaagtgggaagggggtggctagtaaaagtaagggacctaaataaattgatattgtcgagaaaaaaaattttaaaaaaatctcctgccatcctagaaaatctccacaaatgtagaaaagaaaaaaaaggtgtattattctgtaagcatcgaaccagaccggaatgggtgttacaggcaatccactaatgagattgcaaagagagacaaaaatctcacattttatgtagccaaagcacacgcatcttctcatgtaagacgagttaacatggtttggtattcaatttttggtagttc

SEQ ID NO: 60806 - DNA, 1119 bp, Homo sapiens
tacaggcgtgagccactgcgcctggcctccactgtattctgaacactttgggtgttatgttgtgaggccctagatcttattaaattttttcttttatcaggatccttatgatgttgcaccagtagggtaagaatggcattactttgctgttgctaaacgctggcatctttccaggttctccacttaatttctgttgatatgccaggggtaaagggcagctcacatctgctgttcaaatggaaaagttcatcctcctctctaggcctctgttgacgccatcttagctgggaagttgaaagatgcctcattacagctgtccaagtgacctccactgacattgtgaaataggagccagtgtttgttttgtgttgctatgaagcaacctgagactgggtaatttataaagaaaagtggtttatttggctcatggttctgcaggctgtacaagaagcctagtgcttgtatctgctcctggcgaggttctcaggaggcttacaatcatgactgaaggcaaagggcaaaggggagccagtgtgtcacatggtgagagaggaaaaaagtgagagagggaggaggtgccaggctcttttaaacaaccagatctcacatgaactcatagaggaataactcattcattaccatgaggacaccaccaatgtattcatgaaggactcacccccatgctccaaacgtgtcccactaggccccacctctaacactggggattatattttaacatcagacttggagggtaaaaacatccaaactatatcattttttcccaggaccccaaatttcatgttttttttttcacattgcaaaacacaattatcccttttcagtagtcccctaaagtctgaattcattttagcatcaattcaattaaaagtccaaagtccaaagtctcatctgatactcaaggcaggtttcttccacctatgtgcctgtaggattaaatggtggcacaggcatttgtcaaacattttcattccaaaagggataaattggccaaaagaaaatggggcaacaggccccatgcaagtctgaagcccagcagggcagacattaaaccttaaagctttaaaataatccttgactccatgtcctgtattcagccca

SEQ ID NO: 60807 - DNA, 1566 bp, Homo sapiens
agctgtgaaaaaaatacgacccctgcccataataattgctggacgttcgatgtaaagtattatcgactcaaaaaaaaagaaaatatctgggattcatgctcagggacccgtgtggcgcggtctaaagaattaggcagccaccatgccaagtcccaagagatgaatcaaatcaagttggcttattaccccattcccttctctgcctaaacgccattccttcactccaatagaatagccctaatgttgttgcagagatacgtgtgtagaacaaaactccagctctgaaagctcaaaacccagagcttcttccaaccccttctctccgacgcttccaagagacgctccaagaactcagaaaaaaaaaaaaactcgtcaacgtttcgctagatcacagccttgggttgtccacaaaaaccactcaaaaaagcttgagacttcacacaaaggaacctaaaccttgaaaccgcgagctataacatcccaaactggtccacagacaatcaagagacaaaatatagcaatacagtatacctcggatatccaccgccgccataattccgagagcgtttacaggttctctttccggcgcaaagtaaacgtaagcctaggccgccggaagcagcgggttgaagagagtgcgcatgggtgaggagggacgtagagcggaagagggggcggggcgggcaggagagaggcagggggtggaggtgcgggtgggaggggaggagacgcgagggggcggaaagcgggagaggcgcgggaggcgggaaacgtggggtggggtggggtggggtggggtaggggaatgggaggggacgggacgcagaaagattggtgcaggggagcagggaaagactagaagagggatgggccaaagaaggagaacgggagggcggattactgggaaaaaaattagaagacttagaggacagaaagaccgagtggagtcccgccccacgcccaccactgatggaagaattctgccttgatcgtctgtgatcgtcaagaaaacaaattctgatgctgtagagttgtgcttgggagtgtctcttaattttaaaagctccccgggtgtatccactgagctatcagatttaggaacgatggtcatttatatttttctccctgcctcaggtattgggatgggacaggacttaagaatttgggagtcattggcttttatgtgactaaatccattaaaaatctaaaccaattaaagaagcctctgagaaaaatttcacaacacaggaaatgcttctgaagtgaaatattaataagattaagagaaagggaatacccctgggtcccagagtaatgagcaaatgtctgcattccaagtagtctggagtaggtagcaaggctccaaagagggaatgattctgtgtacggggaagctacagaaagcctcagattctcaagcttcagtgtggctctgtaaaagcaaaacgatacagaaatatgcaaacaacacacagatactaggaagaggatgccaaaatctgaaggagggatgagggcgggtgcctacatcttctccaaaacttaggtactgtgaagactccccaa

SEQ ID NO: 60808 - DNA, 712 bp, Homo sapiens
ggaaggaaggagagagaaagagaaaagaaagaaagaaagagagagaagaaggaaggaaatgaaagaaagaaagaaagaaagaaagaagggaagggaagaagggaagggaagggaagaagggaagggaagggaaagagagagagaaataaattgtattaccagaacccattaagaggtagactcaaggaggaagggcccccttgttataatagtgataaaaaaatcgaccgctgccaaaaccttggtgccaaagcagggaggaagtgggaaaaaaatgttaatctgtcttctctcatcctccagtctcatgttggtgcctcccttttgccaaagctgacgctcaataagagggcaaagagcccagttggtgcagaggtcaacctcccaggacataaagccaacagaaaaaacagggaatggacagcagagggtggcacagtgttggagcatctttggattggagagaatcaaagatcatccaggatgatcatccaggcattctgcagagatcctctttattgcaggaatagcaaaaactctaagggaggcaaaaagcatgacctttggggtaaggcacacctgcttccaagctgtgtgaccttggtcaaattaccgaacctctgaaaacctcaggcttcttctaagttgagcctcagaataacaacctcatgggtatgggtgaaattaagtgatatacacagaggtgtggaga

SEQ ID NO: 60809 - DNA, 2000 bp, Homo sapiens
cctacccagccttcaaggtcctcaaatgctatttcctccataaagcctcctgatctaccactactcaaaaagctacctctccctccccccctcagggctgcacagcacttttcgttcctccccaatgacaggcaccatctgtacctggtccagcgactctaccggtgggtggtgtatcttcgcctgtagactgggagtttcttgaggtcaggggagtgacttgcctatctttgcctcttagccttagcagatccccagtagacagctgacactcagaaccgaccaaaagaaggaaggaatgggacctcctgaggaagggcacagaactgtcctgtaaatggaaactagaccggacgcacgccaagccgatgacccacagtaacaggtgttctccatctctgatgtctgtgattcatcctgcacagctgcgcgcacacagcacacgcatacacaggctcccagaatacggcgccccacacgctgtaccgcccgtcgcgttctggacgccccggcgaccacacacaccgagacacacctcagcgacaacctggatccacaaaaaggaggccctgcccccttaaaaaatactaacaccttactgcaaagaactagcagctacggcttgcgcctgcgccccttgttccctgccgcaccttttcttgtagttaagaaatctatttctgcacgcatttcgtcgccgccgccccccatccctacacgcacgcacacacacacacacacacgcacacacacacactccccttcccctacacctacccccctccccccacctcctttcagactaggcgcgcctcgcagagcgggattgaatgggaaagagcggggccgtctttgtcattaatcctcccctccttcgggcaagccaagcttcttccgggtcagcgaccatccccgccaccccactcggggccacggtccccccgcagcgctagtcccgggcccgcgagcaccggcccccgccacccgcaggttgcggagggaggagggcgggagcgggcggcgcggagccgggaggcgggggaggggccggcgtccgaggcggcggcggcggcggctggagcagcctctggcagcagcggggagaatgggagtgcggggcgccagaccgccgcggggtgtcacggccgccacgaagcctgcgaggcgcggggccggcgcccgcggcttttaaacccgggaaggcgcggcggcggcggcggcggcgggcagatcgcggcgcgcaccaggcgccggggcggcggccgaatggagagaaagggctcggcggccggggccaaggggaacccgagcccgcccgcggccggagaggggcagcggccaccgccgccgctgtgcgtcccgggcggcggcggaggagccccagcgaggggccaggtcggggcggcggccgagccggccgagctcatccgacgagcgcacgagttcaaaagccaaggggcgcagtgctacaaggacaagaaattccgtgaagccataggcaaataccaccgggcgttgctggagctgaaggggctgctgccgccccccggggaacgggagcgggactcgcgcccggcctccccggctggggccctgaagcccggccgcctctcggaggagcagagcaagacggtggaagccatcgagatcgactgttacaacagcctggcaggtgagccgcgccgcgccccccgcgccgcggtccccgttcttcggcccggtccctccgcggaccactgcggcgctcccgcggtgcagattctcctgctgtgactgtgttgctctggggagaacccgggagggaggcgctttggaaaaagtgtgactttcaggattatgcctttcaaaggccataatcatctcttgtcccttcgctagcatacatcgtaaatctcacctagaaatgactggaaggggacccagctggcctggctatggctgctgctgctactgctcaccagtggacctgggtccaaaatgcggaagcagcgcccggggtg

SEQ ID NO: 60810 - DNA, 4798 bp, Homo sapiens
tgccaagtgactacatctttgaatccaagtatatccacagagtccaggccaggctcccttgccagtcagtccaaaacctacctttccaactcaacagcctcctctgctcatgatgactaatggtggagatgtttactcccttcagggaaggtctcaccccagtgccatgacttgggaagacccacatcagaacataatccaatctctatgccaaaaaaaaaaaaaaaaaaaatccacacagcaggaatctaattgttgtcttacagaagccctcttgatcactgctttaccagtctgattgtcctccccaacaaaagatacctgaccttgattaatagggagaaaggaaatccttttgaagaggagccagtgaaacaattttgtccttctattaagtggcaaacatttgtatttagaggctgttagatctgaaaggacggtagagatcatttagtgaaatttagatctctcattttgcagatgcccagaaagggaaagtaattttcataatgttggctagtggcaaagatgggactagaatccagctcttatgattcctagttcagtgctctttaaaataccgatgcatgccaaatggcagagtatagagactgtgacatgataatccttaattcaaacagagaccaggtcaccacaacatggagaaacacttctcgacaatcaggaaatccaaaatgacaataaagatctcccagatgaacggctctaccttgcaaatgtggacagcagagagaaaatattgcagaaattccctgctgctggtcacctctgcctcctggatgccacttacattgatctgtttttcctgcttatccgcctccactctggtcacctgagtcaccatcacttcatcatccaaatccactcttgcctcacaatgaagtcccagatcttctacgtggaccagaagggtctctgtgtcatggtttctttcttttccagcttcaccttttttacccttccctctggttctctgctccaacctggcatgcatggcttcccaaactttctgaaataggccattcccctctcgctccctctctttcttggctctgccttgaaaagtcacagtttcacccagatcagtgattcccaaacatgggtgattttaccaccaccccaccacccagggaatacttggccatttccagagacattttttggttgtcacaagtggcatgtagtgagaagaggctaggggagctgctaagcatcctgcaaggctcaagacatcctcatgtaacaaaaaatcatctagtccaaaatgtcaatagtgctgaggctgagaaatacccaatctttagatcccagctataatgctacttcttccaagaaggcctcccattatactttagatcaaggtaaggcccctcctgcctgggtatgctccttctctacctttgtccttcatagcagttagcccacatgtgaatatttgagataacatgacctctgccctccctgcccatctgttagccccaggtgggtgggggggcgggtgtcagctcatcagctgatcccactgccccgcccagtgcccagcagttaggcatcaatttttgcttgttagctttggaacacagcagaagggagtttccacagatgacctctctttctccccaggggctgtgtgggtttccgatggcttcaaatgcatccccacagacaccccagaggtcaagtgcacagtcttggaagcctgacagaagtgggctgatatcctaattctacccccttccagctgggtgaccttcagcaagttacttcatttctctggaactcagtttcatcatctataaaagaaggataaaaatagaacctgtttcatggagttgatgtgaggattaaaagacatagtgtatgtgaagtatttagcacctctgacaccagagaagggattaataaccatgaggaggacacactgtggggcgatgccacttatcctgaggtccactgcaaccccaggtcctggctaatggctacagggatggggaaggagcaatcaggaggcagccagtccacgtcgtcttaacttcctcagccctcacacgtgcctgctgtcatcccatcttacctatcccatgggcttactagatgtaccagtagccacccacccaaagcagagaggtgcctaaaaatcacctgcaggtagcgctgaggccagcctccagcctggctgtcaccccctccacccctggattcccttaagagtcctggcctgggccgggtgtagtggctcactcctgtaatcccagcactttgggaggctgaggcaggcagatcaccagaggtcaggagttcgagaccagcctgaccaatatggtgaaaccccgtctctattaaaactacaaaaattagctaggcatggtggcgggcatctgtagtagtcccagctacttgggaggctgagacgggagaattgcttgaacccaggaggcagaggttgcagtgagccgagatcgcaccactgcactccagcctaggcaatagagcgtgactccatttaaaaaaaaaaaaaaaaagagtcctggcctagcaccccaacttcttatccagattctacctcttggcccagctatttctccatctttctgggccctgtctgtggtgtcagctgaggctccacaccctataaccagcctagccctgcctcccttgcctcccccaaagtctgaaccctggtccacagccaggtatgccagttcccaccggatctgcaggggaactagaaatatttttaccaaataagtgccagaaattgattgctgtggttcctttaaccctttgtgggaagggggaggcttccccatttccaggcctctttgcttcccctgcccctgtcaccaccattttatgcattcaaaaactgttattttattttatttttatttttatttgttaaatggtccttttcctagactgccagggtcagcaaacagaagtgtctgttcaaagagggagggctggacgggaagagggctgctaggcccggtcagagaggacttcaggcagggagcgtggaagctgtggacaggacagcttttagctctgggagcaggtgctggagccaagtcacacacaggtagcagtcagtgaggttcacatccaggaacctttttacagaaacccctctctctctctgtacagctgtataagcaccagcacaggctccgacaacatgcaggtgaggaaggggacagaagggcctaagatcccaccatggagagagagggaggagaggggaggggggcttgtagcatcagcttatcagaaggaccccctggtgcaccagaagattgtagtcctgggtgaacaagagctgccctcgggggttagcagcctgttgcttctgttgacttggctttctgccctgcagccagtgaaacctgacaggtcagtttctagatctgggctgattctctttcacttcctggttctcataccttcatcttgacagtctgtgtatttctcctcattctgtgaaagaatggagttttttggtcctaaatgctcaaaaaaaatctggtctcttaaaaaatctcagcaattctgatacctgggaagttatttaaggggtcagaatgactgacgttagacccctgaagattgaaatcagtgacttgtctctatcctgaggtgtcttctgtcagtgtggaaaagtctgggcacaaagaaggaacagagcatcagcattctcccccagccacccagccgggttgtgaacagaagcaccagttttgcctcctaagtctctgtttttatttgctttgaagaagcagacaggtgcctttttcctgtctctttttttgtactccctccgaagtatgcaacatactttgccgttggtcaatgcctactagatatttgagtggttaaatggaggcgaggtggctcagcagggttgggattagagggaggtgcctagggcacgaaatttcaatcattcttcaaggccatttagtcatcctccaggcgtgtcatcactctagtcccagccctgtggctccctgtggctcagggctggtaagggaaagctcaaagggacatggtttactcaaagatggctgtttgtgggatggggaagctctccaccatgagacctgcctgccatagcttcctcttgcctgggacacctaggtctctcatgtccagacatgtggcttgtatgagctggtcactagcctaccagaaagccccctctctcaggaactgcagagacaaatatacatgaaagggaacttgagggaagtcagaggcagatgttactggtacaagactaaaaagaattctaagaatgttaactaacatttttttcatgcttgctatgtgccaagcccacattaagtactttatggccattattttatataatccctccaacaactagattaggaaggacttggattctggagccagacagcttcagcttaaatcccatctttgtctctttcacgttgtgtggacttgggaaatttcttcagctctctgggcctcagcttcctcacctataaaattgaaacagtaatagtacccacattggagtattctgaggattatatcagtaatacatgtaaaacaatgagaccagcatctgtacaaggtaagcactcaacaaatattggccatgatggtgatgatgatgatgaagatgatgatgaagagatgatgattgcctctggtagcttattcctaaggctgcctacaacaaagtcccacaaactgggtgacttgagataatagaaatgtatgatctcacagttccaggggctaggagtcc

SEQ ID NO: 60811 - DNA, 836 bp, Homo sapiens
gatatagttaagcaagagtcaggatttaattaacatagtaatgttactaagtaactattgctttatcaagggcattcttaagtgaaactggcattcccattacttcaagcgcctggtgatggagaatacaaggagtgctgtcccatttgctgtctctgcctgtcccaagatgccaggagtttgacctgccgtgcttttcggtgcaaatgtcaacacagtgaaaaagataaacaacagtttagtgttattgtgaaaatagttttgacctcccctatctccagggatcgacgggccaaacattgaaaactgttacattactgggacaaaactcccaagatgggttgtaggaggaaggagggaggggctgttatattctgactttaatatcatttgctcagagataggagcatagaaaagatcccctatgcctgaaatttatctcctaaacctctcaccccacatgttattttccatttccttttctgattctgcatagaatgtgtcctgagagacacatttttttcctcaccccagggcaaactaaatagcacaggcagaacccagctggaagcaccctcttcatctcccacctatgtaaaaattaatctttttttccctaccagttattgcctaacactagtgcttatcacaaagaaaaggctgcaagaacaaagtgctctgtgagataaggaatttaagataagtgagctggcagaggataaaatccaatccccttcacacagctgctcccaacacctggcttccccattaacaccactcccaggactatttaagtcttagtcatcttccaggtctcaactgggacaccacttccc

SEQ ID NO: 60812 - DNA, 4113 bp, Homo sapiens
atgctggggagcttctaccaagtgacctccaggaactctcagcattgccaaccagattcctaggtcaaagccactgttatcctccattgcttgctcttggaataaatgcccacctccatcctggagaataaaaaccaaaggtcccacagaacccctttctcccaaccagacaaagacagacggtatctgggccctaactacctggaaagatcatagagtgtttcaaagatccaaatatgttctgtttgtgtccctgcatcccttctgtgacagttttcacactaagctctcagtgtcctgtgaaggtgtctcagaccgcctggaagcatgtcgggggtgaggcaggggtggggggttatgggactgggactggccccattagctccagtcagggcagctctgctcttacctggcttgtttctttgtttgtctgcattctatcccacttcaggggttctacagctaaaaggaatgtgagaactactgcccaagtaggcagaatgctaccagagaaagatttagacagacttgggtcaaatgcctgttttatcacttaacagctatgtgcctttaggaagcaagttcacctctccaaacctcagtttcctcatccctacagcaaagacagcaataccgaccttacagaagagttacaaggaatcactaacaccaacaactaaccctcatccagaaattaccatctatggctagtagacctgtggtttctccaaaagggcctgaaatgagattgtgtctgaggaggcttatgtagagctacagtgttggtgagagctttgctgagggacactggcattcagagaagaagtctttctggggctgactaaactagttttcctctgccaacatcccgctttatgtttacaatggaaggtgggtgatataaatgaagacttggtattctgttggtgggaaaaaagactggagaaattcaagagaaatacaagtttacgtggatctgagctcagggaaaggcgggcagtagaagttgatgtgatttacctcaggtttagtcaacttagttgccctcccaaggttaaaaggtcaacaagtcctttgatgaccatttgcaagcagcctggaagaactcgttcagctaagtcactgcctctgagtacctccccgcaacacagacccaccagctcccacagtgctgccagtaatttcctaaaagtcctcactgcctaacccaaccctcacaaaatttactcttgagttaataattaaccacctcccgaggcttggtaatcccttcaaccatttcctaggatcagaggtggaggaggggtgtttgatttttttttcaaagtgaggaaaagtggacagctacctttcttgacaaaaggcacagcaactccatgcctgtgctgggccagagctctattttgtagtaacctgcaccatctctagactgtcaggtcagggtccatgctctgaaaggaggtgaccagtctcccttgaatgaggtgggctggggaatgtcttgcacttggtaattatctatgattccacattccaggaaccacactgactgtttaataatctttgacaaagataattgaactaatatatgtgaaagcactttgtaaattgaaagtagcatataattcttcttcttattaactgaaccctcattcaaaatgatgatgtatttattaacatatatgtaatatatacattgataaacttattgacataacaacatatttattaatgtggttatgtgttcatgctatattacattcaaaaagcaacttttaaaacagaaagatcccactagggataggcagatgagcacatgaataggagtaaacacacccaaatatcaatacgcattatctctataagtgggttcagggtgattttctttccctatcttttctttcttgtttacccatattttcaaattttttctacagaaaacgttttgctattgtaattttgagacagagtcttgctctgtcgcccaggctggagtgcagtggtgcgatctcagctcactgcaagctccacctcccgggttcacaccattctcccgcctcagcctcaggagtagctgggactacaggcacccagcaccatgcccggctaattttttgtatttttagtagagatggggtttcaccatgttagccaggatggtctcgatctcctgaccttgtgatctgcccgcctcagcctcccaaagtgctgagattacaggtgtaagccaccgtgcccagccactattgtaattttttaaacttaaaatgattaagacaatgcctccacctcatcccacaaccaacaggcaagaaggccttgtgggacgatgccctctgacagtaaccactgctctacccacacagcgcaaagaaagggaacaatttcagcaatagccttcttgaggcagtccccaatccaagcagactgggaaacttacacaattgaggatccagccctttatcatctcaccctccatcacaacatttgcaggagaactttagaagcacactcaaagagcaggaagacaaaccagatggccctgggcacctggaatagcagaggcgcagaggcccccagctctggatgagttccaggagggttgaggtgtggggcactcagactcagccagtacctggcatagggcaagcattccacagacacttcttgaatgagtcagtgagttacaagtcagtttgggaaacagctttgtaccaagttcctaggcatgccctggccctccctgagacaccctgctgggccctaggcacgcacggtgggctgatcattcagaagaggctgccttaagtgcaggaacaggaccatacagatggtggcataactacaagcacagattgtcactacacacatatctagttctaatcatagctttatgtctgccacctgggtgaacttaggcatgtgacttcaattgtctgagcccagttacctcatctgtaaaatggaaatgatgatccctactttggggaattcttgtgaagactatagaagatgtataacatttaccacagaccctagcccttaagcatttgtaggtggtaacaactgttaccagtgtacaagcattgctgtatgtacagcagtgggcacacattttcctctgctaaaggtgagagaccatttggagctacttagatgggtaagcctgaggaagaaggaatgaaaggcccatttaatgggttataaattgtgctttgaaggaaatcctgcagcatagaagctaagacagctgaaagggagcagggtgaattatgttttcaaaccacaatcatcaaccaaactgggtcaggaggcttaagtcctgggaacaagtctagactagagcaactagagacctgctggcagaccatgtgacaatatccaagacacatcatccaaagtgcttctgatttgaggtttacctccaagtgatttcctctagagagtagaataatttcatcagatgcctctcaccagaggctcttccttcaagcctgcttttaggatcatggttatagggcaagacctagaggttagtcttacaacaaggatacttagggtaaaagttgaaaggtcctgcccttgttctttcggtggagaaaaaagctctgcaatggccttgtctttccctgtctacaatttctgtcatcctgagaagactctacatgcggcatttgtgctttcccttcccactgggaaggtacgaaggtacttggatacatgacacaactctgtccaaatcgtcaccagcagaaacctctggagtgtgtgacagtaaaacctgagcaatttcagggttaggctgggagaagaaacctagtgggaatactggaggtagaaaacaatcatgttactgagaaatcatggttttccattaaaaaaggcaagagagagttgagtgtgacaagtggctgcttgtcccctcaaatccacccttcctgtcttccatagtggggcacacagttgtccagctagaacgtacatttttctgcctcccttggagccaggtgtgcccacataaccaagtgcaggcaattgggtgtgcagagatgtgtacaacttctggatagtttccaaattaaagataaactgcgcttgccatgagtaagttct

SEQ ID NO: 60813 - DNA, 510 bp, Homo sapiens
cccttccaacaggaactgaagcttctgcagccacaaacacctagaaacagggttccttcattttcagttgtagctaccaactcacatattactgactgctactaactagaccagatgcaattccacagttctggcatgctgagaacagccactccttgccaacgcggctcagtcctgcattcatttgggacatctctggcaagcccccaggtatcagtgcaatgcactttgcaatgtcagccaagggcatgcagcaaggaactcagggaatggcacaacctaagaatgacgtcagaggagacagaacggatagatgagcttcctggggctggctagtgtcttgatccttcagacaggcacccaggccttatgcaaagttttcagacaggctggttagttaacaagattgggatactagggtgatagtttgaaccaggccactcccaaacaactctggctggccataatgtgcatatgtgttctggggaacaagggaacaaatcagatgta

SEQ ID NO: 60814 - DNA, 2023 bp, Homo sapiens
caggatgtggaaatcgggagccactgctgaggtggccaactgaaggtgaagaagcccaagcgtctgaagtgcgggcagggcctgaggcgtctcgagcttatccagcaagcaaagcccgggcagcctaagcgcgcgccacccacacccaggtcaatcgtcctccccaccccccgccctcatcccagccctcgcgcagtgctccccccttccccgaccgccccccaggcctccgtcattccccctccccgcccggccccgccttcgccttacactgaatgggcgggtagcaactggggtcctcgccgccgggctggcagcggctggagaaggcgctgcgcggggtcacgtagttgctggggaagatgcccacccgctggttcagctgcccggtccaccagccctcgtcgccggacacctgcgagtccttggacagcacctccaccacgtcgcccagccgcagggtcagctcgtcctcgcccgccgcctcgtactcgaacacggccgtccagtagggcagcggcgcgtcgcagcccagctccccggggcccaccgccgccgccgcctcctcctcctcctcctcctcctcctcggccccggcccctgctccatcctcccccggcggggcggcagcggcggcgctcgctaggcagccgagaagcgctctggagggctccatggagcggccgatccatagggtgcggggccgccgccgcccgcaggagccgccgccgcctattgttcatgcgcctccgcagagctgggaggacccccccccaacgacggcggccgcaggtagggcccgggctggcagggctgggagagccggctcgccggcgctgttaccgcggtacgagaagagcgccgagcgcgagctcttcgcgcagcctaggggcgcagcgggccgagtccccgcctgcccgctcgcccccccgggggcggcctcgtcacctctgccgccggtacctgctcgcgcagccggtgcccgccgctgccagccggccgccgctctcctctccgcgccgtgccgtgccccgccccccgcaccgccagctcgccgggaccacctgacgcgggcctggctccgccccagccctgcggaccccagggggctccgccccacgcccgccccgccccgcgcccgctgccttcccattggctgcggccgcccagtccccggttcctccgccgtggttggggcagcctagctggccgtctcgcaggtccctctcaccccctgcgccgccgtcgcaccgtgccctcccccattgcgggctctgtcattctcaaacccaggtcgacccactcttcccgcccactggcccgccgcagctccctccattggctcgcggcacctgtccgtttcctgggagagttcagcacctcccggcaggaagaggctccggcctcattgggtgcgtgagaagggaagggtggatcctaaaaggtaatactgagccttcattcaaactaaaaggctggaagggaggcagctgcctttgtttgccatggatgggtaggggctgcactgagcagcaccggtgttcttcatccggctgcacccccaacagagctctttcttccccagatcccttttacagttggattctccctcttggatctggctctgccttagtccgacctagagggatcagcttcgcccacgcccactctcacccggaacctttcatctcttattgaagccttttaggcccattgggatgttcattagaactctgaaaactacagttctcccctttatgaggactgcaccacagctcgccctctcctgggttccggtaagaagagattccaataccactcttttttcagaattcagaaaggcaagagaccaccttactgagcttcaaactggggctgggaacgctgccatgaattgggcttggtctgtctgaagggagccaccttttcgacaatccttagacttcttttgcctgttggaattacaccttggatcgtggcgaagtctatagaggtcagattaagaagaaccaaagcagaataa

SEQ ID NO: 60815 - DNA, 1089 bp, Homo sapiens
tgccaaggacttcacctgcccttcccattcaatattcaccaaaaaacctatgtgctaggtactttgaataaccactttatataaaaagtggggtgcagagccactaagcaagcaggggtggcgtgtgtcggagccagaatccattatcggctctctgatcagtttacccccaggaggacctttccccgaccccctaccccgccgggagcagcctatcttcgtgcaaaatgcaccgagctacatacagaggctgccttccaggactcagcgcggagggttaggctgcctcgaaccccattctggtaactccatcccagctgggacgccgggccctctccgccccttgcggcccacccctccccttctgccccccaacacggggaccgggcgggctctcggtcggcgccaccgcgcccccgcatcaggatcctcggcgctgacgttctctccccagggggaggaggggcccaggaagggttaggtccgcagccagtgcggagaaagggccctgggctcggctcccacgctcgggcaggcctcccgccgggggatcggagctgcggtcactcgcggcttcggggccgtggcgtcccgcgcacagcttccgcgcctctgcaaggcggtgagtcgtttcttcccggcacaggagggacagtttccccacgtggacgcggggctggcagcgggaggggcaatagcgctggcggagcttagggtttcgcgggagcaaccagcgcgcgcctctctctctcccctcccctcgctcgcgctcgctctcccccgccctctgtctctcccctctctctctctcgctttccccccactctcttgctttcccccttctctctctcttcccctctcctctcgctcgctcctcgtctcccctggctctctcgctctcccctctccccgtctccccacgctctgtctcgctctcccccgtctctctccctccccctctcctcccgctctctctcgctctcctctctcttctccccgacccccttgcgttctctctttttctctcttccctcgctctcccctcccctgccccgtccctctcctctcccctctccccacatctctctc

SEQ ID NO: 60816 - DNA, 1322 bp, Homo sapiens
aaactccgtctcaaaaaaaaaaaagaaaagaaaaaaaaaacccaaactgcatccagagaaagcatgtagacgttcagagaggaatgaaaacaagaggctccctgtcattcaggccttggttcccatctgtccctgcctgctgtaaacaatatcccaccaagggccagcttttgctaaagatagctctggtgggcttcaatcaccattaaacagttcctaaactaattctgctaaggctaatgtagagcagaagactcccttggcccatgtaacagctgtgtcatcattcatttactcatcccatcagtcaatgaatatcattgaatgccagctgtttacaagcttgtaagaagaggaagaaaaaacattggctgcagtctttaaaatataaaccagccactggatgtcagccttctggccaactggctctcaatgctcctgaaatttcccagttgtgccctgggagcattttggaggtatctgacatagctgccactcacagctctttctgagaagttctagagccttggacaccatggtgttttcccatcagccttcctcctctggtaacagccgctaaaccccactcacacacacactttcggggagctgcctcacctgcttccatgttcttctggtgagactttaatcacatgacccctcccctgagcatagacagggtggacttagggcctaaactgagcaacagaatcactttctggggactttgaactttgagctgagacacaaatgcagagggcagttggagccgggccatgccaccgcagcaccacatagaaaagcttcagccctgctgagatcacggtgcctggtccctgggttcagttattcctttaaatctgtagccaccccggattttcatctcttacaaaataaatatcttttgaaccaaattagccaatcaagtatttgtaaccaaagagttcgggcacatctgctctctgctttttcagataaaagctcatggatgagtgaagaaaaagaagaaaaggataaaatagagaagttgtgttgtgtcccctgctcaagcctgcagcacagcctagctcctagtttaagaccctttaatgaatctatatttaccatcaggtttttatttatggaaatctacacaaggcatttggatgaaggctgatgcttatttcaggaaagcaagtctgtggtttcaacaaaacctctgttagctccctccacacctgttcgctcttctgccaaactacctattgctcatttctaaagcaaaaaataaaatcaggaatcggattccaaagcaggacaaaagtggtgattaaagagacagg

SEQ ID NO: 60817 - DNA, 2608 bp, Homo sapiens
ggtctgaatggaatgggtgtgatagtgtctgagcaactataaagtggtatggcactgggaggtattgtaacggtttttcattactcttcttaaaatatcaccagtttcctttggctcttgtttccctcattaattatagcaactgtaatctgggaatacacagtacttttattgccataaaagccaaacttcaataaactcaaatttcaaacttttctataaaattttattcagtgagatcagacacgccttataaacattacacagagccaagaatgattccgtttttacagctataaaaagagatctacaagaccctattgtaatttggggtggcgtcacggttaatctttttcaaccctgtttagattggcccattaataaaaatggctgctagttacagcacatttaaaaatacaatcaccgcgtacaaatggtaacctgtccactccatacttccatgtcctgtgccgcttctattaacttgtctttggaagtagtaaattctcccagtctggacgtggctattttttctcacacacgggccaacacagttcttgctcaacttgggtgcgtttatgacttttcaacagtgtcatcagccgtacctaactcttccaggccttcagtatctcaggtgttagcttcagttgttcctaggtctttcacaaatatcataaatgacaggcaggacgcttttctggagtcaagatctgttagtttcggagtcagaaagaccccgtttagagactcgtaggcgaacttgccagggggcctaccaggggcagaatggggtcctccggaccagccagccgcgtctcagccacctccgcagcccccggggccctgaaccccggccgcgttgacgcgcgcttctcccggacgtcggcaggaggcgcccgcggcggaccaggcgcggcgcgcaccgtagccggcccagggggcggagggagcggagaggaggagctggagggggcgcggcttcctctcggtcgctccctggcgccgggcctctttctctgcctggcccagggctggcggccggcgggggtcgcggcggcggcagtgggggcgctggcgggccgcgggtggcgggggccgggccgcggctccgggtgttaggagacaagatggcggcggctctcagaaggccggtctcctcctctccgccgtcctccgccccgccgctcgccgcctcctcctctcgggtctcctcctcctcgtttgctgcctcctcctcctcctgcagcagcaccagcgaccgccgaagcgccggctcgctcacccggagctccggaggtggatagacggggcagctgcaggctccggcgaccgaggccgagctggggccggggcggggacggcggcggcggcggcggcgacggcggcggcgccgggtggggatggggtcgcagacgctgcagatcctccgacagggggtgtgggccgcgctcagcgggggctggtactacgacccgcaccaggccaccttcgtgaacgcgctgcacctctacctgtggctctttctgctgggcctgcccttcaccctctacatggtgagtgtgggggcggggagcgggtggctccttccccgcgagccggtggggagatgctggggtcgcgccctcttcctcttccacggggtctcgtcccccgggggccgccaccctctcggtgtgaggctccccgcccccactgcgtgctcccactcctctcttcggggctttcctggtttcggaggtgacacgagcaacgagcccacggcaacccgcgccggccgcccccgcccgctcactgggaagcggcagcgtcctaggccccttctcggggttccctcctgcggccactcggctaggccgtccccgccggggccccccgcccgtggggctgtgtggcaggcgccgagcgctctgcggctttaggggacgccgcatccatccttggcacgctgggttcctcgggcgcccggcatccggcactgcccgcccccgccgcggccctcgtccggggctcccgggagaggccgcccgccgcctcgccgctaatccgcgtgcggagccccgggagcgcgggggaccgtgcggctctgctccgagtgtgtgtgggggtcgtccgggctcgtcctccaggggtcctgggtggtggctgaaaacccggctcggaaccctcctgcctctaaaaaaccgttgttgtgcttcgcagcggttcttctctgttcggccccgtggccggtggccgtggtgcttcctggcctccctggggggagggagcggggagataacggggaatctggctggcatttcagcagatttgtttggcttggttcaaggcctttggcggataggagtagggagagagagtactgcctgttgctgaattcggtgcgatcagcttctctgaatcatctgtgtttttaaagcaacattgaaagttgttaagcgcagtttctaaagcacaggttagggtggggcgttagggaaactcgtgtggacagagatgttacttaaggcttcatataaaattttaaagtagtcagaggggaggaaaggatctgaactttttattttaggagaattcctttgaatgtatttctgctaactttgaggtt

SEQ ID NO: 60818 - DNA, 4132 bp, Homo sapiens
tttattcttagcctgagcaatagagaccccttttctacagaaaaacttgaaaattagtcgagcacagtggtgtgtgcctgtagtcccagctacttgggaggctgaggtgggaagattactccgccaggaggcgaaggttgcggtgagctgagattgcaccactgcactccagcctgggtgacaaagtgagatgctgtctccaaaaaaaaaaaaaaaatttttcctccataggtgcttatccaaggcaactaaatataattaagcttcatccttgggaaaatgtaatttaatgcaagaggatcccaaggttgctttgcaatttctcaagcattaacagcaaataactggagatgaatctaccttgtctgtgaaacttttaaagatgccattcagtttcagtgcccagtgaaccatgccaaaaggggaaagtcatctttcagtccgaggttccttttttcttatgagagcactatttacggatacagaagcaaccggcccatataaaaatactccacatctgtggcctcatcttaaagcaaatattcttgacctgtctttatcatataaagtcaacattccaggatagcactgaacttaaccagatacccagtagtgcctctgtgtgtttgtaatacagttgacccttgaacgacgcagggattaggggtgccaacgcccggcacagttgaaaatctgcatataacttttgattaccccgagtcaactcctgtgaacaaaggctatcttgaatttggaggaaagagactatttcagtgagatacagaaataaatacagagactttatttttgtgagatacagagatttggcttggcagttattttctttctgcagttcaaaggaatcattccactgtcttctacctttcatgatttttttagtcttgttgctcttttaagggcaatgtatttttaatcctccaattatttttgtctttgatttttaaagctttccatatagtgcctgtgtgtagttttctttgtatttatcttgccaaagtgttttttattatcactgaatcttggccattatctcttcaaatattccttctgccatattatttttctctcctcctctcacaccacaattatacacatattttaccatgtcctttatctcatgttcttttctgaatttcctatctttggtctctccatatttagtttaaatattttattctacatatcttccagttgttatttttctttcatcatctgtatctaatattctgctaaactgatctattgagttattaattttaatttgtatatttttcagttccagaatttgcatttgatcctctaatatatttccagttacctgctgatgttcttgctcactatttaatttattaaacatattaactacagttaaagctcatatatgataattccaacatctgggtctcctgtgattctgtttctgttgttttttttttccccctcttgtttctctgttttgtcttttgtctgtgtatttctgattgaataccagacactggtattcattcagaatacattctgattgaatgccagacacagtatatgaaaatctgtacataattgaggctgtagatgttataatcttcctcaagatgatctacttttacttttggcaaacaaggtaggaaataagggaatgagctgtttggaagatgatcttcagccttctgagaactgatctgtttctcttttactactagggtgtagccctttagatatacaaacttaaagactgggtttcatctttggcgggccctgaattgtaattacaaacaccccagccttgtgaaagtccaaaatcactgctcagtttctcagccactgctttcaaattggcagatgtggcactgaaaccatccccaagaaaactttataaaattgattaagggagaaaataaaattcaactaggtttgcagtacaatgagcagtaatcattaagccagcttgccctttggcctacttccctgtagctggccgctgcttactaccccaggaaaatgtaggccttgtcacaagactttgttctatagctaaaatctaagagtttctcctttaggttttgcatatcaacgaaactactgacaccggctggctgaagggccccgtaagaagctgactcatggaagaatagtttccatatcctatgatttcatctctttaccaggaccaatcaacaaccccaattttccagcctgttgtcctccaccatccccttaaagacacgcccagaacccctcgagggaacagattcatggcttgagaattcccctccattttctcatccagcagccttggattattaaattccaatgttgctgcagttcccgttgtcagtgtagtattgatctgttgtcgcccagcgggcatacaaacctggcagtcctgttacaacaccaaataccagtcttccctctctgggcttccttctctctggggtcttggcccctaaagtcgtagttactgcggtagcactccaacaccttcaagtatatttttatgctttgtacagctttcctcattatttttgattgaagggttgatctgaaacaagctaacctcttgtcaagtcttttcttaatgtcagttggcatcctcacccatctattacaacatctaattacttaaactttgacttgcctttgccttgactttactggctatattctttcatttcagattcagccatgccttagttgctagctagcctactgattgtacccagccactattggagggttagagtagtgagaggagtgcacagggttttgtggtacaaaccaatccacttgaataatgggagctgagggaaaacaagatcagtggcctccaaagtgggtgtgggcatggcagctatctgaaatctgtgtcccacccagtccaaaatgtatcatagaggtaggccagacacctcaggtaaagcagagatgtctagaccagtgacacatacgcaggatctgaccaacattttgtactcttgcaggctctggttagatgacagagtcacattactcatgatttcaagatcagtgttttttgttacagcacagtgagttttttcctgttcacttttctaggcagtgattttcctggcctaaggtcttttttttttttttttgagatggagtcttgctttgttgcccaggctgaagtgcagtgcacaatctcggctcactgcaacctctgccccccaggctcaagcaattctcctgcctcagcctcctgagtagctgggattacaggcatgtgccactacgcttggcaaatttttttgtatttttagtagagaggggtttcaccatgttagccaggatggtctcgatctcctgaccttgtgatctgcctgccttggcctcccaaagtgctgggattacaggcgtgagccaccgtgcccggcctggcctaaggtcttattaactctcctccatttcagacatgaccccctgtggagttatagctgcaacaatagcagagacaggatttagccaatgcagggtgcttttccagccctagcttaacctttccattcattctaaatgaaataaaatctccacaggtaacccaaggactgaaataggcttcaggtaagaagtgagtgaactttgtatttttcctgagcttggtggaatgagtgtttggaaaagttaaatggtttaactactgaaaaccacccaggccacaggcatatgattcattttgtgtgaccttagactttttcttggaagatttggggccagaaaataggaagccaaaaatagcttcattgggatcaaatatttttctttctggaaaccagaaaactattcagttctgtaagttccaacaagttcctcattaacatcactatttctctacctatattaagtcacccccttgaaattcgggtcacaaaggcaacctacaggtaatgtgggtcatggatgagagggccaatgaaaaaaatgatggcagccggacacagtggctcacgtctgtaatcccagcactttgggaggccaaggcgggcagatcactagatgtcgggagttcgacaccagcctgaccaacatggtgaaacccaatctctactaaaaatacaaaaattagccaggcatggtggcacaggcctgtaat

SEQ ID NO: 60819 - DNA, 1084 bp, Homo sapiens
ttctgaccatagcagcctctccccaacttttacaagaaggctggcatctgacgcatttcatagcctgagtataagatgaggtaacggagggcccacatcacctacatcctgtaaagcctgaggctcaccaaaccacacaggggagtatgaacacagaggacacctcccactgttgttctcttgtctcctgactcaaacagccccttcctttcagcccaagacattgagccatccggggcttgctgtggtatgatacaaaataaatatttggtctttgtccctggttcctgacacagcgcctcaaaatccttggaactgatagtcctgtatgctaatgagatgagtcatggagaggccctagatagcttcaggatgggggctggtcactagaaaaatcaaccatgtgattagaggattagaactttcagccccacctcctcacttctgaccttcaaggagaggaaagggattggagataaagtccaatcactaaatgaccaatgatttcatcaatcatgcctgcataattcagaccttgagcaagaaagaggtcaaagcctgagttactacctttagtgagcttaatttccacgtaggaaagtaagagaagcacagcagcaaagctgtgtttaaaatccccgcccccgccctcccactccctgcaaaaacactcctaaatgaagtcagataaaaatctcccaaaaaaatcctaagtgaaatcagatgcagtggctgaaacgtaattccagctactggggagactgaggtgggaggattgcttaagcccaggaatttgaggccagcctgggaaacatagagagaccctatatctttaaaaaattttgttttaataaaaacaagaataaaacctaaatgacagggattcagagaacttctgggttgagaaaaacattgctttaagaggccaaggtgagagaatcacctgaggccaggagttcaggaccagcctctaagagacgggggggtctcactctattgcccaggctggagtgcagtggcacaatctcagctcactgcagccttgacctcctgggctcaggtgatcctcctacctcagcctcct

SEQ ID NO: 60820 - DNA, 2352 bp, Homo sapiens
ggggtgcagatatgtgctgcctagaaaggcagaaacctgtcccagaacctcttaatacattagtctcatttgccaaatttggccagatatcatgactgtggtcctctcgagatgccctcttgaatcggcttaaaaattatccttccgcaaccacccctagctttccccaccgccagtgcgccgggcaggttgaaaactgcacccacgtttgcagcctctgctctccgcaggagacaggaatccagggctttgccgtcgtcatagcaaccagaagttccgcggtcccctaccctcccgcgactttttccacttcctccgcctgcagggcccagccgccgcttctctcgcgagacttgtgcgccgcgctaagccgctccgtggtgatctcacccgagacttgggggagagggaggagtgaaggaggggaaggaatggggcgggaggcggggcggggaggggaagggcgagtgaggcgccgccactgccggcaactttgtgagcgagttcagtgcgtgcgtgagcgagtgagcgaaaagtcagtgcagcgccgagtccccggctggagggtccccggggagggccaggtctgggccccagaggccgcccccgcagccactccattccctcccgcctctgtggctccctccccatttcctcccccaccggtcgttggggccttcccgcccccgtccgcacttacctgtcccctcccccatgcggtacgcacctcctcatcccccccccggcaacctcgcgcccaccttggaccttcggagcccggacccccgcacttgcttcccgtactggccgccccctcagttctttctgctggcgggcgggatgggggcgctgagcctcggggacggcgcgagcgggggcccgggcgcctagacaatagttgatgcccaaggacggggccacctccgccttcccctcctccgggagctcggcccccgccggccccccgccagcctgtattccgggtccccctcggagccagcctcgggaattgggctgattccacccccgcctccctcgggcccccctccgctccgcgctcggcgcccgcctcgggccggcctcgccgctctccgcagaggaggcggcgagtgagcgcgcgccggccgtctacacggtttctctttctccccagggagagcgcgcggcggacgcgcccgggacgcgcggcggcaccgggaggccgggccgagcggtaagtggtccccgcgcccgggtcctggggggagcgggggtgcaggacggctgacagccccctgccctgtttctggccggggttggggtccagggcccggagcaggaccccaggaggccggttaaagtttgattttcgatttggtggcttgctggtagcttagcccggcgggggcgagtccggcttcaccgcgcccggcgcgcgcgcacgcaccccagaacccgaatctgcacaactactgggcaggcgtctctgcgggaggccaggagacccgcgtcccggtccgggcggttgcgtccaccccgctgagctggtcgccacctggcgacccttcccctccagtcacctgggtgagcgctttgcagcctgagctggagtaggcaggccgagttggttgagttgtgggaaatggagacgaacagctcggtgcccgagggtggttaatttcccctttgggggtcttggggacatgaaattttgggatgctctaacctgctttccggggagcgagtaaaccgcgaaagggctgggaaggcgtgagggtgccgcaaaaagaacttttcctccttcgccccatctgttaccagcttctctcctgaccttaaaggaaatttccgaggctcttaaatcgctccacggcatttctaggtggaccagtaatcgtgttgggcaggttgaaatttcatcgcggtttggagaacagagagacatgggaaatggctcacttccaaggaagatgtttagctaaattgttggcattcgttttctaagagaagcatttggggattgatggctcctagactacgattaccttatagattttatttttcctgacgggtagtttagaggcagcattcgctgaaatgcatactacctgtgaaacgatcatgtttctaaactggagccagcgatgtgatgcaaatttcagaataaaggtgtcgactttcatcaggttccaggtctatctggatggactgggattggcgtttcctctataaagcaaacctttcatgttgaaactctgagtcagactcttaaagccattgtctttatgctggtactctgtgggagttaagtgtcaactttctcctgttttctcctatggagtatccgtccaaggcaaagattctctgactgaa

SEQ ID NO: 60821 - DNA, 1225 bp, Homo sapiens
ttggagagatgctgagcgtctgaggttgcagtaattatttatgtactcctaaagtttttttaaataacaactttattgagttataattctctatttaaattaaaaagtcagtagttcttagtatattcatacagttctgcagctatctctataaacaattttagaacattttcattaccccgcaaagaaactccaagcccatttgcagtcaccccccatttctttccagccgcacccctcctctccgaccctagccctaggctaccactaacctactttctgtctttatagatttgcctcttctatgtgtttcatataaatgggatcatacaatattttgtgttttgtgactggcttctttcacctagctctgtcaaagcacattttttgcaagcgctttaactttggtggtaatgttacagatttaaggattcaaaaccaaatattccctgtctgctgacacagaaactacaacctgtgctgggaccagagaaaatagcaaaacgaccagttactaagtgtgtttgtagaacagggagtgaactttgaagctttcataaaataaaaccaccctagtactaatccaccagtgcattcagtacatgtgattgcgtaattgttttaccgcacctttccagagtattatcctgtttttccctcgaatttcttgcagctcttagaagtcgtttctgattcttccctttcttttacttttgctctgatctgtgaccaagctttatcatttttttccctttgaattgatttttttagcttttgctcttagttttattgtcactgtcttagagtggaccttgacccctgtatctaagcggctgtatctaggcttaggcctcctttctgacccgtttgactcccgctgtcccattctccaggccatcttgtctgatcattctttctaagggaccacttagttacatgtgccaccctggaggaactcaagtggctctaatactttgctacatcaaagtcatactttcctgcttgcttttacgacattcctatttggtctctccatttttggcctctaccagactatgtctctgccttcctatgctaggactttgctctgtcctcttccgtcctattctgattttcgaaaaatcttcagttcgttttcagttttagttatatttaattcaaaaagtatggaggccaggtgcggtggttcacacttgtaatctcagcactttgggaggctgtatca

SEQ ID NO: 60822 - DNA, 1178 bp, Homo sapiens
catttcacttgagtggtaaaataaaacagttctaagtggcatagtctagaggtcaggtgatggtgtcagcctcttaacccttacttgatctccttaatgcatctcaagtttaacatgattgctgaatggttgaaacaaatctgatgaactcagacttatttgctgaaccctttattttattaagaggttagaaaatatgagaaaccacagttcagatattatgatactgtctcgttcatggttttaattttttaaaggacatgtttttggtcagtatatactgggtgattgcctgacagaagagaatgagtatgctggctcaccttcctgtgtagacttgtgcactcagaattagtcagcttccaggaagcaattgggtggtaatgacttttagttgctatcagtatgcatagattcaaataaaaccttgggcattctgctctgaacaatacatttaaacaaaattctcaatttctttttttctcccgtatccagattaatttacttgaatagactcagaaacaacattatactttattgccatctacaaggagctgttttttgagatgacattcctcttagaggaatttacttctttttccaaaatttacaattcgctatttctgtctgtgttctacatttacgttttcagtacgtagaatttaaatattcatgtacattctgtcctagtgactaaggagcattatgtaaggaatttttcttcctctttcagtatattgacatcacattccttggcctagtattcattttgtgtttgtatttcagtgtaatcctaacaagtccattcaagcagtagttgaaccgaggttaagtggtattatggttgtttggcaagttatagccataaacacttacttttaaacacagaatggcctggggtgtctgtaatattcagttgcataatcacagattatgctttacaaacacaggaataagtacctgggtcacataaatcttcagtgagaaattgctccagaggatggagcctacatctgtagagttcccttgagtgttttcttaggtatattaacatttttcatttaattgaaatgtttctgattggatggaactgtggatagtattttagaatttccagataatctcctaacaaacatctaaaggaatgggttgaaatgttaccagtgttgggctgggtg

SEQ ID NO: 60823 - DNA, 2390 bp, Homo sapiens
tgctatcctaaataatgctgtgatgaaccctttttttgcacagaattttgtcttttgaattgtttccttaaaaaatactcaggaataaaataactgggaaaaaaagtatgtaagcattttaaaggctctcgatacatattcctaatttaaaaaaaaaacaacaatttcactcttccagtagctaatgagcacattttataaaaattaatacctcttatttttcttaaagcatacttaagggccctacgattttcagattgtaaataagcattggcttcaactttaagtctccagctgcattagcccctaataagagagtcagactgttctttgaacctttgaagccaggcattgacttctcctctgtagctatgaaagtcctggatgacattttcttctaagagaaggctgtttcatctatactgaaaatctgttgtttattgtagtcaccttatcaatcattttagctagatcttctggataacttgctggtgagcttgcactttcatgttatggagacagcttccttcccgaaacctgatgaaccaatgtctgctggcttctaactcttcttctgagtttcttcacctctctcagccttcatagaattgaagagagttagggccttgctctggattaggctttggtttaagagaatgttgtggctgatttgatcttctttctctccagaacactaaaactttccatctcagcagtaaggctgttttgctttcttatcatttatgtgttcactgcagtagtacttttaattttcttcaaaaacttttcctttgcattcacaacttggctaactggtacaatcctagctttcagcctctcaactttcaaatgtcttcctcactaagcttaatcatttctagcttttgatttaaaatgagacacctgtgactcttcctttcactttcaagtttcgcttgaacttagaggccattctaatttcagtgttgtggtctcagagactagagagcccaaagagagggaggcagatggggaatggctggtgggtggagcagtcagaactcaaacgacatttgttgattgtttgacatttgttgattgattgccgtcttctgtgagtgcagtttgtggcattccccaaaagattagtagtaacatcaaagatcacagattagaaatcaccaaaacagatgtaataatatgacaaagtttgacatattgtgggaattaccaaaatgtgacacagagacaggaagtgagcacatgctgttggaaaaatagcactgacagacttgctcaatgcagggttgcctcacaccttcaatttgtaaaaaaaacacctgcaaagtgcaataaagtgaagtgccataaaatgaggtgtgcctgtattgtatttattgaacagaaacatttttcaaatgtttaaccaattttttcttttgtgaattgcctactgtttcagaaaaactctcaaaccgtgtctttcctctgctttcataccaccatgacaatcatcaacacagaaaacacttctgtgacaaaagctgtgggtttttttctccacatgccaaacagcgtacactggctggatgttctcaattcagttccaacactatccaccctaagatagtgtcagattccacaggttgggggctcagtccccaagactgccccttacatctttggacatcattggtaaatccaggcctccagacttctgactgaccaactttaagttggtgttcccacaaccccatgtttgggtttaattaatttgctggagcagcttacagaactcagggaaacatgtttactgatttatttaaaaggatattacaaaggattcagatgaagcgttgtgtagggcaaggtatcagggaaggagcacggagcttccgtgccctcctttggcgtgccaccttccaagaacttctacatgttcacctctccagaagctcttcaaacctggtcctttgggtttttatacaaggaggttttattacatggcctggttgacaaccgtgtagaaatgtgattggacaaaaagcacattatctaaatccagcaaggcctgtctattcagacttttcttggcctttctgtgtagctttccttcccgtaggatatggagcaggactctctggaatgagtgtcttttgatccacaatcagattagagccctgccttgggcaggtgaaaggacaggaggtcagagagagagagattctgtttcctgaggcctaaagtaccccagcattataacaaggactgtgggagttaggagctaggaactgtggacaaaaaccaatatagctatcataacaccatacccattaatacttcttttcccatttttcttttggaatcttagtattttatcttccttcacaaatctttgcatatattcagtg

SEQ ID NO: 60824 - DNA, 518 bp, Homo sapiens
ctagagtcggttggaagttagagcaagccctagtgagggcactctgggatgcagacaagccccagggagttctgtgccaagaacagccacatcccaccttcctcattgtggtgaaaagattccttgtgtgactttaggcacagggacattagctagtagcatgtgaccctgtgactcatggccatcaggagtggccccagctctgcattccatgcatgataactcacttcacaaccccgctgtcccattttgaccccgcttacccatttggacatttcttgggatgactctgcctgcataaaacccacagtcaaatccaggttagccttttctgagttttacatttggccagtgcaaaatcctgtccagggcagcattgtcaaagcagctgccacctccactgacctgcactgctcaaaggtaatcatgacctggcccagtcgagctggtgacatgtcaagcttcctgcctgaggttgtccctaattctgccaggggtccaagagactgaaggaggta

SEQ ID NO: 60825 - DNA, 956 bp, Homo sapiens
taatctagagggcttagcctgggcctgacacatggtaaatgttcacgaaatgggtgctggtgttagctggagccatgtctgagataggcattgaaaggcggtgaagggagggtatgtttgcaaatccctgccagacggacaacttccctggcagcctggcccctgagagctgcccttcccgccaacctcgaggctgtaggctttgtttgcctgtgtgggcagcggcctctctctgcctctgacaagcccctggctcccttcttcccagtgaggacctggttccctgtgtgtcacttgggtggcctccatcaataaccctgcattaggcctgagaaacagcagagtggcgggccggaggcgccctccccagaccccacatggaaaatggaaacagtgcagattcccgctgcccatctagatccccgtttgtctgacggacctcatggctacttccgtgagatttggactctgagctcttgttccaaaatactcaatttcaggccagtgactctgccctctgacctaggacaaggacctgcctccgtcctctgagaacacctggcgtccaagggaacacgtggacctccacgggaggggcagcctcgttcctacaatttccaaccaagaaaataaagcctggttcttctctttctcccattacatcacaggatggctctgggttaggaaggggtaggagggatcagggagcggacgtttaaaaaatgagacaagtccctggatatctcttcctgtggcccttgcctgtgatcgcaccctcagtagagaacagtgaatattaacacagggaggaacctgtgagattctctggggtgtgtgtgtgtgtgtgtgtgtgtgtgtgacttttagtttgtttattaagctataatttacctacattaaaattcaccgttttatattacaacattgttatcagttttgacaaacatatacaatca

SEQ ID NO: 60826 - DNA, 1544 bp, Homo sapiens
tggctggtgtgttccacccagacccatacaatcaaatgtgttgactcttggttctgtgagtcttatcaccgacccaaaggacaacatctgttcatcagcatgtagtgtagcatgactaggtattggatgaatgacatggctatgatgcaatgactaggggaataatcacaccctccaccctgtctggttcatcatggtgtgatgattgattttaggtgtcaacttgactggattaagggaaacccagaaagctgattaatcattatttctgggtatgtctgtgggggtggttcctaaagagattggcatttgaatgagtggactgagtaaaaaaaaaaaaaaattgcccttactttttatggggagatactgtctaatcagctgaaagctcaggtacaaaaaaagggcagaggaagagcaaattcattctcttctgaactgggacactcttctcctcctttggacatcagaactccaggatctccagcattcagactctgagacttgcaccagcagtcccccgggtctcaggccgtcagcctcaaactgagagtaacaccaccagccctcctgcttctcaggcctttggacttgaatacagccatgctactaggtccccttgttctccagctctcagaaaacctgtcatgggactccttggcctccataatggtataagccaattcccctaataaatcctctctcatatatctatatctagatctggatcaatgatagctagctagatagctggatagatagatgatagacggatgacagatcctattggttctgtttctctggagaatcttgactagcacacataagaacattgctgtgtcaatatgtactttgggctggagcaaaataatctttgacacatttgtccactctcccagagtgttgatctcagcgtagatcaatgggagtgatgcaagaacacagtcttctgagctggtgtttgctggttccatgaagaagagaagggagactgattaaatcacaaccaagtcacaaagtggaaattgcttccctctggctcagccttcttcttgggccagcttttctgccaatccttcttgatgccccaggcctcacggggtctcttttataagctggcagatgtgttcaatgcaatgctggcaaaatgtcatacaggtggccacccatatggtgccagtttggatctgactcctggaaaaaattctggaagcccactcagccatggaggacacccgccggcttcctgcactgggtccagagctgtctgctcatggggacacaggtgggaagcaggtgtttcacataaatggaccaccctctgctaatcaccaccaatcaagccagtggtgcaggagaaaacaaaatgagaaagaatcatcatccaagaggtgaaatgaactggtggccaaggaagcagggggtgcatctggatttccataacataaatggtcatatttcaggcaggcttttctttagagcaagccagaaactcagagacaggaaatgtgggtgtcagatttcattccagtgggtacactgtc

SEQ ID NO: 60827 - DNA, 595 bp, Homo sapiens
aggcgagcaaatgagcaaatgggatgcagtgagtgaaaatataacctgggagtctgtagggttgtgttgctgagggaatatataggccccaggggctcacaggcctctgccatttcctacaaggcccacttacctgccctcccgtccccaccatggccgcgtttatttgctagacagggttggtgccagcctacagggccattttgctcaatgcctgggctagaggtcatgataagtaattatatctctgtccaagagggttctggctgcctgccagtcctggttcctgccttcctctggcctgccctgggaaatgtcgccatcagcaaaatactcccttctcctggtggagccaaagaaggggaactgtggaaggtccctctctcaaggccacctgccctatgacctgaggttggcactggagcagagaaagggaaggagtggggacagaagctggaacaaagggccctggggagtcacctcaggaccccctcacagccagggctcactcagaacccagagagagcctgttcccaggaacccactcacttccaaatctttcccctcatgcagggagttccctgttccttctaga

SEQ ID NO: 60828 - DNA, 2209 bp, Homo sapiens
actgctcagttctcagtttatttcaacaaataattatggcacactggtgtcaggcactgtctggaggatatgagtgatatcacctttgccctcaaggaacacgccatctgtttgagaaggactacaagcaaacatgatgtgttgtgataagcacaggagcggcaggaacaaaatgctatggaatggtacttaggcgggttttcaaatggtgatttttgccattttacatgggttaggttgtgattcccagctttgctttttgttcgaatattatctccattgtctctgacaatagacattcttgcctacagattcaacagcaacggtccatctggagctctttgttgatctagatggcttcctccaagaaaatcttcttgtctactgagatccatggcaaaaataatcacatactaccccatgacagctcttacatgattttaactatttgtgaatttctagtctgatccactaggtcacaaaataaatccaatggccaataaattcattgccccatgtttaattttatcctatccttgacagtgctgagcagtcacacgcatactgttattactcagtccctagttgccaaatgaaccgaggtatatctgaatgaaaatgttatcatccaaggtctgtaaacagaatagcctgaaatctcagctgaaaggccaaatgtctgagtcaccagtaatggggtaaatcaatcacatacctcctgatgtaatgcactgagaaggatacaacatcatttctaaggtattctaaccaaaatgcacaacttcagtttagtcattagaaaaacagcatccaagcctgaactgaatggcttttgctatgaaatgactaaccagtatcgaggttgtgaaaaacaagattgtagtactaactattccagattaaaggacttgtaagaggacatggcaacctgtgagcccagactggatcctggaccagaaaaaggacactagtgagacaactggcagaatttgcataaggtctgtaggttatagcattgcatcgatgtgaatttcctgattgtgatcattgtactgtggttatttgaagaatctgggtgaaggacatatgggaattcttggtaaaatctttgtaagttttttgtaagtgtaaattatttcagaagtaaattttttaaaaagccatagttattggttgagttccagtggtgagatactttgaaaacctaattgccaatgttttttatctaataattcagttctgacaggaatcttccatcattcccatttattttgtaaaccaatcatgcagaatggcttttcctatattgctattttgaataggtgatcagaaatcacttttattaaacaccacaatattatataattcaatgtttttgtgttagaagcaattgggtttgtgaccagggcccaaaatgttcactccctgccaccattactcccgctaccactggcaccacaaaaacagtgaccatttaggaagctcaactttagttctcccagaaagttcatgaggacttagacattgctacttctcagaaagattctaatgtgtcatagtttcatttggggtttctgttgtttcagttttttcttttacagaatcaaatacctccttttcatccaataaattcttgaataaaagacctacaggcattttactgatttcactcaagaaatcttccaaagatgatctttggggaagtcagtatagacttaggaaagattattagaagatccatacatcatttactgagcctggaactttagacaagtcatcaaacaggatcaaatctcagtttcctcatcagtaaaacgggaataaataacatctaccctacctcatagagttaagcatcatcatgaaataatataagctacatattctaatagggaaagaaatgtccatttcctctctcagaaactgaggcagagatccctgtcaacaaattcacacagggagctgagcccagagcccagaacttgtcatctccactctaggcttccacacaccagatcaaagacacctcactcagaaaatacacaacacaagtcacttctcctccaaaggctgagcaaaatcccctgaggaaaaattcctaacagatgagtctgctccaattttaagtacacgttcaagatcatattcatcagatgtaacaggaggtatactgggataaaattaattaattttattccaccatgaggtg

SEQ ID NO: 60829 - DNA, 605 bp, Homo sapiens
ccctaaaaggcagtctcgctcaatccccagcatctacttggatctgggcaggcagccacagaaacagaagaagctacagaggatgcaggcactgggttttggtgtctggacatggaagaattgcaggccaatatccacaaatgtatccgtgaggctctggtcttgaaacaaggatgtgaggaccccaggatggctggtgagggacactaagtggctcaaagaactgagaaaaaaataaaaacatagcagcaatagagaccagagtccgagccaggacaaggcctgtccctcagccacctggctgaaggcatcatcatgacctcaaggaggtaactggtgagtcatacagaaccacactgtgcactcttcaccatggtttatatgctcacagttcaggcaattgcttagaaaactgcatatcgttcatgcccctatgaatcactttcctccttttgttgtctttgtgaagtcatcacaaagttctgagtggaagaattcttccagggactgccaaggagtgacactgtagccaggtgggttcagctctcactttgctcaggatatgggtgtccagtggcgacagatcaggaaaatagccccatact

SEQ ID NO: 60830 - DNA, 1198 bp, Homo sapiens
cccagcctctcccatcccacaggcagggcaggttcctggtaacagcattgcccagtgttgtcaaaatagcgaggagctggaaagaattccagaatgaaatctatgtgcctctgcagcctcccaactgactgccactgtggcagctaaacccgctaatgtgctaagcgttttctggcagggccaggaggcagggttggtattttgggagctgggaggggcttggaggcaacatcctcggcaagtctgggaaggaggtggaggcagggaggcaaagggaaccgacccagaacacttcccatgacgtcaccgagagccacctgagctgcacctcaggattcctgaaacactgctggcggagcggagagtacggagagtacgctgggcccggtgggcagggctcagcagggcatggaggctttgtagctaggcctggggggagagggcgctctagtatgccacttgtcatgtacactttttctgctgacacagagcagtgtgcaatgcgtccgggaggctgggcagcccagggctggcccaagctctgtttgcctgagttggcagtggcagggcccatggtgaccaaacaaaagacgggaagccaaacgcccagaggctggcgggtgaggctccctgagagggctctgaggatacaggcactggcgaagaagggccaggggctcatagggataggaatggggttgggggcaatgggaacttgcaggcagggtcccctctggtttcccagacacaccgcatcgcctctgggcatcagcctctccacactgtccttgcttttcgggggctccttcgaaaatgcttcaaaccatgacaccaggaaggggagcaaaccaccaaatctgagatccaaacaaggtcccagcattcctttgtccctgatgggcttggctccaaattctgggagaaaccagagggttttgagagagtcaggagaggggttcaggggacaaaaaatagggctggtgaagaattccttccgggagccgtctggtagcagggagtaccgtgggtggcaaggccgtgctgctcaggtgaggggacatggtgtcattctgggaacagatgagccagtaaaaccctgacaggattcaatctggaggaaaaaaatcccagctgataggaactgctgagcgcttgcagcttttaaagcccctctagcaaaaggatctgcaaaagcttt

SEQ ID NO: 60831 - DNA, 963 bp, Homo sapiens
ggacgtggtccctgtctccagggtctggggcatcttctagaggagaagattgagacaagcattaaaagattatcatgggccaggtgtggtgctcacacctataatctcaacactttgggaggccaaggcaagaggatcgcttgagcctgggaggtggaggctgcagtgagccatgatggtgccactgcactgcagcctgggcaacaaagtgagaccatgtcttaaaaaaaaaaaaaaacttaatatgattttaccaggtagaaaagagaggaaaggggattccagagagtgggccagcaatctatgcacagagaagagtgagccatctggggcatccagaccatggggtgaggagcaatgaagggcaaaggctgagaaagactgaagagggaggctgggcccaaacaacggagccaagagtgccttgccaaggagtttggactttatcctgggggcaatgaggaaatcactgaaggttttaagcagaggtgggtgacgtgatcagatttgtgtttcagcaagattaccctggccacgggatggagaaagcactggactgggaagagactgggcagactctagaaacattcccaaaatagaattcgcaggactgggtgtcccactggagataggaggaaaaggagataatagaaacagccttctcacttgggcttgaggggccctcgtccaatataggagaccagtaagaaagccttgcccaaggtcacctcaagttacttgatggctaactcgaatcaagaagctcaagttccttctggtagaaacctcttagtctgcctcattcacattgatcagcaaataaatttaaccatcatctgccaggctttccttgttttccactttatacatgtgcactttttgtcctatggagattattaagatcattagggcaaaattccttttgacctcccataaggcctctcacagtacaagacaatatgt

SEQ ID NO: 60832 - DNA, 1029 bp, Homo sapiens
tctttacttaaaaaatacaaaattagccaggcatggtgtcatatgcctgtaatcccagctccttgggaggctgaggctgaagaatcgcttgaacccaggaggtggaggttgcagtgagccgagatcataccactgcactcctgcctaggcgacagagagaaactccatctaaaaaaaaaattagctaggtttaaagtcattagaggtcatataaaaatgcaaatttcaaacttctctcagaaaatcaggagccgtgacaacactgggctcacctccccatgtggcaaatggcttgggttgaatgtgaacatcctccctggaagggcataaacttcccagttgaccacagtacagtcccccaacccccacctcccaccaactccctattcttcgtctcctacaggtttacatggcctgactagcccccagaggcattggagtttgacacgcccacagcagtgcctccattttgccgatgagcaaactgagaaaaggcaaagagaaattagtcccccagatctccaagtgagttcatcagcaaatccagggctggcaatcattagacaatatttatccagctcccagatgtccccgcccctgctctgttcagtcactgcactcatccatgtggctgccccaatgccttgggcatgccagagagacacctcattctttcaacacacaggtcacaaacatcttttgtgccatgacaatctgattctcctcacgtcaccccaagattaactcttttcaaatctgtggttcagattatacaccctgaagctgctgaggggtgacctctcaataaggctaatctcccctggacctaaatactggtggggcgtgtgtgcatgtgtgcatgtgtgtgtgtgtgcgcacgcgcatgtgtgtacccatgtgaactcgctcatgcatgtgcttctagattaacactctttcttctcattaacttcccagacaggtgagaagtcaacatttgccccagttagagaaccagaaagtatcagtcccactgccccatctaaaggg

SEQ ID NO: 60833 - DNA, 2865 bp, Homo sapiens
ccaggggtgaagacgagaatgcgctgaattaaaagaaccagggtcgacagcggccacgcaccagggagaattcggcatgaaccgccccccacccgacctgcacctccctctgccacttcgcctgcggcttcgtccgggcggggaagtcccggtcgaaggggtgaggaccccccagcccacctcggatacggagggagccaccctctgccgacatcacccaatagcacccctttcagagcgacactagttttccgaggccacccctggctccgcgatcgcgagcggacttggcggcttaacagttccactgactggaaggaaggaaggaaggaaggaaggaaggaaggaaggaaggaaggaaggaaggaaggaaggaaggaaggaaggaaggaaggatgaaaaggaggaggaaggcaggcaggcagaaattggctgttggacccggggctggcccccgcgagtcctcgcccggcccgccccactctgtccaggatctgggcaagcgctcaaagtctccccgaggcggccagaggcacctgcccctcgcccggccgggagcagacgctgccccctcgggccaggagccccaaaaccgcctctccgcctgcctcagcgcctcacccagaggtggcgagaacaccattcataagacctgcggcttccctgcctccaaatccaccccaagttaacccgagtcgttaatccactaaagccagctcgctcgcaaatacacgagcagacacacgctcgatcgcccggagcgcctccgagatccgggggctgccggggaaagcccggggcgaccacctgggccccagcacgcccgggacccgctgcttcccccgcggtgctccaactccggaaggtttgcacaaactccccgcgagcgatcggaaggcgaagagcgccctgcaaactccggagcctccgcggtccgtccgctggacccagcggacccagcggcggggcgggggccgcgggctcgggggcgcggggctcggccaagtacaccgaggcggccactgcccgacgctcgccccccgcccagcagcccccgaagccgcgctccctgcccgcgaggcgggggactccggggaccgcgccgtccccgagctcccgcgaccctcctgctgtagagcgctcgagcgccgggcttctccgcctgcaacccctatatctggctctctctgcaatttagcagaacacaaatgtaacaattttcttcttgttaattgcatctcctgacatttctgcgcgttgggggaaaaaaagaagatgaagaagtaagagctgaaagaagagagaagccccgccgcggctggaggcgcctgcaagcgcaatgctctggcagcgctcgccacgcagaaggcgccttttttttcatattgaaaccacgcggaatatgtacattttttagtcttacttacgctttcagggggttgtgaatgacagtcgccattttgctacaatgtaacagaatattgtctcagagttctaaaggttcgctcaggggaagcgacgggccaatcacagcgcgggataccggcccgccggccaatcggcgctgctggtagctaggtgggcggggcctgcgccgtggtagttattaggagagctgtcaaagcccagaggtcactcccttttgtagagcccgagagccagcaggtcttaaaggggcagtacagcgctggtagctccttttcgggctggggaaagtggagacgcacgggagagtattatagtttggtttaactccctacttttctaaataactgcagaagagtttgcgctcccggacagaaatatttaaatattgccagcaagccactgaatcctattcattagcctttggctttgcgtatcaacatttttaatcccccaaagggtaaatccccgtgtttcagtgcaaaagttggaaggctgccgtttcgtgttaacaaattactacatgtgctctgccgtttgctaatgctctgggtcctgccgctttttaatattcttattcccgaagtgttctctttatctcggccaccttcctctctcgcttcttggaactgtcgctgctgttcctggcgactccaggacagcaactcaccctccccctggaacgtctcaatgtcaggctcgctccctcctgcagccagggctttccttacgtagtgcaggggggttactctgcgcggttccccgctaccaccccttcggttcttccctctacaccagaaacttccaaaatgctcagattcctgctaggtggtgggacctggagctctgatctttaggcttaggggtagggaggacttaaggcaacctttggaaactttctactgctaggaagcaagtgactaggcagaagttgtagagcctggactgggtgttatcagggtccctttagaggagtggcacacgcgattctggcgtcacctttcactacttagatagaaggtggaaagaatttgctaatgaataatccgatgtgacccgaggcgtccaatgagtctgtgtctgcttcaagtcagtgtgaactcttcactggcgagcccctgacaaaattgggagacttctgcgaagtcaggcttccactgggcaccgggaagctctggggggatgaaatcgcattaaatcgcgaatagggtaggggcctcgttagcatacagaagtctggctaccattccaaagctgtttaatcagatcaaatagctaagatagtgggggaggggtggcaaggggagagaagttgccaaattgccagttcttcaaagctatgccctctcgcttccttttgctcctctcaagacaatgaataaaataaaataaacattccagaattttaagagttcaactacatacactattagatttaca

SEQ ID NO: 60834 - DNA, 1598 bp, Homo sapiens
tggagccaacacggaggccccccggtttcacggtcagggctcgctacgctacaccctgaacgcagacccagggcagcggcctcggccgcctgaggccactgccgaagacttcgccgccagtcgtaacatcacgttacttctgtccctcgcctcacagactccttcgctctttccactacagcgagaggacttctccagggccgcatcaccctgcggagggaggaagacacggtctctcacgaaagggtctccagacagttccgctgctccgggagcagcccccggccccgcccccgcgtgcgcctggccccacccccaagcgctccatgaccagcctccacgtgcatccgccccagacaggccaggcctgggaggagccgaagccccactccccgccttcttcatgagatcgtccctattgacgtcgacagacagaagccgcgtccagtgagaaggaaagaacggccgctatagccctatcggctgctacaacaccaaaacgcatccacctaactggctgacgctacaccttggtctttccgggtccttgcacgcttcgctccaactcctgcagagctgagccggaggggaatccggaagggacacgctgaacaggtaagactgtgctgcctggggtgcctactggcatcgattcgagggctgccgcgctcccgctgcagagctcggggtgggagacaggcgcggcgaggaaggccagggaaaggggcggggaggggcggggaggagtgagcacgtggaacgccggcgccaccgggcctaggtggcagctgggccggcgcgctccgcccgttctggggcgcgtggggccctccggccggatcagtgctgcaaccgtaaacacgcagggagggcaccccgagtgtcgccgctgagggcgtttctctaagcgcttctctgagacctgctgctgaaggccccacccgacacctggcgggggctgggctgcgggccttggggcggtgtcccctgtgaatgttcaggtcagcataacaggttaggtgtggttgaagcttacgaagtggccggctctgtgctgccggcttcacaggcgctaacatttgccagcgctatgatgtccttgtcagacgcagaaaggggtgcagtttggttgtccgtcggggtagcgcacaactagcaagtgatggggcctgggtttggccctcgcctccactctgagttgtgagttagcgagaaagccacgcctcgtgggctccccgggggcttcagaaaccatgacgcctttcaccatggtgttctacaggcattgtcttgtgactccagcagcgcagccagaagcaaagaaaactgaggggacggcttcctagaggaaacaattccaaagtcccaaactctgattttaaataacgatggaaattagagtcgcggtggtgttcttttttttttttttttttttttttttttgaggcggagtctcgctgtcgcccaggctggagtgcagtggcacgatctcgactcactgcagcctccgcccccggggttcacgccattctcctgcctcagcttcccgcgtagctggggctacaggcgaccaccacctcgcccggctaattttttgt

SEQ ID NO: 60835 - DNA, 1376 bp, Homo sapiens
aaataatttttctctttgtcacttaaaaactaacttaaaaataacttcaaaatacgaaaaaagataactggggcaagaaaggggcttttgtcactttgacaattatattcctaattccccctagccttgacccgcattccaaggccccgacaaggtgtaaagccctgcctttctgatagtcactcctcccctacagtaatcaatctatcaaccttattttcagataaacaaggaaggcgaagggagtgactaggggatcttatttactacaatctaacctcagacatgcccagccagctcccaaaacagaaacaaaaatcaaacttgtcacaattgagaaaaatataaaatcaaccttcaaaagtacacctcacgcccggccatgtcaaccaaacattttgcccactcgggcccccacctcgacacctctccccagccgggggttcctcacccttccttccacccggacaccaccgccacaacccgaggggcaggagcggagcctaagaacaaagaaggtcccccaaaatcccccccacgccggcaaaacccggagccgaatccattgtttataccaccccacccccacccccgccgcacccgcccccccttcctcccgagggcagcctgagccccaggacgatcactcgccccgcgctgggccgtgccctccccgccctgccctgcccgccgcggcccggggatcccaccactgagaagctcggccgcagcaaggcggcgtcggggggccgcagggcgccagtgggggcagaggctattcctcaggacaccggcagatccatcctcatctccatctccgccaccctcctccttcgttgcctcccgggcttcctcctctcctgttgtcagttgggatcagctgatcggagtgaacttctcccagctcggactaacaggaaggcgtgagcggtgcagcccagaaagggaggagcgagagagggaggatcccggcgccagcaagggcgtagtgcgcactgcctcctgggagatgtagctcctcgaggcgcgctctcgcccctcatcccggaaaggaagactctgaatgactacaactcccagtactgaagaggctgctcttgcgaggaggcggtggggacaggctacggaggatttcgggacttggagtttttgcattgagtgtggtgtccgcaggtttcagcacgttcttttgggttgtaactggggaaggcatggtgctacattagagaactgatgtaataatgtctagtataagtgggaaatggtgagtcaattaatttggattcaagtaacctcttgcacaccattccctcagaaacgtgtgagcacagacagtctccaccttcccaatttcacttcgcaaaaactaaggaaaa

SEQ ID NO: 60836 - DNA, 2202 bp, Homo sapiens
ttctgtcactcaacaaatatttattgagcgcttgctatgtaccaggacctgttcttgcacaaaacaggcaatccatgcattgcttacattcacattctagtgggggtagtgacggaccataaaatcagcaagaaaaatgtatgttatgatagatggttatgagtgctttagagtaaaattaagtaggggaggcaggcaggaagtgtgtagtatgtttcaattttatattaggctggtcatggtttgtcatctatttcacctggctcacagttcttgcaggacaggaacaaatctcacttccatttgccttcatacttccagcacttaacacagcaccaggaactcagggaggcaataactttatactgaatccgttttatgccttcctagaggcaagcagttgagaaaggcgtgtaactagatattgcctataaggtccacaattggaataacgtaatcatttatgattaattttattcatttccattaacttaagctaagttcttttagcacgtttagattacagaacgaaagctgtgttaactagtattacaggacttttcacgtttttccaaacatcttctagccacctctttggccctacaactacgcataagcttttgcttttcaaaaaacctccacagcctttgccaattatttgttgatctcgagtagttgttataacagcacttggggtttaacactaaggttgcagatcgcgcccagttatcagttcctcgaacctcaaggaatcacaaagcaaggttccaccccccgaaaaactacgaaaagtgagaaagcctctaacactcctcgcgccgtgcccagccggaaccttgacctcaagatggcgtcccgtagtcgtaagattcagtcggctccaatcaaacatggtgggtcataatttacagttcgggcctttctagtaaccgctagacgctgcttctctatggttattcgtctcggcttggtgagtcagagccaacagcggagacgatctatatacgttcttctctatggttccgcgctccccgcccccggccgcagtgcacgccgggcaagaggaagacctccatcagctcgccgcgcagcgcggctgtatttgcggcctgtgcgagtaggcgcttgggcactcagtctccctggcgagcgacgggcagaaatctcgaaccagtggagcgcactcgtaacctggatcccagaaggtcgcgaaggcagtaccgtttcctcagcggcgggtgagtttgtgtctctgaacgcgtgtggaaaccgggagaccgggtgcctcagctggtggaggaggaaaagccggggtggctgcgaaagcgccagggtggggtagaggtaagggggagcgcggaggcgggggtgggggaggggtcggcacgaggcttggtttcttctcttctctaaggcctggaaaagctgtgggcccagccgtagctggtggaggccagacctacggcttgagctttccgtcttgcattgtcgcccactttccctttcccttccacgttccgccgcggagtgaatcgtctctgccccccctgggctccacgttagatacaaaacgatcgatctgccccaggggagcccttccctgagcccccttacttaccggagccccacagtaggttttcgggcctgggacactctcgccccagccgttgccttgaagttagcctctacccaccctttttagcgaggtgctggccaccaacggatatctttcccttcctctttggccatctagagcccgccaccaagtgaactgggccccacccccttggaattgagctaatacctacctttttagcagtctcctggcttgcttaagatagtcatgaattttgccatcctgcctcttttgcgcattggagggtgcagtaaactgtatatcgccattcattctaggcgattactaagctccacattaaaatgttactttctcatttttctttggtcgtcaatcctgcttttaaatacggttttccggaatagacgtaggactatgaagatttttcggaggttatgtaatatggatttgtattgccatggaaatgccattttgatactgggcagagtggagccaagagaagggaagagattggacctctgttgcaccctactgctgtattagtgtgaagtactctgtgtattaggccgtgggcagtaatgtataaataatttttgtatagtctt

SEQ ID NO: 60837 - DNA, 880 bp, Homo sapiens
tcaactctggttaatttctgtctgaagccactttttatagaaacacagtggccactcaatgttctgggcagacatgactccctgctgtctccttgggtccgtgggcatttttaaagttgctctttttgttgaagttctgtatactgagacatcagctctagcaccacgtctttttagcccctagcatttttatttgtttttgtagcccactgcactgccatagcttaatctttctgtctataaatttactatctacctctacctctggctcctagtaattttactctttggaaggttttattttttatttaaaattttttaattatattgatttttttttttttctgagacaagtttttgctctgttgcccaagttggagtgcagtggtacagtgttggctcattgcaacctttgcctcccaggcttaagcaattctgcttcagcctcccgagtaactgggactacaggcacacaccactgtcccggactaatttttgtattttttttgtagagtctaggttttgctatgttgcccagctggtctcgaactcctgagctcaggtaatctgcctgcctcagcctcccaaagtgctgggattacaggcgtgagccaccatgcccggccttatattgaattattttgatgagtcatctcactgttgaataatgaggtatagcaaacatgaacaaaggaagaggagaaagcagcaaggaagagagaaaaagctcctttttcttcaggctagtttaaaaatatacattactgtgttgcagtttcttacttgattatggctggagggagttccactttaggtcatttcacctagttgctagaactggaaacccagagctctcaaccttcagtaggcattaaaatta

SEQ ID NO: 60838 - DNA, 1470 bp, Homo sapiens
cgctgggcccaatttatataggggctttcgtcctcagctcgagcagcctcagaaccccgacaacccacgccagcgctctgggcggattccgtcaggtggggaaggccaggtggagctctgggttctccccgcaatcgtttctccaggccggaggccccgcccccttcctcctggctcctcccctcctccgtgggccggccgccaacgacgccagagccggaaatgacgacaacggtgagggttctcgggcggggcctgggacaggcagctccggggtccgcggtttcacatcggaaacaaaacagcggctggtctggaaggaacctgagctacgagccgcggcggcagcggggcggcggggaagcgtatgtgcgtgatggggagtccgggcaagccaggaaggcaccgcggacatgggcggccgcgggcagggcccggccctttgtggccgcccgggccgcgaagccggtgtcctaaaagatgaggggcggggcgcggccggttggggctggggaaccccgtgtgggaaaccaggaggggcggcccgtttctcgggcttcgggcgcggccgggtggagagagattccggggagccttggtccggaaatgctgtttgctcgaagacgtctcagggcgcaggtgccttgggccgggattagtagccgtctgaactggagtggagtaggagaaagaggaagcgtcttgggctgggtctgcttgagcaactggtgaaactccgcgcctcacgccccgggtgtgtccttgtccaggggcgacgagcattctgggcgaagtccgcacgcctcttgttcgaggcggaagacggggtctgatgctttctccttggtcgggactgtctcgaggcatgcatgtccagtgactcttgtgtttgctgctgcttccctctcagattcttctcaccgttgtggtcagctctgctttaggcatattaatccatagtggaggctgggatgggtgagagaattgaggtgacttttccataattcaggtgagatgtgattagagttcgatctgcggtggtggcagaggcttacaagaaacactaacgggacatgggaaccaattgaggatcagggaataaagtgtgaagttgactaggaggttttcagtttagaacatggcagagacattctcagaaataaggaagttaggaagaaagacctggtttagagaggagggcgaggaagtggtttggaagtgtcactttggaagtgccagcaggtgaaaatgccctgtgaacaggactggagctgaaaacaggaatcaattccatagatttccagttgatgttggagcagtggagaagtctaagctaaggaaggggaagaggaggccaaggcaaacacttaggaacacttgcaacgagggggtggaagaagagcaaggagccagctgaggagaatgagtgtggttggagaaccaccacagcgcagggtcgccagagctgag

SEQ ID NO: 60839 - DNA, 591 bp, Homo sapiens
ggttcagtaatttgctagaaagactcaactcagagaatgttttatactcaaattatagtttagtacattgaaatgatatggattaaatttagcaacagaaaaagacacatagggcagggtccaggagacaccccaggctcaagctgtcaatagtcctctcccagtggagttgtgcacacagtgcttaatttttccagcaacagtgtatgacaacacacgtggaatattggcaaccagggaagctggctgagccttggtgtccgggtcacacatggctgacctcagttctctggccccttcagaggccaagctgatactgtgtgacacaaggccctcaccgtagatcacattattagcggaaacttgttggcatgacccaatgcctcatgtaaacagcgcagtggctgtttataggccgggcgcagtggctcacgcctgtaatcccagcactttgggaggctgaggcgggcggatcacctgaggtcaggagtttgagaccagcctggctaacatggcgaaaccccgtttccactaaaaaaaaaaaaaaaaaaaaaaaatagaaaaagaaaccaaaccaggtgtggtgataag

SEQ ID NO: 60840 - DNA, 608 bp, Homo sapiens
tggtttcggcctcccaaagtgctgggactacaggcctgagccaccacgcccagccttatccttcattttagacagtttaagaggtttgtattcagccagatctccacatttacttgttcatttgtgttgtgatgttttttaatgttcaagtcttagcacacacaaacaattatatagaaacaagttgtttactttgacacccagtataactaaaaggatcttttgagtcagagattgagtaacttgccagagcctgtttggaaataaaccctgaggatttttcatatcagtggttggttatgcaatgtctgtggcaagccctagaaactaaaagaccaaaccttaaaatgttaaaaacaggaaaggcagttaattattatacataatttgttataaaaggaactataacttattaaagtcagatgatttctggccttgatagtttagggtttagagaagatactgttgtgtactataaaacagcagggctgttttctttcataccctttagcacaggaaagctgaactagggatttttgcaagatgagaaaggcctgttgaaatgtgtgtgtataacatagtaataaaagaaatgcatatgaaaataa

SEQ ID NO: 60841 - DNA, 1245 bp, Homo sapiens
agagatagatggtcaacaaattattacataaataattcatacagttgtgataggtactacaaagaagacgtataagttgctatgaaagtttataataggggaattttacgtatcctggaaagtcaaggggtgcttccctgaggaagtggtaataggggacggcccgctgaaggatggaggaagagctttccaagagagggacaacatgagcaagggctttgaaatgagaaggctggatgaactgcaggcttcctcagtgagaatgctgctggtattttggggggcacagttctttgtgggactttccctcatattgcaagatatttaacatccctggcccctcacccactaaatgccaataatggctttaaggctttgcaataatcaaaaactcctccatcctagttatttccaaacactccccggaagggaggtgctatccctagttgaaaaatcactgtgttaacggaactagaagttacattggaacaaaagggcatagggctccaagagggatatctgtgtaaggaaaaaacaaacaaaagaactgagagattacctgatgtggttgagctctgtcagagcatttcaggataaattagtcatagataataatataaaattcatcagtggaaaaaaatgaggcagttttccaaagaaaacaaaaacttgctcaaaaaagcaaatgtaattatagtatattctggctatagcaaagtagtttagttgtgaatattatttgcatagtgagaatataaagctgaatttaatataaggttatggcactgggaagacaggaagagttacatttgcgtgcactaaaggatgagacctaatgctttatcttctctataggaggtgaataagtacctcaaattaaaacatcaagttatggcacaatgagcatgctacttataattaattatggaggtaaataccaaaagggatggctaaaagagtttaaggtaggaatgagtatcagaagtgaggagggagggggtagaaaagggactgctgttttcatttataaatcttattcttatattatttcataaactccaaaccagagaagattcaggtttttggagatctggataataaaaagaatacaaaactatcaatacaaaattgtgagggctctcccagaggaagccatgcaaggaagggccctgaagcttacaagctttacttattcatggcaaatctacttctgctctgaacatgtattacttttataaaaaatga

SEQ ID NO: 60842 - DNA, 1887 bp, Homo sapiens
caggtcatctttgaggactctgttttctcaattgtcaaggaccagaattccctctttcccctcttgcactatggataaaggcatagacatgttataagtgattatgcagcttttgtcattaaagatatgtaataacacggttcgccaaggtgctccaagcatttggtaattattgcatgaattgatttttgtttttaaatcaaaacatactttggtaaacattcctgtgaagggaggcccattccaagtctcagagttggagtgccaccaagaccccgcctggagccccgctgctctgccagtcaactgatgggctcctttaccctctctcttcctggcagtgctccatagcggtgggaaagagggtgaggccttgccactccgcggagggccccctggcccaccccaatgctgaagacaaatctgaccccatcttcccactgggaacttggccaacccagatgttcccgcagcccctccctccgctcctcgctccctggatggggcccacctccagcgcatttttctcactccaagctccttccttgccagatggctctgctggaggattctgccccgggctgggaggggctggggacctgattctctcatttccctgtggtttggcgagtcttccctcgcccctgtcgttttcagagcgagccccgcccttgtctgcagactctggctgcctggacaggcaaagggaaatggatgggtcaccctgatgcctccgagcccggtgacaggagctaaggatggcaaatacagaccgaggggccaccttgccactgcctgaccctccagggagcttgggcgccgtcccatttcttaaactcctggcagttgcccaataaatggtgagtcagtgaaggactgtaggggtggctgcggggtctgcgggaggggatttccatgcagaatgatgtcaataggtcatgtgcatgggaattgttgtgagtaagaacaaacattaaccagcttttgcccctgtttacaaggctgtgctggagagtgtggagccgaagtcaaccagccttatcccttcaggagacctgaatttataaatggtggtcaggatgaatacaaacaggattcctcccccagttcacgtttgtgacatctggagagatgtatgggtttgtcctgggtcattgtcaccacattggatgcagggggaataaaggatagggcggttgttaatacataccccacatttaaccaagaaaagccacagaggaaggtactgcttcataaaaccaatgtcccttgagcatgtcccttaatatgccacagacactatgccaagcccatcacaggcattgtctcctgtcctcaccccaccctatgggtagggcctgttagccccattttacagaggaggaggagcgctcccagagtcactgcccgcaggtaagtgggagaggctgtgcctccagcactgtcaaggacgggggcactggaccccatttctgatgaaccgaatcttcgtctgagtgggccttggtagcgcagtctcacaacctttctcaactttctcactaaagctgctcaagcaacagaggacagagacactgagggatgtggacacagtccaaggtggcagccttaggtggagagttctctggagttttaccaaaaccaaaagttttatttcataatatatgctttttgttgtcttactgggtaaaatacaacataaaatataccatcctaaccatttttgagtgtgcatttggtgacattaagttccttcacagtgatgtgtagctatcacacgcccatctccagagctccttcctcaccacaaaacagctccccgccccagcctccagcacccccattccagctctgtctctgtgaatttgactactccaggaacctcac

SEQ ID NO: 60843 - DNA, 757 bp, Homo sapiens
tagaagttgaaggtctggctgaaatgttgctttgtgagtgggactgacttgtcggcttcctgtctatgatctctttagagatcgcctccccagggcccagctcagtgcttggcatcactaggtgctcatgttgtggctggaaatgttgtccagcggcttttttctcacctgttgctcggcgagcgggagggagggttacagggttccttcctgccgcttcgccagcccgccgccttgacctctgtccggggcctcgctcggcccaccgtctcgctccgcccacttggccgggcaggctgcgctccgctgacccggatcccgcactcgtggcggccccgcgctcagcgcacggcacaggcggcttccgcactgggtgctaacgtatagacaaggggaacatggtggcgcccgaaaactcggagatgccagcaaccgcggagccccaagggggtgttacagggacaaatgttcccgccgctcgcagctcggtgaacgggagcgttaaaactcgttcttccctccattccctcctgctcacccagctacaaaagccgcgacactcagatacatggtgactaagtgcctgcctgcacaatgatggagttacattggcgaaagcaccacactccagggactacttttcacctgtatcatgtccagaaaattgaccttgtctacataataaccaaatcaaggctgtgtgacaaagcaaaatgcagattcacagtgagagaactgtcaagaggacctagacatt

SEQ ID NO: 60844 - DNA, 621 bp, Homo sapiens
gcatggtggtctgtgtttgtaatcagctacttgggaggttaaggcaggagaatcgtttgaacccaggaggtggaggttgcagtgagctgggatcgtgccactgcactccagcctgggcaacaagagtgaaactccatctcaaaaaaaaaaaaaaaagaactcagatcttaacactaaatgctaatgcttagtaccttagacatgctatgtcatgtagaacaatatgttgagagaatactatttctcataaagtaaatgagtaactaaagtggtttcctgaacgttaaatagtctctcaggagattgtactttggactaagtggaaggataaagcttcaacaatataatacccttcaacagcttaagggtattatatttgatcattagagattttaaaaaacatatgagcagtcccatttaagcttataagaatcttaccttaggccaggcgtggtggctcactcctgtaatcccagcactttaggaggctgccggtggatcacctgaggtcaggagttcgagatcagcctggccaacatggtgaaaccccgtatctactaataatacaaaaattagccaggcgaggccgggcgcagtggctcacacctgtaatcccagcac

SEQ ID NO: 60845 - DNA, 880 bp, Homo sapiens
atctctcatatttagccttcctattatcaaccagacacaggactttcctaccactaggaagggagtggtttccagttttaagatgatacaattgaaaagttttgaaaaggaattaaaaatagtctcaagagaataacttgaaataaaaactgtgttttaataaaatatgagtcaaattagtaatccatcacttaaatcctagatctgtgtctgctactacctagctgtgggactttagctaacctacctacctaggctttgggtcctttatctgtttaaaaaaagaacactttatgaggtctcttgggctcttctaattctgacatcataaaattctattaaatgtatgacaggaatgtttgctaagtgtaaacatattcagcatttacacagtgttttcaacaccttcaaaactctaccagtgaggtccaccaccttctctcctcccaaagtcacataagcagaatctaaaaaaacatggctaggcacagcgcctcgtgtctgtaatcccagcgctttagaaggcagacgtcaggggatctcttgaagccaggagttcaaccagcctgggcaacataccaagactttgcctctaaaaaaaattaaaaattagccaggtatggtggtgcatgcctgagtcccagctactcaggagcctgcggcaggagttcaagctcaggagttcaaggcttgagcttgagctcaggagttcaaggctgcagtgagctatgatcacaccactgcactccagcctgggagacaaagtgagaccctgtctctacaacatgaaaataaaaacaaaataaaacattttctgagatatttccaaaataatttttaatatggtaatatatgctagaactttaattggagaggtgta

SEQ ID NO: 60846 - DNA, 2405 bp, Homo sapiens
tattctgatgaggaaactgcacagaaacttagctaagtggtggaactagaactcaaaacttcttttcactttagccgagtatgcctaccctctttctgataagtatttacttctactcctttagttcagctactcctccccttttccctcccaaattccccaccctgtcaatgaacctatttcctaatattactgccatcatcctaaaacaaatttcttttctaaaacaagtcacttaaccttgcttttaggagctttgctttggtcctagatgtcatcttgatattaattacgaaactgaagtttcttctatttgtgaagacctgtgaacctacatggctccactgttaatttctcatatatctactgtcctagccagttccacgaaaccattactctctcctcgggcaactttctttctctaccttatcccctcctatagggattctctcccacctccgcccatctccgtcccattttgcatgactcctctccgaccgagggaacttccactcccctgctggctcctcaccccggtctcaaacgcgagccactcctcgaggacttctttcctggtcccttagggatcctcagagccggagcggccaggccagttgggtctcccatcccagctcagctatgggggcgcagggagctccggttcttcccccaggcggtgcaagatctctactcgtccgaccctccgaagacctgctgctcctcatctctccaggagccccctcccttggacagccgcttttctcaggagggtccccaaccccctccgagcgtttcctcagacgcccctacttggagcaagtctgctccctgtcacccgggaccctggccaccctcggccttcctacctccctcggaccggggccactcccagttcccctgccccccaccccgctctctcctcaccggccgctgcgggcttcccggattccttttctccctggcacccaagccgtcctgggtattcccaagacaccccgcccttgaagcaggtcgttacaggtcaccccctctctgggaccctggccgcttccgtttcctcagatacctactcctcacacagtggccgccggtcagcgcgctagaccggagcagctggacgtcccaagggacctcctggcctgacccgcgcgggtccggccgtagcctaccttcctcgggagaactccgcagccagaagcccagcccctctccccctagcccagtcagcgcgaactcgccgccgcccccgccgcctccgccctggccccggccccggcccgggccccgacccgaagtccaggcccccttcctccggcctccgcctccggagtgctgagctggagattccgccccgcgacggcccccagatctctgacccgcgttaccggcactcacctgccgctgcccccgaccaactcaagcgccactgcctctacctcggccgccagtggccaccaagcgccaccacctcccccatgacaacaggcccaccctctttcatacttctaacctatccattggatagtggggcggcagctctcctctctgattggtttagtatacccgcccgtcatcgctctttaccgccccttttcctaaacccggtattcgcccccgcccggacctggagcgtcctagcccaagctttagttgtaattggttgagggttgggcaattcgaagttatgataggctgctaaaagtgtctgttaagctaactggcaagagacgtgacggttaaggttgattcacgcttgtgcacagtttggttgcgcagtagaaagcaaaggaggggcagacgctcacattcgtggttacccgggaagggttaagtctttgttgtagagttttctctgtaaacttttccacttctccagctcacttcctgcaaggagaagcttatctctgctagctttattcataggggtagtacttacaaaacaccaacattagaggttgtgtttaagaagtgtttccaagccctggggagaaaggtatcagagagataaaaatgtccccttcttttctttggtctcaatgcatccaatttcattgaagttctttccaggagcctcaatgctaaagggcaaagcgcaaactttcatttagcagaaatcagtcaacttcggttgcaattataaatgtcgtcaataaactgaagtggcgtattgagagttctccagcttccagatccactcctggctgacccctgccaattgaccagacagccattagcaactttttttttttttttttttttctgtgagacggagtttctctcttgttgcccaggctggagtgcaatggtgctatctcggctcatcgcaacctacgcctcccaggttcaagcgattcttctgccttagcctcccgagtagctgggattataggcatgagacggggttt

SEQ ID NO: 60847 - DNA, 2494 bp, Homo sapiens
ttcaaggaacatgccttgaaataacagaaggctattgtgttatcaaagactgtgcagtaccggaggggttattgcttgtatccctacattttgctttcacgtgcacaaggtaaccctatcatgtaattactccatccagcttttttcttttctttcctgtgttttttgcttctctaccattctcagggctccctctcagaaaacaagaacactggagtctgggagtctgcagcttcctgttgcatggctggctgtggaggtcctgcagatggtatctgttcagagccacttgggcacgaccaagatggcaggtacattcggggcaaaaatagcatttataatcccaattaagcagaaaatagaggactcagagtgatgtccaatatctgaggagtgatatagtgtgccttgggctttcctgtacactaatgctgtttctcctgctctttcataatgtcacttttcaagggaaaagaatccaagtctctttccatttctattttagcccacaggggcaatctcactagggaaaggatccattttttgcttttggattttcttcctctggattctacacacgattccaattccaactagattagagaaataaacaaccggtggagaagaaaatcgctcagatagcagacaagggccagaactgcctgccactagcagttggaggcaagccaaaatatttgataagaggtagcttcctgagttagggatccctgagggtggaggctgacaaagatgaagggattagagagaaggggagggaaaaggagggaagaggaggagatgagggggcaggagagaaaagggtaagaaaagctagaaaaacagtcaaaaaacccaatcagagtgctgagccagcttacagtcctgccttgcctaccccctatccccacccatgtggactttacactaggttgcataattacaccagcaaagtgcagcctctgccactggttaaaagggaaagcgtgccaggctccagcctatgggaccgttgttctgctgccacctggaaatcctcccagagctcaaagcctgctgctctgggcaaagctgacaaggaaggacagattcagcagccaaccaaggagcataccttcatttgatttccttaaggcaaaagcactggctaaacaaagggagactatctgggagaaggtgttttcaccctttcaagctggggtgctttcaccaccgggaagtgccacgctgctttccacgctggaacaaggtactgtggtttcaaagttcaaggctctgtttcagggatgggaaggaaaaaaaaatcagtgaaagaaggtgttctggtctctcaggcagaaccatttgttatttgattccagagctcatgtaatttttaaataccacactatgcattttcattactaaatgcattcattttcatcctcaagaaaagtgtatgcccccttccgcctgctttacataatatggcttgagcgcttgtaaaaatggatgggctgtagctctgagttctgccattgtgctattgactggagctcctggttactatcaccagatctatgggtggatcagccattcttctgcagcagggagtggaccgactcaaagcacttagcaccatttaaacttttgtccatctctgtttttatgcacacaaagagtttcctggaaacatggctatcctccaaggatttcagagagtagaattcttccagaactgcagtgtcccaatcacttggaacctcatgagaaagcagacttaaactcagaccctagaacctcgaacttagtatgttccaaaagctttggctctgccatttaccaactgtgtaatttggggaacattgattcatcaccctaaagcttcattttcttcatctataaaatgagatacatattagctatcttgtcttgcataacaaattaccccaaaactcagtagcttaaaagaacgtttatcgtctcagtttctgtgggtcaactctctggcattgggtctcttataagaccacagtcatctcaagctcagttgggacagatctgcttcctgcctcactcacctcgttattgttggcaggactcacttcctaaggccttggttccccaggagctgttggccagaagcctccctcggtgccctgcctcatgggcctcttcgttgagcatctcacaacgtggcagcttacttcatcagtgcaagcaagcaagagcaagagagaggactcaccagagacagtaatagcaaaacagaaggcacagtctttcgtaatccaatcacagatgtgacatcccatcactgttgccacatcctgtgagttagaagtaagtcattaggtccagcccacactcaaggagattacacaaggatgtaaagaccagcaagaggatcattgggagctattttagaagcagcctactctaagataataataacatctagggtttgtttaaaatttaaattagagactgcatggtggcagctacttgggaggctgag

SEQ ID NO: 60848 - DNA, 1384 bp, Homo sapiens
gcccggccaatttttgtagttttagtacagacggggtttcaccatactggtcaggctggtctcgaactcctgacctcaggtgatccacacacctcggcctccgaaagtgctaggattacagtcgtgaaccaccgcgcttggccgcaacttgatttttaaattgctctctgagtgtagattccttgtttgtttggcaagggttcttgccgctgccgctacagcttgaagccaaacatttaatgaaagagagcgggaggggccgaatagaagaatgatgggcgtggccaaccccgaggtggctggaggccgcgcccccttcccagagtgcaccgcagccgctgcattcaggaaccgctttagcttcgcccccggccggccgggcggggaagactggtgtggtctggccatggatgggctccaggccagtgcagggccgttgaggcgcgggcggccgaagcgccggcgcaagccccagccacacagcgggtcggtcctggccctgcccttgaggtccaggaagatacgaaagcagctgcgaagtgttgtatcccgcatggcagcgctgaggacgcagacgctgcctagcgagaactcggaggaatcgagggtggagtcgacggccgacgacctgggggacgcgctacccggtggggcggcggtggcggcgtcccggacgcagcccggcgagagccatacggccacctggggcccgcagagctgctggaggcctcgcccgccgcgcgctccctgcagaccccgtcggcgcgcctggtgcccgcttccgcgccgcccgcgcgcctggtggaggtgcccgccgcgccggtccgggtggtggagacctcggccctgctgtgcaccgcgcaacacttagcggccgtccagtcgtccggggcccctgcgacggcgtcggggccgcaggtggataacacgggtggggagccggcctgggactccccgctgcggcgcgtcttggccgagctgaaccgcatccccagcagccggcggcgagcggcccgcctctttgagtggctcatcgcgcccatgccgccagatcacttttaccggcgcctatgggagcgcgaggcggtgctggtgcggcggcaggaccacacctactaccagggacttttctctaccgctgacctggattcgatgctgcgcaacgaggaggtgcagttcggccagcatttggacgccgctcgctacatcaacggacgacgcgagaccctgaacccacccggccgcgcgctgcccgccgccgcgtggtccctgtaccaggccggctgctccctgcgtctcctctgtccgcaggctttctctactactgtgtggcagtttttggctgtgcttcaagagcagtttggaagcatggcaggctccaacg

SEQ ID NO: 60849 - DNA, 1298 bp, Homo sapiens
gacagagtgagactccttatttaaaaaaaaaaaaaaagcatcttcataagaaacaaaaaatcaggtgagtgatcacagtacctggttttcacatcgtatcaagaagaggcactgaagagggtgggaaagacggtcctgcatcgcctatgcccccctccctcacctctggcacaacagcttggagagagaatctgtgcatgtggtggagcgagaggagtgtgggattttgcattggaactcactgctgccctgtcacagcacagcactacactgagcagaattctgctggcacccacagaggacacatttagatcagctctgggccagaggagaatcctcaggtagagtgggacagacctgagtcccagctggttctgccaccagctgaccaaagtggcctggggccctgaatacatatgagtgacagtcaggtcacaaggactatattccttaggcaaaccctggagatgcactggtcatggaggcagtggactttgggtgtgtgtgaccgcgtgtgacaccaactgtggtgaacaagggagtgcctgcatcattcctcccccaactccagacagggcagctcagggagagactcctacttggggaaaggagagggaagagtactcaagttgcaagacaaagtccagaagactttgagtagcagctcagccacaggaaaataaagcaccaggcagaatcctgaggctcctgattccaggcctttgctcctaagctacatttccagacctaccctgcgccagaagggaatccactgctctgatgggtcagatttatcctggcaggattccccacctgctgactaaagtgcccttgggctttgagtaaatatcagtggtagctaagcagttctggccacaggccttgggcaggatccaatactgtactggtctgcaaagcttcaggtgtgacccagtgcactgccatctgtggtggccatgggagtgctcatgtcacccttccccccaactccagacagcccagtggggagagagattcctgactgggggaaagagaagagacaaagtgagagatgttgcctgggtaaccggggaattttcccttatcttacccaaggccaccaaagatacaggagtatccaggagttggcaacagttgcaggggtcataggcttagggcaccccctggtatacatcagctgcagagaccgtaggcttaagtcacagcacttaatcccctttgaatatatagaaagccttctcaaggaggatgggtacaaataagtccagactgtaaagacttggaataaatacctaact

SEQ ID NO: 60850 - DNA, 2439 bp, Homo sapiens
aggcttaccttgaggacagccttattaggagcagaggcaaacacaggttttgtgggtttgaagcctacacatttatagctttctctaattacacaggtaggaaattataaaatcaggtacaagggcttggcaggggcctaaagcttaagtgatgaaaaaaaaaaacaccacacctctggtgaaaccaatagcttacgaaaaagtagaaaaaagcgcgatgcatggggagctccggtagtcctttgaggtatttgagaggctgagtcaggaagatggcttgagcaccaggagttggaggtttgtaagtgcagtgatggtaaactgccgctgtactccagtctggcaatgtagtgagaccctgtctctcaaaaaaaaaaagtaacccttgcctgactgggacaataattgagaaaccagtaaaacaaaataataactattagccgggcgcggtggctcatgcctgtaaatcctagcattttgggaggctgaggcgggcggattacaaagtcaggagtttgagaaattactacctattaccccatttggctatttttacacttgtaaggaatgaagctcagaggtcacacagctagtaagaagccagcacccttcgatgtgggattgatgtggaggataggcatatacagagaacacaaaagcaaaacaccatggtgcagattttgaaagaaaagccctaagattagtaatgagtgtgaattattcaacaaagtgatcaaaactaactccagctctgcattcctcttcgccatcaggagtttggagcctggagactgctagctgcctggttctttaagaaccagccctggtccagcccattccgcaggccagcaagcttctgaaaagcaaacctaggaagtagctttccaacataaagtggaggtttcaacacaggagactttaagcaagttccagtgtgtctatatttggtctggctgatcggctggactctggccttccccgctcacgttagcagacagctctgccctagtgggcgcttagcctgcgacggcagcccgagaggatgtctaacaagcttctttctccccacccccattcagttgttctcaggtctgaattcaaaatggcctcatctcctgctgtccttcgagcgtcccggctgtaccaatggagcctgaagagttcggcgcagttcctggggtctccacagctgaggcaggttggtcagatcattagggttcctgctcggatggcggcgacgctgatcctggagcctgcgggccgctgctgctgggacgaaccggtgcgaatcgccgtgcgcggcctagccccggagcagccggtcacgctgcgcgcgtccctgcgcgacgagaagggcgcgcttttccaggcccacgcgcgctaccgcgccgacactcttggcgagctggacctggagcgcgcgcccgcgctgggcggcagcttcgcggggcttgagcccatggggctgctctgggccttggagcccgagaaacctttggtgcggctggtgaagcgcgacgtgcgaacgcccttggccgtggagctggaggtgctggatggccacgaccccgaccccgggcggctgctgtgccagacgcggcacgagcgctacttcctcccgcccggggtgcggcgcgagccggtgcgcgtgggccgggtgcgaggcacgctcttcctgccgccaggtgactcacctccgctaattgttccgtgttcgttcgcctttcactttgtgtgtctcccccgccccacgcttttcgcttatgtgtatgcccccccgccgcgcccccgggctatattgcccaggcaggtttcgaattcctggtctccagctatcttcccgcctctgcctccctaagagctgggattacagggtgagccaccgcgcccggcactttgaggggagttacactttttttttttttccgtccctgcccttttcacacgaagaagggatgtagcttccaaccttccggaggttagtgtaaagaaacaggaatggaatggaaagctgattggggaagtgtccctgccgctccaaaactgagaggtccctcaaacctagtgctcagttaaaagacattgtaagggccaggcgcagtggctcacgcttgtaatcccagcactttgggaagtctcggcgggcagatcacgagatcaaaagattgaggccatcctgactaacacggtgaaaccccgtctctactaaaaatacaaaacagtagctgggcgtagtagcgggcgcctgtagtcccagctactcgggaggctgaggcaggagaatggtgtgaacccgggaggcagagtttgtagtgagctgagatcgcgccactgcactccagcctgggcgacagagcgagactccgtctcaaaaaaaagacattgtaaggaaaggaaaaagacacttatattaaaaacaaaacaggccgggcgcggtgg

SEQ ID NO: 60851 - DNA, 1309 bp, Homo sapiens
aggtactcgggaggctgaggcaggagaatcgcttgaacccaggaggcggagattgcagtgagccgaagcgccactgcactccagcctgggcgacagaggagactctgtttcaaaaaaaaaaaaagttaaaaacaaaaccttccatggagcccatgaaaggctggaatttggcttgatctcattggcttttggtttcaccacaaattgatcatccaacaactttcattccaacaaccgagggtggtgtgaggcagagaggctttctacggggtgggttgggcgccacaccttgcgcgccccggggcccaaggagacgaccctgaagaggagcctggctacttttgcctcagacgagtccggagcgccgggttaaccggtctgaagtcccaggggctttctgggactgctcagccaccggcagcttccggcaccaggggacgccggacgccgtccggacattcggcgcgcttgccacgatcttggacgggtctcgggcctcgacctttgaattccccgctccggctccaagatgtcagcaacgctgatcctggagcccccaggccgctgctgctggaacgagccggtgcgcattgccgtgcgcggcctggccccggagcagcgggttacgctgcgcgcgtccctgcgcgacgagaagggcgcgctcttccgggcccacgcgcgctactgcgccgacgcccgcggcgagctggacctggagcgcgcacccgcgctgggcggcagcttcgcgggactcgagcccatggggctgctctgggccctggaacccgagaagcctttttggcgcttcctgaagcgggacgtacagattccttttgtcgtggagttggaggtgctggacggccacgaccccgagcctggacggctgctgtgccaggcgcagcacgagcgccacttcctcccgccaggggtgcggcgccagtcggtgcgagcgggccgggtgcgcgccacgctcttcctgccgccaggtgagccaggctgctggcgggtggtgtgagcgtcagtggcctgagtctccgtttgtttccagtgctgatttagcactggtttggttttggagcaagatcagagaagctaacattgactatgtcagtggccactctaccaaaatagagggtttggtaccgggcgtggtgactaacgcctgtaatcccagcactttgggaggccgagatgggcggatcacttgagatcaggagtttgagaccagactggccagcatggtgaaacgctgactctaccgaaaatacaaaaattagtccagcctggtggcacacgcctgtagtcccag

SEQ ID NO: 60852 - DNA, 1441 bp, Homo sapiens
ttttcagtagagatgaggtttcactctgttggtcaggctggtcttgaactcctaacctcaggtgtgatccacccacctcggcctcccaaagttctaggatcacaggcgtgatccaccgcccccggccggattggtcattaactcttatttcagcagatactctttcatttgggacactggtgtatttgcacaaattctaggcgccccacgcagcggcctggagcctgtccccaagtccaaccaatgggagtagtgttaagggctccgccctcgactactttccagcgctcggcaaagccgccaggcccgcccactgactccgcggagctgggtcgcccctgttctacccagattgggatggcagcgacgctgatcctggagcccgcgggccgctgctgctgggacgagccgctgcgcatcgcagtgcgcggcctggccccggagcagccagtcacgctgcgcacgtccctgcgcgacgaagagggcgcgctcttccgggcccacgcgcgctaccgtgccgacgcccgcgacgagctggacctggagcgcgcgcccgcgctgggaggcagcttcgcggggctccagcccatggggctgctgtgggcgttggagcccgagaaagccttggtgcggctggtgaagcgcgacgtgcggacgcccttcgccgtggagctggaagtgctggacggccacgacaccgagcccgggcggctgctgtgcctggcgcagaacaagcgcgactttctccggccgggggtgcggcgcgagccggtgcgcgcgggcccggtgcgcgccgcgctcttcctgccgccggatgagtagtctgcccagaatttggtcgagctctgcgacccccaccggcccctttcctgtcctgggaatcgcgtgattgtggaacatccctgaacttgttccttcgctccagagtctgtcatggattctgagtctgggcgtccgctgttgcccaggctggagtgccgtggctggatcgtagctcacactgcagcctcgaactcctgggctcaagtcctctcgcctcagcctcctgagtagctactccagtctttcctttttaagtttcacgtccctccctggaggcaccaccactttagctatgtgctgaatagtgcattcaacttattatatatttattgagagccactatgtgccagccatgtggttttgtttgaatacgatatgggcaaaaccttaagctgatgtgcaagaaggatttttgcctcctttcacatcaaacttccaaagaagctaaaatccacagtattggcaatgccctttaattgtttaaaaacacacacaaaactgcctgacagtcctctcccttctatcataaacatgctgtacgtggttctcaacctgcaatgattagccgccctccctgggggaaatttggcaatatctggagacatttgtggttgtcata

SEQ ID NO: 60853 - DNA, 1532 bp, Homo sapiens
ctcacgtgatccatccgcttcggcctcctaaagtgctgggattacaggcgtgagccactgcgggctgtcctgtagttccactttctgaatgaaaaagcaaaatttatgctccctcctgagctcatcccctatgtccccgctgggctcgttttaggtctttgctggcattcaagttggggaagtgtctctccaccagtttctattatcaatccctactattttatagttcaattcagtatctcatcggaaacgtttaaactttaactttgatagtctttcttaatccaggacaaagattacttaaaacggaggaaaggaatttgttaggaccctagcacacttggcctccttcaatcaggcttagggaatattgacccctggtggccagtgaggaaattcagaggcggccagaggccggcacttaccgttaaaaatgcttaactttattcgccacacgtccggggtaaactcgcgaggggatcctacctcttccagatggttccacacgggacctctaggagctcaaaggaccctgggccctccgaagtcgtctcttcttgcagcccgttgctaagtggcgccgcaggaccagcccaggtcccatcacgtggccctgcagggttttgccccacagggccacgacctgccaggccgggcccccctcctccctcctcttcagcgcggaacctcggccgccagtgccaggccgcctcgaccttggcggaggtcaaagccgcgacagtcccggaccatgtggccggcggtccgggcagcgctccgagcctctggggtccccctccaggcctggaggccgatatccacatcgtcctttttctcccaaaaggccgcgaccctgaccgtcacgcccaagactgggctggccgacaagtgcctggatatgaaagcagaaggcttgggctcgggggagccggtgaccctgcaggtgtcgggcgtcagccaccgaggccgcctcttccactcccttgcccactacgaggtggacagcggcggggggctggacctggccggggacctggctctaggaggcgacttcacgggcgtggggcccatggggctcctgtggagcctcatgccggccgcttcgaaggatccacgcctcagtcgaatgcggagggccgccttgaaaaaccccctcatagtggaggtgaccatccacctaacgccgctgcagcaggcggcgccgctgagtccggcgctggcctcggcccaggtgcagcgctggttctccatccccgagctgcgccgcgcgcctgcgagccggccgcctgcggggggtcttcctgctgccatcaggtgcgggggcccttttccgcagagtgcctgacagcagagtgagggaatcgactggcttgctttgctagctggtttgtcatctgaaaacaaagcgagctccttaatccctttattttgtctcctagacttcaagtggaacattcattcccctagatggtggctaggatccaaatttcatctgcttatgcacctttcttctgccagctgctcacccgcca

SEQ ID NO: 60854 - DNA, 1067 bp, Homo sapiens
gactacaggcgcgtgccaccacacccggctaatttttgtatttttagtagagacggggtttcaccatgttggccaggctgggctcaagtggtcaagtggtccgccctcctcagcctcctaaagtgctaggattacaggcgtgagccaccagtcccggccaccaattctcttttgttgataattgagttgatttttttttttctattaaagctttgaacatacatctctgtgctcaggataaagtcctggaagtggaactgctggatcacaaagggtgcaaaagtttttgaacagccaacagccttccagaaaggctgtatcaattataaacagcagcgtatttgtgtgtccctacttcaccatacccctagcaactctatgaattattattattgttaataatttttagctcatttggtaggtggggaaaaaaagacaccctggtgattaaaaccaacaatttgtgatatttaaaatgtggaaccgagctttcagctgcctctggctccctggaggatccggggtaaagaaacataaaatgggtggagtttggctctggtattctcagtgggatgggatggagagggaaattacagcaagccgcttattctcccctcgtccggaaaagggtgggaaacgccatcgttagggcaaaggaattaagaacattattttatgaaaagggtagttgttagggggacgttttaaggtttttaactttaggcggacaagtcactacagatcagctgaaattgctttcggtcctgactactcctgtgcggggttaagacctaaggaagcaaaagggcagccagcaacagccggacgggaggaccccggcggccgccacgcagtcccacaatgccccgctcgcaccaccctgagggcggagagaaaggaccgctgccggggatagggcttccgccgagagcgccgagaagtgcgcacgcgcactgaccccgcgggccctagcaaccagagcagtgacagtagcaaccgccggaatggtgagtacctttcgggccgcgtagccaaagctgagagaagattgggagtggaaaagggtg

SEQ ID NO: 60855 - DNA, 461 bp, Homo sapiens
cctcgttaatgacattgcctccctcccagttgccaaggcctctgactctgtattagtttcctacggctgctgtaacttgatggcttaaaatgatggatatatattctcttatggttctggagaccagaagtctgaaatcagtttcatctggtgaaaatcaagccatgctccctctggaggctggaggagaatctttttctagcctcttccagcttctggtggctgctgcattccttggcttgtgactcatcactccagtctctgccagtagtcacactggcttctccttctgtgtcaaatctctgtctgcctccctcttatgaggatacatgtgattgcattagggcacaccctgatcttgaggataatctccctgtctctcaagatccttaatcatatctgcaaagtactttttttttttttttttttgccatataaggtaacgttcacaggttccaggc

SEQ ID NO: 60856 - DNA, 1670 bp, Homo sapiens
tctaagactctccatcaaccgccgcctcttttctacatcggacacctgccactcctctaggacctcattagtgtgctccagccagggatcaaaggtttcctctccaggccctgggatgtccctccccgagaaaagtgtcagcctcttgtaccatatggactcaacaagaggctgaataacattatccaaaatatagtttagcatctctgctggcatctctgggcccggggtcggagtagggttctgaaacccaaggacacgggcaacatcttgcacggtccacccctctctagctaggaagaggtgcaatctttctaaaaattcagcatcagaagttgggggcttaaataacactttccagacccctcctttgcccggcatctccctggggatcgcggcgtaatctacagcgccagtgagctctaataaggctgctttcgcattttcttccctccagaacattctcccaagcattcggtaggagacctggggcatcgcagcctggagggtctcttcgatttcagcctcatcacagttcactgggatgccccagactaacagagctctctgggagttcacatccatcccccggcaccagtcttccaacagtgtcatcgccattttctcaactatcaagacgccaaattctaccaacagactgtggctcaccgtgctcctggccttagaacaataccagacactcccaccaagtaggcccgagggaggcgaccttcatgcagtcacgattaacaaagacagagtcctgatctcgcccttctctgcccccacagtcagtccgtaggtgcactcggagccgagctcggggacgctgaggcagtcacgcggccgtcgccatcttgcgtctgggtctgggtccggtcgggtccgccgcctgcagcaggggcgtcgcgtcgtcgtgcagcgggcgaggagcgacggcgggcggcgaaggcaggcgcgctgggccgagagccgccggggtgtggtcgcggggcgtggccgccgggcgctcgctgcggctcctggagaggatcgggcgttcgcggtcgcagcctggtcttcccgcgggcgaggagcggccgtttgggagactagccagagggagaaactgtgccgaagtcgcggcggctgcgggccagcggaaagcggcttcttggcgggcgcggggactcctctgggcgggcggcgaggacggccgaggaccagaaacgaaggcagcagaggagcaggaaagtcggagaagcgaggctggagacagcagaggcgagggtgggaaggggcggccgcggcggcccgcagcggttcaggcgctgcgcggctgctctggcgtccagtcctacccgcaacccgccgcgacgttactgctgcagtggaggatggggccagccggcgagcggcgtccgccccgccccgccccgtcccgcccccgcggcggagctgctcgggcgtctccatggcaacggtgtcccagccggcgcgaggcacgcctgctccggcggctcgcgggggtcgagcggttgccgtggagccagcgaggggctcgggcatttgtttctctgatggcgcatttcctttttcataatttagcattttaacagtaaacaactactactaagcaccgtgttttaaaaataataacccaatcctggagtggatttaagatgatattg

SEQ ID NO: 60857 - DNA, 2580 bp, Homo sapiens
acggtcttggtctggatctggtttgaagtcaaaactgaggtcagaaccctctggtttggctcatctgcctgtggagaatccagcctttctcgtccctgcatctttcccttaacttcaagccaaaatgaaacccagccaacccaggcaatacaagcatttttccaatgcctgctctgcaacaaaccactgatcaattaatcaatgcttcagcactatttaaaataagtaaataaataaaaaaagctataaaggacaatgtcggaaccactcgggagatggcaatatggattgcatatcagagggcattactgtatttttttttcttttttttggagacagagtctcgctctgtcactcaggctggagtgcagtgacgcgattttggctcactgcaacctccgcctcccaggttcaaataattctcgtgcctcagcttcctgagtagctgggattacaggtgtgtgccaccacaaccagctagttttttttaaatatttttagtagacatggggttttgccatgttggccagcctggtctcaaactcctggcctcaggagtgatccgtctgcctctgcctcccaaagtgctggaatcacaggcgtgagctacctcgcctggcctgaattattttatcaggttaaatttcgtgggcgtgctaatggtactgtggttttgtagaatatcttggtttttaggagatacgtgctgaaaggttttagtcatgtgacaggatgactgtaacttacttttaatgattagctgaatcagagaacaagagagagctgtatatgtgtgtgtctatgtttagacatagagaaagagaaagcaaatatagccaatgttaacgattgctaaatctaagtccggggtggatgggtgttcattctactgttctttccattttcctctaagtttgaaatttttcaaactgaaaagttgagggaaaaggtctgggcaccatctacatccaaagccagccctgacctggcaacacagacgcttttcattaatccaggcaaacaatttcatttctctccagggagcagtggctgagaagtgagcatacagaaatgtcacagtgtcccctgtcgggggaggaactcaagggaaactcacaagaaagccctggaaaacctgaggaggaagcgaaaggcctaagtcttcctcctgactctgctaccacacagctattcgagcttaggcaagtcactcacttttctaatttcagttttttcatgtgtaaatagcaaatggggttaagtaagactagatgatctccagggacctgcctctcaagctctgaaattctagctctcccattgcataaatctatttggccactgggtttagtttttgggcaactttcccacacccagaggctgtttcctctgacaccaccacacaggctcgcacattgctcagccaccgctgggctgggagctcctgtccagagaggccaggggtcagtgtgggccctttgtgtctgaggaggaaacagacatgtttcatctcacagaaatggccaagtcacacatgtattaattaggccatttacacatttactgtcaattctctctgaccctttgtttgactgactaaaggtctgctcatttcattaggcattaggggcgcctccgtgaatttcacgggcgtgtacttcccgtcagtattgcccaatcagggaatagcgtgttactaaaacacagcaaaggactcctcacaacagggcccttgtaggggaattcatcatcagcactttgtctagtccccagggctgttcccaatacaatctacaatcccaagaggaaagggcatgctctttttaaaaactcttttcccttggcagtccacacaattctctctccccacagcccagattttgtgagacagggctggaaagatgcaattccttggattagcaaagcatctgcttttccagaagaatatggagagaggacaagataaatctagggaatgtgggcttgaacagctgagttactggaaggcaactctgggtcaaaggaagtgggcagaggcccccaggtcagctccgcaggcacttgctggctctcagtggccttcaccccagggtgccctccccctgcatcttcctctggggaatggctcacctctacttgccaccctcctccgcatcttcctcctgcctattttaagtctgatgcccacttaggcctccttctggattgagaccccagagcttggccaccctaccctgaagtgaggaaaggatgcttagaaccaaaagggaaaagagacctatctttctctttcttgtattgtttaggaaattctctctgaggctactcagtagcattgacctgactgctttttaagagggattggtcactggcagagggagccccaaagtcacacaggcagctcctggccctcatttgccctgaaacagagcccagctcaccagcttctgcaccaggaagaaatccttcttgtagatggcaatgcctttgttgaacagcttcctctcggccatcttccactggtcagagcctatggggcaaagaggcagccagggagtgaggtgggcagggccctggcca

SEQ ID NO: 60858 - DNA, 709 bp, Homo sapiens
ctcagctctggccccacccctcttgaatacagtcctcaccatcccaggctagctgctggggctttgctcactggctgcagatcccacactaccgggaacctctgttttttcaactccaaggctttcatgtcaactccctaatgaccttgcattctctatagaacagaccatggtgtcctgtacattcttggagccctcacaggacccagtacaaggccttacgcccgagtgttcggtagatactcgtggacagactgacctctcgctggctgccagtctgatctctacaatgacttcctcttcctacacagcctagccagggagaagcctccccaggaagcagtacagaaggctggccagcctagggcaaacattttgcatccacagacaccagggggcaccagagagctacaccatgggtgaggtcacagtcaaaggttaattggccaaaggcatctataagctagctacttccacttaatcctctctaccaccctaagggattggattatcccattttgcagaggaaatggatctctttatggagtgggcaacatttttcagcagtacatcaccccaagccagcccaatatttccagaatgtctgcttttggccaaaaagactgttcgagagccccagagactagatctgccacaaaggactatgagcaaacaggatggcctgggcatgatgttccagctttatgtg

SEQ ID NO: 60859 - DNA, 1317 bp, Homo sapiens
ccagggtcaggctcaccaaggcctgcaggtaaggccccagaagggtgtgtgcagtcctagccccacccctgggaagagctgctgggtggggctgtggctgccagagtctttcccaaactagcacagaacctgttttgcaaccctggcagggtggaggcaggatccaggccaagagctggtcagcagctgaccccgcccctgcctgacccctgccccttccactgccgaagagcccctggcaaatagtgtaactcagatcgtagagggtgcagattgctagaactcagttccagaaggtttctccacgataatgtcatgacttaagtacacagtttttccatttttgtttcgtaacttgattttttaaagcagtcgctacagaacagaatctagacctgtattttatagcatagctgcttgcatgtatttttcaagacttttctttccctcagagtgatgtttgggttttgtttttttcctgggaagttggtgggggtgggagctacatagcccacctctttccccagtaagattctggtccctaggaagaggggaaaacagctcgggcggctctgaagaggaaatctcaggccctagatgctacaggtcattgttagcaaccccagccgctcccaggaaaccagccagcagcagcggagggcagggctgggcgggcacagggtcccgactatacccagtttgcagttcggcccacccccagcaccaggaatgcccctcccaggctatcgctcctctgcaggcttccgcagctccccagcccctgtgctcctggagcctgcctgcctcctgcccgcctgcgtgactcactgagggccccctccctatctttcactttcacccagcacccagaaggggagtaatttcctcctccatttccttcctcagctcctgggccttgaagagagtaagagaccctcctcgtgtgcagcctttgtcttttcatatatgaagctggagggagggagaggcacagagactaggagggcatccaagtcaccctcacccccagcaagaggggagtggggggatttggacaagaagtgcagagctgcgggctgcagaaacaacctttctcttgcttttaaacccgcattccctgacagccaacctaattcagagcaggaacccaaaagctaaaccctgcactgaaaatcaccctgggcacccccatgaagctgcagggtgggactgtctggctccgcctctccgagggaacatcaagcccacagaactagaagtgcgtgtctgcagaagcaagacagagaaaggaagaatgtgcgccagcctggcaagccc

SEQ ID NO: 60860 - DNA, 2638 bp, Homo sapiens
gcagggtaaaagtagtcaggggcaatgtgtgctggcttctccaatcaccagcctctgtgagcctggggttccctattggtgaatgggcacaacagtttcatctcagttattgtgggattcaatgaggtaatacatagatgaagcgccgcctggcacagggtacgcactcaataaatgtgtttcctgtctcccttgctgggtaggggtggctcagacatcgttatcagtctttaacaccttggaggaaatgaatagtccaactcttccagttccacagctggctgagagcaaggctggccaggcaagggcgggacagggagactcaaagtcctagcaacagtgtggggctctgcaggcacgcagagcttccggcctacagacccaggagagagaggtctggccagaaagtccagagggcacccagcacaggcctcctttaaactcagctatgccagcagggcctgcctacagggatacagggggatgagggtatttcccagataataccggcagagcttccaggcccaaaggatgagccgccacctcctggattcactctaagaagagcaataaaggggaaggtgcgatggccagagggaggctgaggaagggctgcaggaagtagaagggactccagtgtggcagagacacagggcctacagaaagcaagcaagcctgcccagaggccaccacagtaaatgtcccacaagtggaagtgcccgcctggttatttttggcgcctcttctgcccaaagccagtaaggaaaggcagctgctagcaacacagaagggctgtttacactcaagtgtgcaagcactgcaacagggacagaaagcacaactagcagccaccatgcagatgggcctctgccccgtttttcccctcccaactgtcccccgttgtgtgctgcacagctgacacagtgtgggtacttctgctttcactcagatccagcctcccaaccacaggactcactcacgcacatgcaaacaaataaataactatggagccagctgaggactgagccacacccaggagccaagacagtattcctttggattcttcctgcgctcaagctgccctcccagcttccaaactgggagaagcagccaccaggcgcaggacacaggagcagtccctttccaccctcccaaagtgaaagtggagacagtctttacaacctcaagcatctcaccacctctcggcttccccatttgaaaatgaaggattcggactagatgtcccaaatggtttcccagctctggaattaggactatgacccaagaccagctggggcctcagacagaggaaggccaggaggggaggaggatctgtgccaggaactgccagctcacatgccgtctcggggttgcaagttatcacttaagcccatttctgagctatgggggccttacctactaaagaaatggcaagttctggcaacggtaagttggatagggtcctctgtctgcccaactactgggaaaagcagggaatcaaaatctctcaccattttccttcttgtctggattccaattccccagagaagctgagcggctttagagagaagccccttctggccagctacaagcctactgtagctcactctctccatccaagctttaactgggataaaccttgccctgtgctttccccactctccttccttcccaggactcctgaaggaagaagcactgcctggaaaaaatgctctcaccacgaaagctccctgcggctgggagaaaggcagagggaacagggagcaccttccctggctggccacagcacgaggctgtgttccaggaagagcaacagcaagggcggctgccagggaagcctcagccccaagccccggctcttccccaccagctcttccccaccagccgagaatgacagccagcaactgcagccctcagggagacccccagccccaccccagcacaactccggctctcctctgacagtggcaactttcttcttatataattcttggtgtttccttcaccgttgcacataattttaatgggtaaaagagccaaagcagtctttaaggaaaaactcccacccttggctctacccaaacctcctgcgaggtcacactgcgaggcttcaggtgaagcaaacaggggactttttttccttggctgagaaagcagccttcctcctgcccacccacgtgagcagctcagcctggggcctgggcgggtaggttcctgagagcacaatctgatctctgggaagctgggccctcaaccctcggctgcagggccacagtccctctcaaaggcacacagacactgggtctgggccacatgtctagggtggagtggatcaagctgttgttcccagggcacaataaacttcatttatacaagcttcagtggcctggtagattgctttcctactataaacaggacacccttcattttctcttccttgataggagtcaaaggcaaacacactggatccagtgggaactggtgaaatgagagttgccatctgttgaatacctagtatgtgtcattcactctgcatgcataatcctgtctaatcttcacagcctatgaagtactagtatcatccacattttacaggtgaggcaactgaggcccaagaagttaagcaatgcccaaagcc

SEQ ID NO: 60861 - DNA, 5687 bp, Homo sapiens
cagcatgagcaaagttttcttctgggagacccaaatgcaagagaggggctctcaacctgaagattcctggactgggcccattccccttcccctcttctgtcagaggtcttggcacccctgggcagcctttctctggggactctagacacaggaggccctcagctgaatccacaactgcatgttgtcttttcttgtgttccacttattgaaagcagcagcacacagggtcaaacactggggctattttaaaatcccacatgtaaaaattaaattctcatccccatgggcactccagggcgctctttcctggggcggggtgaggagctgacagagtcacgggagtgggggttctgctggcacttggagaggccacactggcagtggctaggctgttccagagcaagctggcaagctgtatgacctgggggcatcctccaggttcttcacccccttgtccccccgggagctacacggaccagagtaaccagccagaggccaatccaattagagtggagactggaccagggccatgcaacgagatggtttatcacagtaattgaatgtttacgctcctattattcactgtccagagcagttggaaaaggaagacctacgaattctcaacccgggaaggcttctccttttccctgggttctgaagccacttaacacccaaggaaagggtgcatttctctgatccaaaaggggcgtgtgccacacctttggtgggaggctctagagcaagacaggtggtttctcccctcagctgaggccccctagggaggactggcttctcggtccaccttcactaggccttcagtctcaaccctgaagctacaggaacaagaagatcccagatcacctggccaggctccccctgctggagcaagccagacatcccctccctcccccagccgcagctgccaacagggatcccctgcatacgcgggccaccggggcctccgtggccagcctctcttcccccatcccaccgccccccgcgcgaggctccacaggctggcacacaggtcccacgtgggatggtggaaacaggaagcagccaccgtagttgtgaccaacaaagttttaaatggggcatataacttcccctttcatcttctcaccagctctcgctggaggctgggctgggacggacacccggcctccactttctgtggcaggtacctcctccatgtcggcccgccttggggctgaagcctgaaggccccagggcacacgaagttccccttcctcccctagacctttacccagaggccttgggggcaacctgacacacatggtcctgcatgtgcgacttgggaggcgacgtgaccagctccaccaagccggccatatgcagggcccggccgaatcccgggtttcggcgctgccgccaggcaccagggaacacagctccccgcgaggcaccgcgcgggctgggagggctgcggcggcgcgggcgtgcgggggcgcgcgggaggatgacaggtctgaggtgcgcccgcccgcgcgaagcgctccagcctaggcctctgctgactgcatttgccccagttccccaacgcccctgcacctctgtcccccaaactcctggcgtggacgccgcgtccaggcccactttcccgtgcacgctggcaggggaaggggctcccgcgccaagttccctcagctggctagcccctcgccgcgccttccgggcctgggctccgtcacgtcagccggtccccacggacaccacgtttctctccagcggaggaggagcagccggattcccgagccgccgcgggccgccgggtggggagggctttcctggcggggccgcgcccgggtgggcgggggccgcgcgcaagctgcgtagctgcacaaacaccgcggggctgcgctgcacacgcagctgcgggccgagggcgcggaccgcgggggagggggcggcgggctgcaggcggcccccgcacggccacacgcgcccgctccaccgccgcccaggccgcagaagttcgagcgcagcggcccccgcggccccctctccgggccgcgcctgcagagctgcaacccgccgtgcgagcagccacagctcgcgcgccgcctggggtcccctcgccggccccgccgcgtgcaggcctcggccgccggccaggcagccccacttacccagctcttgcccgggctccgggctccgggctcggctgtcccccttccgccgcgggtcgccgccttcggtcgcctccgggactccagccgcctgcacgcactcccgattttaaaaacaaacaggcgccgtcgcctccccgcggcgctcgcggggcttccgccagcccgcgcctcccgaggctgagaagtttgctggcagggcccgggcgggacgcgcgggctgtcaccccccgcttgcgatgcaggagcctcggcgcgccccgcacccgtgccgtccgcctcgcgagcgctctgcctccctccgtgtcacccccagtcctgcgatgcagtgtcaggattgcacggctctgactcatcggttgagctcacagcttgaaaaaaaaaaaaagagagagggcgagaggcaacagcggaggaggaggactctggcgtgctacaaaggattgcacaactcgaggctgggagcgcggagcgcccagcggccggccggcgcgcgcggcaccgcggcgagcaggaaccagctctaccacttcatcagcacaactgtctcggggcggcctcagccagcaggcccggcgccgcccacttcctgcgaccaaataaggccggggaaggcgtccttaaacctcaggcggcggccggggctggggatttccagcagacctcacctccactcacgagtcggtcgccgtccccatcccccgcccaggctggcgcccccgatggctttgctggcgggccacgctgctagttcctttcacaccaaggtcaggaggagacggtgacgaaatgtttggaaacccattgagcctgccaggaaagtgtgtgtgtgatgctggggaaggcacaagtcgctttcttccacaaagaaactctctctggttttggatacggtaaatcatgcacaatcctctccatggcattttattaacagactctccgagtttcactttctggctcaaaagcgtcctggtgcgtgtaaaggttattgagaaactggcctcagtccctagaaaggacccaccatctccatcgcttaggtgaggaaaatctcctggatttaaatctagcaactcaggccagagttgagcggcttttcactccatactcacattttcccctgtcttccctaaatatccccctgatcaattctcaggtccaggccttgatgcctccttgcctgactggtgggaagatggaaaacatttttgcagctcaagaggttggttctggcccccacattcaatggggctctagggccaggggaaagttcaggggagtgtgtcctattcttccttccaagttttttggtggtggtgcagtggtggtggtggcggcggcggtggtggcggtggctgtttttcaaggagatgggtcacaaggagattttcctttgaaagaaaaaccaccgaagaataccatgtgtcctggcagccacttttcaaaacactgtggccagacctgagaaccaggtgcatccctcactttctcagggagaagaggagggaggggcagcagaatatgattctcacacactcactgggcctacagggccagggtggggtgtggaggacacaggcaaaacttggatcttctgcccagaaatcctgccaaacctgcacttgcttctaagggggcatggctttcctgtcctcttccacctctttgctggctggagcacctgcgtacatgtacacctggaagtcacacctccccaagaggagaagggcttatttgcaccatgttatgatagatatgtcaaaataaggaacacttaaaacaatcttatctacaaaatacaggtaattatgccacaggactggaccagaggacctcttgagatcccttccagttcaagatccatgattctgtgattacagtaagtgaatagaggagctagggaaaccaccttctacaaaaaaaagcccgggctccccgatttagcatctgtgatgacagtattgttcctggcagctctcagagcacttctccatacagtctcctgaagagccctgcatgtgagttttatctctctcaatctgtggatgtactgaggttcagagaggttaagtgaattgcaccaggtcacagggcaagccaagcatctgtgacctctctgctcctcccccagaggaaggcagtgagcaattgaggaactgcagtgctcaggcctgcagacccccaagcagaggccagactctcagggctcctggcaaaggatcagggtagagcctttttacttttttcatttgcctgatttcttccctcccactgacaacacatccaagtgagggaagcaaaagcaaagccatttggtctccagtgcccactgctgccaagttcctctgcagacctgtggccatcctcacctcccctgagagcccagcccctgcagttggccttaggccagcccagagtgagcccctaagagcttgtgcagaccagcccagggatgttcccaaccaaccagaaaacctgactgggaagcacattgctagaagagcctgccatcatggagccagggcccagccttcagggaacaggtgaaagccactccaaaggagtggcccaggaagcagcatacatagtggaggcaggtggcaggggaaacagagaagtcagtggccctgaaggagccttgctcaccttggagcggcaccgcccttcactacagctaaacttccaaattcaggccacctaagaaaggagagagaagaaaaggggcacacatgtgtgcaggggaggagggctcaagactataccaaatagcccccccttggcaggagaagtctacctcaaaaaggcgggcagatgaggctatgtaaagaaagctgcagcgcttccgggaaagccctggaggtcagttttgctgcagatatgacggtgcagaatcactgacgtgtgaagtgaaagttttggttttagaagctccagcccctgctacaagtctctggggcaaccaagaaggttgacctttcagggaaatggggaggtgttccagagaccttatccacagagttggattttctccaccctcaaccctctttacaaactgcacgaaaaaggagtacagagctccagttaccagggagtgtgacaagagagaaacactccaggaaataaagcaccctagacagaatcctaaactctgattcccaataaaggtagaatatggcaaatttgagaggcttcctagggccacatcagctctctggactccactcagagcggtctgtcactgccctgtgtttcatcagcagtatctagaccattaaaatcttccaaggatgaggccaggcacagtggttcacacctgtaaccccagaactttagaaggctgaggcaggaggagtgcttgagcgcaggagtttagagaccagcctaggcaacgtggcaaaacccagtctctacaaaaaaatacaaaaattagccaggtgtggtggcacatgcctgtggtcccagctactcaagaggctgaggtaggaggattgcttgagcccatgaggtcaaggctgcagtgagttgtgttcacgccac

SEQ ID NO: 60862 - DNA, 1199 bp, Homo sapiens
ccagattgccccactgtactctagcctgggcaacagagggagaccctgtctcaaaaaaaaaaaaaaaaaaaaaaaacaaaacaaaacaaaaaaaaaccacctagttcttttccctgaaaagaccccatgggcctcaggtaaccctctcatgggcactgcctagagagactttttctggcattgactcaatgtctcatcaggggtgtcctccaacgcttctctcccagcctgttctttgtgtcctttccaccacacttttccacagggctgtcctcccagcctgagtaggaacacccctccaccagctgtgtcttctcagccctttttgccaggtcttttctgagcaaaccgcgagctcacaaccaccccagtcatgaagttaagccactgtgtgctgagatgtctctgcactgtcttctcttttatccttggaaaaaaccccaggggaccctcctcctccgctcacattgacttcacctgttctggggcagggccatgcttgccacaccagcccacagctgtctgtgtccctggccctcccacctgccccctccccagcctccctgccctgcaggcctgggccaggttctgagtgcctttgtcaggcctgagaaggagcctctgtacatgtccccagttgctgctgtcactctgggagagacgtctggccgggtgtagggagaaggacaaaacaggtgtggctgccagggagggcaggccagcagagccacaggactgaaacgccctttcttcacagaccgagagctgccaacttctcaaaggcctcccttcagcacagttccatgccctctgcagaactagtcccagacagacttcctcactggctgttcactggagcttggcttccctgtgttgtggcaatgggccaagaggaacaggaactccagagacccaatgtgtgcaacagggcatgctttaaagcactgattttaaatgaaaacaaatactgatacatcatggactagaatccaacattcatgcttatgggggtgtacaggttaagagcacaggctgagacctgagtccaaatcttggctcacactagcttgatgaccttcagcgagttactcaaccactcatctgcaaaatcggaatgatagtaagagcttacttaaacagtgtctggcacacactaagtcttttataagtgttggctatcattttttctcatctatttc

SEQ ID NO: 60863 - DNA, 886 bp, Homo sapiens
attaaagagcaactaaattcaacacttcaattaatatgtgcaacaatgtaagtgagcaagacgctacctcactagggccccacctgggttagaaaaggctgcaggaggtcaattagcaaagcacaccctccctgctgccagttggaactgcagaagaaagactcagcttcctcctgctgtggcaggggcctgaagtaagaggcagcccagaggtgagtgggcgggtggctcaaagcctcacgtgctcactgggctggttccatgaaaacgcaggtgtgaaaatcgtctggggccctgagccagctgggggctggaggcagagtccacgctgtgaacccgagttactcagccagtctatgaagtcaggcccatctgaatcctccagcccctgcatgcagtgccggtagctgataaagacagagctgtttggttttcctggtagtaacagatgggagtccctccccctggcctccttcccacccaaatccaaagtctttgaagttaaggccttgtcttataaataaaaaaaagatgttatataaattattaaagcaatttcaaacacacacacatgctctacccataacctctttgcccaaatccagttattggcattatgccaatttttactatgggcagtgtaatcagtttttatgcacttatgcaattctgtgttttacttttttcatctaaattcatcaacattttcccaagaaacaacattatcttcatattaagataacagtgacacaatactcactgactctaggtatcatgaattatacagccacatgaaacactgaggctgtttacagttttggttttgtttttttttcttttctattttaagcaatgttgctataaatatctttggtgtgcaggaagg

SEQ ID NO: 60864 - DNA, 712 bp, Homo sapiens
ccagacctggggatacaaagatatataaaacagggcttccagtttagttgaagaattgtagtatttattcacccaaaggctcatttaatttgctgaacaggggatatgatcaaagtcatggcccaaaagagaaagtgaaaattcttagaccaggactcaaggttttcctcagcacagggcccagggtgatgttgctggagtcccgggggaggcccacagggtgggacagggagaaattctcaaggaggaggacacaaacaggactggaaggggagcaggactgagccaagcggatgagaggaaagaggcattccagtcctctggggaagcatgggaggtaggaattcttgccatcagtggtttggacaaacacacagagtgggtcaccgggtcagagccgagggttaggacgggagaggagcaaaggtcagacccctgtggagaagggccctaactgccggcctagaagtttgatccttaccatgcagacagtggggagccattgaaggttgctgagcaggaaggtgacccttgcaaagaggcattttaagtgagattacagagcaggcctttatccgaagcttattcaaagccctgtgtgtatttcaagtggcacttgagacagaaagtcgtaaagcgtttgccctgtgtcatgcagacgagaaagaagaaggtttaaggggctcacaaagagatgcttcagtgagaacaa

SEQ ID NO: 60865 - DNA, 3701 bp, Homo sapiens
aaaacagcatttttcctccaggtgaagctcagatacttggctggaaaggccaggcattggagaaactccagtgcactggaatcatcagtacctgccactctgagcagagaggctgcccatgcccagcataaggtggtaccacctagccacacagcaacgtagctgggctgagtgctccccatgagcgtcttctgcctaggacagggagttatcaggttgagatttagaatgtgaaaacgatggccctgcacaaatccaatacacgccttttttactgtgttttaaatctctctatacaattatacccctgtaaggccctcaacaagacactgtttgccttctttccatacttgcaggcttggctcccttcctgcaaggcagcatggcaaatgggaggatccctgctctggtctgtgccacagtccctgctaagaaagtgggcctagggttcctatggagaaggaggagtcactcctctgcccctcccagacccagaccaccagcacagacaaaagtgctaccacttgcacgtttcctctttgcccagcacaataaaggaattaggacctaccacctactaagtttctgcagctgacacttccaggcttaaagtctagcacgccagctcagtcacacatggtctgacgagtcctctttgcaactcagccccaacccagccacccgtgcaattttgctaattcaaacagctttcccgtttagagaggttgatagccatctcccatctccttttcctactgacgtcatcccacattttctccggagacaaataagggtagagttcctgggatagttttcaggctgcctaagataggagtgcagtggcctcccgagtccaccccacatctcaggctttggacaagtcgtcaaaagtgagagggaggtaatgaaataaatcacctagctagggttaaagggcaaaaagaatttggagactgcagctcagacccagatctatcctgggcatttgcagtgcaaagctgcgttttcttcgccactaccgaggtcttgcacaatagcctgtgtataaacatccacgccaacaatgcctgactgtgcaatcacgctgtaattacaggccggcaggaagctgctgctaggaactgcaccattcaacctctaggacaccccatctcgagtctccacggctcggacgcactttcctgcacacaccaacgtgtccccgccgccgccgctacagttgcagtctcgccactggcccgggccgccagcccctagttactctgcaggaatgtcccaaacttctcagctgttctttaaaaaatcctgcgccacgaggctaccgagggcgacgggaaccaccgtcaaagttcctgcagcacattcctgcagcccttgcagttttaggaaacagaaaagaacgagatgccacagagtccgctggaagcgggtttctgagttttatatagaaaacactcacatatgtacgtgggtgtgctgacagtttttatggctaaattgcaaagtgttaggccttagcgatcactgtcaggtttgggacatggttgggaagggtaaagggggagtcaggagcgattcatttcaagggggcttggggacaattccggtttggttttctgaaaatgcgtagggttgttttcccaaacttccgagctactctgctcttcgtcccaggaaggccaagcaaataaaagtccggggaaagttcctttaacttccttcctgcgccctcgacaagggctgcgaagaggaagaggtcatttcccagggaagcaccgggcaggggccgagagctgcgcccagcctgcagggatggaggcgctgggcggagggctggctgcagacgtaggccccggaaagccccttccccccaccctacctcaggccaacggcgcctggagctggccccgctgcagcccttgctgtttgaagtcccgcggcaaagcggcgacaacaccggcgcagcccggcgccccgaccccggccgccgagctccctccctgcagcaccccggcaccccagcgcccggcccaacccggcccgccacatccgcgcccgcgcggcccagcccgagccccggaacgattccgagccccacgccggcgcccggtggcgggagggggcgccgagcccgcggcttacctgcgtgctggatccccgggctgctcggaggggtgcggggcgcaggcgagtgcggcccgcagactctaactttgttgctctcgggacggcgcagtcgtcacttcctcgcggagcgggcggtgcggcccgggctgtgcggcccgggctgtgacccagcggctcgcgcggtggcgcgcagggccctgcagccagccgccccgcccgcgcccccggctccgcgcgcccctggccccaggcgccgtctccccactctgcgcgccctcggctgcggggtagcgggcagccctgcgctgccggccgcctagcctgcaccccccgccctgggagggaagcctcgctccagccgcgtcgtttccgcgccgaagtgcgatccggggccccgcgctggagtcccctgctctcaggctggtctggaaggtggtggtggggttcagggtccccggaaagctggggttccagggtaaacaccagtacacaaacaaagcggtgggggaggggaaagaaaaagtttttccgtttggtgttggggctaaaagggtcatgtcagaaagcagtgtgctctatgtgttcttaatgcctaaagtgggccttaaaacaagggtccctgtccccacgttctctctaaaagtctgcatgatgtccctcgtcatttctacgggttataagtgagcaagacgtttaccacgtatcacacttctgggggctatttcaacgcccaagctggggctgcagaatggtttctgttctaatcctcccccgcgatttccacctctttacactcaactcacagaaaatagagtctgatgcattctgtgtttcatcaccggtcaaaagtgactttgagggtagggtggaggcctgagaagggcagcttcaggcaatagtaatcctgaaatttatcattgctcaaaataaatgtgctcaccttattaaaaagtacaacggaaagccacctttaagataagtagcaaccaagtcgttaaacagcagtcttcaaggaagaactcctgatctcataaggctggagaaaaaacggggttagcctttgctggtgaaaaaaaaaaaaaaagacattcgaaactgcagtgaagggctttcataacagaaacattagcttcattgtagcttgtcgtggaaaacagggaccttttaataggtggttcaaaagcatcagttagggctcaacaattttccttttttccccaaatactgcttctcctagcacattggccagataaaacctcccccctttcaatgcttcatctttttatgaaaacacaggaaaccataaacttgagtgaaggctttgttcagaaaggtggatgtaagactgatggaaaatgacatttgggaaatgatccccaggtctgtgttaatctctcatggaaagccacagactcacccaaagataggcgtatgaagatcgaagctctcctagcaacatgaaatcctccacgttgcagctgctacgccctagttctgatttttactaagacattaatggcacattataaatacaaaatgtgcaatgcaagaaaaataatactgctttgagaaat

SEQ ID NO: 60866 - DNA, 2499 bp, Homo sapiens
atataaaactggtaatttgttacagtagccatagaaaactaatgcagggatgtcttctaaatgtggtgttctctgtgaagtgtttttgccaggtattagaagccctggttttcatataagagcctgagcagaaagtcaaattaggtgggccaagaaatgtcccaggatgctgggtcaccagaaggtttccaaagtaacaagcaactagaaagtcaatggcttgagtcccaaactctgagacagtatccttttttttttttttttttttgagacagagtctcactctgtcacccaggctggagtgcagtgatgcaatcttggcttactgcaatctctgcctcctgcgttcaaatgcttctcctgcctcagctaatttttttagttttgtttttttttttagtagagatggggtttcataatgttggccaggctgctctcgaactgaccttgagtgatctgcctgccttggcctcccaacacactgggattacaggcatgagccaccgtgcctggccctgagacagtatcttgaaagtacagtctgattgcgggcccctggcttatggatgaactctaattcacatattctttcttgaagcttcttctcagacttgttagcctcgcaggccacagcgtggaggccaagtctagaaacagttaacaaaagtaaagcggagtcagctgtccaaagctgctgtggaaattctgtgcattcaacgaccgcaggagcccagcaagcctgtacaaccacccagagtttgtaaatcagtctttcacaatggatagaaaaacacaaacccaagcatcaaggcaaactgcatggcatttctgggacccaggttggccacggatcccagttctttcaccccacacagggtgctttttcctgtctgagataggtgaatatttattggcaggcacagctcaaaggttagagcccaccgcacagtggggaggaagtattttcacagttctctgccagtaataaatggtggtccttggacatcagtcttagcataatgtgggaggtgtcttttgggttcataggccaagaggttgctgggcattcctgagattactttagggcccacagcttcttttaggaagaaggaagtcttcctcttctgggtgtggtaatatctggggattacagcaaccaggtgtgtgacagtatagagtccataaggggctgcagatcttcagggatcttcatgaactgaaattcttcacgatagcaccaaggaacggtgcataaaagcaatagtttatggattgcttggacagggcaaaagactccatgatccctctaatttatccccttttacttcccaattccaagtagagttctccaggaggcaatgagctagaaggacctctttggatagccagttctatatttatatttatatttatatttatatttatatttatctagagaagcctaccacatctgcgggaacatctgtggttcccatatcactcttttagaatcaccagctaaagatatcccactcaaatggcctttgccctgcaccattgtgcttggccttgttttactgacataatttttgccctttgcccccagttggagggtgtggccactgactcacctgccaggaactcattgcctgagtccagtcaacaggttaactcccatctgagttggttgcaaagagcctgaggacctatggaatgccacagaattcctctgtggaccacatcccaggtcctggtatggttccagcagtatctatgagctcctgtcctcagttgctttggcctttctttagcctaggaatttattcttctccaggcagaggaataaaacgaacagccattattcctgacagccagaggcctggattcaaggtcttggttatagacgcaaaatatctgcctcagatgtggaccccacataacaaataacaccttacttcatggcccatgtagtcctcatttcagatgagaaactagaccaagtcaggaatcttggtgactgcatcatggtgactgttagatcttagcacatttattttaggtattgataaatatgatgcaagagatgaatgaacattccaaaaccaactgcagtggggccaccctgggttctcccagcgtgcattattttcaggaagcagataacatttgggaggttatattctttctcccaattgtgaatttttggagcttctagggttttctaatagctatgcaaaggaatgatttgaattgtctaaacccagtcaaggctgtgaattgagggctgtatacatcaaaaaataagacgtgtcaaaatccacaagcaagcctccaaatgctctttccattactgaaaccaataagaatcaatatagaacagaaagcactagtggacttgggcttctggttctccatcttcctcaccctgtgctttccagtatggcagagaaccatgagctcactttccacagactgcacgtacataacacttgttggaagacaattctccgtgggtctctc

SEQ ID NO: 60867 - DNA, 931 bp, Homo sapiens
gtgtggatccagggaagcacttggtcccttcactgttgatttgttcacagaaatgccaggccctctggtcagaatagcattaccagatctaaagcccaaacagtggcatgggtcttggccttggcccatctcagtgagtgttaggatgctttaatggaaataactaggttaataacatgtatgtaaattttatttaccattgagcccttaaaagataccagtgaggtgttattgatccagttgaaatgaagcagctataaaatgatatgtatagtatgaataaatcttttagtaaagtgtttgtgtacaaaaagaaatacattaaaatgttttatccaggtaataaaaatgtgtttttctcattttatacttttccaaaaaagtttttatagtaagtatatttttacttttataatcataaagaaagaaagtagggtaattctattttgaaaaaaaaattaggtcgttacttttaactcaattgcatgttcagaattttgaaaatatgcagccaagagcacatatttgaatcgctgctctgcagaaaaacttaataatcagccttaatggctatgaagcaggcggggcccagccctaaattccaggtcacagggcagtttgccagggcagccggctaacataggtgcttctgcccccccatgggcagctctggaaagtgcaggctctggcctgagcgtttctccagggataggaccctggagagatgagtgtttcagaacccagagacatttggaaaaactggcctcactgctcaaaactgttctggaagatcttaaaatggagcaactaatcatgtagcaatcctttcatactccctacactcgtattcaacatatatagttattttaatttgcacacttcgttctagacactgatgtatgtgtagaatgtacagatcaaattataaatt

SEQ ID NO: 60868 - DNA, 633 bp, Homo sapiens
aaaaaaaaaaaaaaaaaaaaaaaaaggaggggggggatttgaatgcaagtagtttatttgggaagcatcccaggaagcatccctgagatgggaactggaggaatggtgggccaagttgctgccccacaccaacaaaggaagtcagcagggcagtcacgaggtatgtgaggctttcagagcattatggccactgcttcacttctgctgtccaaattgcatggaatctttcacttgtagccaagcctaactcatacactatgtgggagggaattctgggaaatgtagttccagttgagctatatctacataacttcactgatgaatgcacagagaaaaccagtctcagtacccagggccagacctgcagaacgggtattttgttttccatatcaattgagtttctgcctctgtgccccagtcgcacaggcaggcaaatatttaactttggtcattcctgatgtttggcactttgcaatcaggcaaagattccacaatcttacccaattccaagttggatgtggccttctgacactgagtcctgcctggctgttgaagatccctgcagagacattgtccctttcccagtagccccttcagatctgctgacaccttcgtttctacgcccacttggga

SEQ ID NO: 60869 - DNA, 2419 bp, Homo sapiens
ggcttcttttctattttgaaagtgtttcttttaaatcaagttctagattacctttattttatactactactttttgtctatttgagcattttatttttcatcatttggtttaagtcattacaaaaggcattgaaggtctgtctacctgtccatgacagataaaagagattagctcctgtctgaaaatgtttgcaaagtagtgtaattctcctagtccttcctgaagctttcccaaagaagcaaaaatattcagacataaagctaccaggaactccaacctgtttgatcactattcccttgctcaccaacctagtcatctttcagctactccatgcatgacttgtgctgagctattagctcccacatgaatacaagcaattcttatacctgcctaattcagatgatctttcttagggtttgaagtccctggggatccgaagctgtcctaggtatacacttctctcaacccagtccagcacaaaaggagacgactaacgatgaatgaaattgagaaatcagcccacactggtaatcttggaggaatttggtattcttcgtgaaataaaagaggcgcaaaggggccctggattagggtccggagagaggggttttatcccagcactgcccctaaccagctgaaaggtaggtggtccaatcacatcagctctccgagactcagtttccccatctataaaacaaggagtaggcttgacggtccctgtctcactataatttcccaatcgaggttcagggagaaatccacaaaactaataaaacttcttcacggactgctaaatgtgaactcactggtcaaggctgcaagatttgctctttgggtcaaggcagtaggggcggccacaaggaaccaatctcagttaagttattaatgcactttgcccagactagtaactctcccctgacgttccgcatttcccttgcttctcccggaaacgtggggcgcccaggaatcctaaacttccaatccctaagcttccaaaccccgcccctgggaggggagggggcgcggagccgggcctagtcgcgcgcctgcgtactgcggtcagagggccgaggcctgggggcgagctggggtcgtgcagtacagcctctttccggcaaatcacgcgagatttcgttcacccgggctccacagggtcagtgacgcgcgagcggctcccgcgactgtggctcccgaagctgcttcgggccccagcggtgaggaagaagactctcaaccagggtgacttctaggcgtcctcccggagctaccggggacactggcgttattgcccgcaacactgagatagggaatgctcgagaaacagaagcaggttttggggttttttttgaattactgggggaaagcaacctgaggttttgacgtaattgtgtttgaggtgcctctgaaactttcatttaacacagatttgttgagcacgtaccatgcgccgggcataggggattggactcacatttttttgtgtgtgtgacggagtctcgctctgtctgtcgcccaggttggagtgcagtggcgcgatctcggctcactgcagcctccatctctcgggttcaagcgattctcctgcctcagcctcccgagtagctgggattactactgcgcccggataattttttgtatttttggtagagacgagatttcaccgtgttagccaggatggtcttgatctcctgacctcgtgatctgcctgcctcggcctctcagagtgctgggattacaggcgtgagccatcgcgcccggcctggattcacatcattgaacaaagcagacgagtccttatcctcttagcgctgacgagctgggcagttagtttgaaattctgggctagagacgcaaattattattaatttccatataaagtggttggtaggaggagccacagggctcagggaggtcactgagaaagggaagagcaagataggaatctccacatgcaagacttcgggaggggaagggggagaccagaaaaccggaaggggaggagaagactggcagagagatccagaaagacacgtggtttgtttgtttgttttttgagacaaagtctcgctctgttgcccaggctggagtgtcctggctggatctcggctcactgcagcctcagtctcctgggttcaggcagttctccagcttcagcctcctgtgtagctgggactataggcgcccaccaccacgcttaatttttgtatttttagtagagcggggttttcccatgttggccagactggtctcgaattcctggcctcaagtgagcctcccacctcagcctcccaaagtgctggaattacaggtgtgagccacggctctgggcccagaaagatacgttttataacaaggcgtggtcaacagggttgctagtggcagaataatcgcacgaaataagggtattaaaaggtatta

SEQ ID NO: 60870 - DNA, 2237 bp, Homo sapiens
tgagatggagtcttgctcagtcgcccggcgtgcagcggcacgatctcggctcactgcaacctccgcctcccgggttcaagcgattctcctgcctcagcctcccgagtagctaggattacaggcgcgtgccaccacgcccggctaatttttgtgtttttagtagagacgggttttcacggcgttacccaggatggtctcgatctcctgacctcgtgatccgcccaccttagcctcccaaagtgctgggattaaaggcgtgagccacggagtccggcctactctgcttttctaaagtggaattatcttcctctgaaatgtttctcctttattttaaatcaccattagtaatttgtgtacccaaacctgtcatcaaggcttatctttaaccttgaaaatgcctttttaaagagaactcctttaattcccacggttgagtctctcattcttccgcacgcaaatattttaaaataagtaatttcaagaagtcagtcaaactcacaaagctttaacaaggtggcatccagcttggaagtcaagtgttcaagcccgcagtcgggacatccaagagctctttacatcctaattacaacacggaacccagactcactgcataccccgtcccgtatataatgcaaaacttgattctgcaagttcctttctcgggcggtgaaacttcgaaggtcctctccatggagacctttgataaatgtttaagcagtgatcttttctttcgcgtttgcctccattgcaacgcctccgctgatgggaaaaactactccctccgctactgcggggtggcagtgacgtcaacgaattagctgacctgttttttcgggcttcgcggacataggagtcccgaaggccgagagtgagtgagtgagtgggagcggggcggctgcggctcctcctgtccggggcggagccctgcgtcgcgggcctggggaggccccgccagcacccttgacgtctgggtcccgagcagtgcggcagccacacgacactgaggcgagcgagtgggtgtgtgcgtggggggtcagccaaacttcctgtcccgcgctcgagctgcttccggcgggagccggaagacgctgtgtgtggacggaattcgggaccgactgacggccggccggcttcccggaactggaaggtgagctccgaggtgggcctggccacccctcctcggttaggtagtacccgagagggcgggggccagtaccggctacttggggcctggggccgagttcgccccgagagaggaaaccgccctccttgggcatccctcctggatctggcgggcccgggagcggccagtctgaagccctgcggctttggcccttcccctcgcgggtttttaggggcgatgttcttgctcctttgcttggttttgggggtagggatataggaacagactgtcctgagaaagccagagtcagcgagtccccggggcgggggctcttggactgcacccgcagccggggcctgcctacggaccttggggccttatttctgaggcctttgtggtgtggggtagaggatgccaggaggccttgccctgaatgtttcagtccagagctaccctctcctttcataccacttactttctgggtttggaaaagggacagctgcctactcggctgggctgggtcgcccgtttctcctttgcctgtcagttcggggggcaggagtgtgtggattgtttacggccttcatacatttcgtgtcgaatttattttctgaagtttctcaagataatccaatttattaaagtttatcccacttgatcatgaggctcagaaatgcatttaggcaccatttggaagttaaatattattaacttgggacttaagaattagtacttaggttggaacgaaggtcaacgcagcatatttgcaataaataaaaaacatttggaaataaagtcgggcattttgttagggagtgagaaattgcacttggttttttcttagtgtggtgcagagtaaaagacaactaaagtagcagtcagaagttttaagttctagttttttacgttttgcatctaagtagatgtctaatttttggcaagttgctgaatctctagctctggggagtttttctgtaaacgaaggggtttacctttagggctatgacaatttttccgaggcactgaactttgagtagaagtgacataagcatttctttgttttggaaagataacttgaatggctgcataaaggatgtattggaaagaggaattt

SEQ ID NO: 60871 - DNA, 449 bp, Homo sapiens
ttactgagcactttctatgattgcttcttcagagatgaagcagaggaagtgggccagtaacctgctcctctcccaggtttccccatctgagagaaaggccctaccatccacccagctgcccaggccctttgcccacatcactgactcctccgtgtctctcatcagtcacaagttctgtcatttcctcctctttaacctctctccagtccatcctcgttttttcatccctgcaaccagttgcacaatttctctactgaattgtgaaatagcttcctcttggctcaacatccctccagtcttgctgccctctcagattatctatacagcaatcagaaggatccttctgaactatatttctgatcatgggccaccctgcctcactccctcagtggcttccctgtgcccttgggatgaagtccagactcgccaacgtggcttgcaaagctcct

SEQ ID NO: 60872 - DNA, 606 bp, Homo sapiens
actattcaggatctgtaattacctgaagatgttcacaccaccacccgtccctcccagcaaaaaatcagagatgaagacagattaaggggctaatctcactaggcttgaggaaacgaagggattctgaacagtgagatggcaagggaacattcacctagttattaattgacttgactctgcctaagcgtggtagagctgctggctgaaaatggggcgcctctttcttggcaccatgatacgcctgccaagtgcacttctaaccagatcttcattaaatgactcacctcaaactggggcaggaacgtgatttgggtggaggctccccctaggtccaaggtccccacagtctcctgtctgtggccatgcagctgacctgtcaaatgagagccagctctaaatagcctcgacatcctgggcagcccaacacttgtctctcttgctcttatcatacactgaaggtattccatacatactccactgctccccagccccaaggctgcaggtgaatgtcaactcggaaggactcttgttgcagcagaggccttcaaggcaggtgttttttttttttttggaaggcctttttggagacagagtcttgctctatca

SEQ ID NO: 60873 - DNA, 406 bp, Homo sapiens
ttccttctatttaattgtaagtttgtacccattaaccaagttctcctaatctctccacaccccactagccttcccagcccctctggtaactgtcattctattctacttccatgaaatcaacttttttagctcccatatatgagtgagaacatgcagtatatatctttctgagcctggcgtgtttcacttaacataatgacctttgcttttttttattttattttttttgagacggactctcactctgtcgcccaggctggaatgcagtggcgcaatctcagctcactgaaacctctgcctcccgggttcatgtgattctcctgcctcagcctcctgagtagctgggattacagggacccaccaccatgcccagctaatttttgtatttttagtacagacggggttt

SEQ ID NO: 60874 - DNA, 3038 bp, Homo sapiens
ctttttaccatctaacacattatataatttacttttgtttattttcatatttcctgtttcctgccacctttacccactatgtgaactatacatagccaggcagaatttttttttttttttttaaatacagagtcttgctctatcacccaggctggagtgcagttgtgcaatctcacctcactgcaacctccgcctcccgggttcaagcgattctcatgcctcagcctcccaagcagccaggattacaagcatgtgccgccgcgcctggctaattttgtatttttaatagagacagggttttgccatgttggccaggctgttctcaaacttctggtctcaagtgatccacccgcctcagcctcccaaaatgctaggattataggcatgagccaccttggctggcccgtaagcaggaatttttatctgttttgttttttatgtgttcctggtgctggaatggtggtgtgagcacacagtagatgttgaatgaatactccaaagggataaacaataatacagtaactcaggcactagatctcacccatttaataaaaatgtaacagctgatcgggcacagtggctcacgcctgttaagtgtgccactgcactccagcctcagtgatagagagagactctatctcaaataataataataataataataataataataatagctgactgctttccaaaaaattacccagcccctgaaaaaaatcacaattccaagcttcagtgaaggttttccccacatttgttatataaaggtgacatttatccaaatgtgtcaagttttatatgctactcaaaatagtgcagataggcgtactttttgtagactagggaggtatgtatacgtcagtacatttaaatctactcctttcacagttggtcttctcattttctcttgctcactatctcttattcaccccccaacaaagccctgtttccaattctttttgttgagactctggtgccagccagtgtttgtcactatctccatctccttctatggtcttttgtgtctctttatacctggagtagacatgaatcctccccactcagctttcccagaacgtcacactctggcttcccttcttccatgtccccggaagcctgagagaccacaatcccagaggacctgggccccattcatgtgctcacctgcttgtgtctgccggttccctgagtccttgctttcgctgcaggttgccttttgctctttgctcctgtttcagctcttcttaatcaagcgagcctcatgaaccgcattcacctttgtgccagtttgcaactaacagtgtggcattttgctaactcactcccttctctatccttccctcctcccttactctctttttctctgagtacacaattcgttcatctacttttatcatagttaacttccaactagtaggattatcgctcatagggcggaagctgctcagcaactcatttctgtgtttttgttagccaaatagaaaagttaatagcacttctcaataccttccatccctgacacagaatttagaaacctggatggaacataacttggtctcttaaaaaaaaaaaaaaaaaactttagaaacctgggcattcacctgtctagttaataagcatgtactgagtatctaatatataccaggcactgtgctagattcttgatatatacagaggaatccgatatagaagaaatttcagcttactggagaaaacagggctgggcacagtggctcttgtctgtaatcttagcactttggaaggtcgaggcaggaggattacttgaggtcaggatttcaagaccaccttgggcaacacagtgaagctctgtctctacaaaaataaaaaaattatctgggcatggtggcatgcacctgtagtcccagctactcagaaggctaaggtgggaggatcgcttgagcctaagaggtcaaggctgcatgaaccatgattatatcactgcattccagcctgggctacagagcaagaacctgtctcaaaaaacaaactaacaaaacccagacaagcaaaccaacgactgtaatgtactgtgataagttctctgacagaaatgcacacaaagtgctctaggaacagacataagggacaagaaacttggcttggaaggggaaaggtgaaggtgggatgggactgggaagcttcttgagggatgagaggtaggaattatcctgggaaaatgacacaaggaggattctgagaacttcaagtattaacagcttggtacagctggaatatagaggtgtaccagaataaagacagccagagtgagggaaaatggctctggaagcagagaatcagatttcaaaaggagtggacttgttttcctttcccatagtgagattgattgttagttatgtctttctgttgactccctaagcaaatatcattattgattgacttggataaaataatacagtatctcacaacagtggaaaattggataggtgattagaaaggtccaccaaaaggtccaaaaagagtgaaatgtaaaagctcccactgacaattcatctgagctccacagcaaagctagccttaacaagttaaaaattaaacataaggcaagtttaaaatgtaactagaatgaaatttttaaacagtaagctgaactatggaaccaatatagttaaaccacccagtgcataagtaagccaagccaagcaaaaccaaggtaggtctaataagctaagttcaggacaggctgcagcaaagtgagcaatgccttatttgaggatataacttataatacaaagggccacagccctgacacaccttgctatctgaaggatgtctaaggtgggtggtgcatggtatcttttgtattaccaaagacaggtattaatattaggcctggaacatgctggacaccagtaattgaatcccaaatggacttggtacaattaggctaatggaatatgcaggcagaagcaatagggcaaggagtaccccctttcccagtgttccactacggcctaggtattacatgtccaactcccaattcccctccaaactagacc

SEQ ID NO: 60875 - DNA, 645 bp, Homo sapiens
gtagttaatgattatttgtaggcatagtggtgcacgcctgtagtcccaactacttgggaagctgaagtaggaggatctcttgagctcaggagcttaagttcagcctggacaacataacaaaaccccatttcaaaaatatatggccaagcatagtggctcacaactataattccagcactttgggggcctgaggtaggagaaccatttgagcccagtagcaacagagtgagatccagtctttactccccccccccacaaaaaaaagttagctgggcatggtggcacaagcctgtgctcctagctactcaggagactgacatgggagaattgcttgaccccagaaggttaaggctgcagtgagtcatgattgcaccactgcactccagcctgggtgacatagtgagaccctgtcattcattaacaaataaataaacaaataattatctgtggtaacatatcttgtatataagtaaaacattgaatgttttaaatttttaaaaatttatctaaaagtgataagattaaatccttgaccgccaggatttcttaaaatgcccctgcagagatgtgaactagtcttaatatcacgagaaaatgtcaatttagtagaattctatatttgcagcacatgcaataaaaaagcag

SEQ ID NO: 60876 - DNA, 2187 bp, Homo sapiens
ttgtctcaaaaaaaaggtttacagccggggcggtggcccacgcctgtaatctcaacactttgggaggccgaggcaggtggatcacctgaggccaggagttcgagaccagcctggccagcatggtgaaactccatctctaccaaaaatacaaaaattagccgggtgtggtggcatgcacctgtagtcccacttactggggaggctgaggcaggagaatcgcttgaaccaaggaggtggaggttgcagggagccgagatgccccactgcactccagcctgggtgacagaagactctctctcagaaaaaaaaaaaaaaaagtttacaaggcttatcattaccaaatcggcatgttccctcagaagaaacagaaattcagaaacagaaactatgcaagtgggaaacaaggcggaggggagtaattagaggtcaaagacatcgggaaggagtgtacggattaagtcctccctagagaaatggtgacgaaggatctacaaccacatttaaaataaactttttaatttgaaatggagtataacagagcagagcttcaaccacaagtctcctaactattggcttggcactcagaataccgtaccttccttaatgactcactgactgactctcattgaaaaatgagaatacttgtgagtacactccttttcagaggtgtattcgggatttcaggagtcggggaggcaagttgaagagcttccaactttatgcaactttcaggaaagaaggctgcggaccggtattagcaaatggaaatccggggggcggtcgtgggcaggaagtatcggccacacaggacctagtgaggccgaggaccctgctcccgacctcggtggcagcactcccctccccgcccggctccctggcgtgccgctgctcttcggaggctggcagcctcgccctcaaccaccgccctcgggaaagtcctcgactgcctatcaaaaaacatttggcctgggacgtccgctggctgcactatcccttacagaatcagcaagggtgaaaagccaggaaagagatgcaacccaaaggagtaaggcagtgccgggagcggcagaagcggagcgggggcgagggcaaggtagccgcggccacgctggctgcggcatggagacacgggaggaacgggacccgcgggcggcacgggaaagggctgcggctcagaccactgcggcgggacgggcggatcagcggggatctaagtctcctgaggcaagggcgccccgaccgcagcgactcctgacacacccaggccgcaggacgaagcgctaccgcctggggctgccagctcccgcctcccgcccgcagagcccgggccccacgtagaggatccggcgccgccgacactcgcacactcaccgcgcgcgcgccacccttgcgcggcagcccgccgccctcggcgcgacctccgccccaccccgcgcgccgcggcgcctgggctacgtcacgggcgcgtgcgctctccgcgcgccgtcagcggcgcgggtggggcattgccagctcggcgtcccggttcccttggagacagagctggccagggcggccgcggctgggcaactacgacagcggagcccctggggaagccaagatgccgtcgaagggaaaggacaaaaagaaaggcaagagcaaaggcaaagacacgaagtaaggagaagccacccgagagtcccctctccctgggcctgcctgggatttcgggtctggggctggcaacctggcgccccccgcgccggcccactcggaccctctccccggctctcccggcttgtgaggattacagctcccatgtccatagtctggcagatctctactatgtgttcagattatcttaaacgtgtagaggatgtataaagtagttccttgggccttttcagagatctcttttggttcaaaggggacacctaaagtattttaccaagttggataattattgaggttttcccaaactgatcagagccactgaggtgggtaatgttctagcactaaccccttacaggcctggagttgctgctagattgctactagccctattgggggaccccggtggtttctggacacgttggagtcatacgtggtgtccagcaacaacaccatatatgggaacacagagttggcaccaaacttgagatgtttgtaaagtaacttaagagagtaattcatgctcaatacagaaag

SEQ ID NO: 60877 - DNA, 620 bp, Homo sapiens
gggtgacagagaaagattccatcaaaaaaaccccaaaacaaaaaaccaaaagctgtgactaatatacaaactatataatcaacctccaaataccaaagtgttgacttcttaaccatttggccacactgtcataatgctatgcaatcccattgttaattttttaataacccaaacataaataaaataaaaaagccccacatccctcgccctgtggcagcacatagctggcacagaaaaaaaaaatcaacctataaaaggggagacttgtataacaaaacatgtaatttattaatgaaggtttcaaaatggctctagtcctatgactagaaagaacttcccctagcctatttgttcaacaaatgtttgggcagcctgctctgttccaggtactgcagataagtagataacaactacagtctgatgagggcttctttaaatggcttaaagagccctacatgactcaacccctgcctgcctctctaacttcatttcttccttttcttctcatttgctcactgtgccccagcccatttccgctgtctgaatgtgccatgcttcttcctgcctcgggacatatgcacctgttggccgatgtggcaatagtaataattcttcttttt

SEQ ID NO: 60878 - DNA, 1897 bp, Homo sapiens
tctatgtaaactgtaacttagctgagaaaaagtttaactcaaagttttggcaagaaaggggacagccagtccatggaaaatacaaagagccacacttagggaaaatagcttagcaaatggctgcctttggtgaaaatctagagtccacctctagaaggaaattcaaagttcatacactgaccctcgcccctcgcgtcccccctcccccttacctcagatcaccacggatagtgaagtagggtgggggaagggagcaatggcaaagtggacgctcacggcaggggacagagtaaccaaaaagagtagtttctgggggagagagagaaggctggtgcagaggtaaaaaggaaagacggtgggcggatggagagatgagggcaagagagtgacagcagggagcgggcagagctggagaaggagagtgggcgagagccagaaaagaggaggcttaggagtaaaagggtagagggccaagggtaacagcccagggttggatccgggaccagggaggttatgaagtgagggctgggcatgggacagggccgcacaggtcgggtaggaggtctggccaaaaaggggttgggccaagaaggtggtcccgcccgaggatggctcagggagcggacggaaaggatccaattcctagcttcatggtgccttggcaccaccctcactcgcctgcaggatccgggctcgcactgccgccgccgccaatagcgccgccatggctctcggccgccctagctccgcaccccgcgcctctactgcccagaagcactacagctgccaggcctcgccctccatcctgccaggcttcctcattggtggggaggactattttctccagccaatcactggtccgaacacctgattcctctcctcacacccccgtcctggggataagtgattggttaggagcgaaaatgctctcgccctctgccacctcagccaatgacgtaggcggaggtagagaagacgcccctgacttggacactccctaccgagcacacggggaagacgcccccctaacctggaactccgattggccaagggcggaaccgaggccccacccccccactgaaaaaagtaaataagacccttcaagaattttgcagtcgctccacctcaacatccgcgtaaggggcgtggctatacttaggggcggggctaggcaaagattgccctatgaggcgagggaatgagactgggctgcgagttggggatagggtttctctttgggggcgtggcttatggaacctcgttttcccgccgacggttggccacgtcacgtgacatgggttggaagatggcgtctcccacagacggtaagagccggcttagagatctttgcctgcagcctccttctttgctctactgggaacatccactctgtctctgcccctcgaacatacatttctttcttgggctcttctcctttcccttttattttttttcttgagatccatcgccgtcttcagctcaccggttcttcacagcagctccggaggtgcccagtttccccgctctgtaccaggcgtgtggaggagggcactagggagggactcattctgggtaaaaggacaggggggtcgccctgtgccttccttatctctatttgggcgaggctgagggtcgaggaggagatgtttctggaggacgtggcttactgtagttttttccttggggtacccattgaaaggatcagttctcttctgattgagcgcacggatggaatgattctcacaaaccctcgcagggctgctggctgacctcatctcgatactgaaccgcaagagaaacatgatctctctcctgtctcctcagtttgggaccattgccgtggcagcaagagaagcgggggacgttctcggcccctcgccctgagagtcgcgaggag

SEQ ID NO: 60879 - DNA, 1390 bp, Homo sapiens
aacagtctgagccatgaactcagtccagtattgaaaaataagtatctccagaagtaattcttattctagtatcaaacataacagtcctttaaaatttcctttggaatgttgaaaagagatcaaatgaaaccttcagaatggttatttatcagggaacaagaaacctccaatttcgttcacccattgtagctccactttctcattttaatgctcaatccacagtggcgatggtaaaagatgtcctgcaccttcagagatggcagtgggagaggggacatcacctttccatttattgcttgttgcaatttggcctgtttacagacagaattgctctgtgggttcttttagtggagagtggaggaaatcaagataggaacaagaaatcagcatttacacatgacccatgagttggctaatttttaacatgtagttaagaaatgattacagcctgcagagtcatgacctcaacttttcatcagctccattggattgtgcctcagtttggaaatgaaggaggtacacgggaagttttaattgtacctgtgtgatttatccctagtcagctctttaatttcttctggctgtctgaggtttccgacatgctgtaaatttccccaactttttcattatctgcaatttctttatgacttgtgaatcggagtggagagagagtgtggatttacagcagagataaacatgtccataaagtctgtatctgtgtcagtaattgtactgctgtcagtgactgtcctgttttacaggcctctcttgggaaaggaacaggcttcactaccagcagcactgaagtgcttgctttgatttgcattaacttgctaggagattaggtaggaatggtgggataggaattgatactggaccttggcctctcttgtttgtttgagatcaaatgacctcctaggataactgtgtgttgaagatagaacatggacagacaatattcatttcctaaatgaaaatgaaacttgaattgatatggtagatgtgaaaaatcctttctaacttcattttataatgtacctttaaggtgacttccctttcctatcactgttgataattaaacttaggttccctctggcccccctcccccattttccttttcttagaattaaaacacagggtttcacttttagagcactcatatctgctcaagagtgggccagctagagttaaggtgaagactacatctgccttatcttaattctcaactattattggctctttctcatctgcttaaggtggtgtgcccacaaccatttaccatgagaaaggcagtcacaaggagcaattcttaatataactgtctttaaaaggctctttaggatctctctctttagtgttttcttccttatagtaattttgaaagaaactg

SEQ ID NO: 60880 - DNA, 831 bp, Homo sapiens
acttagcccaaaacaccaaataagtctagtagagttttgctgctttaaatgtaaaaagcagcattttactcttagtatttaaaggcgactccttaccttcttgtagcactttgtctactgcagaatgtgcatgattttgccctagttatggtgactggattctcatcctctcagtaggatcaatattaagctagccttctttacctcctcgatccatattaaacctgtcttggaaagagtctgtttattggataatatagctacaccggggctctatgacaatatcttttgctgcctcattaactctcgagcattagaacaagataaaaatgccctaaagcctcttatctgatgtctggtgtaacctgctgtaagcaggattgccattagtttatgttagaaatcaaatgaccctctccagtgcaggaagtactgattaaacctgaagtgtccccggaggactctacagctgtcagaggggtggtgactgtccgtcacgaaaagggaaatctgggccagaggtcccagtggggcggtgctttaagaacccgcacgtggctgccccagctgttctgctttgcctaatgaattgttttacaagaagaggctgggtattatcatcacaagctgccttccttagggactggagcaggccaaataataagtaatgttagtgatggtaattgaaatgtgatggctctcctgagatctttatggccctggagctggttggcacttgtggattgccttgtcctagcaagtgccttattttttttctgttttgtaataccgttgtgtgcgtttttctcttctgtcccccatggaaattca

SEQ ID NO: 60881 - DNA, 1706 bp, Homo sapiens
cactatatggatgtaccaattcaagactctttgtagatagtttgacttggaccttataaatgaagccttaccatacaagcaggttgcatccactgacttgtgttccatagttcaaactctgcttttacatgaagtgattttccttacttcaggaatgttacattttagtccagtattgttttaaaataggaaattctggaggtaaagcttttaggggggaggtagtgtgagtcttgtcatgcatcattagccggacatatgtgtagtgatatgcaccccactgtgtgcttttaatttgttgcttagttaaatgagaagtattctgtcccagataggtggggaaaacaaatagcctttgatgagtgttgtccaaggcactgactggcggcttcctctaaagttgaatgagtgttttctcccctaattttctacttcagaagttccaggaatcaagttttgaacgcattaatggacttgggaaatgatttgtcagcacgtggaaatgaggacttaggtttcttgtgtaacagcttggctaacaaagcaagtttgtgcctcatgaactttaagggccttgctgggagtggcagtgtgatgaatgaagcaaagcaattttccaggagcatttcaggtcagtgataggagaaatcagttgtcttctcagtcaaacagaaacttaattttagttgcatctgtcttaataagagaatctgtatgcaaattgaatggtagaaattccacatctgccaaagatgggagcattgcaagtcttttttttaactcgaagctctttagtcccattctcaacacttcaaaattgaggtttgaccaaatattgaagagatgtcatactactaaattgcaaaatgcaaactagttttgtttcagactttttatacagtgcttttcttgtccttgatgttagtcatttgaattgatgcccaatctttaatttaataattggaggctattattaataacaataactgatttacttcttgtccaagcctttattagattcatgggatgtaggtatacagagatttctggggctgttctgggctattggagatcttgtagacctaaactattcaaagcagtagccactaactgcatgtgtttgtttgaagttaaattaattaaaaataaaatttaaaatctaattcctcagtcactctaggaaatgctcagtagccatgtgtcgctaatgactaccacattggacagcactgctctagaccaaaggtcagcaaactatggcctgcaacctgtttttgtattctctgagctaagaatgttttttacgtttttatgggggctgtaaaagtaaaacaaaaacaaaaaacggaagaatctgaaacagactgaatgtggcccacaagcctaacataacatccttacgtcccattcatacttatgttatgttaggcttgtgggccacattcagtctgtttggttctttacaaaaaacctttgctcagccctggacctatgcttcctcttggtgacgttttggctttctgatcaaattgggttaggactttccataagtcatcagaagactaaatctaataagcaaatagacaaatttcagataaagtttcttactatagatagactatggaatgagtccagagcatacacaaatcagttccctgaagctaggacaagcgggatgtgcatttgaaataggaaaatagtttata

SEQ ID NO: 60882 - DNA, 660 bp, Homo sapiens
cattcggacagacatacaagtgaacggacggacgctcctaggatgggtgctatgcattgcttaagaaggggaacctttgaggacccttgaaatccctcccctctgatgccttggaggaaggcggactggcccagattcccggaccggcaaccgccacctgcctctctggtctcctcccaccccgaggggatcgcgctcgcgccgcgccactcgcgcggccaccgctagagggagccgggagcgtctccgaagtctcccgcttgcggcttcgctcaggcgctgcctttcacccgcctcgcaggggctgcgaggctccgacaagactggtcccttcttgtcattaggccctaggcccgcagccctccgcggccccgacctctaggaggtgcccagcaccaacaggccgaccctatgctccctacccagccctccgctatgaaaaccctaacgctgctctgctactgcccccattttaccaattaggacacagagaggctgacagatgtacctagggtcacacagcgaatgcgtggcagagccggaaacccagggggcctggctccgaacccccatgcctcagaggatctcaagcaccttcttgtatctttctgttcaaggggaaaccgaggcacagagcaagtctagagcatactgtgtggg

SEQ ID NO: 60883 - DNA, 1176 bp, Homo sapiens
tggagccaggccgggacgcaggcccgagttagcacggctggcattgctgccactcccttcagggcagggaggacagtcatctagcggccttcggattacacaaaccctttccttggcgggggtctcccagggtggtcaggtccggaccaggcagaggccttgcacctgtgcttcccagccccccagttttgcgcgggaactgcaggtgccaaacccggaggcagcaaaagtgctgcccaaacggggatggagccacccggggcgggagaggccgggggcatctaaggccgtgtagctcccatgtttagaggctcccagttatttacaaatgaataaaggccagaggacacgcgtttgggtcaacttaaaggtgcgcgtgcagtgttctgtgacctccgtgggatgcgaggctggcgggccggagcgcccctgccggggattggccggccgcgctccgccgcagactccgcgccgccgggcgctcacttcgccacctgacggcaacggcgggaaccgcaggagcgcgcggaccaccccccacccacttcccccgagccccgccggccccagctcccgctccccaggaagcgaagggttaagctgtcagcggcgcgatgttaaacaggtgtcaaaggcgccccatatatctgcagattgaaatcaaattcttcgccgtataaaaagataaattacccaggcgctgccgagcgtcccactcatcacgccagcgccagacggcaagcaatttttttttaatgtgctaacgacctaatcaagcaatcaagtcggaggagattgcagcgtgacccgggcagccatctgccgccgagcccgcatgcatttccgcgccgcgcggggcgggggccgcgaggggctgccggggggaagggggaaaatcctaaacaaattaacacccaattttccccgtctaattagttaaatgagaagagttgggggtccccggggaagcgggggcgctcgcgacgaggcgagtgctgcctccccagcattaattagtgcgggtcaatgccgcggctcccgggagagcagccgctttaatttcccgtggtatttcagtgcctgaggcccatcgattcaaactgaaattaacttatttttcaatcagcccagggctgcccctgggggtgactcttcttttgccgcctcctgaataga

SEQ ID NO: 60884 - DNA, 1423 bp, Homo sapiens
aaattagatatgaccaggacccaactctggggtggatacccagagaaatgcaacaatatgcacaaggagacaactgccagaatattcgttacagtgtggcttgtgggggtgttaatactagaaaaaaatctatccaccactaggggaataagtctatgcacacagcacccctcatgcaagcactcagaagtgaaaacaagatgactagcatggatggactcaaaaacacaatgttgaggaaaaaggtttaaagaaaaatcacagcatattatattgaagaattcgaaaccgctatatagatttcaaagtaacacttgcacaaatttacccaaggtggaccgtaaagccacttatataacacaccagagtggctgtctgaaaaggggagtgaaaggggtctgggaataggaacgaagagaggaagtgataaaataaacaaggagccttgcattggcccacagggtgtcaagaactgagaaggatcaactcaattttgtgcacctgaggttcttcttttcaaaaaaagaatgccagttgcgagggtgagggtcccacaccgcaggagatggcacaagtccggccaagaacggagggggccgcggccggtgcggagcggcctagagcggcgggagggcggacgccccttcgagagctcctctttctctcagaagtcacgggggcgagacgggggcgccagggcggcggacgaggcacggagggcaggaaagcccattccctacagcccggaactcctgctcccaaacctcctccccgaccgccctgcttacctggcgccagctccgggcgcgggccccgcgaccgccatgacctgagacccgagggactctggagcccagctgcccctagttcagtactgggtagagtccgaggaggggcggggccccggctaccacagagacggcgtttgatagagaggaaggtgcgggagacgcggactctcccggaagcgaccgacgtctctaaaagtaccagagagtggactcggctgacccggcggctacagcgcccccatattttctgggagacttcccttttgacaataggtatccgagagtgtaactactttatggcaagtattttagattctgtgtataatagatgttttacatattctcccagagaagccagcatgatctttaaaaaagtataaattaggcttccagccgggcccggtgggttactcctgtaatcccagcactttggaaggccaaggcgggaggatcgcttgagcccaggaattcaagaccagcctgggcaacatggcaagaccccgcctttacaaaagacaaaagcattagccggggatggtggcgagcgcctgtggtccgagctactctggaggctgaggcaggagaatcacttgggcccggaaggtcaaggctgcagtgagccgtgactgtgc

SEQ ID NO: 60885 - DNA, 494 bp, Homo sapiens
ttctaagcttgtaaatttcctggcagggagttggcggcaggggatggatgggaatgaaactaaagcttgggccatctatttctcaaactcaccccaccctcaaaggttcacaggcagaaaactttctcctcaggtcaaattgctaataattattgaggaatagctacagatcctggaagcctcatgggtgacacacagactgaaaaattaaaaggccattagcccttttcttactactcagaagcctgactgtcccttgaccctgggcaatcttacatttcctaacacccaaccatgagcatagttggaattcctgtaatgggggaagaatgttctgttatcagtgcctaaaaatggctactagccctagtgactgctcactacctgccacgttctgtacaaagtacttgacatgcattagcactcttatccttatcactgctttgtaaggcagtactattccattttgcaggtgaggaaactgaggttcttct

SEQ ID NO: 60886 - DNA, 1795 bp, Homo sapiens
atcacaagctgtgattagagacacaatgagatttatacaaggaaaaactgattaagaatcacaagattccaaagcccaaaggaagtcctatttgtaacaataaatgatgaaaaaggggaattgacttttgacttgtcagcaaaaacgaaattaaaagaaaagcaaaaggagttggaagggggaggcgggattccaagatacaaagcataaataaaaagaagttctgtgctccacccctccaccagagctggatacagcccttctgttgtccgccctacaaactttaggaaacttcagcaaaaggcccacctcctggagttcccaggaaccccaaaacacgcgttctaaggaaagaaacaaagttgtgcgcggtcgggtttcatggaggccggcgccttctcccccgacccagcccattccagttaggtagggtccaaggctcagcctggccgcccgagggatccgcccagcccagccccaggggtctcagcgcgggggtccggcggggccttccacagagggcgcgggaaccttgggcgggcctggggctcaccgcagtccttgaactgcaccggttcggcctgggcagcggtgctgagcgccaggagcaggaatgtagctgccaggaaacgcatcgcggataacgaagttccaagctcgggaaagaagcagcggccgcccgcggtcacaagacaaacctgtcggggcgggcccggggaggagcccagtcaggcgacctgtcaccagtaaccacagctgaggcccgcccgcgccccgcccccggctccggaaagccagctccagccctctcaggcccagaagcctgcagtctccgcccatgccatcccctcagaggcctgacccgcccggacccacctccgccccgccccgcctcactcctccccgccccgttccttccctttagagcacctctccggcttcctgggtgcgtccccgccgctgccgtctggagcattcctagccaatcagacaccttctcctcccgcactacccaataggcatgttgggggggcggggcctccgtgaagtcccggcctcctgttcgttctctccgcctcccgaggccccgggtgagaaacgggggagacgcgaggggcggagcttgtggaggaagatggctgccgcctgggggtcgtccctaacggccgcgacgcagagagcggtcactccctggccgaggggcaggtaccaagactagaaaggcacctggaaagggtgtttggttctgcgcctctaggacaaatgggaaactaaggcctgtgggggatgcgagggtttggtgggaggccgtccaggtgggggtcgccaggtttagcgtgaggcgctccaggtcgagggttgcaaggtgccccttctgctcccgggctcaccctcctcccttgcgcgcaggctcctcacggcctccctgggaccccaggcgcgtcgggaggcgtcgtcctccagccccgaggccggcgaagggcagatccgcctcacagacagttgcgtccaggtaggaggccggacgcggagcggcggtacccaggcgattggcgggagcagcgggaactgctcttcactcagccctttaactcccgtttcccgctattcttgatcccccttcctgcatttcagaggcttttggaaatcaccgaagggtcagaattcctcaggctgcaagtggagggaggtggatgctccggattccaatacaaattttcactggatacagttatcaaccccgacgacaggcaaggaggaaggggtgggcccccaaaggaggtacaggagggac

SEQ ID NO: 60887 - DNA, 961 bp, Homo sapiens
tgttctcccggccccgcccggcggccagcttctctgagtctagggggccctgaagcggccgactgggggcccggctctcggcggaacgagggctgcgcgccccgagcctcgagtccgcgctcctactccagctgggctcgcacggctgctgcaccttcgcgcctcctccctgtgcctgcagccgtctgaaggggacccggacggttttatttttggaaacctcccccggctttttcgtctcttttatccacaccaggccccctcctcggagggacagctcagccccctcattaccggagagggagcgaggaattccagcaacacccactttggcaccgggaagccagcgggcggcgagcgggcggcgagggggattaacccgtgcggagcagggggcggcgcggggctgacccaggcgctggtcgggcagatggcgcctgccacgaccgggacactgggccgcctttctcctgctctgggcaagttcgaactgcagacctgccccgaatcgttctcccgcccctcgcctcagggaccgtctttggatcgggggacccaggctgcagccttgcaggtctgaaggaagccgggaggggcgccgaggcccgcgtaggggaacagggccgccgccccctccgcttgcgccctggccgctgggggcgccctccgcagggccggccggagcgggggtggcgcggggcggggcgcggcgcgcggagcgcagggaggtcccgggcgcgccccctggcggagctggcggccctggcgctccgtggctgcaatgccctggcgccgccgccttcgctctggatctcaatccccttccactggcgtgagggtcacgcctgagcctggcgcggtgatggctgccggtagaagaggggtcctctttttctttttctttttcttttctttctttctttctttcttttttttgagacggagtttcgctcttgttgcc

SEQ ID NO: 60888 - DNA, 932 bp, Homo sapiens
aggaagtgctattatttccccacatagcagatgaggaaatgaaggctcggggaagtaaatgactcatccacagtcacaagccagtaggtggctgcgctgggattcactcctggtttgtctggtcccagatgctaaaccaatgccagcttccaggggaagggagaccaccgacagctgcatttttctcagagctggaagcatgcacagctgtttgtggtgtggtgggggtgctaatggctgcatgggactgtggtcacaggtcagcccccaccaagcatcccccattctcctcaggcctgtttaccagctaggggtccgctctgagtcagggcggtgaatctgattcgcacccacagagaagaaggaaggaagtcacagccacactcaccccacctccatcaagtagtctgcagttgctgaatagagctcatctcaactcgtagcttttctctttgggaaagagaaatgacatacatacaatgtctatttagctctgtgtggtagaggtgttgccattcccatttcacaagcccagaggggtagtcgcttgctcaaggccacacagctgggagttgagccaggattcaactaaaaagtctgaacaactccaaagtccatgctgttttccctgcagcacactgcactcacaccagggtgtcctgcaatgatgggaaatgggcagctctttcaaatcacttagttcacttcgcttcccttcatttccagtctctggtgcatgggtgggctgatctgaaagctccgtgccattcactataagctgagatgtcatttcctatttacctgcataaattccttcagtccctggctgggggtggaggggtggaggaatcttctaaacccccgggggagcctgaagcataacttctcctcaagcacagtctctgaagacctgagcaggacaacagtgtgag

SEQ ID NO: 60889 - DNA, 1498 bp, Homo sapiens
attgttcctggctttccacaaactttcaagaaataagttatctccaaaaagttaagaaccactggaatacatagcaggtactcaaagaaaaaagctacctttcgctccttgttctcacaaattctccctttttacttaaagatgacacaccaaggcttcacaataaatgtgcattgtatctcaccattttcttggcttgggtaagtagtaacatatgcaagcttatgccccaattctctagcgatagtctaggccctcaaacactgcttcatttctctcttcaccgagaggagtacacggtatatactcgagaacaatcatccacctagctgcacaaagcaccatatcggctaggaaaaccaaataggaaccacagcctcagggctggaccatagacaccggataccccaacgctacagggtgaggagaatgtgttcccccaaactactgggcaaaccaggagtctgaacccccctacccttttcctccctctctctctggaactctggtaaaggcaggtcttctgggctctgcctaaggctggagagaaacgttacccgagccgggggttgcagcgcgacgaagttccacctccgctgtcctgggaaggggcggcagcactcagcagaagacgggctccccactctcccaccaacagaccccagagttggtctccacccggcctgggaaccggctcgggggattgccctttccccaaggagtttccgcttccgggctatcctttgccggaagcagtatgtgaatgacgtagaagtattgcgccgttggtgattacggaagaaccaggagtttggcgtgaccatggtgagagaagacggtccaagaagggacgttatcaggccactttttgggtggagaaggaggtagtcagaccgtggccaaatttccttcacattatcctagcatattttcattctggtcttagctcttaaacttctccaagcggtgactgttatgctttacagagtggggaagagggtctgggttatttgaggcaagaagggaaggcaatagacaagagaaaagaagagactttaaaagatgccgtgtgtttccaacttttttaattctaaaatttctgtttcaaggggaagcaaaagaaaacaaggaagtatgcgaccatgaagcgaatgcttagtctcagagatcagaggctgtgagtgtctggaatcaactgcccagggatattctaataagagtctagagaggataagtagtaaaaatgtttgttgttattattttgttttttgcttattatcgtgtcttagatttatatagcatgagatagccagtgtttaacagtaatttagctgctgagcgatcacactgggaaaggcgatgggaattaaacatttcttaagtgttcactttttctaccgttatatgctttgtctgccatatcgcatttaaacctcatgtcagttcggtgaagtccgtatagttctctttatgtttttaccattacactactacattc

SEQ ID NO: 60890 - DNA, 2199 bp, Homo sapiens
attcacctcctgagagaggtgaagatctgggttgctaagatggaagaaaggtcaattatttgcatgttactcaagtgatgcactgacacaatattctcacagttctccctccccccgcccccccccacacacccaaaagaattcagtgtattagctttgctttttagtgattcactcaagctaaagtaagagtttatgtctggtattacgttgagagcttttggaagattatcttccaggttgtctttagaccatctttgtatctggtttttgctctctttgcttttgctctgagattctgcaacaccgatttatatgtgttgagacagtctaaaaaattccatttctccccttctacaattcctgcagatgttactcactatatgtctgcaggaattggtgtaatcttacactctgccttgaaaacacctttccattcttcacagctttgttcccagttgaatttctggggagaattgagttaggtctattcatttaatttgggagaaactgacatctttacaatttttcctcttttcacccaggatcatggtaagcctctccattatttgaagtctaatttcatcctacttggatatgcttctttatgactctgtagctttctacatataagtcctacatctttcttgttagagtttttcctagttgctttatgtttttttgttgttgttgcgattgttgctattgtgaatggaaccttttttttttttcattcaaaaatgaacccgtggagcgataggatctctaccacctctttcggctgtgagactctatggtttttcagttctatgagaacattctactggagcctacattatctgaacccaaaggaagatggcaaccacgagtcgccaagtaaaggaccgctctatctcgcctttgttctcctctcggtggttactgcgcagacgtagtcgcccaagtcgcgtccccgccttcccggtcgcgggcccagctcgggagcgccggcgcactggcgcgctccgtttacacgctccggggcctgtaggcgccgcgagttccggctgtcgccgtcgccgccgcggctcctggaggtcggttgcgacgagtaacggcgccaggacgagccctgcgccttctttttcgatatgtacccgaattggggccggtatggcgggagcagccactatccgccgccaccggtcccaccgccgccgccagtggcgcttcctgaggcctcgccggggcccgggtactcgagctcgacgactcccgcggccccctcctcctcgggcttcatgagcttccgcgaacagcacttggcgcagctccagcagctgcagcagatgcaccagaagcaaatgcagtgcgtgcttcagccccaccaccttcctccgccccctctgccgcccccgccagtgatgccggggggcggctacggagactggcagccgccaccgccaccgatgcccccgccacccgggccggccctcagctatcagaagcagcagcagtacaaacaccagatgctccaccaccaacgagacgggcctcctggtttggttccaatggagctggaatccccccctgaatctccccctgtgccgcctgggtcctatatgcccccatctcagtcttacatgcccccacctcagccgccaccctcttactaccccccgacctcatctcagccctacctgcctcctgctcagccgtccccttcgcagtccccaccttcccaatcctacctggcgcccaccccttcttactcatcctcctcctcttcctcgcaatcctatttgagccattcccagtcctacttgccctcttctcaggcatctccttcccgcccctcccagggccattctaaatcccaactactagctccaccaccaccgtccgccccccctggaaataagacaactgtccagcaagagcctttggagagtggggccaaaaacaagagtactgaacagcagcaagccgcccctgagccagatccctctacgatgactccacaggtaagaaagcatctgcctgaacctcatctttcacctagagggccctgaatgagcaggcctcagggctttaaccagtggttagtctaattccaacacacaatgactagctaacactccaaaggattccgtaagagtcagagggctgacagctcagctttttaattagctagatgtgaattaccaaaaaaacagcgtt

SEQ ID NO: 60891 - DNA, 622 bp, Homo sapiens
aagttaactgtggaaagcagtgattatttgattggcaaaggaaaaaggggtaagtcagggaaggatgactagactcatgccaagtggataaggttagggaaaagacatttcaggaagaatgactagtacatatatgcagagttatagagacatgaaatggtgcgatgcgctctgagtgctagaaggaagtctgtattgtttgtataaaatgccataggcactggccagagatgttgcaggaaagtgtagttggggccagatcaagagggacctgagttcttggactttgcctggtaggtaggggaaggagttaaagcaaatgaatcacaactgtgtgttttaggaagatcactctggcagcatgaatctggagcgggtgagtacagacaggaagactaggtagagattagtgctttgctttcaggtgaaaaaaaaatgaggtcagtgaattattaaataaaaaggaatggcagaggagaaagagaggacaggattgagctgaactgttcaggagctggaatggttaggacttggattgtccagagagttttctctttgtgacttaaaatatatggcttttcccagttttcctgggttagtttttaattttttaaacttgcgg

SEQ ID NO: 60892 - DNA, 2238 bp, Homo sapiens
tactaattcagccagaggtttaaagcacatctttttcattaggaaggtgagccttaaaggtgaatactcaaggggcctgaatacttaaggaggggaaggggatgctatatgctttcacttcaagtcagcgggaagaatggcacactcaaagtggggaggtcagcctggcatggtggcacctgtagtcccagctactccagaggctgaggcagagggatcgcttgagcccagagtgtcgaggctccagtgaactatgaccttgtttcttaaaaaaacagctgggagtttatattctagggatagggtgacaaacgaacaacttccaaaatgcacaagatgtatggggaacaattagtttggctggaatttgcgttggggggagatcagaagctgttgagaaataaggctatagttggtgaagatatccgactcgtaaaaaggcaatgggatttagaaattcctgggattctgtttctttgactcggggttaggaagacagggaagtaacaagtgcctttttttttttttttaatagttaagggacctgagactgggggtggggggcaatgtcatctgccccaggccacacaagtgtaagatcaggcatgcatgtctgccaaggtttcagttcaatgtccgtgcccctcttttgctctcttcccaaggtacagaggcggaacggcgcggtgccctcgggtcccaagagagaagggcgccaagctcagagccagttctgtggaagggtaggggaaggcctgaccccgggggcaatgtggtggcgggacagtcgtatacaccttcaggagaaccacctcaggctgacaggcagtgcggagggccccaagagcgccttagggttgcctgctccagagagcgggactcctgcgctgcagccgggatactgggcgccgccgtgcgcccaccccctgccagtggttcgctccgaacacccctcgtcgggcggcgggtactgcggcccgccccacttccggttgttgtccggccctatatccggtgtccgcccgccctcggctcctccgccgtgatgctgtcccgatcccgctgtgtgtctcgggcgttcagccgctcgctctccgccttccagaaggtacggtctggccgagccggggccccgacgggtgaggagtctgttggcgggcagagaggcggcctggaaggcaggggcgcggcgcgccggccgggccgggcaccaagggcactgggacgcggaggccgcgcgggctgggcggcccggggccgtggttgccctcgggaccgttttgcggagcccagcggccccctgccttctccaggcagcctgcggggaacgtttcctgctgtaccccaccctccgcgcgggagctggggagccgcgcccgtccagatacttgactcagagttagggaggaggcgcggcggagtcctccggcgggattcggcgcccgtctcgtcttgctctgttaaaatcagtgggtattaatgagtcccgttgggaagttgagatagtttggcaggcccagcgtgttgattgggtctgccagcacggtgtgttgcatttaccttcggagttacgagattcacctgtcaccaccactgggacagctttgagcgtgtacttaaaagaaaaagctgggtttttttttcatcttgggtgacgtcgataatgtcttctttctcaacaggggaactgccctctagggagacgttccctgcctggtaagttctgcccttaccgtcacctaaaatgctctcctcctgggcagagcagtatgtgaggaactcgggggtgcctgtgtttctcataatatttaaagacagtttggttcagagagtagtgagacgcaatgctacataatcacgagctatcgcttattcatttagctcgtagttgagtttctactgtgttaggcactgtgctagacgctagggatacaggagtggatacagaagtgtacagttcttgccctcgtggagctcctaggctagttggatagtgtcagttgctaaacaagccaacaaaggcaaatttttgtaactgctgagaaggaaacgagggtggacagaagagccctttttgaggaggtgacttaaaagttatggccatggccgggcgcggtggctgacgcctgtaatcccagcactctgggaggctgaggcgggcggatcacgaggtcaggagatcgagaccatcctggttaacacggtgaaaccccatctctactaaaaaatacaaaaaat

SEQ ID NO: 60893 - DNA, 1073 bp, Homo sapiens
tcacctaattgtgtatatggattgagaaacctgtgtgaaagtcaaaatgcaggctttgtggtcagtttgttttgtaatattttcacagtaacatccaggagatgagggctcggcacaaagaggcttttttgaagaaacataacctcaaactaggcttcatgtcggcatttgtgaaggcctcagcctttgccttgcaggaacagcctgttgtaaatgcaggtgagttgcttgtggctggaattggagaggtcctgggaggtaggtgtatgagcacagacctgctcccacatgcagaggatcaacagaccaaggctttttatttgctacctatagaaatatcagtatcttccccagggatttcttggttcaccttcctgaagcagcatcatgattactttctacccgccagctgggcagaacagtttctcttcccagtgtacagctcggcagctgctcaggcagcaggcagttctgggatagcccagctctccaggctgtctcctgtcaaggtggaagcacgtgttctggcttcctcccctcccccagctccacaggccctgttaccttggggcctgacttccacagttggtgtaggctcctggctgacctttgatcttaggtcgatgggcctcactgggagcttcggcttggcctctcatggacctggtgcttattttctttcctttttacttacctacgtcattgtagtgttgacctaacaagcactttgttttcctgttgacacacttctctgttccttgggagattggagaggggtcagtgctacttttgccatcctcagcagtgtcaggggccctaaaggtctagaagtagaagccctagtccctcctgttgagtggtgctctagggaggtagaaggccatctttgttttgcccaaatgtatacctcttctttttcccattcttctcatgcctccctgactggctctcatctttttcagtggcccccttctgcttgcccacacatgtaggcggctctcaaaagttctcgtggcctctttttcacattacatgcttcctctggatgtcttatctaacaatacaacatggac

SEQ ID NO: 60894 - DNA, 854 bp, Homo sapiens
ccaggcaccatgagcctcttccaaggcttcttcatcctcttccccacagaacctggtcctccccgaccccaccccttcccctgaggcccacatggcatgctgctcaccaccagccctgcgtcctacttcctggcagccccaagctcgctcttgacttcactctggagcttctacaggggagccttccaacctgccccaatgagccgtggtcattgcatggaagaagcgagaacaccgtaggccagagcaggctttattggggccgtgtaaaccccagggagaggcaggacgtggaccacagagagtcatgtacaggctgcgctttcacttgtcttctctgtctcagtctcctgaagagcccgaggaagtcaagtctccccaccatgagtgaggggtctggtctgacagttgggccttcagagccaggcacgtggaccgtgtcagaagcgccacctggtggtgactgggatgctggcagggaggagctgagggcaaaactctagtggaaatttcccaggtcggtcccacgccccggtgacagggtgaaccctgagaggagcccccaaactggaggcaattgtctttgaggtaaccactcaccccagcttttcagagaccagaggcaagacatttctggctaagagccatggatagttgttccatgcgttttgtggtttcttatcccaaaagggcatgaagtcacagtaggcagtgacatggtaaacagccagggcctgagagggagtcctgatgggcacaccttgtctaaactgctttggcctggaagctgaattgctgtcctcttgcacccctggggcaggctgcccctcttcccccacacaggcccactgggg

SEQ ID NO: 60895 - DNA, 1085 bp, Homo sapiens
gtgaggacccctcctggagccagcagagagcagagcacagagctgggctgtaagaactgttggcagacggaatgactgagtggcagactcggtgccacgttggatggggggtagaagagggcagggtgacccagccccagggagggtcgctctgtcctcctggctttacttttgagaaggtcatgtggcctccaaggacctgacagcagcttcttcctgagcaatgtgtgacccaggcggccaaagggatgacagccgtggctgcgggaagggaaggggctcagagagaggcccacaaagctaccccgcctttgctctcccaggtcccactgggaatgggcaggacccggaacttccaaccccaggtcatttggagagaaagaggagagagcaggatgggcggtggggcggggagggagacccacagcctcagccggcggggagctgaatcccggccaggatgcggccaggaggcagagggaggccgcaccatccctgctcggccaagcccaggggaacttgaggctctgaggccttgctctggggggtgcccgggtaggactggcttcagggtccaccccgccgggcagggtcctgccgggcagagccgccggccccgcctggacacagaaagcggcgcgtgcaacccacggggccccagccgcaaggtgcacggtcccagggtggagggacggccgagggggcccctcgcctgggagggtggagaagggaccggacaaaacaccgtacctgcccgagctgggagccgggtccgcgggccaggcctccccctcacgtaccggcccttcacgccagagcgcgccgcgggccgctgctttccggcatccagcgtgcggggccagccggtgcagcgcggccattggctgcggatgagctcatacttgagccttagaataaaccaccaatcaccgcccggctcggctcctgccggccttaaagccgcaaggtctgcacggctgggctgtgaggggcggggggcggtttagagaggggagggtgggatgggatgtggggtgggtggggagagcaggtctagaatcatccagggatgcggaaggggctgc

SEQ ID NO: 60896 - DNA, 1069 bp, Homo sapiens
atgtggtttcaccgtgttggtcaggctggcctcgaacttctgacctcaagtgatctacccacttcggcctcccaaagtgctgggattacaggtgttagccactgcgcccggccacttttgaaattctttcaggagattcccgagtgaaatgtctgaagactgctgccttgggaacaggagccacgggacactttctgcctccggctgccggcgggtaactcgggcctggatggacttccctgccagcttgtttcccaaattgccgcgcgggcccagaaaagagatgagagcataaacccctagggggcgcagtccccaggatccctgtcttcatggagtggggctcatggggtcagggcttgggtcaactccactccatagcacgaaatgacttcctggagtcacgtgcgtgggggaggcttagcccctgaaggagagccacctctcttcagtgactgattgactgtgcacgtgaaatattttattttttctatttactctcacagatttgggttttccctcctctcatccttctctcccagccacactcaggcctggggctccattctgctgcccacaaggtacgaagtgggttagaagcagcaaggggacccacaggcaaaaatactcctgggagacagtggcgaggggcacatgttccccggggctactaggaagtggccccagataacgtctcagctgatgacagacttttaatcactaaaaggtaaacactaatgtgcaggaatcctgtttgtttgctcacagatgtacctgacacacagtaagtgctcagtaaatgtttgtagagtgactgaatgtttgctggacctcctgcccctcattctacacagagaaaagctaggctgacaaaggtgaaatgatttgttgaaggtcaatggaaacctagggctaagccgggacaaaaaccaaggtccactgatgcttcctgggccctagagtcttgaggaggtgcagctccctgttctgcccccaagactggcctcagtcctgcctctccccctccccaacctaaccctggcggcaaggcggggctcccctcgggccc

SEQ ID NO: 60897 - DNA, 1465 bp, Homo sapiens
tatcgtccttgttttcagagacatgaacctcctagacacaggcgcaaacggtaccaagcaatgtaacagaacaaaagtgagacgtctgcccaaggggcagccgaccctggacatgcattcagagcgtcagtgtcagctgacactcgggagtgacagctcgggcagtcaccgagctgggaagacaggagggagtgccgcaacttcttcagtgtagccttaagtcgcggtgaggggcgcgtagagacttgctgctcccatagcaacgggaccagccaccctctacaggcctgacgggttacttccgttcaccgtcggctgagccaagaaaggccgcttccgatcctccagcccccgaggcgcgggggcgcgcggacgcccggttataactgaacaacccgagccccacgtctctgattggctcaggcagaggaagggggcgggagatcggcaacgaagggcgtagccggcttccactcaaacttgaggtttccccccatcccctcacagcggaagccgacctcgcccgccccggaagtgcaaactgtgtggtctggcaggtgtggattccgccggtgaaggctgaaggcagctaccttaaagatgccgggatccgcagcgaagggctcggagttgtcagagaggatcgagagcttcgtggagaccctgaagcggggtggtgggccgcgcagctccgaggaaatggctcgggagaccctagggttgctgcgccagatcatcacggaccaccgctggagcaacgcgggtgaggccggcctgcctccgccggcgaacctggcccctgtctgttcccgatcccagggctgaaaatttcccaggcctcacttcgcgttggctcctcttatcctctctcttttggactgtaggggagctgatggagctgatccgcagagagggcaggaggatgacggccgctcagccctccgagaccaccgtgggcaacatggtgcggagagtgctcaagattatccgggaggagtatggcaggtcaggctcacgtcctgggctcctggttggatccagtgacactttttgcacgggcccctctacctgctcggagactttattggagctgaacagcccttgttacctgcctgaccactcctccccacctctctctttgggtcttgttgcctctatagactccatggacgcagcgacgagagtgatcagcaggagtccctgcacaaactgttgacatccggaggcctaaacgaggatttcagcttccattatgcccaactccagtccaacatcattgaggcgattaatgagctgctagtggagctgggtaagaggcctgatcgctgggaaaatgggactggtcacaggcacataagggaacagaagcctctgaaggttgttcattagcagagatgggagattagctgtcttctggttctcagaggtttgtcctccttcctgattaggaaatgttgcaacaggt
